(19) United States
(12) Patent Application Publication
(10) Pub. No.: US 2019/0343942 A1
(43) Pub. Date: Nov. 14, 2019

(54) RNA ENCODING A TUMOR ANTIGEN

(71) Applicant: CureVac AG, Tübingen (DE)

(72) Inventors: Mariola FOTIN-MLECZEK, Sindelfingen (DE); Ingmar HOERR, Stuttgart (DE)

(21) Appl. No.: 16/094,995

(22) PCT Filed: Apr. 21, 2017
(86) PCT No.: PCT/EP2017/059525

§ 371 Date: Oct. 19, 2018

(30) Foreign Application Priority Data
Apr. 22, 2016 (EP) PCT/EP2016/059111

(51) Int. Cl. A61K 39/00; A61P 35/00

(52) U.S. Cl. CPC A61K 39/001188; A61P 35/00; A61K 39/001194; A61K 2039/53; A61K 39/001186; A61K 39/00119; A61K 39/001195

(57) ABSTRACT

The present invention relates to an RNA encoding a tumor antigen. In particular, the present invention relates to RNA suitable for treatment and/or prophylaxis of cancer and related diseases. The present invention concerns such novel RNA as well as compositions, vaccines and kits comprising the RNA. Furthermore, the present invention relates to the RNA, compositions, vaccines or kits as disclosed herein for use in the treatment and/or prophylaxis of cancer and related diseases.

[0001] The present invention relates to an RNA encoding a tumor antigen. In particular, the present invention relates to RNA suitable for treatment and/or prophylaxis of cancer and related diseases. The present invention concerns such novel RNA as well as compositions, vaccines and kits comprising the RNA. Furthermore, the present invention relates to the RNA, compositions, vaccines or kits as disclosed herein for use in the treatment and/or prophylaxis of cancer and related diseases.

[0002] Apart from cardiovascular diseases and infectious diseases, the occurrence of cancer diseases is one of the most frequent causes of death in modern society and is in most cases associated with considerable costs in terms of therapy and subsequent rehabilitation measures. The treatment of cancer diseases is greatly dependent, for example, on the type of tumor that occurs, on the age, the distribution of cancer cells in the patient to be treated, etc. Cancer therapy is nowadays conventionally carried out by the use of radiation therapy or chemotherapy in addition to invasive operations. However, such conventional therapies typically place extraordinary stress on the immune system and can be used in some cases to only a limited extent. In addition, most of these conventional therapies require long intervals between the individual treatments to allow for regeneration of the immune system.

[0003] Therefore, supplementary strategies have been investigated in recent years in addition to such “conventional treatments” to avoid or at least reduce the impact on the immune system by such treatments. One such supplementary treatment in particular includes gene therapeutic approaches or genetic vaccination, which already have been found to be highly promising for treatment or for supporting such conventional therapies.

[0004] Gene therapy and genetic vaccination are methods of molecular medicine, which have already been proven in the therapy and prevention of certain diseases and generally exhibit a considerable effect on daily medical practice, in particular on the treatment of diseases as mentioned above. Both methods, gene therapy and genetic vaccination, are based on the introduction of nucleic acids into the patient's cells or tissue and subsequent processing of the information coded for by the nucleic acid that has been introduced into the cells or tissue, that is to say the (protein) expression of the desired polypeptides.

[0005] In gene therapy approaches, typically DNA is used even though RNA is also known in recent developments. Importantly, in all these gene therapy approaches mRNA functions as messenger for the sequence information of the encoded protein, irrespectively if DNA, viral RNA or mRNA is used.

[0006] In general RNA is considered an unstable molecule: RNases are ubiquitous and notoriously difficult to inactivate. Furthermore, RNA is also chemically more labile than DNA. Also for that reason, many gene therapy approaches normally use DNA to transfer the coding information into the cell which is then transcribed into mRNA, carrying the naturally occurring elements of an mRNA, particularly the 5′-CAP structure and the 3′ poly(A) sequence to ensure expression of the encoded therapeutic or antigenic protein.

[0007] However, in many cases expression systems based on the introduction of such nucleic acids into the patient's cells or tissue and the subsequent expression of the desired polypeptides coded for by these nucleic acids do not exhibit the desired, or even the required, level of expression which may allow for an efficient therapy, irrespective as to whether DNA or RNA is used.

[0008] In the prior art, different attempts have hitherto been made to increase the yield of the expression of an encoded protein, in particular by use of improved expression systems, both in vitro and/or in vivo. Methods for increasing expression described generally in the prior art are conventionally based on the use of expression vectors or cassettes containing specific promoters and corresponding regulation elements. As these expression vectors or cassettes are typically limited to particular cell systems, these expression systems have to be adapted for use in different cell systems. Such adapted expression vectors or cassettes are then usually transfected into the cells and typically treated in dependence of the specific cell line. Therefore, preference is given primarily to those nucleic acid molecules which are able to express the encoded proteins in a target cell by systems inherent in the cell, independent of promoters and regulation elements which are specific for particular cell types. In this context, there can be distinguished between mRNA stabilizing elements and elements which increase translation efficiency of the mRNA.

[0009] mRNAs which are optimized in their coding sequence and which are in general suitable for such a purpose are described in application WO 02/098443 (CureVac GmbH). For example, WO 02/098443 describes mRNAs that are stabilised in general form and optimised for translation in their coding regions. WO 02/098443 further discloses a method for determining sequence modifications. WO 02/098443 additionally describes possibilities for substituting adenine and uracil nucleotides in mRNA sequences in order to increase the guanine/cytosine (G/C) content of the sequences. According to WO 02/098443, such substitutions and adaptations for increasing the G/C content can be used for gene therapeutic applications but also genetic vaccines in the treatment of cancer or infectious diseases. In this context, WO 02/098443 generally mentions sequences as a base sequence for such modifications, in which the modified mRNA codes for at least one biologically active peptide or polypeptide, which is translated in the patient to be treated, for example, either not at all or inadequately or with faults. Alternatively, WO 02/098443 proposes mRNAs coding for antigens e.g. tumour antigens or viral antigens as a base sequence for such modifications.

[0010] In a further approach to increase the expression of an encoded protein the application WO 2007/035355 describes the positive effect of long poly(A) sequences (particularly longer than 120 bp) and the combination of at least two 3′ untranslated regions of the beta globin gene on mRNA stability and translational activity.

[0011] However, even though some of these prior art documents try to provide quite efficient tools for gene therapy approaches and additionally improved mRNA stability and translational activity, there still remains the problem of a generally lower stability of RNA-based applications versus DNA vaccines and DNA based gene therapeutic approaches. Accordingly, there still exists a need in the art to provide improved tools for gene therapy approaches and genetic vaccination or as a supplementary therapy for conventional treatments as discussed above, which allow for better provision of encoded proteins in viva e.g. via a further improved mRNA stability and/or translational activity, preferably for gene therapy and genetic vaccination.

[0012] Furthermore despite of all progress in the art, efficient expression of an encoded peptide or protein in cell-free systems, cells or organisms (recombinant expression) is still a challenging problem.

[0013] It is thus an object of the present invention to provide a tumor vaccine. In particular, it is an object to provide a system for expressing a tumor antigen, preferably by stabilization of the mRNA and/or an increase of the translational efficiency of such an mRNA with respect to such nucleic acids known from the prior art. It is a further object of the invention to provide such a system, which allows treatment and/or prophylaxis of cancer by stimulating the immune system in a safe and effective manner. It is thus a particular object of the present invention to provide a cancer vaccine or a composition for treatment or prophylaxis of cancer by stimulating the immune system.

[0014] The object underlying the present invention is solved by the claimed subject matter.

[0015] The present application is filed together with a sequence listing in electronic format. The information contained in the electronic format of the sequence listing is incorporated herein by reference in its entirety.

[0016] For the sake of clarity and readability the following definitions are provided. Any technical feature mentioned for these definitions may be read on each and every embodiment of the invention. Additional definitions and explanations may be specifically provided in the context of these embodiments.

[0017] Adaptive immune response: The adaptive immune response is typically understood to be an antigen-specific response of the immune system. Antigen specificity allows for the generation of responses that are tailored, for example, to specific pathogens or pathogen-infected cells. The ability to mount these tailored responses is usually maintained in the body by “memory cells”. Should a pathogen infect the body more than once, these specific memory cells are used to quickly eliminate it. In this context, the first step of an adaptive immune response is the activation of naive antigen-specific T cells or different immune cells able to induce an antigen-specific immune response by antigen-presenting cells. This occurs in the lymphoid tissues and organs through which naïve T cells are constantly passing.

[0018] The three cell types that may serve as antigen-presenting cells are dendritic cells, macrophages, and B cells. Each of these cells has a distinct function in eliciting immune responses. Dendritic cells may take up antigens by phagocytosis and macropinocytosis and may become stimulated by contact with e.g. a foreign antigen to migrate to the local lymphoid tissue, where they differentiate into mature dendritic cells. Macrophages ingest particulate antigens such as bacteria and are induced by infectious agents or other appropriate stimuli to express ME molecules. The unique ability of B cells to bind and internalize soluble protein antigens via their receptors may also be important to induce T cells. ME-molecules are, typically, responsible for presentation of an antigen to T-cells. Therein, presenting the antigen on MHC molecules leads to activation of T cells, which induces their proliferation and differentiation into armed effector T cells. The most important function of effector T cells is the killing of infected cells by CD8+ cytotoxic T cells and the activation of macrophages by Th1 cells, which together make up cell-mediated immunity, and the activation of B cells by both Th2 and Th1 cells to produce different classes of antibody, thus driving the humoral immune response. T cells recognize an antigen by their T cell receptors which do not recognize and bind the antigen directly, but instead recognize short peptide fragments e.g. of pathogen-derived protein antigens, e.g. so-called epitopes, which are bound to MHC molecules on the surfaces of other cells.

[0019] Adaptive immune system: The adaptive immune system is essentially dedicated to eliminate or prevent pathogenic growth. It typically regulates the adaptive immune response by providing the vertebrate immune system with the ability to recognize and remember specific pathogens (to generate immunity), and to mount stronger attacks each time the pathogen is encountered. The system is highly adaptable because of somatic hypermutation (a process of accelerated somatic mutations), and V(D)J recombination (an irreversible genetic recombination of antigen receptor gene segments). This mechanism allows a small number of genes to generate a vast number of different antigen receptors, which are then uniquely expressed on each individual lymphocyte. Because the gene rearrangement leads to an irreversible change in the DNA of each cell, all of the progeny (offspring) of such a cell will then inherit genes encoding the same receptor specificity, including the Memory B cells and Memory T cells that are the keys to long-lived specific immunity.

[0020] Adjuvant/adjuvant component: An adjuvant or an adjuvant component in the broadest sense is typically a pharmacological and/or immunological agent that may modify, e.g. enhance, the effect of other agents, such as a drug or vaccine. It is to be interpreted in a broad sense and refers to a broad spectrum of substances. Typically, these substances are able to increase the immunogenicity of antigens. For example, adjuvants may be recognized by the innate immune systems and, e.g., may elicit an innate immune response. “Adjuvants” typically do not elicit an adaptive immune response. Insofar, “adjuvants” do not qualify as antigens. Their mode of action is distinct from the effects triggered by antigens resulting in an adaptive immune response.

[0021] Antigen: In the context of the present invention, the term “antigen” typically refers to a substance, which is capable of being recognized by the immune system, preferably by the adaptive immune system, and which is capable of eliciting an antigen-specific immune response, e.g. by formation of antibodies and/or antigen-specific T cells as part of an adaptive immune response. Typically, an antigen may be or may comprise a peptide or protein, which may be presented by the MHC to T-cells. In the sense of the present invention an antigen may be the product of translation of a provided nucleic acid molecule, preferably an RNA comprising at least one coding sequence as defined herein. In this context, also fragments, variants and derivatives of an antigen, such as a peptide or a protein, comprising at least one epitope are understood as antigens.

[0022] Artificial nucleic acid molecule: An artificial nucleic acid molecule may typically be understood to be a nucleic acid molecule, e.g. a DNA or an RNA, that does not occur naturally. In other words, an artificial nucleic acid molecule may be understood as a non-natural nucleic acid molecule. Such nucleic acid molecule may be non-natural due to its individual sequence (which does not occur naturally) and/or due to other modifications, e.g. structural modifications of nucleotides, which do not occur naturally. An artificial nucleic acid molecule may be a DNA molecule, an RNA molecule or a hybrid-molecule comprising DNA and RNA portions. Typically, artificial nucleic acid molecules may be designed and/or generated by genetic engineering methods to correspond to a desired artificial sequence of nucleotides (heterologous sequence). In this context an artificial sequence is usually a sequence that may not occur naturally, i.e. it differs from the wild type sequence by at least one nucleotide. The term “wild type” may be understood as a sequence occurring in nature. Further, the term “artificial nucleic acid molecule” is not restricted to mean “one single molecule” but is, typically, understood to comprise an ensemble of identical molecules. Accordingly, it may relate to a plurality of identical molecules contained in an aliquot.

[0023] Bicistronic RNA, multicistronic RNA: A bicistronic or multicistronic RNA is typically an RNA, preferably an mRNA, that typically may have two (bicistronic) or more (multicistronic) open reading frames (ORF). An open reading frame in this context is a sequence of codons that is translatable into a peptide or protein.

[0024] Carrier/polymeric carrier: A carrier in the context of the invention may typically be a compound that facilitates transport and/or complexation of another compound (cargo). A polymeric carrier is typically a carrier that is formed of a polymer. A carrier may be associated to its cargo by covalent or non-covalent interaction. A carrier may transport nucleic acids, e.g. RNA or DNA, to the target cells. The carrier may for some embodiments be a cationic component.

[0025] Cationic component: The term “cationic component” typically refers to a charged molecule, which is positively charged (cation) at a pH value typically from 1 to 9, preferably at a pH value of or below 9 (e.g. from 5 to 9), of or below 8 (e.g. from 5 to 8), of or below 7 (e.g. from 5 to 7), most preferably at a physiological pH, e.g. from 7.3 to 7.4. Accordingly, a cationic component may be any positively charged compound or polymer, preferably a cationic peptide or protein, which is positively charged under physiological conditions, particularly under physiological conditions in vivo. A “cationic peptide or protein” may contain at least one positively charged amino acid, or more than one positively charged amino acid, e.g. selected from Arg, His, Lys or Orn. Accordingly, “polycationic” components are also within the scope exhibiting more than one positive charge under the conditions given.

[0026] 5′-cap: A 5′-cap is an entity, typically a modified nucleotide entity, which generally “caps” the 5′-end of a mature mRNA. A 5′-cap may typically be formed by a modified nucleotide, particularly by a derivative of a guanine nucleotide. Preferably, the 5′-cap is linked to the 5′-terminus via a 5′-5′-triphosphate linkage. A 5′-cap may be methylated, e.g. m7GpppN, wherein N is the terminal 5′ nucleotide of the nucleic acid carrying the 5′-cap, typically the 5′-end of an RNA. Further examples of 5′cap structures include glyceryl, inverted deoxy abasic residue (moiety), 4′,5′ methylene nucleotide, 1-(beta-D-erythrofuranosyl) nucleotide, 4′-thio nucleotide, carbocyclic nucleotide, 1,5-anhydrohexitol nucleotide, L-nucleotides, alpha-nucleotide, modified base nucleotide, threo-pentofuranosyl nucleotide, acyclic 3′,4′-seco nucleotide, acyclic 3,4-dihydroxybutyl nucleotide, acyclic 3,5 dihydroxypentyl nucleotide, 3′-3′-inverted nucleotide moiety, 3′-3′-inverted abasic moiety, 3′-2′-inverted nucleotide moiety, 3′-2′-inverted abasic moiety, 1,4-butanediol phosphate, 3′-phosphoramidate, hexylphosphate, aminohexyl phosphate, 3′-phosphate, 3′phosphorothioate, phosphorodithioate, or bridging or non-bridging methylphosphonate moiety.

[0027] Cellular immunity/cellular immune response: Cellular immunity relates typically to the activation of macrophages, natural killer cells (NK), antigen-specific cytotoxic T-lymphocytes, and the release of various cytokines in response to an antigen. In more general terms, cellular immunity is not based on antibodies, but on the activation of cells of the immune system. Typically, a cellular immune response may be characterized e.g. by activating antigen-specific cytotoxic T-lymphocytes that are able to induce apoptosis in cells, e.g. specific immune cells like dendritic cells or other cells, displaying epitopes of foreign antigens on their surface. Such cells may be virus-infected or infected with intracellular bacteria, or cancer cells displaying tumor antigens. Further characteristics may be activation of macrophages and natural killer cells, enabling them to destroy pathogens and stimulation of cells to secrete a variety of cytokines that influence the function of other cells involved in adaptive immune responses and innate immune responses.

[0028] DNA: DNA is the usual abbreviation for deoxy-ribonucleic acid. It is a nucleic acid molecule, i.e. a polymer consisting of nucleotides. These nucleotides are usually deoxy-adenosine-monophosphate, deoxy-thymidine-monophosphate, deoxy-guanosine-monophosphate and deoxy-cytidine-monophosphate monomers which are by themselves composed of a sugar moiety (deoxyribose), a base moiety and a phosphate moiety, and polymerise by a characteristic backbone structure. The backbone structure is, typically, formed by phosphodiester bonds between the sugar moiety of the nucleotide, i.e. deoxyribose, of a first and a phosphate moiety of a second, adjacent monomer. The specific order of the monomers, i.e. the order of the bases linked to the sugar/phosphate-backbone, is called the DNA sequence. DNA may be single stranded or double stranded. In the double stranded form, the nucleotides of the first strand typically hybridize with the nucleotides of the second strand, e.g. by A/T-base-pairing and G/C-base-pairing.

[0029] Epitope: In the context of the present invention, the term ‘epitope’ typically refers to a fragment of an antigen or a variant of an antigen, wherein said fragment is presented by an MHC complex. Such a fragment comprising or consisting of an epitope as used herein may typically comprise from about 5 to about 2D amino acids. An epitope may also be referred to herein as ‘antigen determinant’. Epitopes can be distinguished in T cell epitopes and B cell epitopes. T cell epitopes or parts of the proteins in the context of the present invention may comprise fragments preferably having a length of about 6 to about 20 or even more amino acids, e.g. fragments as processed and presented by MHC class I molecules, preferably having a length of about 8 to about 10 amino acids, e.g. 8, 9, or 10, (or even 11, or 12 amino acids), or fragments as processed and presented by MHC class II molecules, preferably having a length of about 13 or more amino acids, e.g. 13, 14, 15, 15, 17, IS, 19, 20 or even more amino acids, wherein these fragments may be selected from any part of the amino acid sequence. These fragments are typically recognized by T cells in form of a complex consisting of the peptide fragment and an MHC molecule, i.e. the fragments are typically not recognized in their native form. B cell epitopes are typically fragments located on the outer surface of (native) protein or peptide antigens as defined herein, preferably having 5 to 15 amino acids, more preferably having 5 to 12 amino acids, even more preferably having 6 to 9 amino acids, which may be recognized by antibodies, i.e. in their native form. Such epitopes of proteins or peptides may furthermore be selected from any of the herein mentioned variants of such proteins or peptides. In this context, antigenic determinants can be conformational or discontinuous epitopes, which are composed of segments of the proteins or peptides as defined herein that are discontinuous in the amino acid sequence of the proteins or peptides as defined herein but are brought together in the three-dimensional structure or continuous or linear epitopes, which are composed of a single polypeptide chain.

[0030] Fragment of a sequence: A fragment of a sequence may typically be a shorter portion of a full-length sequence of e.g. a nucleic acid molecule or an amino acid sequence. Accordingly, a fragment, typically, consists of a sequence that is identical to the corresponding stretch within the full-length sequence. A preferred fragment of a sequence in the context of the present invention, consists of a continuous stretch of entities, such as nucleotides or amino acids corresponding to a continuous stretch of entities in the molecule the fragment is derived from, which represents at least 20%, preferably at least 30%, more preferably at least 40%, more preferably at least 50%, even more preferably at least 60%, even more preferably at least 70%, and most preferably at least BU % of the total (i.e. full-length) molecule from which the fragment is derived.

[0031] G/C modified: A G/C-modified nucleic acid may typically be a nucleic acid, preferably an artificial nucleic acid molecule as defined herein, based on a modified wild-type sequence comprising a preferably increased number of guanosine and/or cytosine nucleotides as compared to the wild-type sequence. Such an increased number may be generated by substitution of codons containing adenosine or thymidine nucleotides by codons containing guanosine or cytosine nucleotides. If the enriched G/C content occurs in a coding region of DNA or RNA, it makes use of the degeneracy of the genetic code. Accordingly, the codon substitutions preferably do not alter the encoded amino acid residues, but exclusively increase the G/C content of the nucleic acid molecule. As used herein, the term ‘G/C modification’ comprises, in particular, the modifications of the number of guanosine and/or cytosine nucleotides in the RNA according to the invention, such as GC optimization of sequences, adaptation of sequences to human codon usage, codon optimization, or C-optimization of sequences.

[0032] Gene therapy: Gene therapy may typically be understood to mean a treatment of a patient's body or isolated elements of a patient's body, for example isolated tissues/cells, by nucleic acids encoding a peptide or protein. It typically may comprise at least one of the steps of a) administration of a nucleic acid, preferably an RNA as defined herein, directly to the patient—by whatever administration route—or in vitro to isolated cells/tissues of the patient, which results in transfection of the patient's cells either in vivo/ex vivo or in vitro, b) transcription and/or translation of the introduced nucleic acid molecule; and optionally c) re-administration of isolated, transfected cells to the patient, if the nucleic acid has not been administered directly to the patient.

[0033] Genetic vaccination: Genetic vaccination may typically be understood to be vaccination by administration of a nucleic acid molecule encoding an antigen or an immunogen or fragments thereof. The nucleic acid molecule may be administered to a subject's body or to isolated cells of a subject. Upon transfection of certain cells of the body or upon transfection of the isolated cells, the antigen or immunogen may be expressed by those cells and subsequently presented to the immune system, eliciting an adaptive, i.e. antigen-specific immune response. Accordingly, genetic vaccination typically comprises at least one of the steps of a) administration of a nucleic acid, preferably an artificial nucleic acid molecule as defined herein, to a subject, preferably a patient, or to isolated cells of a subject, preferably a patient, which usually results in transfection of the subject's cells either in vivo or in vitro: b) transcription and/or translation of the introduced nucleic acid molecule; and optionally c) re-administration of isolated, transfected cells to the subject, preferably the patient, if the nucleic acid has not been administered directly to the patient.

[0034] Heterologous sequence: Two sequences are typically understood to be ‘heterologous’ if they are not derivable from the same gene. I.e., although heterologous sequences may be derivable from the same organism, they naturally (in nature) do not occur in the same nucleic acid molecule, such as in the same mRNA.

[0035] Humoral immunity/humoral immune response: Humoral immunity refers typically to antibody production and optionally to accessory processes accompanying antibody production. A humoral immune response may be typically characterized, e.g., by Th2 activation and cytokine production, germinal center formation and isotype switching, affinity maturation and memory cell generation. Humoral immunity also typically may refer to the effector functions of antibodies, which include pathogen and toxin neutralization, classical complement activation, and opsonin promotion of phagocytosis and pathogen elimination.

[0036] Immunogen: In the context of the present invention, an immunogen may be typically understood to be a compound that is able to stimulate an immune response. Preferably, an immunogen is a peptide, polypeptide, or protein. In a particularly preferred embodiment, an immunogen in the sense of the present invention is the product of translation of a provided nucleic acid molecule, preferably an artificial nucleic acid molecule as defined herein. Typically, an immunogen elicits at least an adaptive immune response.

[0037] Immunostimulatory composition: In the context of the invention, an immunostimulatory composition may be typically understood to be a composition containing at least one component which is able to induce an immune response or from which a component, which is able to induce an immune response, is derivable. Such immune response may be preferably an innate immune response or a combination of an adaptive and an innate immune response. Preferably, an immunostimulatory composition in the context of the invention contains at least one artificial nucleic acid molecule, more preferably an RNA, for example an mRNA molecule. The immunostimulatory component, such as the mRNA may be complexed with a suitable carrier. Thus, the immunostimulatory composition may comprise an mRNA/carrier-complex. Furthermore, the immunostimulatory composition may comprise an adjuvant and/or a suitable vehicle for the immunostimulatory component, such as the mRNA.

[0038] Immune response: An immune response may typically be a specific reaction of the adaptive immune system to a particular antigen (so called specific or adaptive immune response) or an unspecific reaction of the innate immune system (so called unspecific or innate immune response), or a combination thereof.

[0039] Immune system: The immune system may protect organisms from infection. If a pathogen succeeds in passing a physical barrier of an organism and enters this organism, the innate immune system provides an immediate, but non-specific response. If pathogens evade this innate response, vertebrates possess a second layer of protection, the adaptive immune system. Here, the immune system adapts its response during an infection to improve its recognition of the pathogen. This improved response is then retained after the pathogen has been eliminated, in the form of an immunological memory, and allows the adaptive immune system to mount faster and stronger attacks each time this pathogen is encountered. According to this, the immune system comprises the innate and the adaptive immune system. Each of these two parts typically contains so called humoral and cellular components.

[0040] Immunostimulatory RNA: An immunostimulatory RNA (isRNA) in the context of the invention may typically be an RNA that is able to induce an innate immune response. It usually does not have an open reading frame and thus does not provide a peptide-antigen or immunogen but elicits an immune response e.g. by binding to a specific kind of Toll-like-receptor (TLR) or other suitable receptors. However, of course also mRNAs having an open reading frame and coding for a peptide/protein may induce an innate immune response and, thus, may be immunostimulatory RNAs.

[0041] Innate immune system: The innate immune system, also known as non-specific (or unspecific) immune system, typically comprises the cells and mechanisms that defend the host from infection by other organisms in a non-specific manner. This means that the cells of the innate system may recognize and respond to pathogens in a generic way, but unlike the adaptive immune system, it does not confer long-lasting or protective immunity to the host. The innate immune system may be, e.g., activated by ligands of Toll-like receptors (TLRs) or other auxiliary substances such as lipopolysaccharides, TNF-alpha, CD40 ligand, or cytokines, monokines, lymphokines, interleukins or chemokines, IL-1, IL-2, IL-3, IL-4, IL-5, IL-6, IL-7, IL-8, IL-9, IL-10, IL-11, IL-12, IL-13, IL-14, IL-15, IL-16, IL-17, IL-18, IL-19, IL-20, IL-21, IL-22, IL-23, IL-24, IL-25, IL-26, IL-27, IL-28, IL-29, IL-30, IL-31, IL-32, IL-33, IFN-alpha, IFN-beta, IFN-gamma, GM-CSF, G-CSF, M-CSF, LT-beth, TNF-alpha, growth factors, and hGH, a ligand of human Toll-like receptor TLR1, TLR2, TLR3, TLR4, TLR5, TLR6, TLR7, TLR8, TLR9, TLR10, a ligand of murine Toll-like receptor TLR1, TLR2, TLR3, TLR4, TLR5, TLR6, TLR7, TLR8, TLR9, TLR10, TLR11, TLR12 or TLR13, a ligand of a NOD-like receptor, a ligand of a RIG-1 like receptor, an immunostimulatory nucleic acid, an immunostimulatory RNA (isRNA), a CpG-DNA, an antibacterial agent, or an anti-viral agent. The pharmaceutical composition according to the present invention may comprise one or more such substances. Typically, a response of the innate immune system includes recruiting immune cells to sites of infection, through the production of chemical factors, including specialized chemical mediators, called cytokines; activation of the complement cascade; identification and removal of foreign substances present in organs, tissues, the blood and lymph, by specialized white blood cells; activation of the adaptive immune system; and/or acting as a physical and chemical barrier to infectious agents.

[0042] Cloning site: A cloning site is typically understood to be a segment of a nucleic acid molecule, which is suitable for insertion of a nucleic acid sequence, e.g., a nucleic acid sequence comprising an open reading frame. Insertion may be performed by any molecular biological method known to the one skilled in the art, e.g. by restriction and ligation. A cloning site typically comprises one or more restriction enzyme recognition sites (restriction sites). These one or more restrictions sites may be recognized by restriction enzymes which cleave the DNA at these sites. A cloning site which comprises more than one restriction site may also be termed a multiple cloning site (MCS) or a polylinker.

[0043] Nucleic acid molecule: A nucleic acid molecule is a molecule comprising, preferably consisting of nucleic acid components. The term nucleic acid molecule preferably refers to DNA or RNA molecules. It is preferably used synonymous with the term “polynucleotide”. Preferably, a nucleic acid molecule is a polymer comprising or consisting of nucleotide monomers, which are covalently linked to each other by phosphodiester-bonds of a sugar/phosphate-backbone. The term “nucleic acid molecule” also encompasses modified nucleic acid molecules, such as base-modified, sugar-modified or backbone-modified etc. DNA or RNA molecules.

[0044] Open reading frame: An open reading frame (ORF) in the context of the invention may typically be a sequence of several nucleotide triplets, which may be translated into a peptide or protein. An open reading frame preferably contains a start codon, i.e. a combination of three subsequent nucleotides coding usually for the amino acid methionine (ATG), at its 5′-end and a subsequent region, which usually exhibits a length which is a multiple of 3 nucleotides. An ORF is preferably terminated by a stop-codon (e.g., TAA, TAG, TGA). Typically, this is the only stop-codon of the open reading frame. Thus, an open reading frame in the context of the present invention is preferably a nucleotide sequence, consisting of a number of nucleotides that may be divided by three, which starts with a start codon (e.g. ATG) and which preferably terminates with a stop codon (e.g., TAA, TGA, or TAG). The open reading frame may be isolated or it may be incorporated in a longer nucleic acid sequence, for example in a vector or an mRNA. An open reading frame may also be termed “(protein) coding region” or, preferably, “coding sequence”.

[0045] Peptide: A peptide or polypeptide is typically a polymer of amino acid monomers, linked by peptide bonds. It typically contains less than 50 monomer units. Nevertheless, the term peptide is not a disclaimer for molecules having more than 50 monomer units. Long peptides are also called polypeptides, typically having between 50 and 600 monomeric units.

[0046] Pharmaceutically effective amount: A pharmaceutically effective amount in the context of the invention is typically understood to be an amount that is sufficient to induce a pharmaceutical effect, such as an immune response, altering a pathological level of an expressed peptide or protein, or substituting a lacking gene product, e.g., in case of a pathological situation.

[0047] Protein: A protein typically comprises one or more peptides or polypeptides. A protein is typically folded into 3-dimensional form, which may be required for the protein to exert its biological function.

[0048] Poly(A) sequence: A poly(A) sequence, also called poly(A) tail or 3′-poly(A) tail, is typically understood to be a sequence of adenosine nucleotides, e.g., of up to about 400 adenosine nucleotides, e.g. from about 20 to about 400, preferably from about 50 to about 400, more preferably from about 50 to about 300, even more preferably from about 50 to about 250, most preferably from about 60 to about 250 adenosine nucleotides. As used herein, a poly(A) sequence may also comprise about 10 to 200 adenosine nucleotides, preferably about 10 to 100 adenosine nucleotides, more preferably about 40 to 80 adenosine nucleotides or even more preferably about 50 to 70 adenosine nucleotides. A poly(A) sequence is typically located at the 3′end of an mRNA. In the context of the present invention, a poly(A) sequence may be located within an mRNA or any other nucleic acid molecule, such as, e.g., in a vector, for example, in a vector serving as template for the generation of an RNA, preferably an mRNA, e.g., by transcription of the vector.

[0049] Polyadenylation: Polyadenylation is typically understood to be the addition of a poly(A) sequence to a nucleic acid molecule, such as an RNA molecule, e.g. to a premature mRNA. Polyadenylation may be induced by a so-called polyadenylation signal. This signal is preferably located within a stretch of nucleotides at the 3′-end of a nucleic acid molecule, such as an RNA molecule, to be polyadenylated. A polyadenylation signal typically comprises a hexamer consisting of adenine and uracil/thymine nucleotides, preferably the hexamer sequence AAUAAA. Other sequences, preferably hexamer sequences, are also conceivable. Polyadenylation typically occurs during processing of a pre-mRNA (also called premature-mRNA). Typically, RNA maturation (from pre-mRNA to mature mRNA) comprises the step of polyadenylation.

[0050] Restriction site: A restriction site, also termed restriction enzyme recognition site, is a nucleotide sequence recognized by a restriction enzyme. A restriction site is typically a short, preferably palindromic nucleotide sequence, e.g. a sequence comprising 4 to 8 nucleotides.

[0051] A restriction site is preferably specifically recognized by a restriction enzyme. The restriction enzyme typically cleaves a nucleotide sequence comprising a restriction site at this site. In a double-stranded nucleotide sequence, such as a double-stranded DNA sequence, the restriction enzyme typically cuts both strands of the nucleotide sequence.

[0052] RNA, mRNA: RNA is the usual abbreviation for ribonucleic-acid. It is a nucleic acid molecule, i.e. a polymer consisting of nucleotides. These nucleotides are usually adenosine-monophosphate, uridine-monophosphate, guanosine-monophosphate and cytidine-monophosphate monomers which are connected to each other along a so-called backbone. The backbone is formed by phosphodiester bonds between the sugar, i.e. ribose, of a first and a phosphate moiety of a second, adjacent monomer. The specific succession of the monomers is called the RNA-sequence. Usually RNA may be obtainable by transcription of a DNA-sequence, e.g., inside a cell. In eukaryotic cells, transcription is typically performed inside the nucleus or the mitochondria. In vivo, transcription of DNA usually results in the so-called premature RNA which has to be processed into so-called messenger-RNA, usually abbreviated as mRNA. Processing of the premature RNA, e.g. in eukaryotic organisms, comprises a variety of different posttranscriptional-modifications such as splicing, 5′-capping, polyadenylation, export from the nucleus or the mitochondria and the like. The sum of these processes is also called maturation of RNA. The mature messenger RNA usually provides the nucleotide sequence that may be translated into an amino-acid sequence of a particular peptide or protein. Typically, a mature mRNA comprises a 5′-cap, a 5′-UTR, an open reading frame, a 3′-UTR and a poly(A) sequence. Aside from messenger RNA, several non-coding types of RNA exist which may be involved in regulation of transcription and/or translation.

[0053] Sequence of a nucleic acid molecule: The sequence of a nucleic acid molecule is typically understood to be the particular and individual order, i.e. the succession of its nucleotides. The sequence of a protein or peptide is typically understood to be the order, i.e. the succession of its amino acids.

[0054] Sequence identity: Two or more sequences are identical if they exhibit the same length and order of nucleotides or amino acids. The percentage of identity typically describes the extent to which two sequences are identical, i.e. it typically describes the percentage of nucleotides that correspond in their sequence position with identical nucleotides of a reference-sequence. For determination of the degree of identity, the sequences to be compared are considered to exhibit the same length, i.e. the length of the longest sequence of the sequences to be compared. This means that a first sequence consisting of 8 nucleotides is 80% identical to a second sequence consisting of ID nucleotides comprising the first sequence. In other words, in the context of the present invention, identity of sequences preferably relates to the percentage of nucleotides of a sequence which have the same position in two or more sequences having the same length. Gaps are usually regarded as non-identical positions, irrespective of their actual position in an alignment.

[0055] Stabilized nucleic acid molecule: A stabilized nucleic acid molecule is a nucleic acid molecule, preferably a DNA or RNA molecule that is modified such, that it is more stable to disintegration or degradation, e.g., by environmental factors or enzymatic digest, such as by an exo- or endonuclease degradation, than the nucleic acid molecule without the modification. Preferably, a stabilized nucleic acid molecule in the context of the present invention is stabilized in a cell, such as a prokaryotic or eukaryotic cell, preferably in a mammalian cell, such as a human cell. The stabilization effect may also be exerted outside of cells, e.g. in a buffer solution etc., for example, in a manufacturing process for a pharmaceutical composition comprising the stabilized nucleic acid molecule.

[0056] Transfection: The term “transfection” refers to the introduction of nucleic acid molecules, such as DNA or RNA (e.g. mRNA) molecules, into cells, preferably into eukaryotic cells. In the context of the present invention, the term “transfection” encompasses any method known to the skilled person for introducing nucleic acid molecules into cells, preferably into eukaryotic cells, such as into mammalian cells. Such methods encompass, for example, electroporation, lipofection, e.g. based on cationic lipids and/or liposomes, calcium phosphate precipitation, nanoparticle based transfection, virus based transfection, or transfection based on cationic polymers, such as DEAE-dextran or polyethylenimine etc. Preferably, the introduction is non-viral.

[0057] Vaccine: A vaccine is typically understood to be a prophylactic or therapeutic material providing at least one antigen, preferably an immunogen. The antigen or immunogen may be derived from any material that is suitable for vaccination. For example, the antigen or immunogen may be derived from a pathogen, such as from bacteria or virus particles etc., or from a tumor or cancerous tissue. The antigen or immunogen stimulates the body's adaptive immune system to provide an adaptive immune response.

[0058] Vector: The term “vector” refers to a nucleic acid molecule, preferably to an artificial nucleic acid molecule. A vector in the context of the present invention is suitable for incorporating or harboring a desired nucleic acid sequence, such as a nucleic acid sequence comprising an open reading frame. Such vectors may be storage vectors, expression vectors, cloning vectors, transfer vectors etc. A storage vector is a vector, which allows the convenient storage of a nucleic acid molecule, for example, of an mRNA molecule. Thus, the vector may comprise a sequence corresponding, e.g., to a desired mRNA sequence or a part thereof, such as a sequence corresponding to the coding sequence and the 3′-UTR of an mRNA. An expression vector may be used for production of expression products such as RNA, e.g. mRNA, or peptides, polypeptides or proteins. For example, an expression vector may comprise sequences needed for transcription of a sequence stretch of the vector, such as a promoter sequence, e.g. an RNA polymerase promoter sequence. A cloning vector is typically a vector that contains a cloning site, which may be used to incorporate nucleic acid sequences into the vector. A cloning vector may be, e.g., a plasmid vector or a bacteriophage vector. A transfer vector may be a vector, which is suitable for transferring nucleic acid molecules into cells or organisms, for example, viral vectors. A vector in the context of the present invention may be, e.g., an RNA vector or a DNA vector. Preferably, a vector is a DNA molecule. Preferably, a vector in the sense of the present application comprises a cloning site, a selection marker, such as an antibiotic resistance factor, and a sequence suitable for multiplication of the vector, such as an origin of replication. Preferably, a vector in the context of the present application is a plasmid vector.

[0059] Vehicle: A vehicle is typically understood to be a material that is suitable for storing, transporting, and/or administering a compound, such as a pharmaceutically active compound. For example, it may be a physiologically acceptable liquid, which is suitable for storing, transporting, and/or administering a pharmaceutically active compound.

[0060] 3′-untranslated region (3′-UTR): Generally, the term “3′-UTR” refers to a part of the artificial nucleic acid molecule, which is located 3′ (i.e. “downstream”) of an open reading frame and which is not translated into protein. Typically, a 3′-UTR is the part of an mRNA which is located between the protein coding region (open reading frame (ORF) or coding sequence (CDS)) and the poly(A) sequence of the mRNA. In the context of the invention, the term 3′-UTR may also comprise elements, which are not encoded in the template, from which an RNA is transcribed, but which are added after transcription during maturation, e.g. a poly(A) sequence. A 3′-UTR of the mRNA is not translated into an amino acid sequence. The 3′-UTR sequence is generally encoded by the gene, which is transcribed into the respective mRNA during the gene expression process. The genomic sequence is first transcribed into pre-mature mRNA, which comprises optional introns. The pre-mature mRNA is then further processed into mature mRNA in a maturation process. This maturation process comprises the steps of 5′capping, splicing the pre-mature mRNA to excise optional introns and modifications of the 3′-end, such as polyadenylation of the 3′-end of the pre-mature mRNA and optional endo-/or exonuclease cleavages etc. In the context of the present invention, a 3′-UTR corresponds to the sequence of a mature mRNA, which is located between the stop codon of the protein coding region, preferably immediately 3′ to the stop codon of the protein coding region, and the poly(A) sequence of the mRNA. The term “corresponds to” means that the 3′-UTR sequence may be an RNA sequence, such as in the mRNA sequence used for defining the 3′-UTR sequence, or a DNA sequence, which corresponds to such RNA sequence. In the context of the present invention, the term “a 3′-UTR of a gene”, such as “a 3′-UTR of a ribosomal protein gene”, is the sequence, which corresponds to the 3′-UTR of the mature mRNA derived from this gene, i.e. the mRNA obtained by transcription of the gene and maturation of the pre-mature mRNA. The term “3′-UTR of a gene” encompasses the DNA sequence and the RNA sequence (both sense and antisense strand and both mature and immature) of the 3′-UTR.

[0061] 5′-untranslated region (5′-UTR): A 5′-UTR is typically understood to be a particular section of messenger RNA (mRNA). It is located 5′ of the open reading frame of the mRNA. Typically, the 5′-UTR starts with the transcriptional start site and ends one nucleotide before the start codon of the open reading frame. The 5′-UTR may comprise elements for controlling gene expression, also called regulatory elements. Such regulatory elements may be, for example, ribosomal binding sites. The 5′-UTR may be post-transcriptionally modified, for example by addition of a 5′-CAP. In the context of the present invention, a 5′-UTR corresponds to the sequence of a mature mRNA, which is located between the 5′-CAP and the start codon. Preferably, the 5′-UTR corresponds to the sequence, which extends from a nucleotide located 3′ to the 5′-CAP, preferably from the nucleotide located immediately 3′ to the 5′-CAP, to a nucleotide located 5′ to the start codon of the protein coding region, preferably to the nucleotide located immediately 5′ to the start codon of the protein coding region. The nucleotide located immediately 3′ to the 5′-CAP of a mature mRNA typically corresponds to the transcriptional start site. The term “corresponds to” means that the 5′-UTR sequence may be an RNA sequence, such as in the mRNA sequence used for defining the 5′-UTR sequence, or a DNA sequence, which corresponds to such RNA sequence. In the context of the present invention, the term “a 5′-UTR of a gene” is the sequence, which corresponds to the 5′-UTR of the mature mRNA derived from this gene, i.e. the mRNA obtained by transcription of the gene and maturation of the pre-mature mRNA. The term “5′-UTR of a gene” encompasses the DNA sequence and the RNA sequence of the 5′-UTR. By the inventive embodiments such a 5′-UTR may be provided 5′-terminal to the coding sequence. Its length is typically less than 500, 400, 300, 250 or less than 200 nucleotides. In other embodiments its length may be in the range of at least 10, 20, 30 or 40, preferably up to 100 or 150, nucleotides.

[0062] 5′Terminal Oligopyrimidine Tract (TOP): The 5′terminal oligopyrimidine tract (TOP) is typically a stretch of pyrimidine nucleotides located in the 5′ terminal region of a nucleic acid molecule, such as the 5′ terminal region of certain mRNA molecules or the 5′ terminal region of a functional entity, e.g. the transcribed region, of certain genes. The sequence starts with a cytidine, which usually corresponds to the transcriptional start site, and is followed by a stretch of usually about 3 to 30 pyrimidine nucleotides. For example, the TOP may comprise 3, 4, 5, 5, 7, 8, 9, 10, 11, 12, 13, 14, 15, 16, 17, 18, 19, 20, 21, 22, 23, 24, 25, 25, 27, 28, 29, 30 or even more nucleotides. The pyrimidine stretch and thus the 5′ TOP ends one nucleotide 5′ to the first purine nucleotide located downstream of the TOP. Messenger RNA that contains a 5′terminal oligopyrimidine tract is often referred to as TOP mRNA. Accordingly, genes that provide such messenger RNAs are referred to as TOP genes. TOP sequences have, for example, been found in genes and mRNAs encoding peptide elongation factors and ribosomal proteins.

[0063] TOP motif: In the context of the present invention, a TOP motif is a nucleic acid sequence which corresponds to a 5′TOP as defined above. Thus, a TOP motif in the context of the present invention is preferably a stretch of pyrimidine nucleotides having a length of 3-3D nucleotides. Preferably, the TOP-motif consists of at least 3 pyrimidine nucleotides, preferably at least 4 pyrimidine nucleotides, preferably at least 5 pyrimidine nucleotides, more preferably at least 6 nucleotides, more preferably at least 7 nucleotides, most preferably at least 8 pyrimidine nucleotides, wherein the stretch of pyrimidine nucleotides preferably starts at its 5′end with a cytosine nucleotide. In TOP genes and TOP mRNAs, the TOP-motif preferably starts at its 5′end with the transcriptional start site and ends one nucleotide 5′ to the first purin residue in said gene or mRNA. A TOP motif in the sense of the present invention is preferably located at the 5′end of a sequence, which represents a 5′UTR, or at the 5′end of a sequence, which codes for a 5′UTR. Thus, preferably, a stretch of 3 or more pyrimidine nucleotides is called “TOP motif” in the sense of the present invention if this stretch is located at the 5′end of a respective sequence, such as the artificial nucleic acid molecule, the 5′UTR element of the artificial nucleic acid molecule, or the nucleic acid sequence which is derived from the 5′UTR of a TOP gene as described herein. In other words, a stretch of 3 or more pyrimidine nucleotides, which is not located at the 5′-end of a 5′UTR or a 5′UTR element but anywhere within a 5′UTR or a 5′UTR element, is preferably not referred to as “TOP motif”.

[0064] TOP gene: TOP genes are typically characterised by the presence of a 5′ terminal oligopyrimidine tract. Furthermore, most TOP genes are characterized by a growth-associated translational regulation. However, also TOP genes with a tissue specific translational regulation are known. As defined above, the 5′UTR of a TOP gene corresponds to the sequence of a 5′UTR of a mature mRNA derived from a TOP gene, which preferably extends from the nucleotide located 3′ to the 5′-CAP to the nucleotide located 5′ to the start codon. A 5′UTR of a TOP gene typically does not comprise any start codons, preferably no upstream AUGs (uAUGs) or upstream open reading frames (uORFs). Therein, upstream AUGs and upstream open reading frames are typically understood to be AUGs and open reading frames that occur 5′ of the start codon (AUG) of the open reading frame that should be translated. The 5′UTRs of TOP genes are generally rather short. The lengths of 5′UTRs of TOP genes may vary between 2D nucleotides up to 500 nucleotides, and are typically less than about 200 nucleotides, preferably less than about 150 nucleotides, more preferably less than about 100 nucleotides. Exemplary 5′UTRs of TOP genes in the sense of the present invention are the nucleic acid sequences extending from the nucleotide at position 5 to the nucleotide located immediately 5′ to the start codon (e.g. the ATG) in the sequences according to SEQ ID NOs. 1-1353 of the patent application WO2013/143700, whose disclosure is incorporated herewith by reference. In this context, a particularly preferred fragment of a 5′UTR of a TOP gene is a 5′UTR of a TOP gene lacking the 5′TOP motif. The terms “5′UTR of a TOP gene” or “5′-TOP UTR” preferably refer to the 5′UTR of a naturally occurring TOP gene.

[0065] The present invention provides an RNA comprising at least one coding sequence encoding a tumor antigen, or a fragment or variant of a tumor antigen.

[0066] In the context of the present invention, the tumor antigen encoded by the at least one coding sequence of the RNA is preferably an antigen as defined herein, which is derived from or associated with a tumor or a cancer disease. Preferably, the tumor is a malignant tumor. The tumor antigen is preferably an antigen associated with a cancer disease. A tumor antigen as used herein is typically derived from a tumor cell, preferably a mammalian tumor cell. A tumor antigen is preferably located in or on the surface of a tumor cell derived from a mammalian, preferably from a human, tumor, such as a systemic or a solid tumor.

[0067] Tumor antigens may also be selected from proteins, which are overexpressed in tumor cells compared to a normal cell. Furthermore, the expression ‘tumor antigen’ also includes an antigen expressed in cells, which are (were) not themselves (or originally not themselves) degenerated but are associated with the supposed tumor. Antigens, which are connected with tumor-supplying vessels or (re)formation thereof, in particular those antigens, which are associated with neovascularization, e.g. growth factors, such as VEGF, bFGF etc., are also included herein. Further antigens connected with a tumor include antigens from cells or tissues typically embedding the tumor. Further, some substances (usually proteins or peptides) are expressed in patients suffering (knowingly or not-knowingly) from a cancer disease and they occur in increased concentrations in the body fluids of said patients. Some substances may also referred to herein as ‘tumor antigens’, without being antigens in the strictest sense of an immune response inducing substance. The class of tumor antigens can be divided further into tumor-specific antigens (TSAs) and tumor-associated-antigens (TAAs), both of which are comprised by the expression as used herein. TSAs can only be presented by tumor cells and never by normal “healthy” cells. They typically result from a tumor specific mutation. TAAs, which are more common, are usually presented by both tumor and healthy cells. These antigens are recognized and the antigen-presenting cell can be destroyed by cytotoxic T cells. Additionally, tumor antigens can also occur on the surface of the tumor in the form of, e.g., a mutated receptor. In this case, they can be recognized by antibodies.

[0068] As used herein, the term ‘tumor antigen’ or ‘antigen’ preferably refers to any one of the antigens provided in Table I herein. The at least one coding sequence of the RNA according to the invention thus preferably encodes a tumor antigen selected from the antigens provided in Table 1, or a fragment or variant thereto.

[0069] The inventors surprisingly found that the RNA according to the invention is capable of providing expression of the tumor antigen encoded in the at least one coding region upon administration of the RNA to cells or to a patient. It was unexpectedly found that an improved immune response can advantageously be obtained by using the RNA according to the invention as a vaccine against a tumor antigen as defined herein.

[0070] Preferably, the at least one coding sequence of the RNA according to the invention encodes a tumor antigen, preferably as defined herein, or a fragment or variant thereof, wherein the tumor antigen is preferably selected from the group consisting of 1A01_HLA-A/m; 1A02; 5T4; ACRBP; AFP; AKAP4; alpha-actinin-_4/m; alpha-methylacyl-coenzyme_A_racemase; ANDR; ART-4; ARTC1/m; AURKB; B2MG; B3GN5; B4GN1; B7H4; BAGE-1; BAS1; BCL-2; bcr/abl; beta-catenin/m; BING-4; BIRC7; BRCA1/m; BY55; calreticulin; CAMEL; CASP-8/m; CASPA; cathepsin_B; cathepsin_L; CD1A; CD1B; CD1C; CD1D; CD1E; CD20; CD22; CD27B; Cr33; CD3E; CD3Z; CD44_Isoform_; CD44_Isoform_B; CD4; CD52; CD55; CD56; CD80; CD86; CD8A; CDC27/m; CDE30; CDK4/m; CDKN2A/m; CEA; CEAM6; CH3L2; CLCA26; CML28; CML66; COA-1/m; coactnsin-like_protein; collagen_XXIII; COX-2; CP1B1; CSAG2; CT45A1; CT55; CT-_9/BRD6; CTAG2_Isoform_LAGE-1A; CTAG2_Isoform_LAGE-1B; CTCFL; ten; cyclin_B1; cyclin_D1; cyp-B; DAM-10; DEP1A; E7; EF1A2; EFTUD2/m; EGFR; EGLN3; ELF2/m; EMMPRIN; EpCam; EphA2; EphA3; ErbB3; ERBB4; ERG; ETV6; EWS; EZH2; FABP7; FCGR3A_Version_1; FCGR3A_Version_2; FGF5; FGFR2; fibronectin; FOS; FOXP3; FUT1; G250; GAGE-1; GAGE-2; GAGE-3; GAGE-4; GAGE-5; GAGE-6; GAGE7b: GAGE-8 (GAGE-2D); GASR; GnT-V; GPC3; GPNMB/m; GRM3; HAGE; hepsin; Her2/neu; HLA-A2/m; homeobox_NKX3.1; HOM-TES-B5; HPG1; HS71A; HS71B; HST-2; hTERT; iCE; IF2B3; ILl1; IL-13Ra2; IL2-RA; IL2-RB; IL2-RG; IL-5; IMP3; ITA5; IT81; IT86; kallikrein-2; kallikrein-3; kallikrein-4; KI20A; KIAA0205; KIF2C; KK-LC-1; LDLR; LGMN; LIRB2; LY6K; MAGA5; MAGA8; MAGA8; MAGE-A10; MAGE-A12; MAGE-A1; MAGE-A2; MAGE-A3; MAGE-A4; MAGE-A6; MAGE-A9; MAGE-B10; MAGE-B16; MAGE-B17; MAGE-B1; MAGE-B2; MAGE-B3; MAGE-B4; MAGE-B5; MAGE-B6; MAGE-C1; MAGE-C2; MAGE-C3; MAGE-D1; MAGE-D2; MAGE-D4; MAGE-_E1; MAGE-E1_(MAGE1); MAGE-E2; MAGE-F1; MAGE-H1; MAGEL2; mammaglobin_A; MART-1/melan-A; MART-2; MCI_R; M-CSF; mesothelin; MITF: MMP1_1; MMP7; MUC-1; MUM-1/m; MUM-2/m; MYCN; MYD1A; MYD1B; MYD1C; MYD1D; MYD1E; MYD1F: MYD1G; MYD1H; NA17; NA88-A; Neo-PAP; NFYC/m; NGEP; NPM; NRCAM; NSE; NUF2; NY-ESD-1; DA1; DGT: OS-9; osteocalcin; osteopontin; p53; PAGE-4; PAI-1; PAI-2; PAP; PATE; PAX3; PAX5: PDIL1; PDCD1; PDEF: PECA1; PGCB; PGFRB; Pim-1_-Kinase; Pin-1; PLAC1; PMEL; PML; POTEF; POTE; PRAME; PRDX5/m; PRM2; prostein; proteinase-3; PSA; PSB9; PSCA; PSGR; PSM; PTPRC; RA88A; RAGE-1; RARA; RASH; RASK; RASN; RGS5; RHAMM/CD168; RHOC; RSSA; RU1; RU2; RUNX1; S-100; SAGE; SART-1; SART-2; SART-3; SEPR; SERPINB5; SIA7F: SIA8A; SIAT9; SIRT2/m; SOX10; SP17; SPNXA; SPXN3; SSX-1; SSX-2; SSX3; SSX-4; STIA1; STAG2; STAMP-1; STEAP-1; Survivin-2B; survivin; SYCP1; SYT-SSX-1; SYT-SSX-2; TARP; TCRg; TF2AA; TGFB1; TGFR2; TGM-4; TIE2; TKTL1; TP1/m; TRGVII; TRGV9; TRPC1; TRP-p8; TSG10; TSPY1; TVC_(TRGV3); TX101; tyrosinase; TYRP1; TYRP2; UPA; VEGFR1; WT1; and XAGE1.

[0071] It is further preferred that the at least one coding sequence of the RNA of the present invention encodes a tumor antigen, or a fragment or variant thereof, wherein the tumor antigen is an antigen selected from the antigens listed in Table 1. Therein, each row corresponds to an antigen as identified by the respective gene name (first column ‘Gene Name’) and the database accession number of the corresponding protein (second column ‘Protein Accession No.’). The third column (‘A’) in Table I indicates the SEQ ID NO: corresponding to the respective amino acid sequence as provided herein. The SEQ ID NO: corresponding to the nucleic acid sequence of the wild type RNA encoding the antigen is indicated in the fourth column (‘B’). The fifth column (‘C’) provides the SEQ ID NO:'s corresponding to modified nucleic acid sequences of the RNAs as described herein that encode the antigen preferably having the amino acid sequence as defined by the SEQ ID NO: indicated in the third column (‘A’) or by the database entry indicated in the second column (‘Protein Accession No.’).

[0072] For example, the at least one coding region of the RNA according to the invention may encode the antigen ‘5T4’ (see Table I, third row), as referenced in the UniProtKB database under ‘Q13B41’ (see Table 1, third row, second column). The full-length amino acid sequence of the 5T4 antigen as used herein is indicated in the third column and is defined by SEQ ID NO: 3. In the case of an RNA encoding 5T4 or a fragment or variant thereof, the at least one coding region of the RNA may thus comprise or consist of, for example, the nucleic acid sequence according to SEQ ID NO: 507 (see Table 1, third row, fourth column) or a fragment or variant thereof, or, alternatively, any one of the nucleic acid sequences according to SEQ ID NOs: 1011; 1515; 2019; 2523; 3027; 3531; 4035, or a fragment or variant of any one of these sequences.

TABLE 1
List of tumor antigens

| | Accession No. | | | |
|---|---|---|---|---|
| Gene Name | (UniProtKB, NCBI, Genbank or Pubmed) | A | B | C |
| HLA-A | P30443 | 1 | 505 | 1009; 1513; 2017; 2521; 3025; 3529; 4033 |
| HLA-A | P01892 | 2 | 506 | 1010; 1514; 2018; 2522; 3026; 3530; 4034 |
| TPBG | Q13641 | 3 | 507 | 1011; 1515; 2019; 2523; 3027; 3531; 4035 |
| ACRBP | Q8NEB7 | 4 | 508 | 1012; 1516; 2020; 2524; 3028; 3532; 4036 |
| AFP | P02771 | 5 | 509 | 1013; 1517; 2021; 2525; 3029; 3533; 4037 |
| AKAP4 | Q5JQC9 | 6 | 510 | 1014; 1518; 2022; 2526; 3030; 3534; 4038 |
| ACTN4 | B4DSX0 | 7 | 511 | 1015; 1519; 2023; 2527; 3031; 3535; 4039 |
| ACTN4 | B4E337 | 8 | 512 | 1016; 1520; 2024; 2528; 3032; 3536; 4040 |
| ACTN4 | O43707 | 9 | 513 | 1017; 1521; 2025; 2529; 3033; 3537; 4041 |
| AMACR | A0A024RE16 | 10 | 514 | 1018; 1522; 2026; 2530; 3034; 3538; 4042 |
| AMACR | A8KAC3 | 11 | 515 | 1019; 1523; 2027; 2531; 3035; 3539; 4043 |
| AR | P10275 | 12 | 516 | 1020; 1524; 2028; 2532; 3036; 3540; 4044 |
| NOB1 | Q9ULX3 | 13 | 517 | 1021; 1525; 2029; 2533; 3037; 3541; 4045 |
| ART1 | P52961 | 14 | 518 | 1022; 1526; 2030; 2534; 3038; 3542; 4046 |
| AURKB | Q96GD4 | 15 | 519 | 1023; 1527; 2031; 2535; 3039; 3543; 4047 |
| B2M | P61769 | 16 | 520 | 1024; 1528; 2032; 2536; 3040; 3544; 4048 |
| B3BNT5 | Q9BYG0 | 17 | 521 | 1025; 1529; 2033; 2537; 3041; 3545; 4049 |
| B4BALNT1 | Q00973 | 18 | 522 | 1026; 1530; 2034; 2538; 3042; 3546; 4050 |
| VTCN1 | Q7Z7D3 | 19 | 523 | 1027; 1531; 2035; 2539; 3043; 3547; 4051 |
| BAGE | Q13072 | 20 | 524 | 1028; 1532; 2036; 2540; 3044; 3548; 4052 |
| BSG | P35613 | 21 | 525 | 1029; 1533; 2037; 2541; 3045; 3549; 4053 |
| bcl2 | A9QXG9 | 22 | 526 | 1030; 1534; 2038; 2542; 3046; 3550; 4054 |
| BCR/ABL | A9UEZ4 | 23 | 527 | 1031; 1535; 2039; 2543; 3047; 3551; 4055 |
| BCR/ABL | A9UEZ7 | 24 | 528 | 1032; 1536; 2040; 2544; 3048; 3552; 4056 |
| BCR/ABL | A9UEZ8 | 25 | 529 | 1033; 1537; 2041; 2545; 3049; 3553; 4057 |
| BCR/ABL | A9UEZ9 | 26 | 530 | 1034; 1538; 2042; 2546; 3050; 3554; 4058 |
| BCR/ABL | A9UFO0 | 27 | 531 | 1035; 1539; 2043; 2547; 3051; 3555; 4059 |
| BCR/ABL | A9UFO1 | 28 | 532 | 1036; 1540; 2044; 2548; 3052; 3556; 4060 |
| BCR/ABL | A9UFO3 | 29 | 533 | 1037; 1541; 2045; 2549; 3053; 3557; 4061 |
| BCR/ABL | A9UFO4 | 30 | 534 | 1038; 1542; 2046; 2550; 3054; 3558; 4062 |
| BCR/ABL | A9UFO5 | 31 | 535 | 1039; 1543; 2047; 2551; 3055; 3559; 4063 |
| BCR/ABL | A9UFO6 | 32 | 536 | 1040; 1544; 2048; 2552; 3056; 3560; 4064 |
| BCR/ABL | A9UFO8 | 33 | 537 | 1041; 1545; 2049; 2553; 3057; 3561; 4065 |
| CTNNB1 | P35222 | 34 | 538 | 1042; 1546; 2050; 2554; 3058; 3562; 4066 |
| CTNNBL1 | Q8WYA6 | 35 | 539 | 1043; 1547; 2051; 2555; 3059; 3563; 4067 |
| WDR46 | O15213 | 36 | 540 | 1044; 1548; 2052; 2556; 3060; 3564; 4068 |
| BIRC7 | Q96CA5 | 37 | 541 | 1045; 1549; 2053; 2557; 3061; 3565; 4068 |
| BRCA1 | A0A024R1V0 | 38 | 542 | 1046; 1550; 2054; 2558; 3062; 3566; 4070 |
| BRCA1 | A0A024R1V7 | 39 | 543 | 1047; 1551; 2055; 2559; 3063; 3567; 4071 |
| BRCA1 | A0A024R1Z8 | 40 | 544 | 1048; 1552; 2056; 2560; 3064; 3568; 4072 |
| BRCA1 | A0A068BFX7 | 41 | 545 | 1049; 1553; 2057; 2561; 3065; 3569; 4073 |
| BRCA1 | C6YB45 | 42 | 546 | 1050; 1554; 2058; 2562; 3066; 3570; 4074 |
| BRCA1 | C6YB47 | 43 | 547 | 1051; 1555; 2059; 2563; 3067; 3571; 4075 |
| BRCA1 | G3XAC3 | 44 | 548 | 1052; 1556; 2060; 2564; 3068; 3572; 4076 |
| CD160 | O95971 | 45 | 549 | 1053; 1557; 2061; 2565; 3069; 3573; 4077 |
| CALR | B4DHR1 | 46 | 550 | 1054; 1558; 2062; 2566; 3070; 3574; 4078 |
| CALR | B4E2Y9 | 47 | 551 | 1055; 1559; 2063; 2567; 3071; 3575; 4079 |
| CALR | P27797 | 48 | 552 | 1056; 1560; 2064; 2568; 3072; 3576; 4080 |
| CALR3 | Q96L12 | 49 | 553 | 1057; 1561; 2065; 2569; 3073; 3577; 4081 |
| CAMEL | O95987 | 50 | 554 | 1058; 1562; 2066; 2570; 3074; 3578; 4082 |
| CASP8 | Q14790 | 51 | 555 | 1058; 1563; 2067; 2571; 3075; 3579; 4083 |
| CASP10 | Q92851-4 | 52 | 556 | 1060; 1564; 2068; 2572; 3076; 3580; 4084 |
| CTSB | A0A024R374 | 53 | 557 | 1061; 1565; 2069; 2573; 3077; 3581; 4085 |
| CTSB | P07858 | 54 | 558 | 1062; 1566; 2070; 2574; 3078; 3582; 4086 |
| CTSL | A0A024R276 | 55 | 559 | 1063; 1567; 2071; 2575; 3079; 3583; 4087 |
| CTSL | P07711 | 56 | 560 | 1064; 1568; 2072; 2576; 3080; 3584; 4088 |
| CTSL | Q9HBQ7 | 57 | 561 | 1065; 1569; 2073; 2577; 3081; 3585; 4089 |
| CD1A | P06126 | 58 | 562 | 1066; 1570; 2074; 2578; 3082; 3586; 4090 |
| CD1B | P29016 | 59 | 563 | 1067; 1571; 2075; 2579; 3083; 3587; 4091 |
| CD1C | P29017 | 60 | 564 | 1068; 1572; 2076; 2580; 3084; 3588; 4092 |
| CD1D | P15813 | 61 | 565 | 1069; 1573; 2077; 2581; 3085; 3589; 4093 |
| CD1E | P15812 | 62 | 566 | 1070; 1574; 2078; 2582; 3086; 3590; 4094 |
| MS4A1 | P11836 | 63 | 567 | 1071; 1575; 2079; 2583; 3087; 3591; 4095 |
| CD22 | O60926 | 64 | 568 | 1072; 1576; 2080; 2584; 3088; 3592; 4096 |
| CD22 | P20273 | 65 | 569 | 1073; 1577; 2081; 2585; 3089; 3593; 4097 |
| CD22 | Q0EAF5 | 66 | 570 | 1074; 1578; 2082; 2586; 3090; 3594; 4098 |
| CD276 | Q5ZPR3 | 67 | 571 | 1075; 1579; 2083; 2587; 3091; 3595; 4099 |
| CD33 | B4DF51 | 68 | 572 | 1076; 1580; 2084; 2588; 3092; 3596; 4100 |
| CD33 | P20138 | 69 | 573 | 1077; 1581; 2085; 2589; 3093; 3597; 4101 |
| CD33 | Q546G0 | 70 | 574 | 1078; 1582; 2086; 2590; 3094; 3598; 4102 |
| CD3E | P07766 | 71 | 575 | 1079; 1583; 2087; 2591; 3095; 3599; 4103 |
| CD247 | P20963 | 72 | 576 | 1080; 1584; 2088; 2592; 3096; 3600; 4104 |
| CD44 | P16070 | 73 | 577 | 1081; 1585; 2089; 2593; 3097; 3601; 4105 |
| CD44 | P16070-6 | 74 | 578 | 1082; 1586; 2090; 2594; 3098; 3602; 4106 |
| CD4 | P01730 | 75 | 579 | 1083; 1587; 2091; 2595; 3099; 3603; 4107 |
| CD52 | P31358 | 76 | 580 | 1084; 1588; 2092; 2596; 3100; 3604; 4108 |
| CDW52 | Q6IBD0 | 77 | 581 | 1085; 1589; 2093; 2597; 3101; 3605; 4109 |
| HEL-S-171mP | V9HWN9 | 78 | 582 | 1086; 1590; 2094; 2598; 3102; 3606; 4110 |
| CD55 | B1AP15 | 79 | 583 | 1087; 1591; 2095; 2599; 3103; 3607; 4111 |
| CD55 | D3DT85 | 80 | 584 | 1088; 1592; 2096; 2600; 3104; 3608; 4112 |
| CD55 | D3DT86 | 81 | 585 | 1089; 1593; 2097; 2601; 3105; 3609; 4113 |
| CD55 | P08174 | 82 | 586 | 1090; 1594; 2098; 2602; 3106; 3610; 4114 |
| NCAM1 | P13591 | 83 | 587 | 1091; 1595; 2099; 2603; 3107; 3611; 4115 |
| CD80 | A0N0P2 | 84 | 588 | 1092; 1596; 2100; 2604; 3108; 3612; 4116 |
| CD80 | P33681 | 85 | 589 | 1093; 1597; 2101; 2605; 3109; 3613; 4117 |
| CD86 | P42081 | 86 | 590 | 1094; 1598; 2102; 2606; 3110; 3614; 4118 |
| CD8A | P01732 | 87 | 591 | 1095; 1599; 2103; 2607; 3111; 3615; 4119 |
| CDC27 | G5EA36 | 88 | 592 | 1096; 1600; 2104; 2608; 3112; 3616; 4120 |
| CDC27 | P30260 | 89 | 593 | 1097; 1601; 2105; 2609; 3113; 3617; 4121 |
| TNFRSF8 | P28908 | 90 | 594 | 1098; 1602; 2106; 2610; 3114; 3618; 4122 |
| CDK4 | A0A024RBB6 | 91 | 595 | 1099; 1603; 2107; 2611; 3115; 3619; 4123 |
| CDK4 | P11802 | 92 | 596 | 1100; 1604; 2108; 2612; 3116; 3620; 4124 |
| CDK4 | Q6LC83 | 93 | 597 | 1101; 1605; 2109; 2613; 3117; 3621; 4125 |
| CDK4 | Q96BE9 | 94 | 598 | 1102; 1606; 2110; 2614; 3118; 3622; 4126 |
| CDKN2A | D1LYX3 | 95 | 599 | 1103; 1607; 2111; 2615; 3119; 3623; 4127 |
| CDKN2A | G3XAG3 | 96 | 600 | 1104; 1608; 2112; 2616; 3120; 3624; 4128 |
| CDKN2A | K7PML8 | 97 | 601 | 1105; 1609; 2113; 2617; 3121; 3625; 4129 |
| CDKN2A | L8E941 | 98 | 602 | 1106; 1610; 2114; 2618; 3122; 3926; 4130 |
| CDKN2A | QBN726 | 99 | 603 | 1107; 1611; 2115; 2619; 3123; 3927; 4131 |
| CEACAM5 | NP_004354 | 100 | 604 | 1108; 1612; 2116; 2620; 3124; 3628; 4132 |
| CEACAM6 | P40199 | 101 | 605 | 1109; 1613; 2117; 2621; 3125; 3629; 4133 |
| CHI3L2 | Q15782 | 102 | 606 | 1110; 1614; 2118; 2622; 3126; 3630; 4134 |
| CLCA2 | Q9UQC9 | 103 | 607 | 1111; 1615; 2119; 2623; 3127; 3631; 4135 |
| EXOSC5 | Q9NQT4 | 104 | 608 | 1112; 1616; 2120; 2624; 3128; 3632; 4136 |
| NUDCD1 | Q96RS6 | 105 | 609 | 1113; 1617; 2121; 2625; 3129; 3633; 4137 |
| UBXN11 | Q5T124 | 106 | 610 | 1114; 1618; 2122; 2626; 3130; 3634; 4138 |
| COTL1 | Q14019 | 107 | 611 | 1115; 1619; 2123; 2627; 3131; 3635; 4139 |
| COL23A1 | L8EAS4 | 108 | 612 | 1116; 1620; 2124; 2628; 3132; 3636; 4140 |
| COL23A1 | Q86Y22 | 109 | 613 | 1117; 1621; 2125; 2629; 3133; 3637; 4141 |
| COX-2 | Q6ZYK7 | 110 | 614 | 1118; 1622; 2126; 2630; 3134; 3638; 4142 |
| CYP1B1 | Q16678 | 111 | 615 | 1119; 1623; 2127; 2631; 3135; 3639; 4143 |
| CSAG2 | Q9Y5P2-2 | 112 | 616 | 1120; 1624; 2128; 2632; 3136; 3640; 4144 |
| CSAG2 | Q9Y5P2 | 113 | 617 | 1121; 1625; 2129; 2633; 3137; 3641; 4145 |
| CT45A1 | Q5HYN5 | 114 | 618 | 1122; 1626; 2130; 2634; 3138; 3642; 4146 |
| CT55 | Q8WUE5 | 115 | 619 | 1123; 1627; 2131; 2635; 3139; 3643; 4147 |
| BRDT | Q58F21 | 116 | 620 | 1124; 1628; 2132; 2636; 3140; 3644; 4148 |
| CTAG2 | O75638-2 | 117 | 621 | 1125; 1629; 2133; 2637; 3141; 3645; 4149 |
| CTAG2 | O75638 | 118 | 622 | 1126; 1630; 2134; 2638; 3142; 3646; 4150 |
| CTCFL | Q8NI51 | 119 | 623 | 1127; 1631; 2135; 2639; 3143; 3647; 4151 |
| TNS4 | QBIZW8 | 120 | 624 | 1128; 1632; 2136; 2640; 3144; 3648; 4152 |
| CCNB1 | P14635 | 121 | 625 | 1129; 1633; 2137; 2641; 3145; 3649; 4153 |
| CCND1 | P24385 | 122 | 626 | 1130; 1634; 2138; 2642; 3146; 3650; 4154 |
| PPIB | P23284 | 123 | 627 | 1131; 1635; 2139; 2643; 3147; 3651; 4155 |
| MAGEB1 | P43366 | 124 | 628 | 1132; 1636; 2140; 2644; 3148; 3652; 4156 |
| DEPDC1 | Q5TB30 | 125 | 629 | 1133; 1637; 2141; 2645; 3149; 3653; 4157 |
| E7 | P03129 | 126 | 630 | 1134; 1638; 2142; 2646; 3150; 3654; 4158 |
| E7 | P06788 | 127 | 631 | 1135; 1639; 2143; 2647; 3151; 3655; 4159 |
| E7 | P17387 | 128 | 632 | 1136; 1640; 2144; 2648; 3152; 3656; 4160 |
| E7 | P06429 | 129 | 633 | 1137; 1641; 2145; 2649; 3153; 3657; 4161 |
| E7 | P27230 | 130 | 634 | 1138; 1642; 2146; 2650; 3154; 3658; 4162 |
| E7 | P24837 | 131 | 635 | 1139; 1643; 2147; 2651; 3155; 3659; 4163 |
| E7 | P21736 | 132 | 636 | 1140; 1644; 2148; 2652; 3156; 3660; 4164 |
| E7 | P26558 | 133 | 637 | 1141; 1645; 2149; 2653; 3157; 3661; 4165 |
| E7 | P36831 | 134 | 638 | 1142; 1646; 2150; 2654; 3158; 3662; 4166 |
| E7 | P36833 | 135 | 639 | 1143; 1647; 2151; 2655; 3159; 3663; 4167 |
| E7 | Q9QCZ1 | 136 | 640 | 1144; 1648; 2152; 2656; 3I60; 3664; 4168 |
| ORF | Q81865 | 137 | 641 | 1145; 1649; 2153; 2657; 3161; 3665; 4169 |
| E7 | Q80956 | 138 | 642 | 1146; 1650; 2154; 2658; 3162; 3666; 4170 |
| EEF1A2 | Q05639 | 139 | 643 | 1147; 1651; 2155; 2659; 3163; 3667; 4171 |
| EFTUD2 | Q15029 | 140 | 644 | 1148; 1652; 2156; 2660; 3164; 3668; 4172 |
| EGFR | A0A0B4J1Y5 | 141 | 645 | 1149; 1653; 2157; 2661; 3165; 3669; 4173 |
| EGFR | E7BSV0 | 142 | 646 | 1150; 1654; 2158; 2662; 3166; 3670; 4174 |
| EGFR | L0R6G1 | 143 | 647 | 1151; 1655; 2159; 2663; 3167; 3671; 4175 |
| EGFR | P00533-2 | 144 | 648 | 1152; 1656; 2160; 2664; 3168; 3672; 4176 |
| EGFR | P00533 | 145 | 649 | 1153; 1657; 2161; 2665; 3169; 3673; 4177 |
| EGFR | Q147T7 | 146 | 650 | 1154; 1658; 2162; 2666; 3170; 3674; 4178 |
| EGFR | Q504U8 | 147 | 651 | 1155; 1659; 2163; 2667; 3171; 3675; 4179 |
| EGFR | Q8NDU8 | 148 | 652 | 1156; 1660; 2164; 2668; 3172; 3676; 4180 |
| EGLN3 | Q9H6Z9 | 149 | 653 | 1157; 1661; 2165; 2669; 3173; 3677; 4181 |
| ELF2 | B7Z720 | 150 | 654 | 1158; 1662; 2166; 2670; 3174; 3678; 4182 |
| hEMMPRIN | Q54A51 | 151 | 655 | 1159; 1663; 2167; 2671; 3175; 3679; 4183 |
| EPCAM | P16422 | 152 | 656 | 1160; 1664; 2168; 2672; 3176; 3680; 4184 |
| EPHA2 | P29317 | 153 | 657 | 1161; 1665; 2169; 2673; 3177; 3681; 4185 |
| EPHA3 | P29320 | 154 | 658 | 1162; 1666; 2170; 2674; 3178; 3682; 4186 |
| EPHA3 | Q6P4R6 | 155 | 659 | 1163; 1667; 2171; 2675; 3179; 3683; 4187 |
| ERBB3 | B3KWG5 | 156 | 660 | 1164; 1668; 2172; 2676; 3180; 3684; 4188 |
| ERBB3 | B4DGQ7 | 157 | 661 | 1165; 1669; 2173; 2677; 3181; 3685; 4189 |
| ERBB4 | Q15303 | 158 | 662 | 1166; 1670; 2174; 2678; 3182; 3686; 4190 |
| ERG | P11308 | 159 | 663 | 1167; 1671; 2175; 2679; 3183; 3687; 4191 |
| ETV6 | P41212 | 160 | 664 | 1168; 1672; 2176; 2680; 3184; 3688; 4192 |
| EWSR1 | Q01844 | 161 | 665 | 1169; 1673; 2177; 2681; 3185; 3689; 4193 |
| EZH2 | F2YMM1 | 162 | 666 | 1170; 1674; 2178; 2682; 3186; 3690; 4194 |
| EZH2 | G3XAL2 | 163 | 667 | 1171; 1675; 2179; 2683; 3187; 3691; 4195 |
| EZH2 | L0R855 | 164 | 668 | 1172; 1676; 2180; 2684; 3188; 3692; 4196 |
| EZH2 | Q15910 | 165 | 669 | 1173; 1677; 2181; 2685; 3189; 3693; 4197 |
| EZH2 | S4S3R8 | 166 | 670 | 1174; 1678; 2182; 2686; 3190; 3694; 4198 |
| FABP7 | O15540 | 167 | 671 | 1175; 1679; 2183; 2687; 3191; 3695; 4199 |
| FCGR3A | P08637 | 168 | 672 | 1176; 1680; 2184; 2688; 3192; 3696; 4200 |
| FCGR3A | CCDS1232.1 | 169 | 673 | 1177; 1681; 2185; 2689; 3193; 3697; 4201 |
| FGF5 | P12034 | 170 | 674 | 1178; 1682; 2186; 2690; 3194; 3698; 4202 |
| FGF5 | Q60518 | 171 | 675 | 1179; 1683; 2187; 2691; 3195; 3699; 4203 |
| FGFR2 | P21802 | 172 | 676 | 1180; 1684; 2188; 2692; 3196; 3700; 4204 |
| LRFN4 | A0A024R5I6 | 173 | 677 | 1181; 1685; 2189; 2693; 3197; 3701; 4205 |
| ITGA5 | A0A024RB01 | 174 | 678 | 1182; 1686; 2190; 2694; 3198; 3702; 4206 |
| FNDC3A | A0A024RDT9 | 175 | 679 | 1183; 1687; 2191; 2695; 3199; 3703; 4207 |
| FNDC3A | A0A024RDV5 | 176 | 680 | 1184; 1688; 2192; 2696; 3200; 3704; 4208 |
| FANK1 | A6NH44 | 177 | 681 | 1185; 1689; 2193; 2697; 3201; 3705; 4209 |
| A8K6A5 | A8K6A5 | 178 | 682 | 1186; 1690; 2194; 2698; 3202; 3706; 4210 |
| B2R627 | B2R627 | 179 | 683 | 1187; 1691; 2195; 2699; 3203; 3707; 4211 |
| B3KXM5 | B3KXM5 | 180 | 684 | 1188; 1692; 2196; 2700; 3204; 3708; 4212 |
| B4DIC5 | B4DIC5 | 181 | 685 | 1189; 1693; 2197; 2701; 3205; 3709; 4213 |
| B4DN21 | B4DN21 | 182 | 686 | 1190; 1694; 2198; 2702; 3206; 3710; 4214 |
| B4DS98 | B4DS98 | 183 | 687 | 1191; 1695; 2199; 2703; 3207; 3711; 4215 |
| B4DTH2 | B4DTH2 | 184 | 688 | 1192; 1696; 2200; 2704; 3208; 3712; 4216 |
| B4DTK1 | B4DTK1 | 185 | 689 | 1193; 1697; 2201; 2705; 3209; 3713; 4217 |
| B4DU16 | B4DU16 | 186 | 690 | 1194; 1698; 2202; 2706; 3210; 3714; 4218 |
| B7Z3W5 | B7Z3W5 | 187 | 691 | 1195; 1699; 2203; 2707; 3211; 3715; 4219 |
| B7Z939 | B7Z939 | 188 | 692 | 1196; 1700; 2204; 2708; 3212; 3716; 4220 |
| FNDC3A | G5E9X3 | 189 | 693 | 1197; 1701; 2205; 2709; 3213; 3717; 4221 |
| Q9H382 | Q9H382 | 190 | 694 | 1198; 1702; 2206; 2710; 3214; 3718; 4222 |
| FOS | P01100 | 191 | 695 | 1199; 1703; 2207; 2711; 3215; 3719; 4223 |
| FOXP3 | Q9BZS1 | 192 | 696 | 1200; 1704; 2208; 2712; 3216; 3720; 4224 |
| FUT1 | P19526 | 193 | 697 | 1201; 1705; 2209; 2713; 3217; 3721; 4225 |
| CA9 | Q16790 | 194 | 698 | 1202; 1706; 2210; 2714; 3218; 3722; 4226 |
| GAGE1 | AAAB2744 | 195 | 699 | 1203; 1707; 2211; 2715; 3219; 3723; 4227 |
| GAGE2A | Q6NT46 | 196 | 700 | 1204; 1708; 2212; 2716; 3220; 3724; 4228 |
| GAGE3 | Q13067 | 197 | 701 | 1205; 1709; 2213; 2717; 3221; 3725; 4229 |
| GAGE4 | Q13068 | 198 | 702 | 1206; 1710; 2214; 2718; 3222; 3726; 4230 |
| GAGE5 | Q13069 | 199 | 703 | 1207; 1711; 2215; 2719; 3223; 3727; 4231 |
| GAGE6 | Q13070 | 200 | 704 | 1208; 1712; 2216; 2720; 3224; 3728; 4232 |
| GAGE7 | O76087 | 201 | 705 | 1209; 1713; 2217; 2721; 3225; 3729; 4233 |
| GAGE2D | Q9UEU5 | 202 | 706 | 1210; 1714; 2218; 2722; 3226; 3730; 4234 |
| CCKBR | P32239 | 203 | 707 | 1211; 1715; 2219; 2723; 3227; 3731; 4235 |
| MGAT5 | Q09328 | 204 | 708 | 1212; 1716; 2220; 2724; 3228; 3732; 4236 |
| GPC3 | I6QTG3 | 205 | 709 | 1213; 1717; 2221; 2725; 3229; 3733; 4237 |
| GPC3 | P51654 | 206 | 710 | 1214; 1718; 2222; 2726; 3230; 3734; 4238 |
| GPC3 | Q8IYG2 | 207 | 711 | 1215; 1719; 2223; 2727; 3231; 3735; 4239 |
| GPNMB | A0A024RA55 | 208 | 712 | 1216; 1720; 2224; 2728; 3232; 3736; 4240 |
| GPNMB | Q14956 | 209 | 713 | 1217; 1721; 2225; 2729; 3233; 3737; 4241 |
| GPNMB | Q8IXJ5 | 210 | 714 | 1218; 1722; 2226; 2730; 3234; 3738; 4242 |
| GPNMB | Q96F58 | 211 | 715 | 1219; 1723; 2227; 2731; 3235; 3739; 4243 |
| GRM3 | Q14832 | 212 | 716 | 1220; 1724; 2228; 2732; 3236; 3740; 4244 |
| DDX43 | Q9NXZ2 | 213 | 717 | 1221; 1725; 2229; 2733; 3237; 3741; 4245 |
| HPN | B2ZDQ2 | 214 | 718 | 1222; 1726; 2230; 2734; 3238; 3742; 4246 |
| HPN | P05981 | 215 | 719 | 1223; 1727; 2231; 2735; 3239; 3743; 4247 |
| ERBB2 | B4DTR1 | 216 | 720 | 1224; 1728; 2232; 2736; 3240; 3744; 4248 |
| ERBB2 | L8E8G2 | 217 | 721 | 1225; 1729; 2233; 2737; 3241; 3745; 4249 |
| ERBB2 | P04626 | 218 | 722 | 1226; 1730; 2234; 2738; 3242; 3746; 4250 |
| HER-2 | Q9UK79 | 219 | 723 | 1227; 1731; 2235; 2739; 3243; 3747; 4251 |
| HLA-A2 | Q95387 | 220 | 724 | 1228; 1732; 2236; 2740; 3244; 3748; 4252 |
| HLA-A2 | Q9MYF8 | 221 | 725 | 1229; 1733; 2237; 2741; 3245; 3749; 4253 |
| NKX3-1 | Q99801 | 222 | 726 | 1230; 1734; 2238; 2742; 3246; 3750; 4254 |
| LUZP4 | B2RBQ6 | 223 | 727 | 1231; 1735; 2239; 2743; 3247; 3751; 4255 |
| LUZP4 | Q9P127 | 224 | 728 | 1232; 1736; 2240; 2744; 3248; 3752; 4256 |
| NDRG1 | 12543784 | 225 | 729 | 1233; 1737; 2241; 2745; 3249; 3753; 4257 |
| HSPA1A | P0DMV8 | 226 | 730 | 1234; 1738; 2242; 2746; 3250; 3754; 4258 |
| HSPA1B | P0DMV9 | 227 | 731 | 1235; 1739; 2243; 2747; 3251; 3755; 4259 |
| FGF6 | P10767 | 228 | 732 | 1236; 1740; 2244; 2748; 3252; 3756; 4260 |
| hTERT | O94807 | 229 | 733 | 1237; 1741; 2245; 2749; 3253; 3757; 4261 |
| CES2 | O00748 | 230 | 734 | 1238; 1742; 2246; 2750; 3254; 3758; 4262 |
| IGF2BP3 | O00425 | 231 | 735 | 1239; 1743; 2247; 2751; 3255; 3759; 4263 |
| IL10 | P22301 | 232 | 736 | 1240; 1744; 2248; 2752; 3256; 3760; 4264 |
| IL13RA2 | Q14627 | 233 | 737 | 1241; 1745; 2249; 2753; 3257; 3761; 4265 |
| IL2RA | P01589 | 234 | 738 | 1242; 1746; 2250; 2754; 3258; 3762; 4266 |
| IL2RB | P14784 | 235 | 739 | 1243; 1747; 2251; 2755; 3259; 3763; 4267 |
| IL2RG | P31785 | 236 | 740 | 1244; 1748; 2252; 2756; 3260; 3764; 4268 |
| IL5 | P05113 | 237 | 741 | 1245; 1749; 2253; 2757; 3261; 3765; 4269 |
| IMP3 | Q9NV31 | 238 | 742 | 1246; 1750; 2254; 2758; 3262; 3766; 4270 |
| ITGA5 | P08648 | 239 | 743 | 1247; 1751; 2255; 2759; 3263; 3767; 4271 |
| ITGB1 | P05556 | 240 | 744 | 1248; 1752; 2256; 2760; 3264; 3768; 4272 |
| ITGB6 | P18564 | 241 | 745 | 1249; 1753; 2257; 2761; 3265; 3769; 4273 |
| KLK2 | A0A024R4J4 | 242 | 746 | 1250; 1754; 2258; 2762; 3266; 3770; 4274 |
| KLK2 | A0A024R4N3 | 243 | 747 | 1251; 1755; 2259; 2763; 3267; 3771; 4275 |
| KLK2 | B0AZU9 | 244 | 748 | 1252; 1756; 2260; 2764; 3268; 3772; 4276 |
| KLK2 | B4DU77 | 245 | 749 | 1253; 1757; 2261; 2765; 3269; 3773; 4277 |
| KLK2 | P20151 | 246 | 750 | 1254; 1758; 2262; 2766; 3270; 3774; 4278 |
| KLK2 | Q6T774 | 247 | 751 | 1255; 1759; 2263; 2767; 3271; 3775; 4279 |
| KLK2 | Q6T775 | 248 | 752 | 1256; 1760; 2264; 2768; 3272; 3776; 4280 |
| KLK3 | P07288-1 | 4558 | 4561 | 4564; 4567; 4570; 4573; 4576; 4579; 4582; 4590 |
| KLK3 | P07288-2 | 4559 | 4562 | 4565; 4568; 4571; 4574; 4577; 4580; 4583 |
| KLK3 | P07288-3 | 4560 | 4563 | 4566; 4569; 4572; 4575; 4578; 4581; 4584 |
| KLK4 | A0A0C4DFQ5 | 249 | 753 | 1257; 1761; 2265; 2769; 3273; 3777; 4281 |
| KLK4 | Q5BQA0 | 250 | 754 | 1258; 1762; 2266; 2770; 3274; 3778; 4282 |
| KLK4 | Q96PT0 | 251 | 755 | 1259; 1763; 2267; 2771; 3275; 3779; 4283 |
| KLK4 | Q96PT1 | 252 | 756 | 1260; 1764; 2268; 2772; 3276; 3780; 4284 |
| KLK4 | Q9Y5K2 | 253 | 757 | 1261; 1765; 2269; 2773; 3277; 3781; 4285 |
| KIF20A | O95235 | 254 | 758 | 1262; 1766; 2270; 2774; 3278; 3782; 4286 |
| LPGAT1 | Q92604 | 255 | 759 | 1263; 1767; 2271; 2775; 3279; 3783; 4287 |
| KIF2C | Q99661 | 256 | 760 | 1264; 1768; 2272; 2776; 3280; 3784; 4288 |
| CT83 | Q5H943 | 257 | 761 | 1265; 1769; 2273; 2777; 3281; 3785; 4289 |
| LDLR | P01130 | 258 | 762 | 1266; 1770; 2274; 2778; 3282; 3786; 4290 |
| LGMN | Q99538 | 259 | 763 | 1267; 1771; 2275; 2779; 3283; 3787; 4291 |
| LILRB2 | Q8N423 | 260 | 764 | 1268; 1772; 2276; 2780; 3284; 3788; 4292 |
| LY6K | Q17RY6 | 261 | 765 | 1269; 1773; 2277; 2781; 3285; 3789; 4293 |
| MAGEA5 | P43359 | 262 | 766 | 1270; 1774; 2278; 2782; 3286; 3790; 4294 |
| MAGEA8 | P43361 | 263 | 767 | 1271; 1775; 2279; 2783; 3287; 3791; 4295 |
| MAGEA11 | P43364 | 264 | 768 | 1272; 1776; 2280; 2784; 3288; 3792; 4296 |
| MAGEA10 | A0A024RC14 | 265 | 769 | 1273; 1777; 2281; 2785; 3289; 3793; 4297 |
| MAGEA12 | P43365 | 266 | 770 | 1274; 1778; 2282; 2786; 3290; 3794; 4298 |
| MAGEA1 | P43355 | 267 | 771 | 1275; 1779; 2283; 2787; 3291; 3795; 4299 |
| MAGEA2 | P43356 | 268 | 772 | 1276; 1780; 2284; 2788; 3292; 3796; 4300; 4588 |
| MAGEA3 | P43357 | 269 | 773 | 1277; 1781; 2285; 2789; 3293; 3797; 4301; 4587 |
| MAGEA4 | A0A024RC12 | 270 | 774 | 1278; 1782; 2286; 2790; 3294; 3798; 4302 |
| MAGEA4 | P43358 | 271 | 775 | 1279; 1783; 2287; 2791; 3295; 3799; 4303 |
| MAGEA4 | Q1RN33 | 272 | 776 | 1280; 1784; 2288; 2792; 3296; 3800; 4304 |
| MAGEA6 | A8K072 | 273 | 777 | 1281; 1785; 2289; 2793; 3297; 3801; 4305 |
| MAGEA6 | P43360 | 274 | 778 | 1282; 1786; 2290; 2794; 3298; 3802; 4306 |
| MAGEA6 | Q6FHI5 | 275 | 779 | 1283; 1787; 2291; 2795; 3299; 3803; 4307 |
| MAGEA9 | P43362 | 276 | 780 | 1284; 1788; 2292; 2796; 3300; 3804; 4308 |
| MAGEB10 | Q96LZ2 | 277 | 781 | 1285; 1789; 2293; 2797; 3301; 3805; 4309 |
| MAGEB16 | A2A368 | 278 | 782 | 1286; 1790; 2294; 2798; 3302; 3806; 4310 |
| MAGEB17 | A8MXT2 | 279 | 783 | 1287; 1791; 2295; 2799; 3303; 3807; 4311 |
| MAGE-B1 | Q96TG1 | 280 | 784 | 1288; 1792; 2296; 2800; 3304; 3808; 4312 |
| MAGEB2 | O15479 | 281 | 785 | 1289; 1793; 2297; 2801; 3305; 3809; 4313 |
| MAGEB3 | O15480 | 282 | 786 | 1290; 1794; 2298; 2802; 3306; 3810; 4314 |
| MAGEB4 | O15481 | 283 | 787 | 1291; 1795; 2299; 2803; 3307; 3811; 4315 |
| MAGEB5 | Q9BZ81 | 284 | 788 | 1292; 1796; 2300; 2804; 3308; 3812; 4316 |
| MAGEB6 | Q8N7X4 | 285 | 789 | 1293; 1797; 2301; 2805; 3309; 3813; 4317 |
| MAGEC1 | O60732 | 286 | 790 | 1294; 1798; 2302; 2806; 3310; 3814; 4318 |
| MAGEC2 | Q9UBF1 | 287 | 791 | 1295; 1799; 2303; 2807; 3311; 3815; 4319; 4585 |
| MAGEC3 | Q8TD91 | 288 | 792 | 1296; 1800; 2304; 2808; 3312; 3816; 4320 |
| MAGED1 | Q9Y5V3 | 289 | 793 | 1297; 1801; 2305; 2809; 3313; 3817; 4321 |
| MAGED2 | Q9UNF1 | 290 | 794 | 1298; 1802; 2306; 2810; 3314; 3818; 4322 |
| MAGED4 | Q96JG8 | 291 | 795 | 1299; 1803; 2307; 2811; 3315; 3819; 4323 |
| MAGEE1 | Q6IAI7 | 292 | 796 | 1300; 1804; 2308; 2812; 3316; 3820; 4324 |
| MAGEE1 | Q9HCI5 | 293 | 797 | 1301; 1805; 2309; 2813; 3317; 3821; 4325 |
| MAGEE2 | Q8TD90 | 294 | 798 | 1302; 1806; 2310; 2814; 3318; 3822; 4326 |
| MAGEF1 | Q9HAY2 | 295 | 799 | 1303; 1807; 2311; 2815; 3319; 3823; 4327 |
| MAGEH1 | Q9H213 | 296 | 800 | 1304; 1808; 2312; 2816; 3320; 3824; 4328 |
| MAGEL2 | Q9UJ55 | 297 | 801 | 1305; 1809; 2313; 2817; 3321; 3825; 4329 |
| SCGB2A2 | Q13296 | 298 | 802 | 1306; 1810; 2314; 2818; 3322; 3826; 4330 |
| SCGB2A2 | Q6NX70 | 299 | 803 | 1307; 1811; 2315; 2819; 3323; 3827; 4331 |
| MLANA | Q16655 | 300 | 804 | 1308; 1812; 2316; 2820; 3324; 3828; 4332 |
| HHAT | Q5VTY9 | 301 | 805 | 1309; 1813; 2317; 2821; 3325; 3829; 4333 |
| MC1R | Q01726 | 302 | 806 | 1310; 1814; 2318; 2822; 3326; 3830; 4334 |
| MC1R | Q1JUL4 | 303 | 807 | 1311; 1815; 2319; 2823; 3327; 3831; 4335 |
| MC1R | Q1JUL6 | 304 | 808 | 1312; 1816; 2320; 2824; 3328; 3832; 4336 |
| MC1R | Q1JUL8 | 305 | 809 | 1313; 1817; 2321; 2825; 3329; 3833; 4337 |
| MC1R | Q1JUL9 | 306 | 810 | 1314; 1818; 2322; 2826; 3330; 3834; 4338 |
| MC1R | Q1JUM0 | 307 | 811 | 1315; 1819; 2323; 2827; 3331; 3835; 4339 |
| MC1R | Q1JUM2 | 308 | 812 | 1316; 1820; 2324; 2828; 3332; 3836; 4340 |
| MC1R | Q1JUM3 | 309 | 813 | 1317; 1821; 2325; 2829; 3333; 3837; 4341 |
| MC1R | Q1JUM4 | 310 | 814 | 1318; 1822; 2326; 2830; 3334; 3838; 4342 |
| MC1R | Q1JUM5 | 311 | 815 | 1319; 1823; 2327; 2831; 3335; 3839; 4343 |
| MC1R | Q6UR92 | 312 | 816 | 1320; 1824; 2328; 2832; 3336; 3840; 4344 |
| MC1R | Q6UR94 | 313 | 817 | 1321; 1825; 2329; 2833; 3337; 3841; 4345 |
| MC1R | Q6UR95 | 314 | 818 | 1322; 1826; 2330; 2834; 3338; 3842; 4346 |
| MC1R | Q6UR96 | 315 | 819 | 1323; 1827; 2331; 2835; 3339; 3843; 4347 |
| MC1R | Q6UR97 | 316 | 820 | 1324; 1828; 2332; 2836; 3340; 3844; 4348 |
| MC1R | Q6UR98 | 317 | 821 | 1325; 1829; 2333; 2837; 3341; 3845; 4349 |
| MC1R | Q6UR99 | 318 | 822 | 1326; 1830; 2334; 2838; 3342; 3846; 4350 |
| MC1R | Q6URA0 | 319 | 823 | 1327; 1831; 2335; 2839; 3343; 3847; 4351 |
| MC1R | Q86YW1 | 320 | 824 | 1328; 1832; 2336; 2840; 3344; 3848; 4352 |
| MC1R | V9Q5S2 | 321 | 825 | 1329; 1833; 2337; 2841; 3345; 3849; 4353 |
| MC1R | V9Q671 | 322 | 826 | 1330; 1834; 2338; 2842; 3346; 3850; 4354 |
| MC1R | V9Q783 | 323 | 827 | 1331; 1835; 2339; 2843; 3347; 3851; 4355 |
| MC1R | V9Q7F1 | 324 | 828 | 1332; 1836; 2340; 2844; 3348; 3852; 4356 |
| MC1R | V9Q8N1 | 325 | 829 | 1333; 1837; 2341; 2845; 3349; 3853; 4357 |
| MC1R | V9Q977 | 326 | 830 | 1334; 1838; 2342; 2846; 3350; 3854; 4358 |
| MC1R | V9Q9P5 | 327 | 831 | 1335; 1839; 2343; 2847; 3351; 3855; 4359 |
| MC1R | V9Q9R8 | 328 | 832 | 1336; 1840; 2344; 2848; 3352; 3856; 4360 |
| MC1R | V9QAE0 | 329 | 833 | 1337; 1841; 2345; 2849; 3353; 3857; 4361 |
| MC1R | V9QAR2 | 330 | 834 | 1338; 1842; 2346; 2850; 3354; 3858; 4362 |
| MC1R | V9QAW3 | 331 | 835 | 1339; 1843; 2347; 2851; 3355; 3859; 4363 |
| MC1R | V9QB02 | 332 | 836 | 1340; 1844; 2348; 2852; 3356; 3860; 4364 |
| MC1R | V9QB58 | 333 | 837 | 1341; 1845; 2349; 2853; 3357; 3861; 4365 |
| MC1R | V9QBY6 | 334 | 838 | 1342; 1846; 2350; 2854; 3358; 3862; 4366 |
| MC1R | V9QC17 | 335 | 839 | 1343; 1847; 2351; 2855; 3359; 3863; 4367 |
| MC1R | V9QC66 | 336 | 840 | 1344; 1848; 2352; 2856; 3360; 3864; 4368 |
| MC1R | V9QCQ4 | 337 | 841 | 1345; 1849; 2353; 2857; 3361; 3865; 4369 |
| MC1R | V9QDF4 | 338 | 842 | 1346; 1850; 2354; 2858; 3362; 3866; 4370 |
| MC1R | V9QDN7 | 339 | 843 | 1347; 1851; 2355; 2859; 3363; 3867; 4371 |
| MC1R | V9QDQ6 | 340 | 844 | 1348; 1852; 2356; 2860; 3364; 3868; 4372 |
| CSF1 | P09603 | 341 | 845 | 1349; 1853; 2357; 2861; 3365; 3869; 4373 |
| MSLN | Q13421 | 342 | 846 | 1350; 1854; 2358; 2862; 3366; 3870; 4374 |
| MITF | O75030-8 | 343 | 847 | 1351; 1855; 2359; 2863; 3367; 3871; 4375 |
| MITF | O75030-9 | 344 | 848 | 1352; 1856; 2360; 2864; 3368; 3872; 4376 |
| MITF | O75030 | 345 | 849 | 1353; 1857; 2361; 2865; 3369; 3873; 4377 |
| MMP11 | B3KQS8 | 346 | 850 | 1354; 1858; 2362; 2866; 3370; 3874; 4378 |
| MMP7 | P09237 | 347 | 851 | 1355; 1859; 2363; 2867; 3371; 3875; 4379 |
| MUC1 | AAA60019 | 348 | 852 | 1356; 1860; 2364; 2868; 3372; 3876; 4380 |
| MUC1 | NP_116242 | 349 | 853 | 1357; 1861; 2365; 2869; 3373; 3877; 4381 |
| TRAPPC1 | Q9Y5R8 | 350 | 854 | 1358; 1862; 2366; 2870; 3374; 3878; 4382 |
| MYCN | P04198 | 351 | 855 | 1359; 1863; 2367; 2871; 3375; 3879; 4383 |
| MYO1A | Q9UBC5 | 352 | 856 | 1360; 1864; 2368; 2872; 3376; 3880; 4384 |
| MYO1B | O43795 | 353 | 857 | 1361; 1865; 2369; 2873; 3377; 3881; 4385 |
| MYO1C | O00159 | 354 | 858 | 1362; 1866; 2370; 2874; 3378; 3882; 4386 |
| MYO1D | O94832 | 355 | 859 | 1363; 1867; 2371; 2875; 3379; 3883; 4387 |
| MYO1E | Q12965 | 356 | 860 | 1364; 1868; 2372; 2876; 3380; 3884; 4388 |
| MYO1F | O00160 | 357 | 861 | 1365; 1869; 2373; 2877; 3381; 3885; 4389 |
| MYO1G | B0I1T2 | 358 | 862 | 1366; 1870; 2374; 2878; 3382; 3886; 4390 |
| MYO1H | NP_001094891 | 359 | 863 | 1367; 1871; 2375; 2879; 3383; 3887; 4391 |
| MGAT5B | Q3V5L5 | 360 | 864 | 1368; 1872; 2376; 2880; 3384; 3888; 4392 |
| VENTXP1 | 10790436 | 361 | 865 | 1369; 1873; 2377; 2881; 3385; 3889; 4393 |
| PAPOLG | Q9BWT3 | 362 | 866 | 1370; 1874; 2378; 2882; 3386; 3890; 4394 |
| NFYC | Q13952 | 363 | 867 | 1371; 1875; 2379; 2883; 3387; 3891; 4395 |
| ANO7 | Q6IWH7 | 364 | 868 | 1372; 1876; 2380; 2884; 3388; 3892; 4396 |
| NPM1 | P0G748 | 365 | 869 | 1373; 1877; 2381; 2885; 3389; 3893; 4397 |
| NRCAM | Q92823 | 366 | 870 | 1374; 1878; 2382; 2886; 3390; 3894; 4398 |
| ENO2 | P09104 | 367 | 871 | 1375; 1879; 2383; 2887; 3391; 3895; 4399 |
| NUF2 | Q9BZD4 | 368 | 872 | 1376; 1880; 2384; 2888; 3392; 3896; 4400 |
| CTAG1A | P78358 | 369 | 873 | 1377; 1881; 2385; 2889; 3393; 3897; 4401; 4586 |
| GPR143 | P51810 | 370 | 874 | 1378; 1882; 2386; 2890; 3394; 3898; 4402 |
| OGT | O15294 | 371 | 875 | 1379; 1883; 2387; 2891; 3395; 3899; 4403 |
| OS9 | B4DH11 | 372 | 876 | 1380; 1884; 2388; 2892; 3396; 3900; 4404 |
| OS9 | B4E321 | 373 | 877 | 1381; 1885; 2389; 2893; 3397; 3901; 4405 |
| OS9 | B7Z8E7 | 374 | 878 | 1382; 1886; 2390; 2894; 3398; 3902; 4406 |
| OS9 | Q13438 | 375 | 879 | 1383; 1887; 2391; 2895; 3399; 3903; 4407 |
| BGLAP | P02818 | 376 | 880 | 1384; 1888; 2392; 2896; 3400; 3904; 4408 |
| SPP1 | A0A024RDE2 | 377 | 881 | 1385; 1889; 2393; 2897; 3401; 3905; 4409 |
| SPP1 | A0A024RDE6 | 378 | 882 | 1386; 1890; 2394; 2898; 3402; 3906; 4410 |
| SPP1 | A0A024RDJ0 | 379 | 883 | 1387; 1891; 2395; 2899; 3403; 3907; 4411 |
| SPP1 | B7Z351 | 380 | 884 | 1388; 1892; 2396; 2900; 3404; 3908; 4412 |
| SPP1 | F2YQ21 | 381 | 885 | 1389; 1893; 2397; 2901; 3405; 3909; 4413 |
| SPP1 | P10451 | 382 | 886 | 1390; 1894; 2398; 2902; 3406; 3910; 4414 |
| TP53 | P04637 | 383 | 887 | 1391; 1895; 2399; 2903; 3407; 3911; 4415 |
| PAGE4 | O60829 | 384 | 888 | 1392; 1896; 2400; 2904; 3408; 3912; 4416 |
| SERPINE1 | P05121 | 385 | 889 | 1393; 1897; 2401; 2905; 3409; 3913; 4417 |
| SERPINB2 | P05120 | 386 | 890 | 1394; 1898; 2402; 2906; 3410; 3914; 4418 |
| REG3A | Q06141 | 387 | 891 | 1395; 1899; 2403; 2907; 3411; 3915; 4419 |
| PAP | Q53S56 | 388 | 892 | 1396; 1900; 2404; 2908; 3412; 3916; 4420 |
| PATE1 | Q8WXA2 | 389 | 893 | 1397; 1901; 2405; 2909; 3413; 3917; 4421 |
| PAX3 | P23760 | 390 | 894 | 1398; 1902; 2406; 2910; 3414; 3918; 4422 |
| PAX5 | Q02548 | 391 | 895 | 1399; 1903; 2407; 2911; 3415; 3919; 4423 |
| CD274 | Q9NZQ7 | 392 | 896 | 1400; 1904; 2408; 2912; 3416; 3920; 4424 |
| PDCD1 | Q15116 | 393 | 897 | 1401; 1905; 2409; 2913; 3417; 3921; 4425 |
| SPDEF | O95238 | 394 | 898 | 1402; 1906; 2410; 2914; 3418; 3922; 4426 |
| PECAM1 | P16284 | 395 | 899 | 1403; 1907; 2411; 2915; 3419; 3923; 4427 |
| BCAN | Q96GW7 | 396 | 900 | 1404; 1908; 2412; 2916; 3420; 3924; 4428 |
| PDGFRB | P09619 | 397 | 901 | 1405; 1909; 2413; 2917; 3421; 3925; 4429 |
| PIM1 | A0A024RD25 | 398 | 902 | 1406; 1910; 2414; 2918; 3422; 3926; 4430 |
| PIN1P1 | O15428 | 399 | 903 | 1407; 1911; 2415; 2919; 3423; 3927; 4431 |
| PIN1 | Q13526 | 400 | 904 | 1408; 1912; 2416; 2920; 3424; 3928; 4432 |
| PIN1 | Q49AR7 | 401 | 905 | 1409; 1913; 2417; 2921; 3425; 3929; 4433 |
| PLAC1 | Q9HBJ0 | 402 | 906 | 1410; 1914; 2418; 2922; 3426; 3930; 4434 |
| PMEL | P40967 | 403 | 907 | 1411; 1915; 2419; 2923; 3427; 3931; 4435; 4591 |
| PML | P29590 | 404 | 908 | 1412; 1916; 2420; 2924; 3428; 3932; 4436 |
| POTEF | A5A3E0 | 405 | 909 | 1413; 1917; 2421; 2925; 3429; 3933; 4437 |
| POTED | Q86YR6 | 406 | 910 | 1414; 1918; 2422; 2926; 3430; 3934; 4438 |
| PRAME | A0A024R1E6 | 407 | 911 | 1415; 1919; 2423; 2927; 3431; 3935; 4439 |
| PRAME | P78395 | 408 | 912 | 1416; 1920; 2424; 2928; 3432; 3936; 4440 |
| PRDX5 | P30044 | 409 | 913 | 1417; 1921; 2425; 2929; 3433; 3937; 4441 |
| PRM2 | P04554 | 410 | 914 | 1418; 1922; 2426; 2930; 3434; 3938; 4442 |
| SLC45A3 | Q96JT2 | 411 | 915 | 1419; 1923; 2427; 2931; 3435; 3939; 4443 |
| PRTN3 | D6CHE9 | 412 | 916 | 1420; 1924; 2428; 2932; 3436; 3940; 4444 |
| PRTN3 | P24158 | 413 | 917 | 1421; 1925; 2429; 2933; 3437; 3941; 4445 |
| NPEPPS | P55786 | 414 | 918 | 1422; 1926; 2430; 2934; 3438; 3942; 4446 |
| PSMB9 | P28065 | 415 | 919 | 1423; 1927; 2431; 2935; 3439; 3943; 4447 |
| PSCA | D3DWI6 | 416 | 920 | 1424; 1928; 2432; 2936; 3440; 3944; 4448 |
| PSCA | O43653 | 417 | 921 | 1425; 1929; 2433; 2937; 3441; 3945; 4449 |
| OR51E2 | Q9H255 | 418 | 922 | 1426; 1930; 2434; 2938; 3442; 3946; 4450 |
| FOLH1 | Q04609 | 419 | 923 | 1427; 1931; 2435; 2939; 3443; 3947; 4451; 4589 |
| PTPRC | NP_002829 | 420 | 924 | 1428; 1932; 2436; 2940; 3444; 3948; 4452 |
| RAB8A | PG1006 | 421 | 925 | 1429; 1933; 2437; 2941; 3445; 3949; 4453 |
| MOK | Q9UQ07 | 422 | 926 | 1430; 1934; 2438; 2942; 3446; 3950; 4454 |
| RARA | P10276 | 423 | 927 | 1431; 1935; 2439; 2943; 3447; 3951; 4455 |
| HRAS | P01112 | 424 | 928 | 1432; 1936; 2440; 2944; 3448; 3952; 4456 |
| KRAS | P01116 | 425 | 929 | 1433; 1937; 2441; 2945; 3449; 3953; 4457 |
| NRAS | P01111 | 426 | 930 | 1434; 1938; 2442; 2946; 3450; 3954; 4458 |
| RGS5 | O15539 | 427 | 931 | 1435; 1939; 2443; 2947; 3451; 3955; 4459 |
| HMMR | O75330 | 428 | 932 | 1436; 1940; 2444; 2948; 3452; 3956; 4460 |
| RHOC | P08134 | 429 | 933 | 1437; 1941; 2445; 2949; 3453; 3957; 4461 |
| RPSA | P08865 | 430 | 934 | 1438; 1942; 2446; 2950; 3454; 3958; 4462 |
| SFMBT1 | Q9UHJ3 | 431 | 935 | 1439; 1943; 2447; 2951; 3455; 3959; 4463 |
| DCDC2 | Q9UHG0 | 432 | 936 | 1440; 1944; 2448; 2952; 3456; 3960; 4464 |
| RUNX1 | Q01196 | 433 | 937 | 1441; 1945; 2449; 2953; 3457; 3961; 4465 |
| HEL-S-100 | V9HW39 | 434 | 938 | 1442; 1946; 2450; 2954; 3458; 3962; 4466 |
| SAGE1 | Q9NXZ1 | 435 | 939 | 1443; 1947; 2451; 2955; 3459; 3963; 4467 |
| SART1 | O43290 | 436 | 940 | 1444; 1948; 2452; 2956; 3460; 3964; 4468 |
| DSE | Q9UL01 | 437 | 941 | 1445; 1949; 2453; 2957; 3461; 3965; 4469 |
| SART3 | Q15020 | 438 | 942 | 1446; 1950; 2454; 2958; 3462; 3966; 4470 |
| FAP | Q12884 | 439 | 943 | 1447; 1951; 2455; 2959; 3463; 3967; 4471 |
| SERPINB5 | P36952 | 440 | 944 | 1448; 1952; 2456; 2960; 3464; 3968; 4472 |
| ST6GALNAC6 | Q969X2 | 441 | 945 | 1449; 1953; 2457; 2961; 3465; 3969; 4473 |
| ST8SIA1 | Q92185 | 442 | 946 | 1450; 1954; 2458; 2962; 3466; 3970; 4474 |
| ST3GAL5 | Q9UNP4 | 443 | 947 | 1451; 1955; 2459; 2963; 3467; 3971; 4475 |
| SIRT2 | A0A024R0G8 | 444 | 948 | 1452; 1956; 2460; 2964; 3468; 3972; 4476 |
| SIRT2 | Q8IXJ6 | 445 | 949 | 1453; 1957; 2461; 2965; 3469; 3973; 4477 |
| S0X10 | P56693 | 446 | 950 | 1454; 1958; 2462; 2966; 3470; 3974; 4478 |
| SPA17 | Q15506 | 447 | 951 | 1455; 1959; 2463; 2967; 3471; 3975; 4479 |
| SPANXA1 | Q9NS26 | 448 | 952 | 1456; 1960; 2464; 2968; 3472; 3976; 4480 |
| SPANXN3 | Q5MJ09 | 449 | 953 | 1457; 1961; 2465; 2969; 3473; 3977; 4481 |
| SSX1 | QI6384 | 450 | 954 | 1458; 1962; 2466; 2970; 3474; 3978; 4482 |
| SSX2 | Q16385 | 451 | 955 | 1459; 1963; 2467; 2971; 3475; 3979; 4483 |
| SSX3 | Q99909 | 452 | 956 | 1460; 1964; 2468; 2972; 3476; 3980; 4484 |
| SSX4 | O60224 | 453 | 957 | 1461; 1965; 2469; 2973; 3477; 3981; 4485 |
| SULT1A1 | P50225 | 454 | 958 | 1462; 1966; 2470; 2974; 3478; 3982; 4486 |
| STAG2 | Q8N3U4-2 | 455 | 959 | 1463; 1967; 2471; 2975; 3479; 3983; 4487 |
| STEAP2 | Q8NFT2 | 456 | 960 | 1464; 1968; 2472; 2976; 3480; 3984; 4488 |
| STEAP1 | A0A024RA63 | 457 | 961 | 1465; 1969; 2473; 2977; 3481; 3985; 4489 |
| STEAP1 | Q9UHE8 | 458 | 962 | 1466; 1970; 2474; 2978; 3482; 3986; 4490 |
| BIRC5 | O15392-2 | 459 | 963 | 1467; 1971; 2475; 2979; 3483; 3987; 4491 |
| BIRC5 | O15392 | 460 | 964 | 1468; 1972; 2476; 2980; 3484; 3988; 4492 |
| SYCP1 | A0A024R0I2 | 461 | 965 | 1469; 1973; 2477; 2981; 3485; 3989; 4493 |
| SYCP1 | B7ZLS9 | 462 | 966 | 1470; 1974; 2478; 2982; 3486; 3990; 4494 |
| SYCP1 | Q15431 | 463 | 967 | 1471; 1975; 2479; 2983; 3487; 3991; 4495 |
| SYCP1 | Q3MHC4 | 464 | 968 | 1472; 1976; 2480; 2984; 3488; 3992; 4496 |
| SYT-SSX1 | A4PIV7 | 465 | 969 | 1473; 1977; 2481; 2985; 3489; 3993; 4497 |
| SYT-SSX1 | A4PIV8 | 466 | 970 | 1474; 1978; 2482; 2986; 3490; 3994; 4498 |
| SYT-SSX2 | A4PIV9 | 467 | 971 | 1475; 1979; 2483; 2987; 3491; 3995; 4499 |
| SYT-SSX2 | A4PIW0 | 468 | 972 | 1476; 1980; 2484; 2988; 3492; 3996; 4500 |
| TARP | Q0VGM3 | 469 | 973 | 1477; 1981; 2485; 2989; 3493; 3997; 4501 |
| TCRg | A2JGV3 | 470 | 974 | 1478; 1982; 2486; 2990; 3494; 3998; 4502 |
| GTF2A1 | P52655 | 471 | 975 | 1479; 1983; 2487; 2991; 3495; 3999; 4503 |
| TGFB1 | P01137 | 472 | 976 | 1480; 1984; 2488; 2992; 3496; 4000; 4504 |
| TGFBR2 | P37173 | 473 | 977 | 1481; 1985; 2489; 2993; 3497; 4001; 4505 |
| TGM4 | B2R7D1 | 474 | 978 | 1482; 1986; 2490; 2994; 3498; 4002; 4506 |
| TEK | Q02763 | 475 | 979 | 1483; 1987; 2491; 2995; 3499; 4003; 4507 |
| TKTL1 | P51854 | 476 | 980 | 1484; 1988; 2492; 2996; 3500; 4004; 4508 |
| TPI1 | P60174 | 477 | 981 | 1485; 1989; 2493; 2997; 3501; 4005; 4509 |
| TRGV11 | Q99601 | 478 | 982 | 1486; 1990; 2494; 2998; 3502; 4006; 4510 |
| LOC402482 | A4D1X2 | 479 | 983 | 1487; 1991; 2495; 2999; 3503; 4007; 4511 |
| TRGV9 | Q99603 | 480 | 984 | 1488; 1992; 2496; 3000; 3504; 4008; 4512 |
| TRGV9 | Q99604 | 481 | 985 | 1489; 1993; 2497; 3001; 3505; 4009; 4513 |
| TRPC1 | P48995 | 482 | 986 | 1490; 1994; 2498; 3002; 3506; 4010; 4514 |
| TRPM8 | Q7Z2W7 | 483 | 987 | 1491; 1995; 2499; 3003; 3507; 4011; 4515 |
| TSGA10 | Q9BZW7 | 484 | 988 | 1492; 1996; 2500; 3004; 3508; 4012; 4516 |
| TSPY1 | Q01534 | 485 | 989 | 1493; 1997; 2501; 3005; 3509; 4013; 4517 |
| TRGV3 | M13231.1 | 486 | 990 | 1494; 1998; 2502; 3006; 3510; 4014; 4518 |
| TEX101 | Q9BY14-2 | 487 | 991 | 1495; 1999; 2503; 3007; 3511; 4015; 4519 |
| TYR | A0A024DBG7 | 488 | 992 | 1496; 2000; 2504; 3008; 3512; 4016; 4520 |
| TYR | L8B082 | 489 | 993 | 1497; 2001; 2505; 3009; 3513; 4017; 4521 |
| TYR | L8B086 | 490 | 994 | 1498; 2002; 2506; 3010; 3514; 4018; 4522 |
| TYR | L8B0B9 | 491 | 995 | 1499; 2003; 2507; 3011; 3515; 4019; 4523 |
| TRP-2 | O75767 | 492 | 996 | 1500; 2004; 2508; 3012; 3516; 4020; 4524 |
| TYR | P14679 | 493 | 997 | 1501; 2005; 2509; 3013; 3517; 4021; 4525 |
| TYR | U3M8N0 | 494 | 998 | 1502; 2006; 2510; 3014; 3518; 4022; 4526 |
| TYR | U3M9D5 | 495 | 999 | 1503; 2007; 2511; 3015; 3519; 4023; 4527 |
| TYR | U3M9J2 | 496 | 1000 | 1504; 2008; 2512; 3016; 3520; 4024; 4528 |
| TYRP1 | P17643 | 497 | 1001 | 1505; 2009; 2513; 3017; 3521; 4025; 4529 |
| DCT | P40126 | 498 | 1002 | 1506; 2010; 2514; 3018; 3522; 4026; 4530 |
| PRAP1 | Q96NZ9 | 499 | 1003 | 1507; 2011; 2515; 3019; 3523; 4027; 4531 |
| VEGFR1 | B5A924 | 500 | 1004 | 1508; 2012; 2516; 3020; 3524; 4028; 4532 |
| WT1 | A0A0H5AUY0 | 501 | 1005 | 1509; 2013; 2517; 3021; 3525; 4029; 4533 |
| WT1 | P19544 | 502 | 1006 | 1510; 2014; 2518; 3022; 3526; 4030; 4534 |
| WT1-AS | Q06250 | 503 | 1007 | 1511; 2015; 2519; 3023; 3527; 4031; 4535 |
| XAGE1A | Q9HD64 | 504 | 1008 | 1512; 2016; 2520; 3024; 3528; 4032; 4536 |

Legend to Table 1:
Column ‘A’: amino acid sequence SEQ ID ND:; column ‘B’: RNA sequence SEQ ID ND: (wild type RNA); column ‘C’: RNA sequence SEQ ID ND: (modified RNA).

[0073] It is thus further preferred that the at least one coding sequence of the RNA of the present invention encodes a tumor antigen, or a fragment or variant thereof, wherein the tumor antigen is an antigen selected from the antigens listed in Table 1, preferably an antigen selected from the antigens defined by the database accession number provided under the respective column in Table 1. More preferably, the at least one coding sequence of the RNA according to the invention comprises or consists any one of the nucleic acid sequences provided in Table 1, or a fragment or variant of any one of these sequences, preferably as defined herein.

[0074] According to a preferred embodiment, the present invention concerns an RNA comprising at least one coding sequence encoding a tumor antigen, or a fragment or variant of a tumor antigen, wherein the tumor antigen preferably comprises or consists of any one of the amino acid sequences defined in the third column (column ‘A’) of Table 1, or a fragment or variant of any one of these sequences. In other words, the at least one coding sequence preferably encodes a tumor antigen comprising or consisting of an amino acid sequence selected from the group consisting of SEQ ID NOs: 1-504, or a fragment or variant of any one of said amino acid sequences.

[0075] The at least one coding sequence of the RNA according to the invention preferably comprises a nucleic acid sequence encoding a full-length tumor antigen or a full-length variant of a tumor antigen as defined herein. The term ‘full-length (tumor) antigen’ or ‘full-length variant of a (tumor) antigen’ as used herein typically refers to an antigen that substantially comprises the entire amino acid sequence of the naturally occurring tumor antigen. As used herein, the term ‘full-length (tumor) antigen’ preferably relates to the full-length sequence of an antigen indicated in Table I. More preferably, the term ‘full-length (tumor) antigen’ preferably refers to an amino acid sequence as defined by any one of the SEQ ID NO:'s listed under the third column (‘A’) of Table I or to an amino acid provided in the database under the respective database accession number.

[0076] Alternatively, the at least one coding sequence of the RNA according to the invention may also comprise a nucleic acid sequence encoding a fragment of a tumor antigen or a fragment of a variant of a tumor antigen as defined herein.

[0077] In the context of the present invention, a ‘fragment’ of an antigen or of a variant thereof may comprise a sequence of an antigen or of a variant thereof as defined above, which is, with regard to its amino acid sequence (or its encoded nucleic acid sequence), N-terminally, C-terminally and/or intrasequentially truncated compared to the amino acid sequence of the naturally occurring protein or a variant thereof (or its encoded nucleic acid sequence). Such truncation may thus occur either on the amino acid level or on the nucleic acid level, respectively. A sequence identity with respect to such a fragment as defined herein therefore preferably refers to the entire antigen or a variant thereof as defined herein or to the entire (coding) nucleic acid sequence of such an antigen or of a variant thereof.

[0078] A fragment of an antigen or of a variant thereof in the context of the present invention may furthermore comprise a sequence of an antigen or of a variant thereof as defined herein, which has a length of about 5 to about 20 or even more amino acids and which is preferably processed and presented by an MHC complex. Preferably, a fragment of an antigen or of a variant thereof in the context of the present invention may furthermore comprise a sequence of an antigen or of a variant thereof as defined above, which has a length of about 6 to about 20 or even more amino acids, e.g. a fragment as processed and presented by MHC class I molecules, preferably having a length of about 8 to about 10 amino acids, e.g. 8, 9, or 10, (or even 5, 7, 11, or 12 amino acids), or a fragment as processed and presented by MHC class II molecules, preferably having a length of about 13 or more amino acids, e.g. 13, 14, 15, 15, 17, 18, 19, 20 or even more amino acids, wherein the fragment may be selected from any part of the amino acid sequence. These fragments are typically recognized by T-cells in the form of a complex consisting of the peptide fragment and an MHC molecule, i.e. the fragments are typically not recognized in their native form.

[0079] Preferably, a fragment or a variant of an antigen is a functional fragment or a functional variant, which comprises at least one functional epitope of the corresponding antigen capable of inducing an adaptive immune response in a subject. Such a functional epitope may be a confirmed epitope by any biological assay or a predicted epitope by any possibility to predict epitopes (e.g. computer analysis of the antigen).

[0080] A fragment of an antigen or of a variant thereof as defined herein preferably comprises at least one epitope of the antigen or of the variant thereof. An epitope (also called “antigen determinant”) in the context of the present invention is typically a fragment located on the outer surface of a (native) antigen or of a variant thereof as defined herein, preferably having 5 to 20 amino acids, more preferably having 5 to 15 or 5 to 12 amino acids, even more preferably having 6 to 9 amino acids, which may be recognized by antibodies or B-cell receptors, i.e. in their native form. Such an epitope of an antigen or of a variant thereof may furthermore be selected from any of the herein mentioned variants of such antigens. In this context, an antigenic determinant can be a conformational or discontinous epitope, which is composed of segments of an antigen or of a variant thereof as defined herein that are discontinuous in the amino acid sequence of the antigen or of the variant as defined herein but are brought together in the three-dimensional structure. Alternatively, an antigenic determinant may also be a continuous or linear epitope, which is composed of a single polypeptide chain.

[0081] According to a preferred embodiment of the invention, the RNA comprises at least one coding sequence encoding a variant of a tumor antigen as defined herein, or a fragment of a variant of a tumor antigen.

[0082] In certain embodiments of the present invention, a ‘variant’ of a tumor antigen or a fragment thereof as defined herein may be encoded by the RNA comprising at least one coding sequence as defined herein, wherein the amino acid sequence encoded by the at least one coding sequence differs in at least one amino acid residue from the naturally occurring amino acid sequence. In this context, the ‘change’ in at least one amino acid residue may consist, for example, in a mutation of an amino acid residue to another amino acid, a deletion or an insertion. More preferably, the term ‘variant’ as used in the context of the amino acid sequence encoded by the at least one coding sequence of the RNA according to the invention comprises any homolog, isoform or transcript variant of the tumor antigen or a fragment thereof as defined herein, wherein the homolog, isoform or transcript variant is preferably characterized by a degree of identity or homology, respectively, as defined herein.

[0083] Preferably, a variant of a tumor antigen or a fragment thereof may be encoded by the RNA comprising at least one coding sequence as defined herein, wherein at least one amino acid residue of the amino acid sequence encoded by the at least one coding sequence is substituted. Substitutions, wherein amino acids, which originate from the same class, are exchanged for one another, are called conservative substitutions. In particular, these are amino acids having aliphatic side chains, positively or negatively charged side chains, aromatic groups in the side chains or amino acids, the side chains of which can form hydrogen bridges, e.g. side chains which have a hydroxyl function. By conservative constitution, e.g. an amino acid having a polar side chain may be replaced by another amino acid having a corresponding polar side chain, or, for example, an amino acid characterized by a hydrophobic side chain may be substituted by another amino acid having a corresponding hydrophobic side chain (e.g. serine (threonine) by threonine (serine) or leucine (isoleucine) by isoleucine (leucine). In a preferred embodiment, a variant of a tumor antigen or a fragment thereof may be encoded by the RNA according to the invention, wherein at least one amino acid residue of the amino acid sequence encoded by the at least one coding sequence comprises at least one conservative substitution compared to the respective naturally occurring sequence. These amino acid sequences as well as their encoding nucleic acid sequences in particular are comprised by the term ‘variant’ as defined herein.

[0084] Insertions, deletions and/or non-conservative substitutions are also possible, in particular, at those sequence positions, which cause no modification to the three-dimensional structure or do not affect the binding region. Modifications to a three-dimensional structure by insertion(s) or deletion(s) can easily be determined e.g. using CD spectra (circular dichroism spectra) (Limy, 1985, Absorption, Circular Dichroism and ORD of Polypeptides, in: Modern Physical Methods in Biochemistry, Neuberger et al. (ed.), Elsevier, Amsterdam).

[0085] In order to determine the percentage, to which two sequences (nucleic acid sequences, e.g. RNA or mRNA sequences as defined herein, or amino acid sequences, preferably the amino acid sequence encoded by the RNA according to the invention) are identical, the sequences can be aligned in order to be subsequently compared to one another. For this purpose, e.g. gaps can be inserted into the sequence of the first sequence and the component at the corresponding position of the second sequence can be compared. If a position in the first sequence is occupied by the same component as is the case at a corresponding position in the second sequence, the two sequences are identical at this position. The percentage, to which two sequences are identical, is a function of the number of identical positions divided by the total number of positions. The percentage, to which two sequences are identical, can be determined using a mathematical algorithm. A preferred, but not limiting, example of a mathematical algorithm, which can be used is the algorithm of Karlin et al. (1993), PNAS USA, 90:5873-5877 or Altschul et al. (1997), Nucleic Acids Res., 25:3389-3402. Such an algorithm is integrated, for example, in the BLAST program. Sequences, which are identical to the sequences of the present invention to a certain extent, can be identified by this program.

[0086] A fragment of a tumor antigen or a variant thereof encoded by the at least one coding sequence of the RNA according to the invention may typically comprise an amino acid sequence having a sequence identity of at least 5%, 10%, 20%, 30%, 40%, 50%, 60%, 70%, 80%, 85%, 86%, 87%, 88%, 89%, 90%, 91%, 92%, 93%, 94%, 95%, 96%, 97%, 98%, or 99%, preferably of at least 70%, more preferably of at least 80%, even more preferably at least 85%, even more preferably of at least 90% and most preferably of at least 95% or even 97%, with an amino acid sequence of the respective naturally occurring full-length antigen or a variant thereof.

[0087] More preferably, a fragment of a tumor antigen or a variant thereof encoded by the at least one coding sequence of the RNA according to the invention may typically comprise or consist of an amino acid sequence having a sequence identity of at least 5%, 10%, 20%, 30%, 40%, 50%, 60%, 70%, 80%, 85%, 86%, 87%, 88%, 89%, 90%, 91%, 92%, 93%, 94%, 95%, 96%, 97%, 98%, or 99%, preferably of at least 70%, more preferably of at least 80%, even more preferably at least 85%, even more preferably of at least 90% and most preferably of at least 95% or even 97%, with an amino acid sequence of an antigen selected from the antigens indicated in Table I or a variant thereof. Even more preferably, a fragment of a tumor antigen or a variant thereof encoded by the at least one coding sequence of the RNA according to the invention may typically comprise or consist of an amino acid sequence having a sequence identity of at least 5%, 10%, 20%, 30%, 40%, 50%, 60%, 70%, 80%, 85%, 85%, 87%, 88%, 89%, 90%, 91%, 92%, 93%, 94%, 95%, 96%, 97%, 98%, or 99%, preferably of at least 70%, more preferably of at least 80%, even more preferably at least 85%, even more preferably of at least 90% and most preferably of at least 95% or even 97%, with any one of the amino acid sequences defined in the third column (column ‘A’) of Table 1, or a fragment or variant of any one of these sequences.

[0088] Most preferably, a fragment of a tumor antigen or a variant thereof encoded by the at least one coding sequence of the RNA according to the invention typically comprises or consists of an amino acid sequence having a sequence identity of at least 80% with any one of the amino acid sequences defined in the third column (column ‘A’) of Table 1, or a fragment or variant of any one of these sequences.

[0089] Preferably, the tumor antigen encoded by the at least one coding sequence of the RNA is an antigen as defined herein, which is encoded by a nucleic acid sequence comprising or consisting of any one of the nucleic acid sequences defined in Table 1, preferably in the fourth or fifth column (column ‘B’ or ‘C’, respectively) of Table 1, or a fragment or variant of any one of these sequences. In other words, the tumor antigen encoded by the at least one coding sequence of the RNA is preferably an antigen as defined herein, which is preferably encoded by a nucleic acid sequence comprising or consisting of a nucleic acid sequence selected from the group consisting of SEQ ID NOs: 505-4033; 4551-4591 or a fragment or variant of any of these sequence.

[0090] In a preferred embodiment, the present invention thus provides an RNA comprising at least one coding sequence, wherein the coding sequence comprises or consists any one of the nucleic acid sequences defined in Table I, preferably in the fourth or fifth column (column ‘B’ or ‘C’, respectively) of Table 1, or a fragment or variant of any one of these sequences.

[0091] In certain embodiments, the RNA according to the invention, preferably the at least one coding sequence of the RNA according to the invention, may comprise or consist of a fragment of a nucleic acid sequence encoding a tumor antigen or a fragment or variant thereof as defined herein. Preferably, the at least one coding sequence of the RNA according to the invention comprises or consists of a fragment, preferably as defined herein, of any one of the nucleic acid sequences defined in Table 1, preferably in the fourth or fifth column (column ‘B’ or ‘C’, respectively) of Table I, or a fragment or variant of any one of these sequences.

[0092] In this context, a ‘fragment of a nucleic acid sequence’ is preferably a nucleic acid sequence encoding a fragment of a tumor antigen or of a variant thereof as described herein. More preferably, the expression ‘fragment of a nucleic acid sequence’ refers to a nucleic acid sequence having a sequence identity of at least 5%, 10%, 20%, 30%, 40%, 50%, 60%, 70%, 80%, 85%, 8G %, 87%, 88%, 89%, 90%, 91%, 92%, 93%, 94%, 95%, 96%, 97%, 98%, or 99%, preferably of at least 70%, more preferably of at least 80%, even more preferably at least 85%, even more preferably of at least 90% and most preferably of at least 95% or even 97%, with a respective full-length nucleic acid sequence.

[0093] In another preferred embodiment, the RNA according to the invention, preferably the at least one coding sequence of the RNA according to the invention, may comprise or consist of a variant of a nucleic acid sequence as defined herein, preferably of a nucleic acid sequence encoding a tumor antigen or a fragment thereof as defined herein. The expression ‘variant of a nucleic acid sequence’ as used herein in the context of a nucleic acid sequence encoding a tumor antigen or a fragment thereof, typically refers to a nucleic acid sequence, which differs by at least one nucleic acid residue from the respective naturally occurring nucleic acid sequence encoding a tumor antigen or a fragment thereof. More preferably, the expression ‘variant of a nucleic acid sequence’ refers to a nucleic acid sequence having a sequence identity of at least 5%, 10%, 20%, 30%, 40%, 50%, 60%, 70%, 80%, 85%, 86%, 87%, 88%, 89%, 90%, 91%, 92%, 93%, 94%, 95%, 96%, 97%, 98%, or 99%, preferably of at least 70%, more preferably of at least 80%, even more preferably at least 85%, even more preferably of at least 90% and most preferably of at least 95% or even 97%, with a nucleic acid sequence, from which it is derived.

[0094] Preferably, the RNA according to the invention, more preferably the at least one coding sequence of the RNA according to the invention, encodes a variant of a tumor antigen or a fragment thereof, preferably as defined herein.

[0095] In a preferred embodiment, the RNA according to the invention, more preferably the at least one coding sequence of the RNA according to the invention, comprises or consists of a variant of a nucleic acid sequence encoding a tumor antigen or a fragment thereof as defined herein, wherein the variant of the nucleic acid sequence encodes an amino acid sequence comprising at least one conservative substitution of an amino acid residue.

[0096] In another embodiment, the RNA according to the invention, more preferably the at least one coding sequence of the RNA according to the invention, comprises or consists of a variant of a nucleic acid sequence encoding a tumor antigen or a fragment thereof as defined herein, wherein the nucleic acid sequence of the variant differs from the respective naturally occurring nucleic acid sequence in at least one nucleic acid residue, preferably without resulting—due to the degenerated genetic code—in an alteration of the encoded amino acid sequence, i.e. the amino acid sequence encoded by the variant or at least part thereof may preferably not differ from the naturally occurring amino acid sequence in one or more mutation(s) within the above meaning.

[0097] Furthermore, a ‘variant’ of a nucleic acid sequence encoding a tumor antigen or a fragment or variant thereof as defined herein, may also comprise DNA sequences, which correspond to RNA sequences as defined herein and may also comprise further RNA sequences, which correspond to DNA sequences as defined herein. Those skilled in the art are familiar with the translation of an RNA sequence into a DNA sequence (or vice versa) or with the creation of the complementary strand sequence (i.e. by substitution of U residues with T residues and/or by constructing the complementary strand with respect to a given sequence).

[0098] According to a preferred embodiment, the at least one coding sequence of the RNA according to the invention comprises or consists of a nucleic acid sequence having a sequence identity of at least 5%, 10%, 20%, 30%, 40%, 50%, 60%, 70%, 80%, 85%, 86%, 87%, 88%, 89%, 90%, 91%, 92%, 93%, 94%, 95%, 96%, 97%, 98%, or 99%, preferably of at least 70%, more preferably of at least 80%, even more preferably at least 85%, even more preferably of at least 90% and most preferably of at least 95% or even 97%, with a nucleic acid sequence encoding a naturally occurring full-length tumor antigen as defined herein, or a variant thereof.

[0099] In a further preferred embodiment, the at least one coding sequence of the RNA according to the invention comprises or consists of a nucleic acid sequence identical to or having a sequence identity of at least 5%, 10%, 20%, 30%, 40%, 50%, 60%, 70%, 80%, 85%, 86%, 87%, 88%, 89%, 90%, 91%, 92%, 93%, 94%, 95%, 96%, 97%, 98%, or 99%, preferably of at least 70%, more preferably of at least 80%, even more preferably at least 85%, even more preferably of at least 90% and most preferably of at least 95% or even 97%, with any one of the nucleic acid sequences defined in Table 1, preferably in the fourth or fifth column (column ‘B’ or T′, respectively) of Table 1, or a fragment or variant thereof. According to a particularly preferred embodiment, the at least one coding sequence of the RNA according to the invention comprises or consists of a nucleic acid sequence having a sequence identity of at least 80% with any one of the nucleic acid sequences defined in Table 1, preferably in the fourth or fifth column (column ‘B’ or ‘C’, respectively) of Table 1, or a fragment or variant of any one of these sequences.

[0100] In a further preferred embodiment, the at least one coding sequence of the RNA according to the invention comprises or consists of a nucleic acid sequence having a sequence identity of at least 5%, 10%, 20%, 30%, 40%, 50%, 60%, 70%, 80%, 85%, 86%, 87%, 88%, 89%, 90%, 91%, 92%, 93%, 94%, 95%, 96%, 97%, 98%, or 99%, preferably of at least 70%, more preferably of at least 80%, even more preferably at least 85%, even more preferably of at least 90% and most preferably of at least 95% or even 97%, with any one of the nucleic acid sequences defined in the fourth (column ‘B’) of Table 1, or a fragment or variant of any one of these sequences. In other words, the at least one coding sequence of the RNA according to the invention preferably comprises or consists of a nucleic acid sequence having a sequence identity of at least 5%, 10%, 20%, 30%, 40%, 50%, 60%, 70%, 80%, 85%, 86%, 87%, 88%, 89%, 90%, 91%, 92%, 93%, 94%, 95%, 96%, 97%, 98%, or 99%, preferably of at least 70%, more preferably of at least 80%, even more preferably at least 85%, even more preferably of at least 90% and most preferably of at least 95% or even 97%, with a nucleic acid sequence selected from the group consisting of SEQ ID NOs: 505-1008; 4561-4563, or a fragment or variant of any one of said nucleic acid sequences. According to a particularly preferred embodiment, the at least one coding sequence of the RNA according to the invention comprises or consists of a nucleic acid sequence having a sequence identity of at least 80% with any one of the nucleic acid sequences defined in the fourth (column ‘B’) of Table 1, or a fragment or variant of any one of these sequences.

[0101] According to certain embodiments of the present invention, the RNA is mono-, bi-, or multicistronic, preferably as defined herein. The coding sequences in a bi- or multicistronic RNA preferably encode distinct tumor antigens as defined herein or a fragment or variant thereof. Preferably, the coding sequences encoding two or more antigens may be separated in the bi- or multicistronic RNA by at least one IRES (internal ribosomal entry site) sequence, as defined below. Thus, the term “encoding two or more antigens” may mean, without being limited thereto, that the bi- or even multicistronic RNA, may encode e.g. at least two, three, four, five, six or more (preferably different) antigens of the antigens or their fragments or variants within the definitions provided herein. More preferably, without being limited thereto, the bi- or even multicistronic mRNA, may encode, for example, at least two, three, four, five, six or more (preferably different) antigens as defined herein or their fragments or variants as defined herein. In this context, a so-called IRES (internal ribosomal entry site) sequence as defined above can function as a sole ribosome binding site, but it can also serve to provide a bi- or even multicistronic mRNA as defined above, which encodes several antigens, which are to be translated by the ribosomes independently of one another. Examples of IRES sequences, which can be used according to the invention, are those from picornaviruses (e.g. FMDV), pestiviruses (CFFV), polioviruses (PV), encephalomyocarditis viruses (ECMV), foot and mouth disease viruses (FMDV), hepatitis C viruses (HCV), classical swine fever viruses (CSFV), mouse leukoma virus (MLV), simian immunodeficiency viruses (SIV) or cricket paralysis viruses (CrPV).

[0102] According to a further embodiment the at least one coding sequence of the RNA according to the invention may encode at least two, three, four, five, six, seven, eight and more antigens (or fragments and derivatives thereof) as defined herein linked with or without an amino acid linker sequence, wherein said linker sequence can comprise rigid linkers, flexible linkers, cleavable linkers (e.g., self-cleaving peptides) or a combination thereof. Therein, the antigens may be identical or different or a combination thereof. Particular antigen/epitope combinations can be encoded by said mRNA encoding at least two antigens as explained herein (also referred to herein as ‘multi-antigen-constructs/mRNA’).

[0103] Preferably, the at least one coding sequence of the RNA according to the invention comprises at least two, three, four, five, six, seven, eight or more nucleic acid sequences identical to or having a sequence identity of at least 5%, 10%, 20%, 30%, 40%, 50%, 60%, 70%, 80%, 85%, 86%, 87%, 88%, 89%, 90%, 91%, 92%, 93%, 94%, 95%, 96%, 97%, 98%, or 99%, preferably of at least 70%, more preferably of at least 80%, even more preferably at least 85%, even more preferably of at least 90% and most preferably of at least 95% or even 97%, with any one of the nucleic acid sequences disclosed in Table 1 herein, or a fragment or variant of any one of said nucleic acid sequences.

[0104] Preferably, the RNA comprising at least one coding sequence as defined herein typically comprises a length of about 50 to about 20000, or 100 to about 20000 nucleotides, preferably of about 250 to about 20000 nucleotides, more preferably of about 500 to about 10000, even more preferably of about 500 to about 5000.

[0105] The RNA according to the invention may further be single stranded or double stranded. When provided as a double stranded RNA, the RNA according to the invention preferably comprises a sense and a corresponding antisense strand.

[0106] In a preferred embodiment, the RNA comprising at least one coding sequence as defined herein is an mRNA, a viral RNA or a replicon RNA.

[0107] According to a further embodiment, the RNA, preferably an mRNA, according to the invention is a modified RNA, preferably a modified RNA as described herein. In this context, a modification as defined herein preferably leads to a stabilization of the RNA according to the invention. More preferably, the invention thus provides a stabilized RNA comprising at least one coding sequence as defined herein.

[0108] According to one embodiment, the RNA of the present invention may thus be provided as a “stabilized mRNA”, that is to say as an RNA that is essentially resistant to in vivo degradation (e.g. by an exo- or endo-nuclease). Such stabilization can be effected, for example, by a modified phosphate backbone of the RNA of the present invention. A backbone modification in connection with the present invention is a modification in which phosphates of the backbone of the nucleotides contained in the RNA are chemically modified. Nucleotides that may be preferably used in this connection contain e.g. a phosphorothioate-modified phosphate backbone, preferably at least one of the phosphate oxygens contained in the phosphate backbone being replaced by a sulfur atom. Stabilized RNAs may further include, for example: non-ionic phosphate analogues, such as, for example, alkyl and aryl phosphonates, in which the charged phosphonate oxygen is replaced by an alkyl or aryl group, or phosphodiesters and alkylphosphotriesters, in which the charged oxygen residue is present in alkylated form. Such backbone modifications typically include, without implying any limitation, modifications from the group consisting of methylphosphonates, phosphoramidates and phosphorothioates (e.g. cytidine-5′-O-(1-thiophosphate)).

[0109] In the following, specific modifications are described, which are preferably capable of “stabilizing” the RNA as defined herein.

### Chemical Modifications:

[0110] The term “RNA modification” as used herein may refer to chemical modifications comprising backbone modifications as well as sugar modifications or base modifications.

[0111] In this context, a modified RNA as defined herein may contain nucleotide analogues/modifications, e.g. backbone modifications, sugar modifications or base modifications. A backbone modification in connection with the present invention is a modification, in which phosphates of the backbone of the nucleotides contained in an RNA as defined herein are chemically modified. A sugar modification in connection with the present invention is a chemical modification of the sugar of the nucleotides of the RNA as defined herein. Furthermore, a base modification in connection with the present invention is a chemical modification of the base moiety of the nucleotides of the RNA. In this context, nucleotide analogues or modifications are preferably selected from nucleotide analogues, which are applicable for transcription and/or translation.

### Sugar Modifications:

[0112] The modified nucleosides and nucleotides, which may be incorporated into a modified RNA as described herein, can be modified in the sugar moiety. For example, the 2′ hydroxyl group (OH) can be modified or replaced with a number of different “oxy” or “deoxy” substituents. Examples of “oxy”-2′ hydroxyl group modifications include, but are not limited to, alkoxy or aryloxy (—OR, e.g., R═H, alkyl, cycloalkyl, aryl, aralkyl, heteroaryl or sugar); polyethyleneglycols (PEG), —O(CH₂CH₂O)ₙCH₂CH₂OR; “locked” nucleic acids (LNA) in which the 2′ hydroxyl is connected, e.g., by a methylene bridge, to the 4′ carbon of the same ribose sugar; and amino groups (—O-amino, wherein the amino group, e.g., NRR, can be alkylamino, dialkylamino, heterocyclyl, arylamino, diarylamino, heteroarylamino, or diheteroaryl amino, ethylene diamine, polyamino) or aminoalkoxy.

[0113] “Deoxy” modifications include hydrogen, amino (e.g. NH₂; alkylamino, dialkylamino, heterocyclyl, arylamino, diary) amino, heteroaryl amino, diheteroaryl amino, or amino acid); or the amino group can be attached to the sugar through a linker, wherein the linker comprises one or more of the atoms C, N, and D.

[0114] The sugar group can also contain one or more carbons that possess the opposite stereochemical configuration than that of the corresponding carbon in ribose. Thus, a modified RNA can include nucleotides containing, for instance, arabinose as the sugar.

### Backbone Modifications:

[0115] The phosphate backbone may further be modified in the modified nucleosides and nucleotides, which may be incorporated into a modified RNA as described herein. The phosphate groups of the backbone can be modified by replacing one or more of the oxygen atoms with a different substituent. Further, the modified nucleosides and nucleotides can include the full replacement of an unmodified phosphate moiety with a modified phosphate as described herein. Examples of modified phosphate groups include, but are not limited to, phosphorothioate, phosphoroselenates, borano phosphates, borano phosphate esters, hydrogen phosphonates, phosphoroamidates, alkyl or aryl phosphonates and phosphotriesters. Phosphorodithioates have both non-linking oxygens replaced by sulfur. The phosphate linker can also be modified by the replacement of a linking oxygen with nitrogen (bridged phosphoroamidates), sulfur (bridged phosphorothioates) and carbon (bridged methylene-phosphonates).

### Base Modifications:

[0116] The modified nucleosides and nucleotides, which may be incorporated into a modified RNA as described herein can further be modified in the nucleobase moiety. Examples of nucleobases found in RNA include, but are not limited to, adenine, guanine, cytosine and uracil. For example, the nucleosides and nucleotides described herein can be chemically modified on the major groove face. In some embodiments, the major groove chemical modifications can include an amino group, a thiol group, an alkyl group, or a halo group.

[0117] In particularly preferred embodiments of the present invention, the nucleotide analogues/modifications are selected from base modifications, which are preferably selected from 2-amino-6-chloropurineriboside-5′-triphosphate, 2-Aminopurine-riboside-5′-triphosphate; 2-aminoadenosine-5′-triphosphate, 2′-Amino-2′-deoxycytidine-triphosphate, 2-thiocytidine-5′-triphosphate, 2-thiouridine-5′-triphosphate, 2′-Fluorothymidine-5′-triphosphate, 2′-O-Methyl-inosine-T-triphosphate 4-thiouridine-5′-triphosphate, 5-aminoallylcytidine-5′-triphosphate, 5-aminoallyluridine-5′-triphosphate, 5-bromocytidine-5′-triphosphate, 5-bromouridine-5′-triphosphate, 5-Bromo-2′-deoxycytidine-5′-triphosphate, 5-Bromo-2′-deoxyuridine-5′-triphosphate, 5-iodocytidine-5′-triphosphate, 5-Iodo-2′-deoxycytidine-5′-triphosphate, 5-iodouridine-5′-triphosphate, 5-Iodo-2′-deoxyuridine-5′-triphosphate, 5-methylcytidine-5′-triphosphate, 5-methyluridine-5′-triphosphate, 5-Propynyl-2′-deoxcytidine-5′-triphosphate, 5-Propynyl-2′-deoxyuridine-5′-triphosphate, 6-azacytidine-5′-triphosphate, 6-azauridine-5′-triphosphate, 6-chloropurineriboside-5′-triphosphate, 7-deazaadenosine-5′-triphosphate, 7-deazaguanosine-5′-triphosphate, 8-azaadenosine-5′-triphosphate, 8-azidoadenosine-5′-triphosphate, benzimidazole-riboside-5′-triphosphate, N1-methyladenosine-5′-triphosphate, N1-methylguanosine-5′-triphosphate, N6-methyladenosine-5′-triphosphate, O6-methylguanosine-5′-triphosphate, pseudouridine-5′-triphosphate, or puromycin-5′-triphosphate, xanthosine-5′-triphosphate. Particular preference is given to nucleotides for base modifications selected from the group of base-modified nucleotides consisting of 5-methylcytidine-5′-triphosphate, 7-deazaguanosine-5′-triphosphate, 5-bromocytidine-5′-triphosphate, and pseudouridine-5′-triphosphate.

[0118] In some embodiments, modified nucleosides include pyridin-4-one ribonucleoside, 5-aza-uridine, 2-thio-5-aza-uridine, 2-thiouridine, 4-thio-pseudouridine, 2-thio-pseudouridine, 5-hydroxyuridine, 3-methyluridine, 5-carboxymethyl-uridine, 1-carboxymethyl-pseudouridine, 5-propynyl-uridine, 1-propynyl-pseudouridine, 5-taurinomethyluridine, 1-taurinomethyl-pseudouridine, 5-taurinomethyl-2-thio-uridine, 1-taurinomethyl-4-thio-uridine, 5-methyl-uridine, 1-methyl-pseudouridine, 4-thio-1-methyl-pseudouridine, 2-thio-1-methyl-pseudouridine, 1-methyl-1-deaza-pseudouridine, 2-thio-1-methyl-1-deaza-pseudouridine, dihydrouridine, dihydropseudouridine, 2-thio-dihydrouridine, 2-thio-dihydropseudouridine, 2-methoxyuridine, 2-methoxy-4-thio-uridine, 4-methoxy-pseudouridine, and 4-methoxy-2-thio-pseudouridine.

[0119] In some embodiments, modified nucleosides include 5-aza-cytidine, pseudoisocytidine, 3-methyl-cytidine, N4-acetylcytidine, 5-formylcytidine, N4-methylcytidine, 5-hydroxymethylcytidine, 1-methyl-pseudoisocytidine, pyrrolo-cytidine, pyrrolo-pseudoisocytidine, 2-thio-cytidine, 2-thio-5-methyl-cytidine, 4-thio-pseudoisocytidine, 4-thio-1-methyl-pseudoisocytidine, 4-thio-1-methyl-1-deaza-pseudoisocytidine, 1-methyl-1-deaza-pseudoisocytidine, zebularine, 5-aza-zebularine, 5-methyl-zebularine, 5-aza-2-thio-zebularine, 2-thio-zebularine, 2-methoxy-cytidine, 2-methoxy-5-methyl-cytidine, 4-methoxy-pseudoisocytidine, and 4-methoxy-1-methyl-pseudoisocytidine.

[0120] In other embodiments, modified nucleosides include 2-aminopurine, 2, 6-diaminopurine, 7-deaza-adenine, 7-deaza-8-aza-adenine, 7-deaza-2-aminopurine, 7-deaza-8-aza-2-aminopurine, 7-deaza-2,5-diaminopurine, 7-deaza-8-aza-2,5-diaminopurine, 1-methyladenosine, N6-methyladenosine, N6-isopentenyladenosine, N6-(cis-hydroxyisopentenyl)adenosine, 2-methylthio-N6-(cis-hydroqisopentenyl) adenosine, N6-glycinylcarbamoyladenosine, N6-threonylcarbamoyladenosine, 2-methylthio-N6-threonyl carbamoyladenosine, N6,N6-dimethyladenosine, 7-methyladenine, 2-methylthio-adenine, and 2-methoxy-adenine.

[0121] In other embodiments, modified nucleosides include inosine, 1-methyl-inosine, wyosine, wybutosine, 7-deaza-guanosine, 7-deaza-B-aza-guanosine, 5-thio-guanosine, 5-thio-7-deaza-guanosine, 5-thio-7-deaza-8-aza-guanosine, 7-methyl-guanosine, 5-thio-7-methyl-guanosine, 7-methylinosine, 6-methoxy-guanosine, 1-methylguanosine, N2-methylguanosine, N2,N2-dimethylguanosine, 8-oxo-guanosine, 7-methyl-8-oxo-guanosine, 1-methyl-5-thio-guanosine, N2-methyl-6-thio-guanosine, and N2,N2-dimethyl-6-thio-guanosine.

[0122] In some embodiments, the nucleotide can be modified on the major groove face and can include replacing hydrogen on C-5 of uracil with a methyl group or a halo group. In specific embodiments, a modified nucleoside is 5′-O-(1-thiophosphate)-adenosine, 5′-O-(1-thiophosphate)-cytidine, 5′-O-(1-thiophosphate)-guanosine, 5′-O-(1-thiophosphate)-uridine or 5′-O-(1-thiophosphate)-pseudouridine.

[0123] In further specific embodiments, a modified RNA may comprise nucleoside modifications selected from 5-aza-cytidine, 2-thio-cytidine, α-thio-cytidine, Pseudo-iso-cytidine, 5-aminoallyl-uridine, 5-iodo-uridine, N1-methyl-pseudouridine, 5,6-dihydrouridine, α-thio-uridine, 4-thio-uridine, 6-aza-uridine, 5-hydroxy-uridine, deoxy-thymidine, 5-methyl-uridine, Pyrrolo-cytidine, inosine, α-thio-guanosine, 5-methyl-guanosine, 5-methyl-cytdine, 8-oxo-guanosine, 7-deaza-guanosine, N1-methyl-adenosine, 2-amino-6-Chloro-purine, N6-methyl-2-amino-purine, Pseudo-iso-cytidine, 6-Chloro-purine, N6-methyl-adenosine, α-thio-adenosine, 8-azido-adenosine, 7-deaza-adenosine.

### Lipid Modification:

[0124] According to a further embodiment, a modified RNA as defined herein can contain a lipid modification. Such a lipid-modified RNA typically comprises an RNA as defined herein. Such a lipid-modified RNA as defined herein typically further comprises at least one linker covalently linked with that RNA, and at least one lipid covalently linked with the respective linker. Alternatively, the lipid-modified RNA comprises at least one RNA as defined herein and at least one (bifunctional) lipid covalently linked (without a linker) with that RNA. According to a third alternative, the lipid-modified RNA comprises an RNA molecule as defined herein, at least one linker covalently linked with that RNA, and at least one lipid covalently linked with the respective linker, and also at least one (bifunctional) lipid covalently linked (without a linker) with that RNA. In this context, it is particularly preferred that the lipid modification is present at the terminal ends of a linear RNA sequence.

### G/C Content Modification:

[0125] According to another embodiment, the RNA of the present invention, preferably an mRNA, may be modified, and thus stabilized, by modifying the guanosine/cytosine (G/C) content of the RNA, preferably of the at least one coding sequence of the RNA of the present invention.

[0126] In a particularly preferred embodiment of the present invention, the G/C content of the coding region of the RNA of the present invention is modified, particularly increased, compared to the G/C content of the coding region of the respective wild-type RNA, i.e. the unmodified RNA. The amino acid sequence encoded by the RNA is preferably not modified as compared to the amino acid sequence encoded by the respective wild-type RNA. This modification of the RNA of the present invention is based on the fact that the sequence of any RNA region to be translated is important for efficient translation of that RNA. Thus, the composition of the RNA and the sequence of various nucleotides are important. In particular, sequences having an increased G (guanosine)/C (cytosine) content are more stable than sequences having an increased A (adenosine)/U (uracil) content. According to the invention, the codons of the RNA are therefore varied compared to the respective wild-type RNA, while retaining the translated amino acid sequence, such that they include an increased amount of G/C nucleotides. In respect to the fact that several codons code for one and the same amino acid (so-called degeneration of the genetic code), the most favourable codons for the stability can be determined (so-called alternative codon usage). Depending on the amino acid to be encoded by the RNA, there are various possibilities for modification of the RNA sequence, compared to its wild-type sequence. In the case of amino acids, which are encoded by codons, which contain exclusively G or C nucleotides, no modification of the codon is necessary. Thus, the codons for Pro (CCC or CCG), Arg (CGC or CGG), Ala (GCE or GCG) and Gly (GGC or GGG) require no modification, since no A or U is present. In contrast, codons which contain A and/or U nucleotides can be modified by substitution of other codons, which code for the same amino acids but contain no A and/or U. Examples of these are: the codons for Pro can be modified from CCU or CCA to CCC or CCG; the codons for Arg can be modified from CGU or CGA or AGA or AGG to CGC or CGG; the codons for Ala can be modified from GCU or GCA to GCC or GCG; the codons for Gly can be modified from GGU or GGA to GGC or GGG. In other cases, although A or U nucleotides cannot be eliminated from the codons, it is however possible to decrease the A and U content by using codons which contain a lower content of A and/or U nucleotides. Examples of these are: the codons for Phe can be modified from UUU to UUC; the codons for Leu can be modified from UUA, UUG, CUU or CUA to CUC or CUG; the codons for Ser can be modified from UCU or UCA or AGU to UCC, UCG or AGC; the codon for Tyr can be modified from UAU to UAC; the codon for Cys can be modified from UGU to UGC; the codon for His can be modified from CAU to CAC; the codon for Gln can be modified from CAA to CAG; the codons for Ile can be modified from AUU or AUA to AUC; the codons for Thr can be modified from ACU or ACA to ACC or ACG; the codon for Asn can be modified from AAU to AAC; the codon for Lys can be modified from AAA to AAG; the codons for VaI can be modified from GUU or GUA to GUC or GUG; the codon for Asp can be modified from GAU to GAC; the codon for Glu can be modified from GAA to GAG; the stop codon UAA can be modified to UAG or UGA. In the case of the codons for Met (AUG) and Trp (UGG), on the other hand, there is no possibility of sequence modification. The substitutions listed above can be used either individually or in all possible combinations to increase the G/C content of the at least one mRNA of the composition of the present invention compared to its particular wild-type mRNA (i.e. the original sequence). Thus, for example, all codons for Thr occurring in the wild-type sequence can be modified to ACC (or ACG). Preferably, however, for example, combinations of the above substitution possibilities are used:

substitution of all codons coding for Thr in the original sequence (wild-type mRNA) to ACC (or AEG) and
substitution of all codons originally coding for Ser to UCC (or UCG or AGE); substitution of all codons coding for Ile in the original sequence to AUC and
substitution of all codons originally coding for Lys to AAG and
substitution of all codons originally coding for Tyr to UAC; substitution of all codons coding for Val in the original sequence to GUC (or GUG) and
substitution of all codons originally coding for Glu to GAG and
substitution of all codons originally coding for Ala to GCE (or GCG) and
substitution of all codons originally coding for Arg to EGE (or EGG); substitution of all codons coding for Val in the original sequence to GUC (or GUG) and
substitution of all codons originally coding for Glu to GAG and
substitution of all codons originally coding for Ala to GCE (or GCG) and
substitution of all codons originally coding for Gly to GGC (or GGG) and
substitution of all codons originally coding for Asn to AAC; substitution of all codons coding for Val in the original sequence to GUC (or GUG) and
substitution of all codons originally coding for Phe to UUC and
substitution of all codons originally coding for Cys to UGC and
substitution of all codons originally coding for Leu to CUG (or CUC) and
substitution of all codons originally coding for Gln to CAG and
substitution of all codons originally coding for Pro to CCC (or CCG); etc.

[0127] Preferably, the G/C content of the coding region of the RNA of the present invention is increased by at least 7%, more preferably by at least 15%, particularly preferably by at least 20%, compared to the G/C content of the coding region of the wild-type RNA, which codes for an antigen as defined herein or a fragment or variant thereof. According to a specific embodiment at least 5%, 10%, 20%, 30%, 40%, 50%, 60%, more preferably at least 70%, even more preferably at least 80% and most preferably at least 90%, 95% or even 100% of the substitutable codons in the region coding for an antigen as defined herein or a fragment or variant thereof or the whole sequence of the wild type RNA sequence are substituted, thereby increasing the GC/content of said sequence. In this context, it is particularly preferable to increase the G/C content of the RNA of the present invention, preferably of the at least one coding region of the RNA according to the invention, to the maximum (i.e. 100% of the substitutable codons) as compared to the wild-type sequence. According to the invention, a further preferred modification of the RNA of the present invention is based on the finding that the translation efficiency is also determined by a different frequency in the occurrence of tRNAs in cells. Thus, if so-called “rare codons” are present in the RNA of the present invention to an increased extent, the corresponding modified RNA sequence is translated to a significantly poorer degree than in the case where codons coding for relatively “frequent” tRNAs are present. According to the invention, in the modified RNA of the present invention, the region which codes for an antigen as defined herein or a fragment or variant thereof is modified compared to the corresponding region of the wild-type RNA such that at least one codon of the wild-type sequence, which codes for a tRNA which is relatively rare in the cell, is exchanged for a codon, which codes for a tRNA which is relatively frequent in the cell and carries the same amino acid as the relatively rare tRNA. By this modification, the sequences of the RNA of the present invention is modified such that codons for which frequently occurring tRNAs are available are inserted. In other words, according to the invention, by this modification all codons of the wild-type sequence, which code for a tRNA which is relatively rare in the cell, can in each case be exchanged for a codon, which codes for a tRNA which is relatively frequent in the cell and which, in each case, carries the same amino acid as the relatively rare tRNA. Which tRNAs occur relatively frequently in the cell and which, in contrast, occur relatively rarely is known to a person skilled in the art; cf. e.g. Akashi, Curr. Opin. Genet. Dev. 2001, 11(6): 660-666. The codons, which use for the particular amino acid the tRNA which occurs the most frequently, e.g. the Gly codon, which uses the tRNA, which occurs the most frequently in the (human) cell, are particularly preferred. According to the invention, it is particularly preferable to link the sequential G/C content which is increased, in particular maximized, in the modified RNA of the present invention, with the “frequent” codons without modifying the amino acid sequence of the protein encoded by the coding region of the RNA. This preferred embodiment allows provision of a particularly efficiently translated and stabilized (modified) RNA of the present invention. The determination of a modified RNA of the present invention as described above (increased G/C content; exchange of tRNAs) can be carried out using the computer program explained in WO 02/098443—the disclosure content of which is included in its full scope in the present invention. Using this computer program, the nucleotide sequence of any desired RNA can be modified with the aid of the genetic code or the degenerative nature thereof such that a maximum G/C content results, in combination with the use of codons which code for tRNAs occurring as frequently as possible in the cell, the amino acid sequence coded by the modified RNA preferably not being modified compared to the non-modified sequence. Alternatively, it is also possible to modify only the G/C content or only the codon usage compared to the original sequence. The source code in Visual Basic 6.0 (development environment used: Microsoft Visual Studio Enterprise 6.0 with Servicepack 3) is also described in WO 02/098443. In a further preferred embodiment of the present invention, the A/U content in the environment of the ribosome binding site of the RNA of the present invention is increased compared to the A/U content in the environment of the ribosome binding site of its respective wild-type mRNA. This modification (an increased A/U content around the ribosome binding site) increases the efficiency of ribosome binding to the RNA. An effective binding of the ribosomes to the ribosome binding site (Kozak sequence: SEQ ID NO: 4557; the AUG forms the start codon) in turn has the effect of an efficient translation of the RNA. According to a further embodiment of the present invention, the RNA of the present invention may be modified with respect to potentially destabilizing sequence elements. Particularly, the coding region and/or the 5′ and/or 3′ untranslated region of this RNA may be modified compared to the respective wild-type RNA such that it contains no destabilizing sequence elements, the encoded amino acid sequence of the modified RNA preferably not being modified compared to its respective wild-type RNA. It is known that, for example in sequences of eukaryotic RNAs, destabilizing sequence elements (DSE) occur, to which signal proteins bind and regulate enzymatic degradation of RNA in vivo. For further stabilization of the modified RNA, optionally in the region which encodes an antigen as defined herein or a fragment or variant thereof, one or more such modifications compared to the corresponding region of the wild-type RNA can therefore be carried out, so that no or substantially no destabilizing sequence elements are contained there. According to the invention, DSE present in the untranslated regions (3′- and/or 5′-UTR) can also be eliminated from the RNA of the present invention by such modifications. Such destabilizing sequences are e.g. AU-rich sequences (AURES), which occur in 3′-UTR sections of numerous unstable RNAs (Caput et al., Proc. Natl. Acad. Sri. USA 1986, 83: 1670 to 1674). The RNA of the present invention is therefore preferably modified compared to the respective wild-type RNA such that the RNA of the present invention contains no such destabilizing sequences. This also applies to those sequence motifs which are recognized by possible endonucleases, e.g. the sequence GAACAAG, which is contained in the 3′-UTR segment of the gene encoding the transferrin receptor (Binder et al., EMBO J. 1994, 13: 1969 to 1980). These sequence motifs are also preferably removed in the RNA of the present invention.

[0128] According to a preferred embodiment, the present invention provides an RNA as defined herein comprising at least one coding sequence, wherein the coding sequence comprises or consists of any one of the (modified) nucleic acid sequences defined in the fifth column (column ‘C’) of Table 1, or of a fragment or variant of any one of these sequences. In other words, the at least one coding sequence preferably comprises or consists of a nucleic acid sequence selected from the group consisting of SEQ ID NOs: 1009-4033; 4564-4591 or a fragment or variant of any one of these nucleic acid sequences.

[0129] In a further preferred embodiment, the at least one coding sequence of the RNA according to the invention comprises or consists of a nucleic acid sequence identical to or having a sequence identity of at least 5%, 10%, 20%, 30%, 40%, 50%, 60%, 70%, 80%, 85%, 86%, 87%, 88%, 89%, 90%, 91%, 92%, 93%, 94%, 95%, 96%, 97%, 98%, or 99%, preferably of at least 70%, more preferably of at least 80%, even more preferably at least 85%, even more preferably of at least 90% and most preferably of at least 95% or even 97%, with any one of the (modified) nucleic acid sequences defined in the fifth column (column ‘C’) of Table 1, or of a fragment or variant of any one of these sequences.

[0130] According to a particularly preferred embodiment, the at least one coding sequence of the RNA according to the invention comprises or consists of a nucleic acid sequence having a sequence identity of at least 80% with any one of the (modified) nucleic acid sequences defined in the fifth column (column ‘C’) of Table 1, or of a fragment or variant of any one of these sequences.

### GC Optimized Sequences:

[0131] In a preferred embodiment, the present invention provides an RNA comprising at least one coding sequence, wherein the coding sequence comprises or consists of a nucleic acid sequence selected from the group consisting of SEQ ID NOs: 1009-1512; 3025-3528; 3529-4032; 4033-4033, 4564-4566; 4576-4591 or a fragment or variant of any one of these nucleic acid sequences.

[0132] According to a further embodiment, the at least one coding sequence of the RNA according to the invention comprises or consists of a nucleic acid sequence having a sequence identity of at least 5%, 10%, 20%, 30%, 40%, 50%, 60%, 70%, 80%, 85%, 8G %, 87%, 88%, 89%, 90%, 91%, 92%, 93%, 94%, 95%, 96%, 97%, 98%, or 99%, preferably of at least 70%, more preferably of at least 80%, even more preferably at least 85%, even more preferably of at least 90% and most preferably of at least 95% or even 97%, with a nucleic acid sequence selected from the group consisting of SEQ ID NOs: 1009-1512; 3025-3528; 3529-4032; 4033-4033, 4564-4566; 4576-4591 or a fragment or variant of any one of these nucleic acid sequences.

### Sequences Adapted to Human Codon Usage:

[0133] According to the invention, a further preferred modification of the RNA of the present invention is based on the finding that codons encoding the same amino acid typically occur at different frequencies. According to the invention, in the modified RNA of the present invention, the coding sequence (coding region) as defined herein is preferably modified compared to the corresponding region of the respective wild-type RNA such that the frequency of the codons encoding the same amino acid corresponds to the naturally occurring frequency of that codon according to the human codon usage as e.g. shown in Table 2.

[0134] For example, in the case of the amino acid alanine (Ala) present in an amino acid sequence encoded by the at least one coding sequence of the RNA according to the invention, the wild type coding sequence is preferably adapted in a way that the codon “GCS” is used with a frequency of 0.40, the codon “GCT” is used with a frequency of 0.28, the codon “GSA” is used with a frequency of 0.22 and the codon “GCG” is used with a frequency of 0.10 etc. (see Table 2).

TABLE 2
Human codon usage table

| Amino | | | | Amino | | | |
|---|---|---|---|---|---|---|---|
| acid | codon | fraction | /1000 | Acid | codon | fraction | /1000 |
| Ala | GCG | 0.10 | 7.4 | Pro | CCG | 0.11 | 6.9 |
| Ala | GCA | 0.22 | 15.8 | Pro | CCA | 0.27 | 16.9 |
| Ala | GCT | 0.28 | 18.5 | Pro | CCT | 0.29 | 17.5 |
| Ala | GCC* | 0.40 | 27.7 | Pro | CCC* | 0.33 | 19.8 |
| Cys | TGT | 0.42 | 10.6 | Gln | CAG* | 0.73 | 34.2 |
| Cys | TGC* | 0.58 | 12.6 | Gln | CAA | 0.27 | 12.3 |
| Asp | GAT | 0.44 | 21.8 | Arg | AGG | 0.22 | 12.0 |
| Asp | GAC* | 0.56 | 25.1 | Arg | AGA* | 0.21 | 12.1 |
| Glu | GAG* | 0.59 | 39.6 | Arg | CGG | 0.19 | 11.4 |
| Glu | GAA | 0.41 | 29.0 | Arg | CGA | 0.10 | 6.2 |
| Phe | TTT | 0.43 | 17.6 | Arg | CGT | 0.09 | 4.5 |
| Phe | TTC* | 0.57 | 20.3 | Arg | CGC | 0.19 | 10.4 |
| Gly | GGG | 0.23 | 16.5 | Ser | AGT | 0.14 | 12.1 |
| Gly | GGA | 0.26 | 16.5 | Ser | AGC* | 0.25 | 19.5 |
| Gly | GGT | 0.18 | 10.8 | Ser | TCG | 0.06 | 4.4 |
| Gly | GGC* | 0.33 | 22.2 | Ser | TCA | 0.15 | 12.2 |
| His | CAT | 0.41 | 10.9 | Ser | TCT | 0.18 | 15.2 |
| His | CAC* | 0.59 | 15.1 | Ser | TCC | 0.23 | 17.7 |
| Ile | ATA | 0.14 | 7.5 | Thr | ACG | 0.12 | 6.1 |
| Ile | ATT | 0.35 | 16.0 | Thr | ACA | 0.27 | 15.1 |
| Ile | ATC* | 0.52 | 20.8 | Thr | ACT | 0.23 | 13.1 |
| Lys | AAG* | 0.60 | 31.9 | Thr | ACC* | 0.38 | 18.9 |
| Lys | AAA | 0.40 | 24.4 | Val | GTG* | 0.48 | 28.1 |
| Leu | TTG | 0.12 | 12.9 | Val | GTA | 0.10 | 7.1 |
| Leu | TTA | 0.06 | 7.7 | Val | GTT | 0.17 | 11.0 |
| Leu | CTG* | 0.43 | 39.6 | Val | GTC | 0.25 | 14.5 |
| Leu | CTA | 0.07 | 7.2 | Trp | TGG* | 1 | 13.2 |
| Leu | CTT | 0.12 | 13.2 | Tyr | TAT | 0.42 | 12.2 |
| Leu | CTC | 0.20 | 19.6 | Tyr | TAC* | 0.58 | 15.3 |
| Met | ATG* | 1 | 22.0 | Stop | TGA* | 0.61 | 1.6 |
| Asn | AAT | 0.44 | 17.0 | Stop | TAG | 0.17 | 0.8 |
| Asn | AAC* | 0.56 | 19.1 | Stop | TAA | 0.22 | 1.0 |

*most frequent codon

[0135] In a preferred embodiment, the present invention provides an RNA comprising at least one coding sequence, wherein the coding sequence comprises a nucleic acid sequence selected from the group consisting of SEQ ID NOs: 2017-2520; 4570-4572, or a fragment or variant of any one of said nucleic acid sequences.

[0136] According to a further embodiment, the at least one coding sequence of the RNA according to the invention comprises or consists of a nucleic acid sequence having a sequence identity of at least 5%, 10%, 20%, 30%, 40%, 50%, 60%, 70%, 80%, 85%, 86%, 87%, 88%, 89%, 90%, 91%, 92%, 93%, 94%, 95%, 96%, 97%, 98%, or 99%, preferably of at least 70%, more preferably of at least 80%, even more preferably at least 85%, even more preferably of at least 90% and most preferably of at least 95% or even 97%, with a nucleic acid sequence selected from the group consisting of SEQ ID NOs: 2017-2520, 4570-4572 or a fragment or variant of any one of said nucleic acid sequences.

### Codon-Optimized Sequences:

[0137] As described above it is preferred according to the invention, that all codons of the wild-type sequence which code for a tRNA, which is relatively rare in the cell, are exchanged for a codon which codes for a tRNA, which is relatively frequent in the cell and which, in each case, carries the same amino acid as the relatively rare tRNA. Therefore it is particularly preferred that the most frequent codons are used for each encoded amino acid (see Table 2, most frequent codons are marked with asterisks). Such an optimization procedure increases the codon adaptation index (CAI) and ultimately maximises the CAI. In the context of the invention, sequences with increased or maximized CAI are typically referred to as “codon-optimized” sequences and/or CAI increased and/or maximized sequences. According to a preferred embodiment, the RNA of the present invention comprises at least one coding sequence, wherein the coding sequence is codon-optimized as described herein. More preferably, the codon adaptation index (CAI) of the at least one coding sequence is at least 0.5, at least 0.8, at least 0.9 or at least 0.95. Most preferably, the codon adaptation index (CAI) of the at least one coding sequence is I.

[0138] For example, in the case of the amino acid alanine (Ala) present in the amino acid sequence encoded by the at least one coding sequence of the RNA according to the invention, the wild type coding sequence is adapted in a way that the most frequent human codon “GCC” is always used for said amino acid, or for the amino acid Cysteine (Cys), the wild type sequence is adapted in a way that the most frequent human codon “TGC” is always used for said amino acid etc.

[0139] In a preferred embodiment, the present invention provides an RNA comprising at least one coding sequence, wherein the coding sequence comprises a nucleic acid sequence selected from the group consisting of SEQ ID NOs: 2521-3024; 4573-4575, or a fragment or variant of any one of said nucleic acid sequences.

[0140] According to a further embodiment, the at least one coding sequence of the RNA according to the invention comprises or consists of a nucleic acid sequence having a sequence identity of at least 5%, 10%, 20%, 30%, 40%, 50%, 60%, 70%, 80%, 85%, 86%, 87%, 88%, 89%, 90%, 91%, 92%, 93%, 94%, 95%, 96%, 97%, 98%, or 99%, preferably of at least 70%, more preferably of at least 80%, even more preferably at least 85%, even more preferably of at least 90% and most preferably of at least 95% or even 97%, with a nucleic acid sequence selected from the group consisting of SEQ ID NOs: 2521-3024; 4573-4575, or a fragment or variant of any one of said nucleic acid sequences.

### C-Optimized Sequences:

[0141] According to another embodiment, the RNA of the composition of the present invention may be modified by modifying, preferably increasing, the cytosine (C) content of the RNA, preferably of the coding region of the aRNA.

[0142] In a particularly preferred embodiment of the present invention, the C content of the coding region of the RNA of the present invention is modified, preferably increased, compared to the C content of the coding region of the respective wild-type RNA, i.e. the unmodified RNA. The amino acid sequence encoded by the at least one coding sequence of the RNA of the present invention is preferably not modified as compared to the amino acid sequence encoded by the respective wild-type mRNA.

[0143] In a preferred embodiment of the present invention, the modified RNA is modified such that at least 10%, 20%, 30%, 40%, 50%, 60%, 70% or 80%, or at least 90% of the theoretically possible maximum cytosine-content or even a maximum cytosine-content is achieved.

[0144] In further preferred embodiments, at least 10%, 20%, 30%, 40%, 50%, 60%, 70%, 80%, 90% or even 100% of the codons of the target RNA wild type sequence, which are “cytosine content optimizable” are replaced by codons having a higher cytosine-content than the ones present in the wild type sequence.

[0145] In a further preferred embodiment, some of the codons of the wild type coding sequence may additionally be modified such that a codon for a relatively rare tRNA in the cell is exchanged by a codon for a relatively frequent tRNA in the cell, provided that the substituted codon for a relatively frequent tRNA carries the same amino acid as the relatively rare tRNA of the original wild type codon. Preferably, all of the codons for a relatively rare tRNA are replaced by a codon for a relatively frequent tRNA in the cell, except codons encoding amino acids, which are exclusively encoded by codons not containing any cytosine, or except for glutamine (Gln), which is encoded by two codons each containing the same number of cytosines.

[0146] In a further preferred embodiment of the present invention, the modified target RNA is modified such that at least 80%, or at least 90% of the theoretically possible maximum cytosine-content or even a maximum cytosine-content is achieved by means of codons, which code for relatively frequent tRNAs in the cell, wherein the amino acid sequence remains unchanged.

[0147] Due to the naturally occurring degeneracy of the genetic code, more than one codon may encode a particular amino acid. Accordingly, 18 out of 20 naturally occurring amino acids are encoded by more than one codon (with Tryp and Met being an exception), e.g. by 2 codons (e.g. Cys, Asp, Glu), by three codons (e.g. Ile), by 4 codons (e.g. Leu, Gly, Pro) or by D codons (e.g. Leu, Arg, Ser). However, not all codons encoding the same amino acid are utilized with the same frequency under in vivo conditions. Depending on each single organism, a typical codon usage profile is established.

[0148] The term ‘cytosine content-optimizable codon’ as used within the context of the present invention refers to codons, which exhibit a lower content of cytosines than other codons encoding the same amino acid. Accordingly, any wild type codon, which may be replaced by another codon encoding the same amino acid and exhibiting a higher number of cytosines within that codon, is considered to be cytosine-optimizable (C-optimizable). Any such substitution of a C-optimizable wild type codon by the specific C-optimized codon within a wild type coding region increases its overall C-content and reflects a C-enriched modified mRNA sequence. According to a preferred embodiment, the RNA of the present invention, preferably the at least one coding sequence of the RNA of the present invention comprises or consists of a C-maximized RNA sequence containing C-optimized codons for all potentially C-optimizable codons. Accordingly, Inn or all of the theoretically replaceable C-optimizable codons are preferably replaced by C-optimized codons over the entire length of the coding region.

[0149] In this context, cytosine-content optimizable codons are codons, which contain a lower number of cytosines than other codons coding for the same amino acid.

[0150] Any of the codons GCG, GCA, GCU codes for the amino acid Ala, which may be exchanged by the codon GCE encoding the same amino acid, and/or

the codon UGU that codes for Cys may be exchanged by the codon UGC encoding the same amino acid, and/or
the codon GAU which codes for Asp may be exchanged by the codon GAC encoding the same amino acid, and/or
the codon that UUU that codes for Phe may be exchanged for the codon UUC encoding the same amino acid, and/or
any of the codons GGG, GGA, GGU that code Gly may be exchanged by the codon GGC encoding the same amino acid, and/or
the codon CAU that codes for His may be exchanged by the codon CAC encoding the same amino acid, and/or
any of the codons AUA, AUU that code for Ile may be exchanged by the codon AUC, and/or
any of the codons UUG, UUA, CUG, CUA, CUU coding for Leu may be exchanged by the codon CUE encoding the same amino acid, and/or the codon AAU that codes for Asn may be exchanged by the codon AAC encoding the same amino acid, and/or
any of the codons CCG, CCA, CCU coding for Pro may be exchanged by the codon CCC encoding the same amino acid, and/or
any of the codons AGG, AGA, CGG, CGA, CGU coding for Arg may be exchanged by the codon CGC encoding the same amino acid, and/or
any of the codons AGU, AGC, UCG, UCA, UCU coding for Ser may be exchanged by the codon UCC encoding the same amino acid, and/or
any of the codons ACG, ACA, ACU coding for Thr may be exchanged by the codon ACC encoding the same amino acid, and/or
any of the codons GUG, GUA, GUU coding for Val may be exchanged by the codon GUC encoding the same amino acid, and/or
the codon UAU coding for Tyr may be exchanged by the codon UAC encoding the same amino acid.

[0151] In any of the above instances, the number of cytosines is increased by 1 per exchanged codon. Exchange of all non C-optimized codons (corresponding to C-optimizable codons) of the coding region results in a C-maximized coding sequence. In the context of the invention, at least 70%, preferably at least 80%, more preferably at least 90%, of the non C-optimized codons within the at least one coding region of the RNA according to the invention are replaced by C-optimized codons.

[0152] It may be preferred that for some amino acids the percentage of C-optimizable codons replaced by C-optimized codons is less than 70%, while for other amino acids the percentage of replaced codons is higher than 70% to meet the overall percentage of C-optimization of at least 70% of all C-optimizable wild type codons of the coding region.

[0153] Preferably, in a C-optimized RNA of the invention, at least 50% of the C-optimizable wild type codons for any given amino acid are replaced by C-optimized codons, e.g. any modified C-enriched RNA preferably contains at least 50% C-optimized codons at C-optimizable wild type codon positions encoding any one of the above mentioned amino acids Ala, Cys, Asp, Phe, Gly, His, Ile, Leu, Asn, Pro, Arg, Ser, Thr, Val and Tyr, preferably at least 60%.

[0154] In this context codons encoding amino acids, which are not cytosine content-optimizable and which are, however, encoded by at least two codons, may be used without any further selection process. However, the codon of the wild type sequence that codes for a relatively rare tRNA in the cell, e.g. a human cell, may be exchanged for a codon that codes for a relatively frequent tRNA in the cell, wherein both code for the same amino acid. Accordingly, the relatively rare codon GAA coding for Glu may be exchanged by the relative frequent codon GAG coding for the same amino acid, and/or

the relatively rare codon AAA coding for Lys may be exchanged by the relative frequent codon AAG coding for the same amino acid, and/or
the relatively rare codon CAA coding for Gln may be exchanged for the relative frequent codon CAG encoding the same amino acid.

[0155] In this context, the amino acids Met (AUG) and Trp (UGG), which are encoded by only one codon each, remain unchanged. Stop codons are not cytosine-content optimized, however, the relatively rare stop codons amber, ochre (UAA, UAG) may be exchanged by the relatively frequent stop codon opal (UGA).

[0156] The single substitutions listed above may be used individually as well as in all possible combinations in order to optimize the cytosine-content of the modified RNA compared to the wild type mRNA sequence.

[0157] Accordingly, the at least one coding sequence as defined herein may be changed compared to the coding region of the respective wild type RNA in such a way that an amino acid encoded by at least two or more codons, of which one comprises one additional cytosine, such a codon may be exchanged by the C-optimized codon comprising one additional cytosine, wherein the amino acid is preferably unaltered compared to the wild type sequence.

[0158] In a preferred embodiment, the present invention provides an RNA comprising at least one coding sequence, wherein the coding sequence comprises a nucleic acid sequence selected from the group consisting of SEQ ID NOs: 1513-2015; 4557-4559, or a fragment or variant of any one of said nucleic acid sequences.

[0159] According to a further embodiment, the at least one coding sequence of the RNA according to the invention comprises or consists of a nucleic acid sequence having a sequence identity of at least 5%, 10%, 20%, 30%, 40%, 50%, 60%, 70%, 80%, 85%, 85%, 87%, 88%, 89%, 90%, 91%, 92%, 93%, 94%, 95%, 96%, 97%, 98%, or 99%, preferably of at least 70%, more preferably of at least 80%, even more preferably at least 85%, even more preferably of at least 90% and most preferably of at least 95% or even 97%, with a nucleic acid sequence selected from the group consisting of SEQ ID NOs: 1513-2015; 4557-4559, or a fragment or variant of any one of said nucleic acid sequences.

[0160] According to a particularly preferred embodiment, the invention provides an RNA, preferably an mRNA, comprising at least one coding sequence as defined herein, wherein the G/C content of the at least one coding sequence of the RNA is increased compared to the G/C content of the corresponding coding sequence of the corresponding wild-type RNA, and/or

wherein the C content of the at least one coding sequence of the RNA is increased compared to the C content of the corresponding coding sequence of the corresponding wild-type RNA, and/or
wherein the codons in the at least one coding sequence of the RNA are adapted to human codon usage, wherein the codon adaptation index (CAI) is preferably increased or maximised in the at least one coding sequence of the RNA,
and wherein the amino acid sequence encoded by the RNA is preferably not being modified compared to the amino acid sequence encoded by the corresponding wild-type RNA.

[0161] According to another preferred embodiment of the invention, a modified RNA as defined herein, can be modified by the addition of a so-called ‘5′ cap’ structure, which preferably stabilizes the RNA as described herein. A 5′-cap is an entity, typically a modified nucleotide entity, which generally “caps” the 5′-end of a mature mRNA. A 5′-cap may typically be formed by a modified nucleotide, particularly by a derivative of a guanine nucleotide. Preferably, the 5′-cap is linked to the 5′-terminus via a 5′-5′-triphosphate linkage. A 5′-cap may be methylated, e.g. m7GpppN, wherein N is the terminal 5′ nucleotide of the nucleic acid carrying the 5′-cap, typically the 5′-end of an mRNA. m7GpppN is the 5′-cap structure, which naturally occurs in mRNA transcribed by polymerase 11 and is therefore preferably not considered as modification comprised in a modified mRNA in this context. Accordingly, a modified RNA of the present invention may comprise a m7GpppN as 5′-cap, but additionally the modified RNA typically comprises at least one further modification as defined herein.

[0162] Further examples of 5′cap structures include glyceryl, inverted deoxy abasic residue (moiety), 4′,5′ methylene nucleotide, 1-(beta-D-erythrofuranosyl) nucleotide, 4′-thio nucleotide, carbocyclic nucleotide, 1,5-anhydrohexitol nucleotide, L-nucleotides, alpha-nucleotide, modified base nucleotide, threo-pentofuranosyl nucleotide, acyclic 3′,4′-seco nucleotide, acyclic 3,4-dihydroxybutyl nucleotide, acyclic 3,5 dihydroxypentyl nucleotide, 3′-3′-inverted nucleotide moiety, 3′-3′-inverted abasic moiety, 3′-2′-inverted nucleotide moiety, 3′-2′-inverted abasic moiety, 1,4-butanediol phosphate, 3′-phosphoramidate, hexylphosphate, aminohexyl phosphate, 3′-phosphate, 3′phosphorothioate, phosphorodithioate, or bridging or non-bridging methylphosphonate moiety. These modified 5′-cap structures are regarded as at least one modification in this context.

[0163] Particularly preferred modified 5′-cap structures are card (methylation of the ribose of the adjacent nucleotide of m7G), cap2 (additional methylation of the ribose of the 2nd nucleotide downstream of the m7G), cap3 (additional methylation of the ribose of the 3rd nucleotide downstream of the m7G), cap4 (methylation of the ribose of the 4th nucleotide downstream of the m7G), AREA (anti-reverse cap analogue, modified AREA (e.g. phosphothioate modified AREA), inosine, N1-methyl-guanosine, 2′-fluoro-guanosine, 7-deaza-guanosine, 8-oxo-guanosine, 2-amino-guanosine, LNA-guanosine, and 2-azido-guanosine. Accordingly, the RNA according to the invention preferably comprises a 5′-cap structure.

[0164] In a preferred embodiment, the RNA according to the invention comprises at least one 5′- or 3′-UTR element. In this context, an UTR element comprises or consists of a nucleic acid sequence, which is derived from the 5′- or 3′-UTR of any naturally occurring gene or which is derived from a fragment, a homolog or a variant of the 5′- or 3′-UTR of a gene. Preferably, the 5′- or 3′-UTR element used according to the present invention is heterologous to the at least one coding sequence of the RNA of the invention. Even if 5′- or 3′-UTR elements derived from naturally occurring genes are preferred, also synthetically engineered UTR elements may be used in the context of the present invention.

[0165] The term ‘3′UTR element’ typically refers to a nucleic acid sequence, which comprises or consists of a nucleic acid sequence that is derived from a 3′UTR or from a variant of a 3′UTR. A 3′UTR element in the sense of the present invention may represent the 3′UTR of an RNA, preferably an mRNA. Thus, in the sense of the present invention, preferably, a 3′UTR element may be the 3′UTR of an RNA, preferably of an mRNA, or it may be the transcription template for a 3′UTR of an RNA. Thus, a 3′UTR element preferably is a nucleic acid sequence which corresponds to the 3′UTR of an RNA, preferably to the 3′UTR of an mRNA, such as an mRNA obtained by transcription of a genetically engineered vector construct. Preferably, the 3′UTR element fulfils the function of a 3′UTR or encodes a sequence which fulfils the function of a 3′UTR.

[0166] According to a preferred embodiment, the RNA, preferably an mRNA, according to the invention comprises a 5′-cap structure and/or at least one 3′-untranslated region element (3′-UTR element), preferably as defined herein. More preferably, the RNA further comprises a 5′-UTR element as defined herein.

[0167] According to a further preferred embodiment, the RNA of the present invention may contain a poly-A tail on the 3′ terminus of typically about 10 to 200 adenosine nucleotides, preferably about 10 to 100 adenosine nucleotides, more preferably about 40 to 80 adenosine nucleotides or even more preferably about 50 to 70 adenosine nucleotides.

[0168] Preferably, the poly(A) sequence in the RNA of the present invention is derived from a DNA template by RNA in vitro transcription. Alternatively, the poly(A) sequence may also be obtained in vitro by common methods of chemical-synthesis without being necessarily transcribed from a DNA-progenitor. Moreover, poly(A) sequences, or poly(A) tails may be generated by enzymatic polyadenylation of the RNA according to the present invention using commercially available polyadenylation kits and corresponding protocols known in the art.

[0169] Alternatively, the RNA as described herein optionally comprises a polyadenylation signal, which is defined herein as a signal, which conveys polyadenylation to a (transcribed) RNA by specific protein factors (e.g. cleavage and polyadenylation specificity factor (CPSF), cleavage stimulation factor (CstF), cleavage factors I and II (CF I and CF II), poly(A) polymerase (PAP)). In this context, a consensus polyadenylation signal is preferred comprising the NN(U/T)ANA consensus sequence. In a particularly preferred aspect, the polyadenylation signal comprises one of the following sequences: AA(U/T)AAA or A(U/T)(U/T)AAA (wherein uridine is usually present in RNA and thymidine is usually present in DNA).

[0170] According to a further preferred embodiment, the RNA of the present invention may contain a poly(C) tail on the 3′ terminus of typically about 10 to 200 cytosine nucleotides, preferably about 10 to 100 cytosine nucleotides, more preferably about 20 to 70 cytosine nucleotides or even more preferably about 20 to 60 or even 10 to 40 cytosine nucleotides.

[0171] In a further preferred embodiment, the RNA according to the invention further comprises at least one 3′UTR element. Preferably, the at least one 3′UTR element comprises or consists of a nucleic acid sequence derived from the 3′UTR of a chordate gene, preferably a vertebrate gene, more preferably a mammalian gene, most preferably a human gene, or from a variant of the 3′UTR of a chordate gene, preferably a vertebrate gene, more preferably a mammalian gene, most preferably a human gene.

[0172] Preferably, the RNA of the present invention comprises a 3′UTR element, which may be derivable from a gene that relates to an mRNA with an enhanced half-life (that provides a stable mRNA), for example a 3′UTR element as defined and described below. Preferably, the 3′-UTR element is a nucleic acid sequence derived from a 3′-UTR of a gene, which preferably encodes a stable mRNA, or from a homolog, a fragment or a variant of said gene.

[0173] In a particularly preferred embodiment, the 3′UTR element comprises or consists of a nucleic acid sequence, which is derived from a 3′UTR of a gene selected from the group consisting of an albumin gene, an α-globin gene, a β-globin gene, a tyrosine hydroxylase gene, a lipoxygenase gene, and a collagen alpha gene, such as a collagen alpha I(I) gene, or from a variant of a 3′UTR of a gene selected from the group consisting of an albumin gene, an α-globin gene, a β-globin gene, a tyrosine hydroxylase gene, a lipoxygenase gene, and a collagen alpha gene, such as a collagen alpha I(I) gene according to SEQ ID No. 1359-1390 of the patent application WO2013/143700, whose disclosure is incorporated herein by reference, or from a homolog, a fragment or a variant thereof. In a particularly preferred embodiment, the 3′UTR element comprises or consists of a nucleic acid sequence which is derived from a 3′UTR of an albumin gene, preferably a vertebrate albumin gene, more preferably a mammalian albumin gene, most preferably a human albumin gene according to SEQ ID NO: 4549 or the corresponding RNA sequence SEQ ID NO: 4550.

Human albumin 3′UTR SEQ ID NO: 4549:
CATCACATTTAAAAGCATCTCAGCCTACCATGAGAATAAGAGAAAGAAAA
TGAAGATCAAAAGCTTATTCATCTGTTTTTCTTTTTCGTTGGTGTAAAGC
CAACACCCTGTCTAAAAAACATAAATnCTTTAATCATTTTGCCTCTTTTC
TCTGTGCTTCAATTAATAAAAAATGGAAAGAATCT (corresponding
to SEQ ID NO: 1369 of the patent application
WO2013/143700).

[0174] In this context it is particularly preferred that the RNA according to the invention comprises a 3′-UTR element comprising a corresponding RNA sequence derived from the nucleic acids according to SEQ ID NO: 1369-1390 of the patent application WO2013/143700 or a fragment, homolog or variant thereof.

[0175] Most preferably the 3′-UTR element comprises the nucleic acid sequence derived from a fragment of the human albumin gene according to SEQ ID NO: SEQ ID NO: 4551 or SEQ ID NO: 4553:

albumin7 3′UTR
CATCACATTTAAAAGCATCTCAGCCTACCATGAGAATAAGAGAAAGAAA
ATGAAGATCAATAGCTTATTCATCTCTTTTTCTTTTTCGTTGGTGTAAA
GCCAACACCCTGTCTAAAAAACATAAATTTCTTTAATCATTTTGCCTCT
TTTCTCTGTGCTTCAATTAATAAAAAATGGAAAGAACCT (SEQ ID
NO: 4551 corresponding to SEQ ID No: 1376 of the
patent application WO2013/143700)

[0176] In this context, it is particularly preferred that the 3′-UTR element of the RNA according to the present invention comprises or consists of a corresponding RNA sequence of the nucleic acid sequence according to SEQ ID NO: 4551 or SEQ ID NO: 4553 as shown in SEQ ID NO: 4552 or SEQ ID NO: 4554.

[0177] In another particularly preferred embodiment, the 3′UTR element comprises or consists of a nucleic acid sequence which is derived from a 3′UTR of an α-globin gene, preferably a vertebrate α- or β-globin gene, more preferably a mammalian α- or β-globin gene, most preferably a human α- or β-globin gene according to SEQ ID NO: 4541, SEQ ID NO: 4543 or SEQ ID NO: 4545 or the corresponding RNA sequences SEQ ID NO: 4542, SEQ ID NO: 4544 or SEQ ID NO: 4546. SEQ ID NO: 3543, 3536 or 3538:

3′-UTR of Homo sapiens hemoglobin, alpha 1 (HBA1)
GCTGGAGCCTCGGTGGCCATGCTTCTTGCCCCTTGGGCCTCCCCCCAGCC
CCTCCTCCCCTTCCTGCACCCGTACCCCCGTGGTCTTTGAATAAAGTCTG
AGTGGGCGGC (SEQ ID NO: 4541 corresponding to SEQ
ID NO: 1370 of the patent application WO2013/
143700)
3′-UTR of Homo sapiens hemoglobin, alpha 2 (HBA2)
GCTGGAGCCTCGGTAGCCGTTCCTCCTGCCCGCTGGGCCTCCCAACGGGC
CCTCCTCCCCTCCTTGCACCGGCCCTTCCTGGTCTTTGAATAAAGTCTGA
GTGGGCAG (SEQ ID NO: 4543 corresponding to SEQ ID
NO: 1371 of the patent application WO2013/143700)
3′-UTR of Homo sapiens hemoglobin, beta (HBB)
GCTCGCTTTCTTGCTGTCCAATTTCTATTAAAGGTTCCTTTGTTCCCTAG
TCCAACTACTAAACTGGGGGATATTATGAAGGGCCTTGAGCATCTGGATT
CTGCCTAATAAAAAACATTTATTTTCATTGC (SEQ ID NO: 4545
corresponding to SEQ ID NO: 1372 of the patent
application WO2013/143700)

[0178] For example, the 3′UTR element may comprise or consist of the center, α-complex-binding portion of the 3′UTR of an α-globin gene, such as of a human α-globin gene, or a homolog, a fragment, or a variant of an α-globin gene, preferably according to SEQ ID NO: 4547:

Center, α-complex-binding portion of the 3′UTR of
an α-globin gene (also named herein as ″muag″)
GCCCGATGGGCCTCCCAACGGGCCCTCCTCCCCTCCTTGCACCG (SEQ
ID NO: 4547 corresponding to SEQ ID NO: 393 of
the patent application WO2013/143700).

[0179] In this context it is particularly preferred that the 3′-UTR element of the RNA according to the invention comprises or consists of a corresponding RNA sequence of the nucleic acid sequence according to SEQ ID NO: 4547 as shown in SEQ ID NO: 4548, or a homolog, a fragment or variant thereof.

[0180] The term ‘a nucleic acid sequence which is derived from the 3′UTR of a [ . . . ] gene’ preferably refers to a nucleic acid sequence which is based on the 3′UTR sequence of a [ . . . ] gene or on a part thereof, such as on the 3′UTR of an albumin gene, an α-globin gene, a β-globin gene, a tyrosine hydroxylase gene, a lipoxygenase gene, or a collagen alpha gene, such as a collagen alpha I(I) gene, preferably of an albumin gene or on a part thereof. This term includes sequences corresponding to the entire 3′UTR sequence, i.e. the full length 3′UTR sequence of a gene, and sequences corresponding to a fragment of the 3′UTR sequence of a gene, such as an albumin gene, α-globin gene, β-globin gene, tyrosine hydroxylase gene, lipoxygenase gene, or collagen alpha gene, such as a collagen alpha I(I) gene, preferably of an albumin gene.

[0181] The term ‘a nucleic acid sequence which is derived from a variant of the 3′UTR of a [ . . . ] gene’ preferably refers to a nucleic acid sequence, which is based on a variant of the 3′UTR sequence of a gene, such as on a variant of the 3′UTR of an albumin gene, an α-globin gene, a β-globin gene, a tyrosine hydroxylase gene, a lipoxygenase gene, or a collagen alpha gene, such as a collagen alpha I(I) gene, or on a part thereof as described above. This term includes sequences corresponding to the entire sequence of the variant of the 3′UTR of a gene, i.e. the full length variant 3′UTR sequence of a gene, and sequences corresponding to a fragment of the variant 3′UTR sequence of a gene. A fragment in this context preferably consists of a continuous stretch of nucleotides corresponding to a continuous stretch of nucleotides in the full-length variant 3′UTR, which represents at least 20%, preferably at least 30%, more preferably at least 40%, more preferably at least 50%, even more preferably at least 60%, even more preferably at least 70%, even more preferably at least 80%, and most preferably at least 90% of the full-length variant 3′UTR. Such a fragment of a variant, in the sense of the present invention, is preferably a functional fragment of a variant as described herein.

[0182] In a particularly preferred embodiment, the at least one mRNA of the inventive composition comprises at least one 5′-untranslated region element (5′UTR element). Preferably, the at least one 5′UTR element comprises or consists of a nucleic acid sequence, which is derived from the 5′UTR of a TOP gene or which is derived from a fragment, homolog or variant of the 5′UTR of a TOP gene.

[0183] It is particularly preferred that the 5′UTR element does not comprise a TOP-motif or a 5′TOP, as defined above.

[0184] In some embodiments, the nucleic acid sequence of the 5′UTR element, which is derived from a 5′UTR of a TOP gene, terminates at its 3′-end with a nucleotide located at position 1, 2, 3, 4, 5, 5, 7, 8, 9 or 10 upstream of the start codon (e.g. A(U/T)G) of the gene or mRNA it is derived from. Thus, the 5′UTR element does not comprise any part of the protein coding region. Thus, preferably, the only protein coding part of the at least one mRNA of the inventive composition is provided by the coding region.

[0185] The nucleic acid sequence derived from the 5′UTR of a TOP gene is preferably derived from a eukaryotic TOP gene, preferably a plant or animal TOP gene, more preferably a chordate TOP gene, even more preferably a vertebrate TOP gene, most preferably a mammalian TOP gene, such as a human TOP gene.

[0186] For example, the 5′UTR element is preferably selected from 5′-UTR elements comprising or consisting of a nucleic acid sequence, which is derived from a nucleic acid sequence selected from the group consisting of SEQ ID Nos: 1-1353, SEQ ID NO: 1395, SEQ ID NO: 1421 and SEQ ID NO: 1422 of the patent application WO2013/143700, whose disclosure is incorporated herein by reference, from the homologs of SEQ ID NOs: 1-1353, SEQ ID NO: 1395, SEQ ID NO: 1421 and SEQ ID NO: 1422 of the patent application WO2013/143700, from a variant thereof, or preferably from a corresponding RNA sequence. The term “homologs of SEQ ID NOs: 1-1353, SEQ ID NO: 1395, SEQ ID NO:1421 and SEQ ID NO: 1422 of the patent application WO2013/143700” refers to sequences of other species than Homo sapiens, which are homologous to the sequences according to SEQ ID NOs: 1-1353, SEQ ID NO: 1395, SEQ ID NO: 1421 and SEQ ID NO: 1422 of the patent application WO2013/1437111

[0187] In a preferred embodiment, the 5′UTR element of the RNA according to the invention comprises or consists of a nucleic acid sequence, which is derived from a nucleic acid sequence extending from nucleotide position 5 (i.e. the nucleotide that is located at position 5 in the sequence) to the nucleotide position immediately 5′ to the start codon (located at the 3′ end of the sequences), e.g. the nucleotide position immediately 5′ to the ATG sequence, of a nucleic acid sequence selected from SEQ ID NOs: 1-1353, SEQ ID NO: 1395, SEQ ID NO: 1421 and SEQ ID NO:1422 of the patent application H2013/1437111 from the homologs of SEQ ID NOs: 1-1353, SEQ ID NO:1395, SEQ ID NO: 1421 and SEQ ID NO: 1422 of the patent application WO2013/143700 from a variant thereof, or a corresponding RNA sequence. It is particularly preferred that the 5′ UTR element is derived from a nucleic acid sequence extending from the nucleotide position immediately 3′ to the 5′TOP to the nucleotide position immediately 5′ to the start codon (located at the 3′ end of the sequences), e.g. the nucleotide position immediately 5′ to the ATG sequence, of a nucleic acid sequence selected from SEQ ID NOs: 1-1353, SEQ ID NO: 1395, SEQ ID NO: 1421 and SEQ ID NO:1422 of the patent application WO2013/143700, from the homologs of SEQ ID NOs 1-1353, SEQ ID NO: 1395, SEQ ID NO: 1421 and SEQ ID NO:1422 of the patent application WO2013/143700, from a variant thereof, or a corresponding RNA sequence.

[0188] In a particularly preferred embodiment, the 5′UTR element comprises or consists of a nucleic acid sequence, which is derived from a 5′UTR of a TOP gene encoding a ribosomal protein or from a variant of a 5′UTR of a TOP gene encoding a ribosomal protein. For example, the 5′UTR element comprises or consists of a nucleic acid sequence, which is derived from a 5′UTR of a nucleic acid sequence according to any of SEQ ID NOs: 67, 170, 193, 244, 259, 554, 650, 675, 700, 721, 913, 1016, 1063, 1120, 1138, and 1284-1360 of the patent application WO2013/143700, a corresponding RNA sequence, a homolog thereof, or a variant thereof as described herein, preferably lacking the 5′TOP motif. As described above, the sequence extending from position 5 to the nucleotide immediately 5′ to the ATG (which is located at the 3′end of the sequences) corresponds to the 5′UTR of said sequences.

[0189] Preferably, the 5′UTR element comprises or consists of a nucleic acid sequence, which is derived from a 5′UTR of a TOP gene encoding a ribosomal Large protein (RPL) or from a homolog or variant of a 5′UTR of a TOP gene encoding a ribosomal Large protein (RPL). For example, the 5′UTR element comprises or consists of a nucleic acid sequence, which is derived from a 5′UTR of a nucleic acid sequence according to any of SEQ ID NOs: 67, 259, 1284-1318, 1344, 1346, 1348-1354, 1357, 1358, 1421 and 1422 of the patent application WO2013/143700, a corresponding RNA sequence, a homolog thereof, or a variant thereof as described herein, preferably lacking the 5′TOP motif.

[0190] In a particularly preferred embodiment, the 5′UTR element comprises or consists of a nucleic acid sequence which is derived from the 5′UTR of a ribosomal protein Large 32 gene, preferably from a vertebrate ribosomal protein Large 32 (L32) gene, more preferably from a mammalian ribosomal protein Large 32 (L32) gene, most preferably from a human ribosomal protein Large 32 (L32) gene, or from a variant of the 5′UTR of a ribosomal protein Large 32 gene, preferably from a vertebrate ribosomal protein Large 32 (L32) gene, more preferably from a mammalian ribosomal protein Large 32 (L32) gene, most preferably from a human ribosomal protein Large 32 (L32) gene, wherein preferably the 5′UTR element does not comprise the 5′TOP of said gene.

[0191] Accordingly, in a particularly preferred embodiment, the 5′UTR element comprises or consists of a nucleic acid sequence, which has an identity of at least about 40%, preferably of at least about 50%, preferably of at least about 60%, preferably of at least about 70%, more preferably of at least about 80%, more preferably of at least about 90%, even more preferably of at least about 95%, even more preferably of at least about 99% to the nucleic acid sequence according to SEQ ID NO: 4537 or SEQ ID NO: 4538 (5′-UTR of human ribosomal protein Large 32 lacking the 5′ terminal oligopyrimidine tract: GGCGCTGCCTACGGAGGGGCAGCCATCTCCTTCTCGGCATC; corresponding to SEQ ID NO:13 GB of the patent application WO2013/143700) or preferably to a corresponding RNA sequence, or wherein the at least one 5′UTR element comprises or consists of a fragment of a nucleic acid sequence which has an identity of at least about 40%, preferably of at least about 50%, preferably of at least about 60%, preferably of at least about 70%, more preferably of at least about 80%, more preferably of at least about 90%, even more preferably of at least about 95%, even more preferably of at least about 99% to the nucleic acid sequence according to SEQ ID NO: 4537 or more preferably to a corresponding RNA sequence (SEQ ID NO: 4538), wherein, preferably, the fragment is as described above, i.e. being a continuous stretch of nucleotides representing at least 20% etc. of the full-length 5′UTR. Preferably, the fragment exhibits a length of at least about 2D nucleotides or more, preferably of at least about 3D nucleotides or more, more preferably of at least about 4D nucleotides or more. Preferably, the fragment is a functional fragment as described herein.

[0192] In some embodiments, the RNA according to the invention comprises a 5′UTR element, which comprises or consists of a nucleic acid sequence, which is derived from the 5′UTR of a vertebrate TOP gene, such as a mammalian, e.g. a human TOP gene, selected from RPSA, RPS2, RPS3, RPS3A, RPS4, RPS5, RPS6, RPS7, RPS8, RPS9, RPS10, RPS11, RPS12, RPS13, RPS14, RPS15, RPS15A, RPS16, RPS17, RPS18, RPS19, RPS20, RPS21, RPS23, RPS24, RPS25, RPS26, RPS27, RPS27A, RPS28, RPS29, RPS30, RPL3, RPL4, RPL5, RPL6, RPL7, RPL7A, RPL8, RPL9, RPL10, RPL10A, RPL11, RPL12, RPL13, RPL13A, RPL14, RPL15, RPL17, RPL18, RPL18A, RPL19, RPL21, RPL22, RPL23, RPL23A, RPL24, RPL25, RPL27, RPL27A, RPL28, RPL29, RPL30, RPL31, RPL32, RPL34, RPL35, RPL35A, RPL36, RPL36A, RPL37, RPL37A, RPL38, RPL39, RPL40, RPL41, RPLP0, RPLP1, RPLP2, RPLP3, RPLP0, RPLP1, RPLP2, EEFIA1, EEFIB2, EEF1D, EEF1G, EEF2, EIF3E, EIF3F, EIF3H, EIF2S3, EIF3C, EIF3K, EIF3EIP, EIF4A2, PABPC1, HNRNPA1, TPT1, TUBB1, UBA52, NPM1, ATP5G2, GNB2L1, NME2, UQCR8, or from a homolog or variant thereof, wherein preferably the 5′UTR element does not comprise a TOP-motif or the 5TOP of said genes, and wherein optionally the 5′UTR element starts at its 5′-end with a nucleotide located at position 1, 2, 3, 4, 5, 5, 7, 8, 9 or 10 downstream of the 5′terminal oligopyrimidine tract (TOP) and wherein further optionally the 5′UTR element which is derived from a 5′UTR of a TOP gene terminates at its 3′-end with a nucleotide located at position 1, 2, 3, 4, 5, 5, 7, 8, 9 or 10 upstream of the start codon (A(U/T)G) of the gene it is derived from.

[0193] In further particularly preferred embodiments, the 5′UTR element comprises or consists of a nucleic acid sequence, which is derived from the 5′UTR of a ribosomal protein Large 32 gene (RPL32), a ribosomal protein Large 35 gene (RPL35), a ribosomal protein Large 21 gene (RPL21), an ATP synthase, H+ transporting, mitochondrial F1 complex, alpha subunit 1, cardiac muscle (ATP5A1) gene, an hydroxysteroid (17-beta) dehydrogenase 4 gene (HSD17B4), an androgen-induced 1 gene (AIG1), cytochrome c oxidase subunit VIc gene (COX6C), or a N-acylsphingosine amidohydrolase (acid ceramidase) 1 gene (ASAH1) or from a variant thereof, preferably from a vertebrate ribosomal protein Large 32 gene (RPL32), a vertebrate ribosomal protein Large 35 gene (RPL35), a vertebrate ribosomal protein Large 21 gene (RPL21), a vertebrate ATP synthase, H+ transporting, mitochondrial F1 complex, alpha subunit 1, cardiac muscle (ATP5A1) gene, a vertebrate hydroxysteroid (17-beta) dehydrogenase 4 gene (HSD17B4), a vertebrate androgen-induced 1 gene (AIG1), a vertebrate cytochrome c oxidase subunit VIc gene (COX6C), or a vertebrate N-acylsphingosine amidohydrolase (acid ceramidase) 1 gene (ASAH1) or from a variant thereof, more preferably from a mammalian ribosomal protein Large 32 gene (RPL32), a ribosomal protein Large 35 gene (RPL35), a ribosomal protein Large 21 gene (RPL2I), a mammalian ATP synthase, H+ transporting, mitochondrial F1 complex, alpha subunit 1, cardiac muscle (ATP5A1) gene, a mammalian hydroxysteroid (17-beta) dehydrogenase 4 gene (HSD17B4), a mammalian androgen-induced 1 gene (AIG1), a mammalian cyto-chrome c oxidase subunit VIc gene (COX6C), or a mammalian N-acylsphingosine amidohydrolase (acid ceramidase) 1 gene (ASAH1) or from a variant thereof, most preferably from a human ribosomal protein Large 32 gene (RPL32), a human ribosomal protein Large 35 gene (RPL35), a human ribosomal protein Large 21 gene (RPL2I), a human ATP synthase, H+ transporting, mitochondrial F1 complex, alpha subunit 1, cardiac muscle (ATP5A1) gene, a human hydroxysteroid (17-beta) dehydrogenase 4 gene (HSD17B4), a human androgen-induced 1 gene (AIG1), a human cytochrome c oxidase subunit VIc gene (COX6C), or a human N-acylsphingosine amidohydrolase (acid ceramidase) 1 gene (ASAH1) or from a variant thereof, wherein preferably the 5′UTR element does not comprise the 5′TOP of said gene.

[0194] Accordingly, in a particularly preferred embodiment, the 5′UTR element comprises or consists of a nucleic acid sequence, which has an identity of at least about 40%, preferably of at least about 50%, preferably of at least about 50%, preferably of at least about 70%, more preferably of at least about 80%, more preferably of at least about 90%, even more preferably of at least about 95%, even more preferably of at least about 99% to the nucleic acid sequence according to SEQ ID NO: 1368, or SEQ ID NOs: 1412-1420 of the patent application WO2013/143700, or a corresponding RNA sequence, or wherein the at least one 5′UTR element comprises or consists of a fragment of a nucleic acid sequence which has an identity of at least about 40%, preferably of at least about 50%, preferably of at least about 60%, preferably of at least about 70%, more preferably of at least about 80%, more preferably of at least about 90%, even more preferably of at least about 95%, even more preferably of at least about 99% to the nucleic acid sequence according to SEQ ID NO: 1368, or SEQ ID NOs: 1412-1420 of the patent application WO2013/143700, wherein, preferably, the fragment is as described above, i.e. being a continuous stretch of nucleotides representing at least 20% etc. of the full-length 5′UTR. Preferably, the fragment exhibits a length of at least about 20 nucleotides or more, preferably of at least about 30 nucleotides or more, more preferably of at least about 40 nucleotides or more. Preferably, the fragment is a functional fragment as described herein.

[0195] Accordingly, in a particularly preferred embodiment, the 5′UTR element comprises or consists of a nucleic acid sequence, which has an identity of at least about 40%, preferably of at least about 50%, preferably of at least about 60%, preferably of at least about 70%, more preferably of at least about 80%, more preferably of at least about 90%, even more preferably of at least about 95%, even more preferably of at least about 99% to the nucleic acid sequence according to SEQ ID NO: 4539 or SEQ ID NO: 4540 (5′-UTR of ATP5A1 lacking the 5′ terminal oligopyrimidine tract: GCGGCTGGCCATTTTGTCCCAGTCCGGAGGCTGCGGCTGCAGAAGTACCGCCTGCG-GAGTAACTGCAAAG; corresponding to SEQ ID No. 1414 of the patent application WO2013/143700) or preferably to a corresponding RNA sequence, or wherein the at least one 5′UTR element comprises or consists of a fragment of a nucleic acid sequence which has an identity of at least about 40%, preferably of at least about 50%, preferably of at least about 60%, preferably of at least about 70%, more preferably of at least about 80%, more preferably of at least about 90%, even more preferably of at least about 95%, even more preferably of at least about 99% to the nucleic acid sequence according to SEQ ID NO: 4539 or more preferably to a corresponding RNA sequence (SEQ ID NO: 4540), wherein, preferably, the fragment is as described above, i.e. being a continuous stretch of nucleotides representing at least 20% etc. of the full-length 5′UTR. Preferably, the fragment exhibits a length of at least about 20 nucleotides or more, preferably of at least about 30 nucleotides or more, more preferably of at least about 40 nucleotides or more. Preferably, the fragment is a functional fragment as described herein.

[0196] Preferably, the at least one 5′UTR element and the at least one 3′UTR element act synergistically to increase protein production from the at least one mRNA of the inventive composition as described above.

[0197] In a particularly preferred embodiment, the RNA according to the invention comprises a histone stem-loop sequence/structure. Such histone stem-loop sequences are preferably selected from histone stem-loop sequences as disclosed in WO 2012/019780, the disclosure of which is incorporated herewith by reference.

[0198] A histone stem-loop sequence, suitable to be used within the present invention, is preferably selected from at least one of the following formulae (I) or (II):

[0199] Formula (I) (Stem-Loop Sequence without Stem Bordering Elements):

[chemical structure]

[0200] Formula (II) (Stem-Loop Sequence with Stem Bordering Elements):

[chemical structure]

[0201] wherein:

| | |
|---|---|
| stem1 or stem2 bordering elements N₁₋₆ | is a consecutive sequence of 1 to 6, preferably of 2 to 6, more preferably of |
| | 2 to 5, even more preferably of 3 to 5, most preferably of 4 to 5 or 5N, |
| | wherein each N is independently from another selected from a nucleotide |
| | selected from A, U, T, G and C, or a nucleotide analogue thereof: |
| stem1 [N₀₋₂GN₃₋₅] | is reverse complementary or partially reverse complementary with element |
| | stem2, and is a consecutive sequence between of 5 to 7 nucleotides; |
| | wherein N₀₋₂ is a consecutive sequence of 0 to 2, preferably of 0 to 1, more |
| | preferably of 1N, wherein each N is independently from another selected |
| | from a nucleotide selected from A, U, T, G and C or a nucleotide analogue |
| | thereof; |
| | wherein N₃₋₅ is a consecutive sequence of 3 to 5, preferably of 4 to 5, more |
| | preferably of 4N, wherein each N is independently from another selected |
| | from a nucleotide selected from A, U, T, G and C or a nucleotide analogue |
| | thereof, and |
| | wherein G is guanosine or an analogue thereof, and may be optionally |
| | replaced by a cytidine or an analogue thereof, provided that its |
| | complementary nucleotide cytidine in stem2 is replaced by guanosine; |
| loop sequence [N₀₋₄(U/T)N₀₋₄] | is located between elements stem1 and stem2, and is a consecutive |
| | sequence of 3 to 5 nucleotides, more preferably of 4 nucleotides; |
| | wherein each N₀₋₄ is independent from another a consecutive sequence of 0 |
| | to 4, preferably of 1 to 3, more preferably of 1 to 2N, wherein each N is |
| | independently from another selected from a nucleotide selected from A, U, |
| | T, G and C or a nucleotide analogue thereof; and |
| | wherein U/T represents uridine, or optionally thymidine; |
| stem2 [N₃₋₅CN₀₋₂] | is reverse complementary or partially reverse complementary with element |
| | stem1, and is a consecutive sequence between of 5 to 7 nucleotides; |
| | wherein N₃₋₅ is a consecutive sequence of 3 to 5, preferably of 4 to 5, more |
| | preferably of 4N, wherein each N is independently from another selected |
| | from a nucleotide selected from A, U, T, G and C or a nucleotide analogue |
| | thereof; |
| | wherein N₀₋₂ is a consecutive sequence of 0 to 2, preferably of 0 to 1, more |
| | preferably of 1N, wherein each N is independently from another selected |
| | from a nucleotide selected from A, U, T, G or C or a nucleotide analogue |
| | thereof; and |
| | wherein C is cytidine or an analogue thereof, and may be optionally replaced |
| | by a guanosine or an analogue thereof provided that its complementary |
| | nucleoside guanosine in stem1 is replaced by cytidine; |

[0202] wherein

[0203] stem1 and stem2 are capable of base pairing with each other forming a reverse complementary sequence, wherein base pairing may occur between stem) and stem2, e.g. by Watson-Crick base pairing of nucleotides A and U/T or G and C or by non-Watson-Crick base pairing e.g. wobble base pairing, reverse Watson-Crick base pairing, Hoogsteen base pairing, reverse Hoogsteen base pairing or are capable of base pairing with each other forming a partially reverse complementary sequence, wherein an incomplete base pairing may occur between stem1 and stem2, on the basis that one ore more bases in one stem do not have a complementary base in the reverse complementary sequence of the other stem.

[0204] According to a further preferred embodiment, the RNA according to the invention may comprise at least one histone stem-loop sequence according to at least one of the following specific formulae (Ia) or (IIa):

[0205] Formula (Ia) (Stem-Loop Sequence without Stem Bordering Elements):

[chemical structure]

[0206] Formula (IIa) (Stem-Loop Sequence with Stem Bordering Elements):

[chemical structure]

[0207] wherein:

[0208] N, C, G, T and U are as defined above.

[0209] According to a further more particularly preferred embodiment, the RNA according to the invention may comprise at least one histone stem-loop sequence according to at least one of the following specific formulae (Ib) or (IIb):

[0210] Formula (Ib) (Stem-Loop Sequence without Stem Bordering Elements):

[chemical structure]

[0211] Formula (IIb) (Stem-Loop Sequence with Stem Bordering Elements):

[chemical structure]

[0212] wherein:

[0213] N, C, G, T and U are as defined above.

[0214] A particularly preferred histone stem-loop sequence is the sequence CAAAGGCTCTTTTCAGAGCCACCA (according to SEQ ID NO: 3547) or more preferably the corresponding RNA sequence CAAAGGCUCUUUUCAGAGCCACCA (according to SEQ ID NO: 4556).

[0215] According to another particularly preferred embodiment, the RNA according to the invention may additionally or alternatively encode a secretory signal peptide. Such signal peptides are sequences, which typically exhibit a length of about 15 to 30 amino acids and are preferably located at the N-terminus of the encoded peptide, without being limited thereto. Signal peptides as defined herein preferably allow the transport of the antigen, antigenic protein or antigenic peptide as encoded by the at least one mRNA of the composition into a defined cellular compartment, preferably the cell surface, the endoplasmic reticulum (ER) or the endosomal-lysosomal compartment. Examples of secretory signal peptide sequences as defined herein include, without being limited thereto, signal sequences of classical or non-classical MHC-molecules (e.g. signal sequences of MHC I and II molecules, e.g. of the MHC class I molecule HLA-A*0201), signal sequences of cytokines or immunoglobulines as defined herein, signal sequences of the invariant chain of immunoglobulines or antibodies as defined herein, signal sequences of tempi, Tapasin, Erp57, Calretikulin, Calnexin, and further membrane associated proteins or of proteins associated with the endoplasmic reticulum (ER) or the endosomal-lysosomal compartment. Most preferably, signal sequences of MHC class I molecule HLA-A*0201 may be used according to the present invention. For example, a signal peptide derived from HLA-A is preferably used in order to promote secretion of the encoded antigen as defined herein or a fragment or variant thereof. More preferably, an HLA-A signal peptide is fused to an encoded antigen as defined herein or to a fragment or variant thereof:

[0216] Any of the above modifications may be applied to the RNA of the present invention, and further to any RNA as used in the context of the present invention and may be, if suitable or necessary, be combined with each other in any combination, provided, these combinations of modifications do not interfere with each other in the respective at least one mRNA. A person skilled in the art will be able to take his choice accordingly.

[0217] The RNA, preferably an mRNA, according to the invention, which comprises at least one coding sequence as defined herein, may preferably comprise a 5′ UTR and/or a 3′ UTR preferably containing at least one histone stem-loop. Where, in addition to the antigen as defined herein or a fragment or variant thereof, a further peptide or protein is encoded by the at least one coding sequence of the RNA according to the invention, the encoded peptide or protein is preferably no histone protein, no reporter protein and/or no marker or selection protein, as defined herein. The 3′ UTR of the RNA according to the invention preferably comprises also a poly(A) and/or a poly(C) sequence as defined herein. The single elements of the 3′ UTR may occur therein in any order from 5′ to 3′ along the sequence of the RNA of the present invention. In addition, further elements as described herein, may also be contained, such as a stabilizing sequence as defined herein (e.g. derived from the UTR of a globin gene), IRES sequences, etc. Each of the elements may also be repeated in the RNA according to the invention at least once (particularly in di- or multicistronic constructs), preferably twice or more. As an example, the single elements may be present in the RNA according to the invention in the following order:

[0218] 5′-coding region-histone stem-loop poly(A)/(C) sequence-3′; or

[0219] 5′-coding region-poly(A)/(C) sequence-histone stem-loop-3′; or

[0220] 5′-coding region-histone stem-loop polyadenylation signal-3′; or

[0221] 5′-coding region-polyadenylation signal-histone stem-loop-3′; or

[0222] 5′-coding region-histone stem-loop-histone stem-loop poly(A)/(C) sequence-3′; or

[0223] 5′-coding region-histone stem-loop-histone stem-loop-polyadenylation signal-3′; or

[0224] 5′-coding region-stabilizing sequence-poly(A)/(C) sequence-histone stem-loop 3′; or

[0225] 5′ coding region-stabilizing sequence-poly(A)/(C) sequence-poly(A)/(C) sequence-histone stem-loop-3′; etc.

[0226] According to a further embodiment, the RNA, preferably an mRNA, of the present invention preferably comprises at least one of the following structural elements: a 5′- and/or 3′-untranslated region element (UTR element), particularly a 5′-UTR element, which preferably comprises or consists of a nucleic acid sequence which is derived from the 5′-UTR of a TOP gene or from a fragment, homolog or a variant thereof, or a 5′- and/or 3′-UTR element which may preferably be derivable from a gene that provides a stable mRNA or from a homolog, fragment or variant thereof; a histone-stem-loop structure, preferably a histone-stem-loop in its 3′ untranslated region; a 5′-cap structure; a poly-A tail; or a poly(C) sequence.

[0227] According to some embodiments, it is particularly preferred that if, in addition to an antigen as defined herein or a fragment or variant thereof, a further peptide or protein is encoded by the at least one coding sequence as defined herein—the encoded peptide or protein is preferably no histone protein, no reporter protein (e.g. Luciferase, GFP, EGFP, β-Galactosidase, particularly EGFP) and/or no marker or selection protein (e.g. alpha-Globin, Galactokinase and Xanthine:Guanine phosphoribosyl transferase (GPT)). In a preferred embodiment, the RNA according to the invention does not comprise a reporter gene or a marker gene. Preferably, the RNA according to the invention does not encode, for instance, luciferase; green fluorescent protein (GFP) and its variants (such as eGFP, RFP or BFP); α-globin; hypoxanthine-guanine phosphoribosyltransferase (HGPRT); β-galactosidase; galactokinase; alkaline phosphatase; secreted embryonic alkaline phosphatase (SEAP)) or a resistance gene (such as a resistance gene against neomycin, puromycin, hygromycin and zeocin). In a preferred embodiment, the RNA according to the invention does not encode luciferase. In another embodiment, the RNA according to the invention does not encode GFP or a variant thereof.

[0228] According to a preferred embodiment, the RNA according to the present invention comprises, preferably in 5′ to 3′ direction, the following elements:
[0229] a) a 5′-CAP structure, preferably m7GpppN,
[0230] b) at least one coding sequence comprising or consisting of any one of the nucleic acid sequences defined in the fifth column (column ‘C’) of Table 1, or a fragment or variant thereof,
[0231] c) a poly(A) tail, preferably consisting of 10 to 200, 10 to 100, 40 to 80 or 50 to 70 adenosine nucleotides,
[0232] d) a poly(C) tail, preferably consisting of 10 to 200, 10 to 100, 20 to 70, 20 to 60 or 10 to 40 cytosine nucleotides, and
[0233] e) a histone stem-loop, preferably comprising the RNA sequence according to SEQ ID NO: 4556.

[0234] More preferably, the RNA according to the invention comprises, preferably in 5′ to 3′ direction, the following elements:
[0235] a) a 5′-CAP structure, preferably m7GpppN,
[0236] b) at least one coding sequence comprising or consisting of any one of the nucleic acid sequences defined in the fifth column (column ‘C’) of Table 1, or a fragment or variant thereof,
[0237] c) a 3′-UTR element comprising a nucleic acid sequence, which is derived from an α-globin gene, preferably comprising the corresponding RNA sequence of the nucleic acid sequence according to SEQ ID NO: 4547, or a homolog, a fragment or a variant thereof,
[0238] d) a poly(A) tail, preferably consisting of 10 to 200, 10 to 100, 40 to 80 or 50 to 70 adenosine nucleotides,
[0239] e) a poly(C) tail, preferably consisting of 10 to 200, 10 to 100, 20 to 70, 20 to 60 or 10 to 40 cytosine nucleotides, and
[0240] f) a histone stem-loop, preferably comprising the RNA sequence according to SEQ ID NO: 4556.

[0241] In a further embodiment, the RNA according to the invention comprises, preferably in 5′ to 3′ direction, the following elements:
[0242] a) a 5′-CAP structure, preferably m7GpppN,
[0243] b) a 5′-UTR element, which preferably comprises or consists of a nucleic acid sequence, which is derived from the 5′-UTR of a TOP gene, preferably comprising an RNA sequence corresponding to the nucleic acid sequence according to SEQ ID NO: 4537, or a homolog, a fragment or a variant thereof,
[0244] c) at least one coding sequence comprising or consisting of any one of the nucleic acid sequences defined in the fifth column (column ‘C’) of Table 1, or a fragment or variant thereof,
[0245] d) a 3′-UTR element comprising a nucleic acid sequence, which is preferably derived from an α-globin gene, preferably comprising the corresponding RNA sequence of the nucleic acid sequence according to SEQ ID NO: 4547, or a homolog, a fragment or a variant thereof; and/or
   [0246] a 3′-UTR element comprising a nucleic acid sequence, which is derived from an albumin gene, preferably comprising the corresponding RNA sequence of the nucleic acid sequence according to SEQ ID NO: 4551, or a homolog, a fragment or a variant thereof,
[0247] e) a poly(A) tail, preferably consisting of 10 to 200, 10 to 100, 40 to 80 or 50 to 7D adenosine nucleotides,
[0248] f) a poly(C) tail, preferably consisting of 10 to 200, 10 to 100, 20 to 70, 20 to 60 or 10 to 40 cytosine nucleotides, and
[0249] g) a histone stem-loop, preferably comprising the RNA sequence according to SEQ ID NO: 4556.

[0250] The RNA according to the present invention may be prepared using any method known in the art, including synthetic methods such as e.g. solid phase RNA synthesis, as well as in vitro methods, such as RNA in vitro transcription reactions.

[0251] In a further aspect, the present invention concerns a composition comprising the RNA comprising at least one coding sequence as defined herein and a pharmaceutically acceptable carrier. The composition according to the invention is preferably provided as a pharmaceutical composition or as a vaccine.

[0252] According to a preferred embodiment, the (pharmaceutical) composition or the vaccine according to the invention comprises the RNA of the present invention, wherein the at least one coding sequence of the RNA encodes any one of the tumor antigens as defined in Table 1, preferably as defined in the first (‘Gene Name’), second (‘Protein Accession No.’) or third column (‘A’) of Table 1, or a fragment or variant of any one of these antigens.

[0253] Preferably, the (pharmaceutical) composition or the vaccine according to the invention comprises the RNA of the present invention, wherein the at least one coding sequence of the RNA comprises or consists of a nucleic acid sequence encoding a tumor antigen, or a fragment or variant of a tumor antigen, wherein the tumor antigen preferably comprises or consists of any one of the amino acid sequences defined in Table 1 herein, preferably in the third column (column ‘A’) of Table 1, or a fragment or variant of any one of these sequences.

[0254] Preferably, the (pharmaceutical) composition or the vaccine according to the invention comprises the RNA of the present invention, wherein the at least one coding sequence of the RNA comprises or consists of a nucleic acid sequence encoding a tumor antigen, or a fragment or variant of a tumor antigen, wherein the tumor antigen preferably comprises or consists of an amino acid sequence having a sequence identity of at least 5%, 10%, 20%, 30%, 40%, 50%, 60%, 70%, 80%, 85%, 86%, 87%, 88%, 89%, 90%, 91%, 92%, 93%, 94%, 95%, 96%, 97%, 98%, or 99%, preferably of at least 70%, more preferably of at least 80%, even more preferably at least 85%, even more preferably of at least 90% and most preferably of at least 95% or even 97%, with any one of the amino acid sequences defined in Table 1 herein, preferably in the third column (column ‘A’) of Table 1, or a fragment or variant of any one of these sequences.

[0255] More preferably, the (pharmaceutical) composition or the vaccine according to the invention comprises the RNA of the present invention, wherein the at least one coding sequence of the RNA comprises or consists of a nucleic acid sequence encoding a tumor antigen, or a fragment or variant of a tumor antigen, wherein the tumor antigen preferably comprises or consists of an amino acid sequence having a sequence identity of at least 80% with any one of the amino acid sequences defined in Table 1 herein, preferably in the third column (column ‘A’) of Table 1, or a fragment or variant of any one of these sequences.

[0256] In preferred embodiments, the (pharmaceutical) composition or the vaccine according to the invention comprises the RNA of the present invention, wherein the at least one coding sequence of the RNA comprises or consists of any one of the nucleic acid sequences defined in Table 1, preferably in the fourth or fifth column (column ‘B’ or ‘C’, respectively) of Table 1, or a fragment or variant of any one of these sequences.

[0257] According to another embodiment, the (pharmaceutical) composition or the vaccine according to the invention comprises the RNA of the present invention, wherein the at least one coding sequence of the RNA comprises or consists of a nucleic acid sequence having a sequence identity of at least 5%, 10%, 20%, 30%, 40%, 50%, 60%, 70%, 80%, 85%, 86%, 87%, 88%, 89%, 90%, 91%, 92%, 93%, 94%, 95%, 96%, 97%, 98%, or 99%, preferably of at least 70%, more preferably of at least 80%, even more preferably at least 85%, even more preferably of at least 90% and most preferably of at least 95% or even 97%, with any one of the nucleic acid sequences defined in Table 1, preferably in the fourth or fifth column (column ‘B’ or ‘C’, respectively) of Table 1, or a fragment or variant of any one of these sequences.

[0258] According to a particularly preferred embodiment, the (pharmaceutical) composition or the vaccine according to the invention comprises the RNA of the present invention, wherein the at least one coding sequence of the RNA comprises or consists of a nucleic acid sequence having a sequence identity of at least 80% with any one of the nucleic acid sequences defined in Table 1, preferably in the fourth or fifth column (column ‘B’ or ‘C’, respectively) of Table 1, or a fragment or variant of any one of these sequences.

[0259] More preferably, the (pharmaceutical) composition or the vaccine according to the invention comprises the RNA of the present invention, wherein the at least one coding sequence of the RNA comprises or consists of any one of the nucleic acid sequences defined in the fifth column (‘C’) of Table 1, or a fragment or variant of any one of these sequences.

[0260] According to a further embodiment, the (pharmaceutical) composition or the vaccine according to the invention comprises the RNA of the present invention, wherein the at least one coding sequence of the RNA comprises or consists of a nucleic acid sequence having a sequence identity of at least 5%, 10%, 20%, 30%, 40%, 50%, 60%, 70%, 80%, 85%, 86%, 87%, 88%, 89%, 90%, 91%, 92%, 93%, 94%, 95%, 96%, 97%, 98%, or 99%, preferably of at least 70%, more preferably of at least 80%, even more preferably at least 85%, even more preferably of at least 90% and most preferably of at least 95% or even 97%, with any one of the nucleic acid sequences defined in the fifth column (‘C’) of Table 1, or a fragment or variant of any one of these sequences.

[0261] According to a particularly preferred embodiment, the (pharmaceutical) composition or the vaccine according to the invention comprises the RNA of the present invention, wherein the at least one coding sequence of the RNA comprises or consists of a nucleic acid sequence having a sequence identity of at least 80% with any one of the nucleic acid sequences defined in the fifth column (‘C’) of Table 1, or a fragment or variant of any one of these sequences.

[0262] In the context of the present invention, the (pharmaceutical) composition or vaccine may encode one or more of the tumor antigens defined herein or a fragment or variant thereof.

[0263] The (pharmaceutical) composition or vaccine according to the invention may thus comprise the RNA of the present invention, wherein the RNA encodes one specific antigen of the antigens defined herein or a fragment or a variant thereof. In that embodiment, the (pharmaceutical) composition or vaccine preferably comprises the RNA according to the invention comprising the at least one coding sequence as defined herein encoding the antigen or a fragment or variant thereof.

[0264] Alternatively, the (pharmaceutical) composition or vaccine of the present invention may comprise at least one RNA according to the invention, wherein the at least one RNA encodes at least two, three, four, five, six, seven, eight, nine, ten, eleven or twelve distinct antigens as defined herein or a fragment or variant thereof. Preferably, the (pharmaceutical) composition or vaccine comprises several classes of the RNA according to the invention, wherein each RNA species encodes one of the antigens or a fragment or variant thereof. In another embodiment, the RNA comprised in the (pharmaceutical) composition or vaccine is a bi- or multicistronic RNA as defined herein, which encodes the at least two, three, four, five, six, seven, eight, nine, ten, eleven or twelve distinct antigens. Mixtures between these embodiments are also envisaged, such as compositions comprising more than one RNA species, wherein at least one RNA species may be monocistronic, while at least one other RNA species may be bi- or multicistronic.

[0265] The (pharmaceutical) composition or vaccine according to the present invention, preferably the at least one coding sequence of the RNA comprised therein, may thus comprise any combination of the nucleic acid sequences as defined herein.

[0266] In a preferred embodiment of the composition according to the invention, the RNA is complexed with one or more cationic or polycationic compounds, preferably with cationic or polycationic polymers, cationic or polycationic peptides or proteins, e.g. protamine, cationic or polycationic polysaccharides and/or cationic or polycationic lipids.

[0267] According to a preferred embodiment, the RNA of the composition according to the present invention may be complexed with lipids to form one or more liposomes, lipoplexes, or lipid nanoparticles. Therefore, in one embodiment, the inventive composition comprises liposomes, lipoplexes, and/or lipid nanoparticles comprising the at least one mRNA.

[0268] Lipid-based formulations have been increasingly recognized as one of the most promising delivery systems for RNA due to their biocompatibility and their ease of large-scale production. Cationic lipids have been widely studied as synthetic materials for delivery of RNA. After mixing together, nucleic acids are condensed by cationic lipids to form lipid/nucleic acid complexes known as lipoplexes. These lipid complexes are able to protect genetic material from the action of nucleases and deliver it into cells by interacting with the negatively charged cell membrane. Lipoplexes can be prepared by directly mixing positively charged lipids at physiological pH with negatively charged nucleic acids.

[0269] Conventional liposomes consist of a lipid bilayer that can be composed of cationic, anionic, or neutral (phospho)lipids and cholesterol, which encloses an aqueous core. Both the lipid bilayer and the aqueous space can incorporate hydrophobic or hydrophilic compounds, respectively. Liposome characteristics and behaviour in vivo can be modified by addition of a hydrophilic polymer coating, e.g. polyethylene glycol (PEG), to the liposome surface to confer steric stabilization. Furthermore, liposomes can be used for specific targeting by attaching ligands (e.g., antibodies, peptides, and carbohydrates) to its surface or to the terminal end of the attached PEG chains (Front Pharmacol. 2015 Dec. 1; 6:286).

[0270] Liposomes are colloidal lipid-based and surfactant-based delivery systems composed of a phospholipid bilayer surrounding an aqueous compartment. They may present as spherical vesicles and can range in size from 20 nm to a few microns. Cationic lipid-based liposomes are able to complex with negatively charged nucleic acids via electrostatic interactions, resulting in complexes that offer biocompatibility, low toxicity, and the possibility of the large-scale production required for in vivo clinical applications. Liposomes can fuse with the plasma membrane for uptake; once inside the cell, the liposomes are processed via the endocytic pathway and the genetic material is then released from the endosome/carrier into the cytoplasm. Liposomes have long been perceived as drug delivery vehicles because of their superior biocompatibility, given that liposomes are basically analogs of biological membranes, and can be prepared from both natural and synthetic phospholipids (Int J Nanomedicine. 2014; 9:1833-1843).

[0271] Cationic liposomes have been traditionally the most commonly used non-viral delivery systems for oligonucleotides, including plasmid DNA, antisense oligos, and siRNA/small hairpin RNA-shRNA). Cationic lipids, such as MAP, (1,2-dioleoyl-3-trimethylammonium-propane) and DOTMA (N-[1-(2,3-dioleoyloxy)propyl]-N,N,N-trimethyl-ammonium methyl sulfate) can form complexes or lipoplexes with negatively charged nucleic acids to form nanoparticles by electrostatic interaction, providing high in vitro transfection efficiency. Furthermore, neutral lipid-based nanoliposomes for RNA delivery as e.g. neutral 1,2-dioleoyl-sn-glycero-3-phosphatidylcholine (DOPC)-based nanoliposomes were developed. (Adv Drug Deliv Rev. 2014 February; 55:110-115.).

[0272] Therefore, in one embodiment the RNA of the composition according to the present invention is complexed with cationic lipids and/or neutral lipids and thereby forms liposomes, lipid nanoparticles, lipoplexes or neutral lipid-based nanoliposomes.

[0273] In a preferred embodiment, the composition according to the invention comprises the RNA according to the invention that is formulated together with a cationic or polycationic compound and/or with a polymeric carrier. Accordingly, in a further embodiment of the invention, it is preferred that the RNA as defined herein or any other nucleic acid comprised in the inventive (pharmaceutical) composition or vaccine is associated with or complexed with a cationic or polycationic compound or a polymeric carrier, optionally in a weight ratio selected from a range of about 6:1 (w/w) to about 0.25:1 (w/w), more preferably from about 5:1 (w/w) to about 0.5:1 (w/w), even more preferably of about 4:1 (w/w) to about 1:1 (w/w) or of about 3:1 (w/w) to about 1:1 (w/w), and most preferably a ratio of about 3:1 (w/w) to about 2:1 (w/w) of mRNA or nucleic acid to cationic or polycationic compound and/or with a polymeric carrier; or optionally in a nitrogen/phosphate (N/P) ratio of mRNA or nucleic acid to cationic or polycationic compound and/or polymeric carrier in the range of about 0.1-10, preferably in a range of about 0.3-4 or 0.3-1, and most preferably in a range of about 0.5-1 or 0.7-1, and even most preferably in a range of about 0.3-0.9 or 0.5-0.9. More preferably, the N/P ratio of the at least one mRNA to the one or more polycations is in the range of about 0.1 to 10, including a range of about 0.3 to 4, of about 0.5 to 2, of about 0.7 to 2 and of about 0.7 to 1.5.

[0274] Therein, the RNA as defined herein or any other nucleic acid comprised in the (pharmaceutical) composition or vaccine according to the invention can also be associated with a vehicle, transfection or complexation agent for increasing the transfection efficiency and/or the immunostimulatory properties of the RNA according to the invention or of optionally comprised further included nucleic acids.

[0275] Cationic or polycationic compounds, being particularly preferred agents in this context include protamine, nucleoline, spermine or spermidine, or other cationic peptides or proteins, such as poly-L-lysine (PLL), poly-arginine, basic polypeptides, cell penetration peptides (CPPs), including HIV-binding peptides, HIV-1 Tat (HIV), Tat-derived peptides, Penetratin, VP22 derived or analog peptides, HSV VP22 (Herpes simplex), MAP, KALA or protein transduction domains (PTDs), PpT62 0, prolin-rich peptides, arginine-rich peptides, lysine-rich peptides, MPG-peptide(s), Pep-1, L-oligomers, Calcitonin peptide(s), Antennapedia-derived peptides (particularly from Drosophila antennapedia), pAntp, plsI, FGF, Lactoferrin, Transportan, Buforin-2, Bac715-24, SynB, SynB(I), pVEC, hCT-derived peptides, SAP, or histones. More preferably, the RNA according to the invention is complexed with one or more polycations, preferably with protamine or oligofectamine, most preferably with protamine. In this context protamine is particularly preferred.

[0276] Additionally, preferred cationic or polycationic proteins or peptides may be selected from the following proteins or peptides having the following total formula (III):

(Arg)ₗ;(Lys)ₘ;(His)ₙ;(Orn)ₒ;(Xaa)ₓ, (formula (III))

wherein l+m+n+o+x=8-15, and l, m, n or o independently of each other may be any number selected from 0, 1, 2, 3, 4, 5, 6, 7, 8, 9, 10, 11, 12, 13, 14 or 15, provided that the overall content of Arg, Lys, His and Orn represents at least 50% of all amino acids of the oligopeptide; and Xaa may be any amino acid selected from native (=naturally occurring) or non-native amino acids except of Arg, Lys, His or Urn; and x may be any number selected from 0, 1, 2, 3 or 4, provided, that the overall content of Xaa does not exceed 50% of all amino acids of the oligopeptide. Particularly preferred cationic peptides in this context are e.g. Arg₇, Arg₈, Arg₉, H₃R₉, R₉H₃, H₃R₉H₃, YSSR₉SSY, (RKH)₄, Y(RKH)₂R, etc. In this context the disclosure of WO 2009/030481 is incorporated herewith by reference.

[0277] Further preferred cationic or polycationic compounds, which can be used as transfection or complexation agent may include cationic polysaccharides, for example chitosan, polybrene, cationic polymers, e.g. polyethyleneimine (PEI), cationic lipids, e.g. DOTMA: [1-(2,3-sioleyloxy)propyl)]-N,N,N-trimethylammonium chloride, DMRIE, di-C14-amidine, DOTIM, SAINT, DC-ChoI, BGTC, CTAP, DOPE, LEAP, DOPE: Dioleyl phosphatidylethanol-amine, DOSPA, DODAB, DOIC, DMEPC, DOGS: Dioctadecylamidoglicylspermin, DIMRI: Dimyristo-oxypropyl dimethyl hydroxyethyl ammonium bromide, DOTAP: dioleoyloxy-3-(trimethylammonio)propane, DC-6-14: O,O-ditetradecanoyl-N-(α-trimethylammonioacetyl)diethanolamine chloride, CLIP1: rac-[(2,3-dioctadecyloxypropyl)(2-hydroxyethyl)]-dimethylammonium chloride, CLIP6: rac[2(2,3-dihexadecyloxypropyl-oxymethyloxy)ethyl]trimethylammonium, CLIP9: rac-[2(2,3-dihexadecyloxypropyl-oxysuccinyloxy)ethyl]-trimethylammonium, oligofectamine, or cationic or polycationic polymers, e.g. modified polyaminoacids, such as β-aminoacid-polymers or reversed polyamides, etc., modified polyethylenes, such as PVP (poly(N-ethyl-4-vinylpyridinium bromide)), etc., modified acrylates, such as pDMAEMA (poly(dimethylaminoethyl methylacrylate)), etc., modified amidoamines such as pAMAM (poly(amidoamine)), etc., modified polybetaaminoester (PBAE), such as diamine end modified 1,4 butanediol diacrylate-co-5-amino-1-pentanol polymers, etc., dendrimers, such as polypropylamine dendrimers or pAMAM based dendrimers, etc., polyimine(s), such as PEI: poly(ethyleneimine), poly(propyleneimine), etc., polyallylamine, sugar backbone based polymers, such as cyclodextrin based polymers, dextran based polymers, chitosan, etc., silan backbone based polymers, such as PMOXA-PDMS copolymers, etc., block polymers consisting of a combination of one or more cationic blocks (e.g. selected from a cationic polymer as mentioned above) and of one or more hydrophilic or hydrophobic blocks (e.g. polyethyleneglycole); etc.

[0278] According to a preferred embodiment, the composition of the present invention comprises the RNA as defined herein and a polymeric carrier. A polymeric carrier used according to the invention might be a polymeric carrier formed by disulfide-crosslinked cationic components. The disulfide-crosslinked cationic components may be the same or different from each other. The polymeric carrier can also contain further components. It is also particularly preferred that the polymeric carrier used according to the present invention comprises mixtures of cationic peptides, proteins or polymers and optionally further components as defined herein, which are crosslinked by disulfide bonds as described herein. In this context, the disclosure of WO 2012/013326 is incorporated herewith by reference.

[0279] In this context, the cationic components, which form basis for the polymeric carrier by disulfide-crosslinkage, are typically selected from any suitable cationic or polycationic peptide, protein or polymer suitable for this purpose, particular any cationic or polycationic peptide, protein or polymer capable of complexing the RNA as defined herein or a further nucleic acid comprised in the composition, and thereby preferably condensing the RNA or the nucleic acid. The cationic or polycationic peptide, protein or polymer, is preferably a linear molecule, however, branched cationic or polycationic peptides, proteins or polymers may also be used.

[0280] Every disulfide-crosslinking cationic or polycationic protein, peptide or polymer of the polymeric carrier, which may be used to complex the RNA according to the invention or any further nucleic acid comprised in the (pharmaceutical) composition or vaccine of the present invention contains at least one —SH moiety, most preferably at least one cysteine residue or any further chemical group exhibiting an —SH moiety, capable of forming a disulfide linkage upon condensation with at least one further cationic or polycationic protein, peptide or polymer as cationic component of the polymeric carrier as mentioned herein.

[0281] As defined above, the polymeric carrier, which may be used to complex the RNA of the present invention or any further nucleic acid comprised in the (pharmaceutical) composition or vaccine according to the invention may be formed by disulfide-crosslinked cationic (or polycationic) components. Preferably, such cationic or polycationic peptides or proteins or polymers of the polymeric carrier, which comprise or are additionally modified to comprise at least one —SH moiety, are selected from, proteins, peptides and polymers as defined herein for complexation agent.

[0282] In a further particular embodiment, the polymeric carrier which may be used to complex the RNA as defined herein or any further nucleic acid comprised in the (pharmaceutical) composition or vaccine according to the invention may be selected from a polymeric carrier molecule according to generic formula (IV):

L-P¹—S[S—P²—S]ₙ—S—P³-L formula (IV)

[0283] wherein,
[0284] P¹ and P³ are different or identical to each other and represent a linear or branched hydrophilic polymer chain, each P¹ and P³ exhibiting at least one —SH-moiety, capable to form a disulfide linkage upon condensation with component P², or alternatively with (AA), (AA)ₓ, or [(AA)ₓ], if such components are used as a linker between P¹ and P² or P³ and P²) and/or with further components (e.g. (AA), (AA)ₓ, [(AA)ₓ]z or L), the linear or branched hydrophilic polymer chain selected independent from each other from polyethylene glycol (PEG), poly-A(2-hydroxypropyl)methacrylamide, poly-2-(methacryloyloxy)ethyl phospharylcholines, poly(hydroxyalkyl L-asparagine), poly(2-(methacryloyloxy)ethyl phospharylcholine), hydroxyethylstarch or poly(hydroxyalkyl L-glutamine), wherein the hydrophilic polymer chain exhibits a molecular weight of about 1 kDa to about 100 kDa, preferably of about 2 kDa to about 25 kDa; or more preferably of about 2 kDa to about 1 kDa, e.g. about 5 kDa to about 25 kDa or 5 kDa to about 10 kDa;
[0285] P² is a cationic or polycationic peptide or protein, e.g. as defined above for the polymeric carrier formed by disulfide-crosslinked cationic components, and preferably having a length of about 3 to about 100 amino acids, more preferably having a length of about 3 to about 50 amino acids, even more preferably having a length of about 3 to about 25 amino acids, e.g. a length of about 3 to 10, 5 to 15, 10 to 20 or 15 to 25 amino acids, more preferably a length of about 5 to about 20 and even more preferably a length of about 10 to about 20; or
   [0286] is a cationic or polycationic polymer, e.g. as defined above for the polymeric carrier formed by disulfide-crosslinked cationic components, typically having a molecular weight of about 0.5 kDa to about 30 kDa, including a molecular weight of about 1 kDa to about 20 kDa, even more preferably of about 1.5 kDa to about 10 kDa, or having a molecular weight of about 0.5 kDa to about 100 kDa, including a molecular weight of about 10 kDa to about 50 kDa, even more preferably of about 10 kDa to about 30 kDa;
   [0287] each P² exhibiting at least two —SH-moieties, capable to form a disulfide linkage upon condensation with further components P² or component(s) P¹ and/or P³ or alternatively with further components (e.g. (AA), (AA)ₓ, or [(AA)x]_{z});
[0288] —S—S— is a (reversible) disulfide bond (the brackets are omitted for better readability), wherein S preferably represents sulphur or a —SH carrying moiety, which has formed a (reversible) disulfide bond. The (reversible) disulfide bond is preferably formed by condensation of —SH-moieties of either components P¹ and P², P² and P², or P² and P³, or optionally of further components as defined herein (e.g. L, (AA), (AA)ₓ, [(AA)ₓ]_{z}, etc); The —SH-moiety may be part of the structure of these components or added by a modification as defined below;
[0289] L is an optional ligand, which may be present or not, and may be selected independent from the other from RGD, Transferrin, Folate, a signal peptide or signal sequence, a localization signal or sequence, a nuclear localization signal or sequence (NLS), an antibody, a cell penetrating peptide, (e.g. TAT or KALA), a ligand of a receptor (e.g. cytokines, hormones, growth factors etc), small molecules (e.g. carbohydrates like mannose or galactose or synthetic ligands), small molecule agonists, inhibitors or antagonists of receptors (e.g. RGD peptidomimetic analogues), or any further protein as defined herein, etc.;
[0290] n is an integer, typically selected from a range of about 1 to 50, preferably from a range of about 1, 2 or 3 to 30, more preferably from a range of about 1, 2, 3, 4, or 5 to 25, or a range of about 1, 2, 3, 4, or 5 to 20, or a range of about 1, 2, 3, 4, or 5 to 15, or a range of about 1, 2, 3, 4, or 5 to 10, including e.g. a range of about 4 to 9, 4 to 10, 3 to 20, 4 to 20, 5 to 20, or 10 to 20, or a range of about 3 to 15, 4 to 15, 5 to 15, or 1 to 15, or a range of about B to II or 7 to 10. Most preferably, n is in a range of about 1, 2, 3, 4, or 5 to 10, more preferably in a range of about 1, 2, 3, or 4 to 9, in a range of about 1, 2, 3, or 4 to 8, or in a range of about 1, 2, or 3 to 7.

[0291] In this context, the disclosure of WO 2011/026641 is incorporated herewith by reference. Each of hydrophilic polymers P¹ and P³ typically exhibits at least one —SH-moiety, wherein the at least one —SH-moiety is capable to form a disulfide linkage upon reaction with component P² or with component (AA) or (AA)ₓ, if used as linker between P¹ and P² or P³ and P² as defined below and optionally with a further component, e.g. L and/or (AA) or (AA)x, e.g. if two or more —SH-moieties are contained. The following subformulae “P¹—S—S—P²” and “P²—S—S—P³” within generic formula (IV) above (the brackets are omitted for better readability), wherein any of S, P¹ and P³ are as defined herein, typically represent a situation, wherein one —SH-moiety of hydrophilic polymers P¹ and P³ was condensed with one —SH-moiety of component P² of generic formula (IV) above, wherein both sulphurs of these —SH-moieties form a disulfide bond —S—S— as defined herein in formula (IV). These —SH-moieties are typically provided by each of the hydrophilic polymers P¹ and P3, e.g. via an internal cysteine or any further (modified) amino acid or compound which carries a —SH moiety. Accordingly, the subformulae “P¹—S—S—P²” and “P²—S—S—P³” may also be written as “P¹-Cys-Cys-P²” and “P²-Cys-Cys-P³”, if the —SH-moiety is provided by a cysteine, wherein the term Cys-Cys represents two cysteines coupled via a disulfide bond, not via a peptide bond. In this case, the term “—S—S—” in these formulae may also be written as “—S-Cys”, as “-Cys-S” or as “-Cys-Cys-”. In this context, the term “-Cys-Cys-” does not represent a peptide bond but a linkage of two cysteines via their —SH-moieties to form a disulfide bond. Accordingly, the term “-Cys-Cys-” also may be understood generally as “-(Cys-S)—(S-Cys)-”, wherein in this specific case S indicates the sulphur of the —SH-moiety of cysteine. Likewise, the terms “—S-Cys” and “—Cys-S” indicate a disulfide bond between a —SH containing moiety and a cysteine, which may also be written as “—S—(S-Cys)” and “-(Cys-S)—S”. Alternatively, the hydrophilic polymers P¹ and P³ may be modified with a —SH moiety, preferably via a chemical reaction with a compound carrying a —SH moiety, such that each of the hydrophilic polymers P¹ and P3 carries at least one such —SH moiety. Such a compound carrying a —SH moiety may be e.g. an (additional) cysteine or any further (modified) amino acid, which carries a —SH moiety. Such a compound may also be any non-amino compound or moiety, which contains or allows to introduce a —SH moiety into hydrophilic polymers P¹ and P³ as defined herein. Such non-amino compounds may be attached to the hydrophilic polymers P¹ and P³ of formula (IV) of the polymeric carrier according to the present invention via chemical reactions or binding of compounds, e.g. by binding of a 3-thio propionic acid or thioimolane, by amide formation (e.g. carboxylic acids, sulphonic acids, amines, etc), by Michael addition (e.g maleinimide moieties, α,β-unsaturated carbonyls, etc), by click chemistry (e.g. azides or alkines), by alkene/alkine methatesis (e.g. alkenes or alkines), imine or hydrozone formation (aldehydes or ketons, hydrazins, hydroxylamins, amines), complexation reactions (avidin, biotin, protein G) or components which allow Sₙ-type substitution reactions (e.g halogenalkans, thiols, alcohols, amines, hydrazines, hydrazides, sulphonic acid esters, oxyphosphonium salts) or other chemical moieties which can be utilized in the attachment of further components. A particularly preferred PEG derivate in this context is alpha-Methoxy-omega-mercapto poly(ethylene glycol). In each case, the SH-moiety, e.g. of a cysteine or of any further (modified) amino acid or compound, may be present at the terminal ends or internally at any position of hydrophilic polymers P¹ and P³. As defined herein, each of hydrophilic polymers P¹ and P³ typically exhibits at least one —SH-moiety preferably at one terminal and, but may also contain two or even more —SH-moieties, which may be used to additionally attach further components as defined herein, preferably further functional peptides or proteins e.g. a ligand, an amino acid component (AA) or (AA)ₓ, antibodies, cell penetrating peptides or enhancer peptides (e.g. TAT, KALA), etc.

[0292] Preferably, the inventive composition comprises at least one RNA as defined herein, which is complexed with one or more polycations, and at least one free RNA, wherein the at least one complexed RNA is preferably identical to the at least one free RNA. In this context, it is particularly preferred that the composition of the present invention comprises the RNA according to the invention that is complexed at least partially with a cationic or polycationic compound and/or a polymeric carrier, preferably cationic proteins or peptides. In this context, the disclosure of WO 2010/037539 and WO 2012/113513 is incorporated herewith by reference. Partially means that only a part of the RNA as defined herein is complexed in the composition according to the invention with a cationic compound and that the rest of the RNA as defined herein is (comprised in the inventive (pharmaceutical) composition or vaccine) in uncomplexed form (“free”).

[0293] Preferably, the molar ratio of the complexed RNA to the free RNA is selected from a molar ratio of about 0.001:1 to about 1:0.001, including a ratio of about 1:1. More preferably the ratio of complexed RNA to free RNA (in the (pharmaceutical) composition or vaccine of the present invention) is selected from a range of about 5:1 (w/w) to about 1:10 (w/w), more preferably from a range of about 4:1 (w/w) to about 1:8 (w/w), even more preferably from a range of about 3:1 (w/w) to about 1:5 (w/w) or 1:3 (w/w), and most preferably the ratio of complexed mRNA to free mRNA in the inventive pharmaceutical composition or vaccine is selected from a ratio of about 1:1 (w/w).

[0294] The complexed RNA in the (pharmaceutical) composition or vaccine according to the present invention, is preferably prepared according to a first step by complexing the RNA according to the invention with a cationic or polycationic compound and/or with a polymeric carrier, preferably as defined herein, in a specific ratio to form a stable complex. In this context, it is highly preferable, that no free cationic or polycationic compound or polymeric carrier or only a negligibly small amount thereof remains in the component of the complexed RNA after complexing the RNA. Accordingly, the ratio of the RNA and the cationic or polycationic compound and/or the polymeric carrier in the component of the complexed RNA is typically selected in a range so that the RNA is entirely complexed and no free cationic or polycationic compound or polymeric carrier or only a negligibly small amount thereof remains in the composition.

[0295] Preferably the ratio of the RNA as defined herein to the cationic or polycationic compound and/or the polymeric carrier, preferably as defined herein, is selected from a range of about 6:1 (w/w) to about 0.25:1 (w/w), more preferably from about 5:1 (w/w) to about 0.5:1 (w/w), even more preferably of about 4:1 (w/w) to about 1:1 (w/w) or of about 3:1 (w/w) to about 1:1 (w/w), and most preferably a ratio of about 3:1 (w/w) to about 2:1 (w/w). Alternatively, the ratio of the RNA as defined herein to the cationic or polycationic compound and/or the polymeric carrier, preferably as defined herein, in the component of the complexed mRNA, may also be calculated on the basis of the nitrogen/phosphate ratio (N/P-ratio) of the entire complex. In the context of the present invention, an N/P-ratio is preferably in the range of about 0.1-10, preferably in a range of about 0.3-4 and most preferably in a range of about 0.5-2 or 0.7-2 regarding the ratio of RNA:cationic or polycationic compound and/or polymeric carrier, preferably as defined herein, in the complex, and most preferably in a range of about 0.7-1,5, 0.5-1 or 0.7-1, and even most preferably in a range of about 0.3-0.9 or 0.5-0.9, preferably provided that the cationic or polycationic compound in the complex is a cationic or polycationic cationic or polycationic protein or peptide and/or the polymeric carrier as defined above. In this specific embodiment the complexed RNA as defined herein is also encompassed in the term “adjuvant component”.

[0296] In other embodiments, the composition according to the invention comprising the RNA as defined herein may be administered naked without being associated with any further vehicle, transfection or complexation agent.

[0297] It has to be understood and recognized, that according to the present invention, the inventive composition may comprise at least one naked RNA as defined herein, preferably an mRNA, and/or at least one formulated/complexed RNA as defined herein, preferably an mRNA, wherein every formulation and/or complexation as disclosed above may be used.

[0298] According to another embodiment, the (pharmaceutical) composition or vaccine according to the invention may comprise an adjuvant, which is preferably added in order to enhance the immunostimulatory properties of the composition. In this context, an adjuvant may be understood as any compound, which is suitable to support administration and delivery of the composition according to the invention. Furthermore, such an adjuvant may, without being bound thereto, initiate or increase an immune response of the innate immune system, i.e. a non-specific immune response. In other words, when administered, the composition according to the invention typically initiates an adaptive immune response due to an antigen as defined herein or a fragment or variant thereof, which is encoded by the at least one coding sequence of the inventive RNA contained in the composition of the present invention. Additionally, the composition according to the invention may generate an (supportive) innate immune response due to addition of an adjuvant as defined herein to the composition according to the invention.

[0299] Such an adjuvant may be selected from any adjuvant known to a skilled person and suitable for the present case, i.e. supporting the induction of an immune response in a mammal. Preferably, the adjuvant may be selected from the group consisting of, without being limited thereto. TDM, MDP, muramyl dipeptide, pluronics, alum solution, aluminium hydroxide. ADJUMER™ (polyphosphazene); aluminium phosphate gel; glucans from algae; algammulin; aluminium hydroxide gel (alum); highly protein-adsorbing aluminium hydroxide gel; low viscosity aluminium hydroxide gel; AF or SPT (emulsion of squalane (5%), Tween 80 (0.2%), Pluranic L121 (1.25%), phosphate-buffered saline, pH 7.4); AVRIDINE™ (propanediamine); BAY R10005™ ((N-(2-deoxy-2-L-leucylamino-b-D-glucopyrannsyl)-N-octadecyl-dodecanoyl-amide hydroactate); CALCITRIOL™ (1-alpha,25-dihydroxy-vitamin D3); calcium phosphate gel; CAP™ (calcium phosphate nanoparticles); cholera holotoxin, cholera-taxin-A1-protein-A-D-fragment fusion protein, sub-unit B of the cholera toxin; CRL 1005 (block copolymer P1205); cytokine-containing liposomes; DDA (dimethyldioctadecylammnnium bromide); DHEA (dehydroepiandrnsterone); DMPC (dimyristnylphosphatidylcholine); DMPG (dimyristoylphosphatidylglycerol); DOC/alum complex (deoxycholic acid sodium salt); Freund's complete adjuvant; Freund's incomplete adjuvant; gamma inulin; Gerbu adjuvant (mixture of: i) N-acetylglucosaminyl-(P1-4)-N-acetylmuramyl-L-alanyl-D-glutamine (GMDP), ii) dimethyldioctadecylammnnium chloride (DDA), iii) zinc-L-proline salt complex (ZnPro-8); GM-CSF); GMDP (N-acetylglucosaminyl-(b1-4)-N-acetylmuramyl-L-alanyl-D-isaglutamine); imiquimod (I-(2-methypropyl)-1H-imidazo[4,5-c]quinoline-4-amine); ImmTher™ (N-acetylglucosaminyl-N-acetylmuramyl-L-Ala-D-isoGlu-L-Ala-glyceral dipalmitate); DRVs (immunoliposomes prepared from dehydration-rehydration vesicles); interferon-gamma; interleukin-1beta; interleukin-2; interleukin-7; interleukin-12; ISCOMS™; ISCOPREP 7.0.3.™; liposomes; LOXORIBINE™ (7-allyl-8-oxoguanosine); LT oral adjuvant (E. coli labile enterotoxin-protoxin); microspheres and microparticles of any composition; MF59™; (squalene-water emulsion); MONTANIDE ISA 51™ (purified incomplete Freund's adjuvant); MONTANIDE ISA 720™ (metabolisable oil adjuvant); MPL™ (3-Q-desacyl-4′-monophospharyl lipid A); MTP-PE and MTP-PE liposomes ((N-acetyl-L-alanyl-D-isoglutaminyl-L-alanine-2-(1,2-dipalmitoyl-sn-glycero-3-(hydroxyphosphoryloxy))-ethylamide, monosodium salt); MURAMETIDE™ (Nac-Mur-L-Ala-D-Gln-OCH3); MURAPALMITINE™ and D-MURAPALMITINE™ (Nac-Mur-L-Thr-D-isnGln-sn-glyceroldipalmitoyl); NAGO (neuraminidase-galactose oxidase); nanospheres or nanoparticles of any composition; NISVs (non-ionic surfactant vesicles); PLEURAN™ (13-glucan); PLGA, PGA and PLA (homo- and co-polymers of lactic acid and glycolic acid; microspheres/nanospheres); PLURONIC L121™; PMMA (polymethyl methacrylate); PODOS™ (proteinoid microspheres); polyethylene carbamate derivatives; poly-rA: poly-rU (polyadenylic acid-polyuridylic acid complex); polysorbate 80 (Tween 80); protein cochleates (Avanti Polar Lipids, Inc., Alabaster, Ala.); STIMULON™ (OS-21); Quil-A (Quil-A saponin); S-284B3 (4-amino-otec-dimethyl-2-ethoxymethyl-1H-imidazo[4,5 c]quinoline-1-ethanal); SAF-1™ (“Syntex adjuvant formulation”); Sendai proteoliposomes and Sendai-containing lipid matrices; Span-85 (sorbitan trioleate); Specol (emulsion of Marcol 52, Span 85 and Tween 85); squalene or Robane® (2,6,10,15,19,23-hexamethyltetracosan and 2,6,10,15,19,23-hexamethyl-2,6,10,14,18,22-tetracosahexane); stearyltyrosine (octadecyltyrosine hydrochloride); Theramid® (N-acetylglucosaminyl-N-acetylmuramyl-L-Ala-D-isoGlu-L-Ala-dipalmitoxypropylamide); Theronyl-MDP (Termurtide™ or [thr 1]-MDP; N-acetylmuramyl-L-threonyl-D-isaglutamine); Ty particles (Ty-VLPs or virus-like particles); Walter-Reed liposomes (liposomes containing lipid A adsorbed on aluminium hydroxide), and lipopeptides, including Pam3Cys, in particular aluminium salts, such as Adju-phos, Alhydrngel, Rehydragel; emulsions, including CFA, SAF, IFA, MF59, Provax, TiterMax, Montanide, Vaxfectin; copolymers, including Optivax (CRL1005), L121, Poloaxmer4010), etc.; liposomes, including Stealth, cochleates, including BIORAL; plant derived adjuvants, including QS21, Quil A, Iscomatrix, ISCOM; adjuvants suitable for costimulation including Tomatine, biopolymers, including PLG, PMM, Inulin; microbe derived adjuvants, including Romurtide, DETOX, MPL, CWS, Mannose, CpG nucleic acid sequences, CpG7909, ligands of human TLR 1-10, ligands of murine TLR 1-13, ISS-1018, IC31, Imidazoquinolines, Ampligen, Ribi529, IMOxine, IRIVs, VLPs, cholera toxin, heat-labile toxin, Pam3Cys, Flagellin, GPI anchor, LNFPIII/Lewis X, antimicrobial peptides, UC-IV150, RSV fusion protein, cdiGMP; and adjuvants suitable as antagonists including CGRP neuropeptide.

[0300] Particularly preferred, an adjuvant may be selected from adjuvants, which support induction of a Th1-immune response or maturation of naïve T-cells, such as GM-CSF, IL-12, IFNy, any immunostimulatory nucleic acid as defined above, preferably an immunostimulatory RNA, CpG DNA, etc.

[0301] In a further preferred embodiment it is also possible that the inventive composition contains besides the antigen-providing RNA further components which are selected from the group comprising: further antigens (e.g. in the form of a peptide or protein) or further antigen-encoding nucleic acids; a further immunotherapeutic agent; one or more auxiliary substances; or any further compound, which is known to be immunostimulating due to its binding affinity (as ligands) to human Toll-like receptors; and/or an adjuvant nucleic acid, preferably an immunostimulatory RNA (isRNA).

[0302] The composition of the present invention can additionally contain one or more auxiliary substances in order to increase its immunogenicity or immunostimulatory capacity, if desired. A synergistic action of the RNA as defined herein and of an auxiliary substance, which may be optionally contained in the inventive composition, is preferably achieved thereby. Depending on the various types of auxiliary substances, various mechanisms can come into consideration in this respect. For example, compounds that permit the maturation of dendritic cells (DCs), for example lipopolysaccharides. TNF-alpha or CD40 ligand, form a first class of suitable auxiliary substances. In general, it is possible to use as auxiliary substance any agent that influences the immune system in the manner of a “danger signal” (LPS, GP96, etc.) or cytokines, such as GM-CFS, which allow an immune response to be enhanced and/or influenced in a targeted manner. Particularly preferred auxiliary substances are cytokines, such as monokines, lymphokines, interleukins or chemokines, that further promote the innate immune response, such as IL-1, IL-2, IL-3, IL-4, IL-5, IL-6, IL-7, IL-8, IL-9, IL-10, IL-12, IL-13, IL-14, IL-15, IL-16, IL-17, IL-18, IL-19, IL-20, IL-21, IL-22, IL-23, IL-24, IL-25, IL-26, IL-27, IL-28, IL-29, IL-30, IL-31, IL-32, IL-33, IFN-alpha, IFN-beta, IFN-gamma, GM-CSF, G-CSF, M-CSF, LT-beta or TNF-alpha, growth factors, such as hGH.

[0303] Suitable adjuvants may also be selected from cationic or polycationic compounds wherein the adjuvant is preferably prepared upon complexing the RNA of the composition according to the invention with the cationic or polycationic compound. Associating or complexing the RNA of the composition with cationic or polycationic compounds as defined herein preferably provides adjuvant properties and confers a stabilizing effect to the RNA of the composition. In particular, such preferred cationic or polycationic compounds are selected from cationic or polycationic peptides or proteins, including protamine, nucleoline, spermin or spermidine, or other cationic peptides or proteins, such as poly-L-lysine (PLL), poly-arginine, basic polypeptides, cell penetrating peptides (CPPs), including HIV-binding peptides, Tat, HIV-1 Tat (HIV), Tat-derived peptides, Penetratin, VP22 derived or analog peptides, HSV VP22 (Herpes simplex), MAP, KALA or protein transduction domains (PTDs, PpTB20, prolin-rich peptides, arginine-rich peptides, lysine-rich peptides, MPG-peptide(s), Pep-1, L-oligomers, Calcitonin peptide(s), Antennapedia-derived peptides (particularly from Drosophila antennapedia), pAntp, pIsI, FGF, Lactoferrin, Transportan, Buforin-2, Bac715-24, SynB, SynB(I), pVEC, hCT-derived peptides, SAP, protamine, spermine, spermidine, or histones. Further preferred cationic or polycationic compounds may include cationic polysaccharides, for example chitosan, polybrene, cationic polymers, e.g. polyethyleneimine (PEI), cationic lipids, e.g. DOTMA: [1-(2,3-sioleyloxy)propyl)]-N,N,N-trimethylammonium chloride, DMRIE, di-C14-amidine, DOTIM, SAINT, DC-ChoI, BGTC, CTAP, DOPC, DODAP, DOPE: Dioleyl phosphatidylethanol-amine, DOSPA, DODAB, DOIC, DMEPC, DOGS: Dioctadecylamidoglicylspermin, DIMRI: Dimyristo-oxypropyl dimethyl hydroxyethyl ammonium bromide, DOTAP: dioleoyloxy-3-(trimethylammonia)propane, DC-6-14: n,n-ditetradecanoyl-N-(α-trimethylammonioacetyl)diethanolamine chloride, CLIP1: rac-[(2,3-dioctadecyloxypropyl)(2-hydroxyethyl)]-dimethylammonium chloride, CLIP6: rac-[2(2,3-dihexadecyloxypropyl-oxymethyloxy)ethyl]-trimethylammonium, CLIP6: rac-[2(2,3-dihexadecyloxypropyl-oxysuccinyloxy)ethyl]-trimethylammonium, oligofectamine, or cationic or polycationic polymers, e.g. modified polyaminoacids, such as β-aminoacid-polymers or reversed polyamides, etc., modified polyethylenes, such as PVP (poly(N-ethyl-4-vinylpyridinium bromide)), etc., modified acrylates, such as pDMAEMA (poly(dimethylaminoethyl methylacrylate)), etc., modified Amidoamines such as pAMAM (poly(amidoamine)), etc., modified polybetaaminoester (PBAE), such as diamine and modified 1,4 butanedial diacrylate-co-5-amino-1-pentanal polymers, etc., dendrimers, such as polypropylamine dendrimers or pAMAM based dendrimers, etc., polyimine(s), such as PEI: poly(ethyleneimine), poly(propyleneimine), etc., polyallylamine, sugar backbone based polymers, such as cyclodextrin based polymers, dextran based polymers, Chitnsan, etc., silan backbone based polymers, such as PMOXA-PDMS copolymers, etc., blockpolymers consisting of a combination of one or more cationic blocks (e.g. selected of a cationic polymer as mentioned above) and of one or more hydrophilic- or hydrophobic blocks (e.g polyethyleneglycole); etc.

[0304] Additionally, preferred cationic or polycationic proteins or peptides, which can be used as an adjuvant by complexing the RNA of the composition according to the invention, may be selected from following proteins or peptides having the following total formula (III): (Arg)ₗ;(Lys)ₘ;(His)ₙ;(Orn)ₒ;(Xaa)ₓ, wherein l+m+n+o+x=8-15, and l, m, n or n independently of each other may be any number selected from 0, 1, 2, 3, 4, 5, 6, 7, 8, 9, 10, 11, 12, 13, 14 or 15, provided that the overall content of Arg, Lys, His and Orn represents at least 50% of all amino acids of the oligopeptide; and Xaa may be any amino acid selected from native (=naturally occurring) or non-native amino acids except of Arg, Lys, His or Orn; and x may be any number selected from 0, 1, 2, 3 or 4, provided, that the overall content of Xaa does not exceed 50% of all amino acids of the oligopeptide. Particularly preferred oligoarginines in this context are e.g. Arg₇, Arg₈, Arg₉, Arg₇, H₃R₉, R₉H₃, H₃R₉H₃, YSSR₉SSY, (RKH)₄, Y(RKH)₂R, etc.

[0305] The ratio of the RNA to the cationic or polycationic compound in the adjuvant component may be calculated on the basis of the nitrogen/phosphate ratio (N/P-ratio) of the entire RNA complex i.e. the ratio of positively charged (nitrogen) atoms of the cationic or polycationic compound to the negatively charged phosphate atoms of the nucleic acids. For example, 1 μg of RNA typically contains about 3 nmol phosphate residues, provided the RNA exhibits a statistical distribution of bases. Additionally, 1 μg of peptide typically contains about x nmol nitrogen residues, dependent on the molecular weight and the number of basic amino acids. When exemplarily calculated for (Arg)₉ (molecular weight 1424 g/mol, B nitrogen atoms), 1 μg (Arg)₉ contains about 700 pmol (Arg)₉ and thus 700×9=1300 pmol basic amino acids=6.3 nmol nitrogen atoms. For a mass ratio of about 1:1 RNA/(Arg)9 an N/P ratio of about 2 can be calculated. When exemplarily calculated for protamine (molecular weight about 4250 g/mol. 21 nitrogen atoms, when protamine from salmon is used) with a mass ratio of about 2:1 with 2 μg RNA, B nmol phosphate are to be calculated for the RNA; 1 μg protamine contains about 235 pmol protamine molecules and thus 235×21=4935 pmol basic nitrogen atoms=4.9 nmol nitrogen atoms. For a mass ratio of about 2:1 RNA/protamine an N/P ratio of about 0.81 can be calculated. For a mass ratio of about 8:1 RNA/protamine an N/P ratio of about 0.2 can be calculated. In the context of the present invention, an N/P-ratio is preferably in the range of about 0.1-10, preferably in a range of about 0.3-4 and most preferably in a range of about 0.5-2 or 0.7-2 regarding the ratio of RNA:peptide in the complex, and most preferably in the range of about 0.7-1.5.

[0306] In a preferred embodiment, the composition of the present invention is obtained in two separate steps in order to obtain both, an efficient immunostimulatory effect and efficient translation of the RNA according to the invention. Therein, a so called “adjuvant component” is prepared by complexing—in a first step—an RNA as defined herein of the adjuvant component with a cationic or polycationic compound in a specific ratio to form a stable complex. In this context, it is important, that no free cationic or polycationic compound or only a neglibly small amount remains in the adjuvant component after complexing the RNA. Accordingly, the ratio of the RNA and the cationic or polycationic compound in the adjuvant component is typically selected in a range that the RNA is entirely complexed and no free cationic or polycationic compound or only a neglectably small amount remains in the composition. Preferably the ratio of the adjuvant component, i.e. the ratio of the RNA to the cationic or polycationic compound is selected from a range of about 6:1 (w/w) to about 0.25:1 (w/w), more preferably from about 5:1 (w/w) to about 0.5:1 (w/w), even more preferably of about 4:1 (w/w) to about 1:1 (w/w) or of about 3:1 (w/w) to about 1:1 (w/w), and most preferably a ratio of about 3:1 (w/w) to about 2:1 (w/w).

[0307] According to a preferred embodiment, the RNA of the invention comprising at least one coding sequence as defined herein is added in a second step to the complexed RNA of the adjuvant component in order to form the (immunostimulatory) composition of the invention. Therein, the RNA of the composition according to the invention is added as free RNA, preferably as free mRNA, which is not complexed by other compounds. Prior to addition, the free RNA is not complexed and will preferably not undergo any detectable or significant complexation reaction upon the addition of the adjuvant component. This is due to the strong binding of the cationic or polycationic compound to the above described RNA according to the invention comprised in the adjuvant component. In other words, when the RNA comprising at least one coding sequence as defined herein is added to the “adjuvant component”, preferably no free or substantially no free cationic or polycationic compound is present, which could form a complex with the free RNA. Accordingly, an efficient translation of the RNA of the composition is possible in vive. Therein, the free RNA, preferably an mRNA, may occur as a mono-, di-, or multicistronic (m)RNA, i.e. an RNA which carries the coding sequences of one or more proteins. Such coding sequences in di-, or even multicistronic mRNA may be separated by at least one IRES sequence, e.g. as defined herein.

[0308] In a particularly preferred embodiment, the free RNA as defined herein, which is comprised in the composition of the present invention, may be identical or different to the RNA as defined herein, which is comprised in the adjuvant component of the composition, depending on the specific requirements of therapy. Even more preferably, the free RNA, which is comprised in the composition according to the invention, is identical to the RNA of the adjuvant component of the inventive composition.

[0309] In a particularly preferred embodiment, the composition according to the invention comprises the RNA of the invention, which encodes at least one antigen as defined herein and wherein said RNA is present in the composition partially as free RNA and partially as complexed RNA. Preferably, the RNA as defined herein, preferably an mRNA, is complexed as described above and the same (m)RNA is then added as free RNA, wherein preferably the compound, which is used for complexing the RNA is not present in free form in the composition at the moment of addition of the free RNA component.

[0310] The ratio of the first component (i.e. the adjuvant component comprising or consisting of the RNA as defined herein complexed with a cationic or polycationic compound) and the second component (i.e. the free RNA as defined herein) may be selected in the inventive composition according to the specific requirements of a particular therapy. Typically, the ratio of the RNA in the adjuvant component and the at least one free RNA (RNA in the adjuvant component:free RNA) of the composition according to the invention is selected such that a significant stimulation of the innate immune system is elicited due to the adjuvant component. In parallel, the ratio is selected such that a significant amount of the free RNA can be provided in vive leading to an efficient translation and concentration of the expressed protein in vive, e.g. the at least one antigen as defined herein. Preferably the ratio of the RNA in the adjuvant component:free RNA in the inventive composition is selected from a range of about 5:1 (w/w) to about 1:10 (w/w), more preferably from a range of about 4:1 (w/w) to about 1:8 (w/w), even more preferably from a range of about 3:1 (w/w) to about 1:5 (w/w) or 1:3 (w/w), and most preferably the ratio of RNA in the adjuvant component:free RNA in the inventive composition is selected from a ratio of about 1:1 (w/w).

[0311] Additionally or alternatively, the ratio of the first component (i.e. the adjuvant component comprising or consisting of the RNA complexed with a cationic or polycationic compound) and the second component (i.e. the free RNA) may be calculated on the basis of the nitrogen/phosphate ratio (N/P-ratio) of the entire RNA complex. In the context of the present invention, an N/P-ratio is preferably in the range of about 0.1-10, preferably in a range of about 0.3-4 and most preferably in a range of about 0.5-2 or 0.7-2 regarding the ratio of RNA:peptide in the complex and most preferably in the range of about 0.7-1.5.

[0312] Additionally or alternatively, the ratio of the first component (i.e. the adjuvant component comprising or consisting of the RNA complexed with a cationic or polycationic compound) and the second component (i.e. the free RNA) may also be selected in the composition according to the invention on the basis of the molar ratio of both RNA to each other, i.e. the RNA of the adjuvant component, being complexed with a cationic or polycationic compound and the free RNA of the second component. Typically, the molar ratio of the RNA of the adjuvant component to the free RNA of the second component may be selected such, that the molar ratio suffices the above (w/w) and/or N/P-definitions. More preferably, the molar ratio of the RNA of the adjuvant component to the free RNA of the second component may be selected e.g. from a molar ratio of about 0.001:1, 0.01:1, 0.1:1, 0.2:1, 0.3:1, 0.4:1, 0.5:1, 0.6:1, 0.7:1, 0.8:1, 0.9:1, 1:1, 1:0.9.1:0.8, 1:0.7, 1:0.6, 1:0.5, 1:0.4, 1:0.3, 1:0.2, 1:0.1, 1:0.01, 1:0.001, etc. or from any range formed by any two of the above values, e.g. a range selected from about 0.001:1 to 1:0.001, including a range of about 0.01:1 to 1:0.001, 0.1:1 to 1:0.001, 0.2:1 to 1:0.001, 0.3:1 to 1:0.001, 0.4:1 to 1:0.001, 0.5:1 to 1:0.001, 0.6:1 to 1:0.001, 0.7:1 to 1:0.001, 0.8:1 to 1:0.001, 0.9:1 to 1:0.001, 1:1 to 1:0.001, 1:0.9 to 1:0.001, 1:0.8 to 1:0.001, 1:0.7 to 1:0.001, 1:0.6 to 1:0.001, 1:0.5 to 1:0.001, 1:0.4 to 1:0.001, 1:0.3 to 1:0.001, 1:0.2 to 1:0.001, 1:0.1 to 1:0.001, 1:0.01 to 1:0.001, or a range of about 0.01:1 to 1:0.01, 0.1:1 to 1:0.01, 0.2:1 to 1:0.01, 0.3:1 to 1:0.01, 0.4:1 to 1:0.01, 0.5:1 to 1:0.01, 0.6:1 to 1:0.01, 0.7:1 to 1:0.01, 0.8:1 to 1:0.01, 0.9:1 to 1:0.01, 1:1 to 1:0.01, 1:0.9 to 1:0.01, 1:0.8 to 1:0.01, 1:0.7 to 1:0.01, 1:0.6 to 1:0.01, 1:0.5 to 1:0.01, 1:0.4 to 1:0.01, 1:0.3 to 1:0.01, 1:0.2 to 1:0.01, 1:0.1 to 1:0.01, 1:0.01 to 1:0.01, or including a range of about 0.001:1 to 1:0.01, 0.001:1 to 1:0.1, 0.001:1 to 1:0.2, 0.001:1 to 1:0.3, 0.001:1 to 1:0.4, 0.001:1 to 1:0.5, 0.001:1 to 1:0.6, 0.001:1 to 1:0.7, 0.001:1 to 1:0.8, 0.001:1 to 1:0.9, 0.001:1 to 1:1, 0.001 to 0.9:1, 0.001 to 0.8:1, 0.001 to 0.7:1, 0.001 to 0.6:1, 0.001 to 0.5:1, 0.001 to 0.4:1, 0.001 to 0.3:1, 0.001 to 0.2:1, 0.001 to 0.1:1, or a range of about 0.01:1 to 1:0.01, 0.01:1 to 1:0.1, 0.01:1 to 1:0.2, 0.01:1 to 1:0.3, 0.01:1 to 1:0.4, 0.01:1 to 1:0.5, 0.01:1 to 1.06, 0.01:1 to 1:0.7, 0.01:1 to 1:0.8, 0.01:1 to 1:0.9, 0.01:1 to 1:1, 0.001 to 0.9:1, 0.001 to 0.8:1, 0.001 to 0.7:1, 0.001 to 0.6:1, 0.001 to 0.5:1, 0.001 to 0.4:1, 0.001 to 0.3:1, 0.001 to 0.2:1, 0.001 to 0.1:1, etc.

[0313] Even more preferably, the molar ratio of the RNA of the adjuvant component to the free RNA of the second component may be selected e.g. from a range of about 0.01:1 to 1:0.01. Most preferably, the molar ratio of the RNA of the adjuvant component to the free RNA of the second component may be selected e.g. from a molar ratio of about 1:1. Any of the above definitions with regard to (w/w) and/or N/P ratio may also apply.

[0314] Suitable adjuvants may furthermore be selected from nucleic acids having the formula (Va): GₗXₘGₙ, wherein: G is guanosine, uracil or an analogue of guanosine or uracil; X is guanosine, uracil, adenosine, thymidine, cytosine or an analogue of the above-mentioned nucleotides; l is an integer from 1 to 40, wherein when l=1 G is guanosine or an analogue thereof, when l>1 at least 50% of the nucleotides are guanosine or an analogue thereof; m is an integer and is at least 3; wherein when m=3 X is uracil or an analogue thereof, when m>3 at least 3 successive uracils or analogues of uracil occur; n is an integer from 1 to 40, wherein when n=1 G is guanosine or an analogue thereof, when n>1 at least 50% of the nucleotides are guanosine or an analogue thereof, or formula (Vb): (NᵤGₗXₘBₙNᵥ)ₐ, wherein: G is guanosine (guanine), uridine (uracil) or an analogue of guanosine (guanine) or uridine (uracil), preferably guanosine (guanine) or an analogue thereof; X is guanosine (guanine), uridine (uracil), adenosine (adenine), thymidine (thymine), cytidine (cytosine), or an analogue of these nucleotides (nucleosides), preferably uridine (uracil) or an analogue thereof; N is a nucleic acid sequence having a length of about 4 to 50, preferably of about 4 to 40, more preferably of about 4 to 30 or 4 to 20 nucleic acids, each N independently being selected from guanosine (guanine), uridine (uracil), adenosine (adenine), thymidine (thymine), cytidine (cytosine) or an analogue of these nucleotides (nucleosides); a is an integer from 1 to 20, preferably from 1 to 15, most preferably from 1 to 10; l is an integer from 1 to 40, wherein when l=1, G is guanosine (guanine) or an analogue thereof, when I>1, at least 50% of these nucleotides (nucleosides) are guanosine (guanine) or an analogue thereof; m is an integer and is at least 3; wherein when m=3, X is uridine (uracil) or an analogue thereof, and when m>3, at least 3 successive uridines (uracils) or analogues of uridine (uracil) occur; n is an integer from 1 to 40, wherein when n=1, G is guanosine (guanine) or an analogue thereof, when n>1, at least 50% of these nucleotides (nucleosides) are guanosine (guanine) or an analogue thereof; u,v may be independently from each other an integer from 0 to 50, preferably wherein when u=0, v≥1, or when v=0, u≥1; wherein the nucleic acid molecule of formula (Vb) has a length of at least 50 nucleotides, preferably of at least 100 nucleotides, more preferably of at least 150 nucleotides, even more preferably of at least 200 nucleotides and most preferably of at least 250 nucleotides.

[0315] Other suitable adjuvants may furthermore be selected from nucleic acids having the formula (VI): CₗXₘCₙ, wherein: C is cytosine, uracil or an analogue of cytosine or uracil; X is guanosine, uracil, adenosine, thymidine, cytosine or an analogue of the above-mentioned nucleotides; l is an integer from 1 to 40, wherein when l=1 C is cytosine or an analogue thereof, when l>1 at least 50% of the nucleotides are cytosine or an analogue thereof; m is an integer and is at least 3; wherein when m=3 X is uracil or an analogue thereof, when m>3 at least 3 successive uracils or analogues of uracil occur; n is an integer from 1 to 40, wherein when n=1 C is cytosine or an analogue thereof, when n>1 at least 50% of the nucleotides are cytosine or an analogue thereof.

[0316] In this context the disclosure of WO002008014979 and WO2009095226 is also incorporated herein by reference.

[0317] In a further aspect, the present invention provides a vaccine, which is based on the RNA according to the invention comprising at least one coding sequence as defined herein. The vaccine according to the invention is preferably a (pharmaceutical) composition as defined herein.

[0318] Accordingly, the vaccine according to the invention is based on the same components as the (pharmaceutical) composition described herein. Insofar, it may be referred to the description of the (pharmaceutical) composition as provided herein. Preferably, the vaccine according to the invention comprises the RNA as defined herein and a pharmaceutically acceptable carrier. In embodiments, where the vaccine comprises more than one RNA component (such as a plurality of RNAs according to the invention, wherein each encodes a distinct antigen), the vaccine may be provided in physically separate form and may be administered by separate administration steps. The vaccine according to the invention may correspond to the (pharmaceutical) composition as described herein, especially where the mRNA components are provided by one single composition. However, the inventive vaccine may also be provided physically separated. For instance, in embodiments, wherein the vaccine comprises more than one RNA species, these RNA species may be provided such that, for example, two, three, four, five or six separate compositions, which may contain at least one RNA species each (e.g. three distinct mRNA species), each encoding distinct antigens, are provided, which may or may not be combined. Also, the inventive vaccine may be a combination of at least two distinct compositions, each composition comprising at least one mRNA encoding at least one of the antigens defined herein. Alternatively, the vaccine may be provided as a combination of at least one mRNA, preferably at least two, three, four, five, six or more mRNAs, each encoding one of the antigens defined herein. The vaccine may be combined to provide one single composition prior to its use or it may be used such that more than one administration is required to administer the distinct mRNA species encoding any of the antigen combinations as defined herein. If the vaccine contains at least one mRNA molecule, typically at least two mRNA molecules, encoding of the antigen combinations defined herein, it may e.g. be administered by one single administration (combining all mRNA species), by at least two separate administrations. Accordingly; any combination of mono-, bi- or multicistronic mRNAs encoding the at least one antigen or any combination of antigens as defined herein (and optionally further antigens), provided as separate entities (containing one mRNA species) or as combined entity (containing more than one mRNA species), is understood as a vaccine according to the present invention. According to a particularly preferred embodiment of the inventive vaccine, the at least one antigen, preferably a combination as defined herein of at least two, three, four, five, six or more antigens encoded by the inventive composition as a whole, is provided as an individual (monocistronic) mRNA, which is administered separately.

[0319] As with the (pharmaceutical) composition according to the present invention, the entities of the vaccine may be provided in liquid and or in dry (e.g. lyophilized) form. They may contain further components, in particular further components allowing for its pharmaceutical use. The vaccine or the (pharmaceutical) composition may, e.g., additionally contain a pharmaceutically acceptable carrier and/or further auxiliary substances and additives and/or adjuvants.

[0320] The vaccine or (pharmaceutical) composition typically comprises a safe and effective amount of the RNA according to the invention as defined herein, encoding an antigen as defined herein or a fragment or variant thereof or a combination of antigens, preferably as defined herein. As used herein. “safe and effective amount” means an amount of the RNA that is sufficient to significantly induce a positive modification of cancer or a disease or disorder related to cancer. At the same time., however, a “safe and effective amount” is small enough to avoid serious side-effects, that is to say to permit a sensible relationship between advantage and risk. The determination of these limits typically lies within the scope of sensible medical judgment. In relation to the vaccine or (pharmaceutical) composition of the present invention, the expression “safe and effective amount” preferably means an amount of the RNA (and thus of the encoded antigen) that is suitable for stimulating the adaptive immune system in such a manner that no excessive or damaging immune reactions are achieved but, preferably, also no such immune reactions below a measurable level. Such a “safe and effective amount” of the RNA of the (pharmaceutical) composition or vaccine as defined herein may furthermore be selected in dependence of the type of RNA, e.g. monocistronic, bi- or even multicistronic RNA, since a bi- or even multicistronic RNA may lead to a significantly higher expression of the encoded antigen(s) than the use of an equal amount of a monocistronic RNA. A “safe and effective amount” of the RNA of the (pharmaceutical) composition or vaccine as defined above will furthermore vary in connection with the particular condition to be treated and also with the age and physical condition of the patient to be treated, the severity of the condition, the duration of the treatment, the nature of the accompanying therapy, of the particular pharmaceutically acceptable carrier used, and similar factors, within the knowledge and experience of the accompanying doctor. The vaccine or composition according to the invention can be used according to the invention for human and also for veterinary medical purposes, as a pharmaceutical composition or as a vaccine.

[0321] In a preferred embodiment, the RNA of the (pharmaceutical) composition, vaccine or kit of parts according to the invention is provided in lyophilized form. Preferably, the lyophilized RNA is reconstituted in a suitable buffer, advantageously based on an aqueous carrier, prior to administration, e.g. Ringer-Lactate solution, which is preferred, Ringer solution, a phosphate buffer solution. In a preferred embodiment, the (pharmaceutical) composition, the vaccine or the kit of parts according to the invention contains at least two, three, four, five, six or more RNAs, preferably mRNAs which are provided separately in lyophilized form (optionally together with at least one further additive) and which are preferably reconstituted separately in a suitable buffer (such as Ringer-Lactate solution) prior to their use so as to allow individual administration of each of the (monocistronic) RNAs.

[0322] The vaccine or (pharmaceutical) composition according to the invention may typically contain a pharmaceutically acceptable carrier. The expression “pharmaceutically acceptable carrier” as used herein preferably includes the liquid or non-liquid basis of the inventive vaccine. If the inventive vaccine is provided in liquid form, the carrier will be water, typically pyrogen-free water; isotonic saline or buffered (aqueous) solutions, e.g phosphate, citrate etc. buffered solutions. Particularly for injection of the inventive vaccine, water or preferably a buffer, more preferably an aqueous buffer, may be used, containing a sodium salt, preferably at least 50 mM of a sodium salt, a calcium salt, preferably at least 0.01 mM of a calcium salt, and optionally a potassium salt, preferably at least 3 mM of a potassium salt. According to a preferred embodiment, the sodium, calcium and, optionally, potassium salts may occur in the form of their halogenides, e.g. chlorides, iodides, or bromides, in the form of their hydroxides, carbonates, hydrogen carbonates, or sulfates, etc. Without being limited thereto, examples of sodium salts include e.g. NaCl, NaI, NaBr, Na₂CO₃, NaHCO₃, Na₂SO₄, examples of the optional potassium salts include e.g. KCl, Kl, KBr, K₂CO₃, KHCO₃, K₂SO₄, and examples of calcium salts include e.g. CaCl₂, CaI₂, CaBr₂, CaCO₃, CaSO₄, Ca(OH)₂. Furthermore, organic anions of the aforementioned cations may be contained in the buffer. According to a more preferred embodiment, the buffer suitable for injection purposes as defined above, may contain salts selected from sodium chloride (NaCl), calcium chloride (CaCl₂) and optionally potassium chloride (KCl), wherein further anions may be present additional to the chlorides. CaCl₂ can also be replaced by another salt like KCl. Typically, the salts in the injection buffer are present in a concentration of at least 50 mM sodium chloride (NaCl), at least 3 mM potassium chloride (KCl) and at least 0.01 mM calcium chloride (CaCl₂). The injection buffer may be hypertonic, isotonic or hypotonic with reference to the specific reference medium, i.e. the buffer may have a higher, identical or lower salt content with reference to the specific reference medium, wherein preferably such concentrations of the afore mentioned salts may be used, which do not lead to damage of cells due to osmosis or other concentration effects. Reference media are e.g. in “in vivo” methods occurring liquids such as blood, lymph, cytosolic liquids, or other body liquids, or e.g. liquids, which may be used as reference media in “in vitro” methods, such as common buffers or liquids. Such common buffers or liquids are known to a skilled person. Ringer-Lactate solution is particularly preferred as a liquid basis.

[0323] However, one or more compatible solid or liquid fillers or diluents or encapsulating compounds may be used as well, which are suitable for administration to a person. The term “compatible” as used herein means that the constituents of the inventive vaccine are capable of being mixed with the RNA according to the invention as defined herein, in such a manner that no interaction occurs, which would substantially reduce the pharmaceutical effectiveness of the inventive vaccine under typical use conditions. Pharmaceutically acceptable carriers, fillers and diluents must, of course, have sufficiently high purity and sufficiently low toxicity to make them suitable for administration to a person to be treated. Some examples of compounds which can be used as pharmaceutically acceptable carriers, fillers or constituents thereof are sugars, such as, for example, lactose, glucose, trehalose and sucrose; starches, such as, for example, corn starch or potato starch; dextrose; cellulose and its derivatives, such as, for example, sodium carboxymethylcellulose, ethylcellulose, cellulose acetate; powdered tragacanth; malt; gelatin; tallow; solid glidants, such as, for example, stearic acid, magnesium stearate; calcium sulfate; vegetable oils, such as, for example, groundnut oil, cottonseed oil, sesame oil, olive oil, corn oil and oil from theobroma; polyols, such as, for example, polypropylene glycol, glycerol, sorbitol, mannitol and polyethylene glycol; alginic acid.

[0324] The choice of a pharmaceutically acceptable carrier is determined, in principle, by the manner, in which the pharmaceutical composition or vaccine according to the invention is administered. The composition or vaccine can be administered, for example, systemically or locally. Routes for systemic administration in general include, for example, transdermal, oral, parenteral routes, including subcutaneous, intravenous, intramuscular, intraarterial, intradermal and intraperitoneal injections and/or intranasal administration routes. Routes for local administration in general include, for example, topical administration routes but also intradermal, transdermal, subcutaneous, or intramuscular injections or intralesional, intracranial, intrapulmonal, intracardial, and sublingual injections. More preferably, composition or vaccines according to the present invention may be administered by an intradermal, subcutaneous, or intramuscular route, preferably by injection, which may be needle-free and/or needle injection. Compositions/vaccines are therefore preferably formulated in liquid or solid form. The suitable amount of the vaccine or composition according to the invention to be administered can be determined by routine experiments, e.g. by using animal models. Such models include, without implying any limitation, rabbit, sheep, mouse, rat, dog and non-human primate models. Preferred unit dose forms for injection include sterile solutions of water, physiological saline or mixtures thereof. The pH of such solutions should be adjusted to about 7.4. Suitable carriers for injection include hydrogels, devices for controlled or delayed release, polylactic acid and collagen matrices. Suitable pharmaceutically acceptable carriers for topical application include those which are suitable for use in lotions, creams, gals and the like. If the inventive composition or vaccine is to be administered perorally, tablets, capsules and the like are the preferred unit dose form. The pharmaceutically acceptable carriers for the preparation of unit dose forms which can be used for oral administration are well known in the prior art. The choice thereof will depend on secondary considerations such as taste, costs and storability, which are not critical for the purposes of the present invention, and can be made without difficulty by a person skilled in the art.

[0325] The inventive vaccine or composition can additionally contain one or more auxiliary substances in order to further increase the immunogenicity. A synergistic action of the RNA according to the invention and of an auxiliary substance, which may be optionally be co-formulated (or separately formulated) with the inventive vaccine or composition as described above, is preferably achieved thereby.

[0326] Depending on the various types of auxiliary substances, various mechanisms may play a role in this respect. For example, compounds that permit the maturation of dendritic cells (DCs), for example lipopolysaccharides. TNF-alpha or CD40 ligand, form a first class of suitable auxiliary substances. In general, it is possible to use as auxiliary substance any agent that influences the immune system in the manner of a “danger signal” (LPS, GP96, etc.) or cytokines, such as GM-CFS, which allow an immune response produced by the immune-stimulating adjuvant according to the invention to be enhanced and/or influenced in a targeted manner. Particularly preferred auxiliary substances are cytokines, such as monokines, lymphokines, interleukins or chemokines, that—additional to induction of the adaptive immune response by the encoded at least one antigen—promote the innate immune response, such as IL-1 IL-2, IL-3, IL-4, IL-5, IL-6, IL-7, IL-8, IL-9, IL-10, IL-12, IL-13, IL-14, IL-15, IL-16, IL-17, IL-18, IL-19, IL-20, IL-21, IL-22, IL-23, IL-24, IL-25, IL-26, IL-27, IL-28, IL-29, IL-30, IL-31, IL-32, IL-33, INF-alpha, IFN-beta, INF-gamma, GM-CSF, G-CSF, M-CSF, LT-beta or TNF-alpha, growth factors, such as hGH. Preferably. such immunogenicity increasing agents or compounds are provided separately (not co-formulated with the inventive vaccine or composition) and administered individually.

[0327] Further additives which may be included in the inventive vaccine or composition are emulsifiers, such as, for example, Tween; wetting agents, such as, for example, sodium lauryl sulfate; colouring agents; taste-imparting agents, pharmaceutical carriers; tablet-forming agents; stabilizers; antioxidants; preservatives.

[0328] The inventive vaccine or composition can also additionally contain any further compound, which is known to be immune-stimulating due to its binding affinity (as ligands) to human Toll-like receptors TLR1, TLR2, TLR3, TLR4, TLR5, TLR6, TLR7, TLR8, TLR9, TLR10, or due to its binding affinity (as ligands) to murine Toll-like receptors TLR1, TLR2, TLR3, TLR4, TLR5, TLR6, TLR7, TLR8, TLR9, TLR10, TLR11, TLR12 or TLR13.

[0329] Another class of compounds, which may be added to an inventive vaccine or composition in this context, may be CpG nucleic acids, in particular CpG-RNA or CpG-DNA. A CpG-RNA or CpG-DNA can be a single-stranded CpG-DNA (ss CpG-DNA), a double-stranded CpG-DNA (dsDNA), a single-stranded CpG-RNA (ss CpG-RNA) or a double-stranded CpG-RNA (ds CpG-RNA). The CpG nucleic acid is preferably in the form of CpG-RNA, more preferably in the form of single-stranded CpG-RNA (ss CpG-RNA). The CpG nucleic acid preferably contains at least one or more (mitogenic) cytosine/guanine dinucleotide sequence(s) (CpG motif(s)). According to a first preferred alternative., at least one CpG motif contained in these sequences, that is to say the C (cytosine) and the G (guanine) of the CpG motif, is unmethylated. All further cytosines or guanines optionally contained in these sequences can be either methylated or unmethylated. According to a further preferred alternative, however, the C (cytosine) and the G (guanine) of the CpG motif can also be present in methylated form.

[0330] According to one aspect of the present invention, the RNA, the (pharmaceutical) composition or the vaccine may be used according to the invention (for the preparation of a medicament) for the treatment or prophylaxis of cancer and diseases or disorders related thereto.

[0331] As used herein, the term “cancer” refers to the broad class of disorders and malignancies characterized by hyperproliferative cell growth, either in vitro (e.g., transformed cells) or in vive. Conditions which can be treated or prevented by the compositions and methods of the invention include, e.g., a variety of neoplasms, including benign or malignant tumours, a variety of hyperplasias, or the like. Compositions and methods of the invention can achieve the inhibition and/or reversion of undesired hyperproliferative cell growth involved in such conditions. Specific examples of cancer include Acute Lymphoblastic Leukemia, Adult; Acute Lymphoblastic Leukemia, Childhood; Acute Myeloid Leukemia, Adult; Adrenocortical Carcinoma; Adrenocortical Carcinoma, Childhood; AIDS-Related Lymphoma; AIDS-Related Malignancies; Anal Cancer; Astrocytoma, Childhood Cerebellar; Astrocytoma, Childhood Cerebral; Bile Duct Cancer, Extrahepatic; Bladder Cancer; Bladder Cancer, Childhood; Bone Cancer, Osteosarcoma/Malignant Fibrous Histiocytoma; Brain Stem Glioma, Childhood; Brain Tumor, Adult; Brain Tumor, Brain Stem Glioma, Childhood; Brain Tumor, Cerebellar Astrocytoma, Childhood; Brain Tumor, Cerebral Astrocytoma/Malignant Glioma, Childhood; Brain Tumor, Ependymoma, Childhood; Brain Tumor, Medulloblastoma, Childhood; Brain Tumor, Supratentorial Primitive Neuroectodermal Tumors, Childhood; Brain Tumor, Visual Pathway and Hypothalamic Glioma, Childhood; Brain Tumor, Childhood (Other); Breast Cancer; Breast Cancer and Pregnancy; Breast Cancer, Childhood; Breast Cancer, Male; Bronchial Adenomas/Carcinoids, Childhood: Carcinoid Tumor, Childhood; Carcinoid Tumor, Gastrointestinal; Carcinoma, Adrenocortical; Carcinoma, Islet Cell; Carcinoma of Unknown Primary; Central Nervous System Lymphoma, Primary; Cerebellar Astrocytoma, Childhood; Cerebral Astrocytoma/Malignant Glioma, Childhood; Cervical Cancer; Childhood Cancers; Chronic Lymphocytic Leukemia; Chronic Myelogenous Leukemia; Chronic Myeloproliferative Disorders; Clear Cell Sarcoma of 5′endon Sheaths; Colon Cancer; Colorectal Cancer, Childhood; Cutaneous T-Cell Lymphoma; Endometrial Cancer; Ependymoma. Childhood; Epithelial Cancer, Ovarian; Esophageal Cancer; Esophageal Cancer, Childhood; Ewing's Family of Tumors; Extracranial Germ Cell Tumor, Childhood; Extragonadal Germ Cell Tumor; Extrahepatic Bile Duct Cancer; Eye Cancer, Intraocular Melanoma; Eye Cancer, Retinoblastoma; Gallbladder Cancer; Gastric (Stomach) Cancer; Gastric (Stomach) Cancer, Childhood; Gastrointestinal Carcinoid Tumor; Germ Cell Tumor, Extracranial, Childhood; Germ Cell Tumor, Extragonadal; Germ Cell Tumor, Ovarian; Gestational Trophoblastic Tumor; Glioma. Childhood Brain Stem; Glioma. Childhood Visual Pathway and Hypothalamic; Hairy Cell Leukemia; Head and Neck Cancer; Hepatocellular (Liver) Cancer, Adult (Primary); Hepatocellular (Liver) Cancer, Childhood (Primary); Hodgkin's Lymphoma. Adult; Hodgkin's Lymphoma, Childhood; Hodgkin's Lymphoma During Pregnancy; Hypopharyngeal Cancer; Hypothalamic and Visual Pathway Glioma, Childhood; Intraocular Melanoma; Islet Cell Carcinoma (Endocrine Pancreas); Kaposi's Sarcoma; Kidney Cancer; Laryngeal Cancer; Laryngeal Cancer, Childhood; Leukemia, Acute Lymphoblastic, Adult; Leukemia, Acute Lymphoblastic, Childhood; Leukemia, Acute Myeloid, Adult; Leukemia, Acute Myeloid, Childhood; Leukemia, Chronic Lymphocytic; Leukemia, Chronic Myelogenous; Leukemia, Hairy Cell; Lip and Oral Cavity Cancer; Liver Cancer, Adult (Primary); Liver Cancer, Childhood (Primary); Lung Cancer, Non-Small Cell; Lung Cancer, Small Cell; Lymphoblastic Leukemia, Adult Acute; Lymphoblastic Leukemia, Childhood Acute; Lymphocytic Leukemia, Chronic; Lymphoma. AIDS-Related; Lymphoma, Central Nervous System (Primary); Lymphoma, Cutaneous T-Cell; Lymphoma. Hodgkin's, Adult; Lymphoma. Hodgkin's; Childhood; Lymphoma. Hodgkin's During Pregnancy; Lymphoma, Non-Hodgkin's, Adult; Lymphoma, Non-Hodgkin's, Childhood; Lymphoma, Non-Hodgkin's During Pregnancy; Lymphoma, Primary Central Nervous System; Macroglobulinemia. Waldenstrom's; Male Breast Cancer; Malignant Mesothelioma. Adult; Malignant Mesothelioma, Childhood; Malignant Thymoma; Medulloblastoma, Childhood; Melanoma; Melanoma, Intraocular; Merkel Cell Carcinoma; Mesothelioma, Malignant; Metastatic Squamous Neck Cancer with Occult Primary; Multiple Endocrine Neoplasia Syndrome, Childhood; Multiple Myeloma/Plasma Cell Neoplasm; Mycosis Fungoides; Myelodysplasia Syndromes; Myelogenous Leukemia, Chronic; Myeloid Leukemia, Childhood Acute; Myeloma, Multiple; Myeloproliferative Disorders, Chronic; Nasal Cavity and Paranasal Sinus Cancer; Nasopharyngeal Cancer; Nasopharyngeal Cancer, Childhood; Neuroblastoma; Neurofibroma; Non-Hodgkin's Lymphoma. Adult; Non-Hodgkin's Lymphoma, Childhood; Non-Hodgkin's Lymphoma During Pregnancy; Non-Small Cell Lung Cancer; Oral Cancer, Childhood; Oral Cavity and Lip Cancer; Oropharyngeal Cancer; Osteosarcoma/Malignant Fibrous Histiocytoma of Bone; Ovarian Cancer, Childhood; Ovarian Epithelial Cancer; Ovarian Germ Cell Tumor; Ovarian Low Malignant Potential Tumor; Pancreatic Cancer; Pancreatic Cancer, Childhood', Pancreatic Cancer, Islet Cell; Paranasal Sinus and Nasal Cavity Cancer; Parathyroid Cancer; Penile Cancer; Pheochromocytoma; Pineal and Supratentorial Primitive Neuroectodermal Tumors. Childhood; Pituitary Tumor; Plasma Cell Neoplasm/Multiple Myeloma; Pleuropulmonary Blastoma; Pregnancy and Breast Cancer; Pregnancy and Hodgkin's Lymphoma; Pregnancy and Non-Hodgkin's Lymphoma; Primary Central Nervous System Lymphoma; Primary Liver Cancer. Adult; Primary Liver Cancer, Childhood; Prostate Cancer; Rectal Cancer; Renal Cell (Kidney) Cancer; Renal Cell Cancer, Childhood; Renal Pelvis and Ureter. Transitional Cell Cancer; Retinoblastoma; Rhabdomyosarcoma, Childhood; Salivary Gland Cancer; Salivary Gland Cancer, Childhood; Sarcoma, Ewing's Family of Tumors; Sarcoma, Kaposi's; Sarcoma (Osteosarcoma)/Malignant Fibrous Histiocytoma of Bone; Sarcoma, Rhabdomyosarcoma. Childhood; Sarcoma, Soft Tissue. Adult; Sarcoma, Soft Tissue., Childhood; Sezary Syndrome; Skin Cancer; Skin Cancer, Childhood; Skin Cancer (Melanoma); Skin Carcinoma, Merkel Cell; Small Cell Lung Cancer; Small Intestine Cancer; Soft Tissue Sarcoma. Adult; Soft Tissue Sarcoma, Childhood; Squamous Neck Cancer with Occult Primary, Metastatic; Stomach (Gastric) Cancer; Stomach (Gastric) Cancer, Childhood; Supratentorial Primitive Neuroectodermal Tumors, Childhood; T-Cell Lymphoma, Cutaneous; Testicular Cancer; Thymoma, Childhood; Thymoma, Malignant; Thyroid Cancer; Thyroid Cancer, Childhood; Transitional Cell Cancer of the Renal Pelvis and Ureter; Trophoblastic Tumor, Gestational; Unknown Primary Site, Cancer of, Childhood; Unusual Cancers of Childhood; Ureter and Renal Pelvis, Transitional Cell Cancer; Urethral Cancer; Uterine Sarcoma; Vaginal Cancer; Visual Pathway and Hypothalamic Glioma, Childhood; Vulvar Cancer; Waldenstrom's Macro globulinemia; and Wilms' Tumor.

[0332] In this context, also included in the present invention are methods of treating or preventing cancer and diseases or disorders related thereto, preferably as defined herein, by administering to a subject in need thereof a pharmaceutically effective amount of the RNA, the pharmaceutical composition or the vaccine according to the invention. Such a method typically comprises an optional first step of preparing the RNA, the composition or the vaccine of the present invention, and a second step, comprising administering (a pharmaceutically effective amount of) said composition or vaccine to a patient/subject in need thereof. A subject in need thereof will typically be a mammal. In the context of the present invention, the mammal is preferably selected from the group comprising, without being limited thereto, e.g. goat, cattle, swine, dog, cat, donkey, monkey, ape., a rodent such as a mouse, hamster, rabbit and, particularly, human, wherein the mammal typically suffers from cancer, and/or diseases or disorders related thereto (as defined herein).

[0333] The invention also relates to the use of the RNA, the composition or the vaccine according to the invention, preferably for eliciting an immune response in a mammal, preferably for the treatment or prophylaxis of cancer or a related condition as defined herein.

[0334] The subject receiving the pharmaceutical composition or the vaccine according to the invention may be a patient with cancer, preferably as defined herein, or a related condition, receiving chemotherapy (e.g. first-line or second-line chemotherapy), radiotherapy, chemoradiation (combination of chemotherapy and radiotherapy), tyrosine kinase inhibitors (e.g. EGFR tyrosine kinase inhibitors), antibody therapy and/or inhibitory and/or stimulatory checkpoint molecules (e.g. CTLA4 inhibitors. PD1 pathway inhibitors), or a patient, who has achieved partial response or stable disease after having received one or more of the treatments specified above.

[0335] The present invention furthermore comprises the use of the (pharmaceutical) composition or the RNA according to the invention as defined herein for modulating, preferably for inducing or enhancing, an immune response in a mammal as defined herein, more preferably for treating and/or for supporting the treatment or prophylaxis of cancer, preferably as defined herein, or of diseases or disorders related thereto. In this context, support of the treatment or prophylaxis of cancer may be any combination of a conventional cancer therapy method of such as surgery, radiation therapy, chemotherapy (e.g. first-line or second-line chemotherapy), chemoradiation, treatment with tyrosine kinase inhibitors, treatment with inhibitory and/or stimulatory checkpoint molecules, preferably CTLA4 inhibitors. PD-1 pathway inhibitors, antibody therapy or any combination of these, and a therapy using the RNA or the pharmaceutical composition as defined herein. Support of the treatment or prophylaxis of cancer may be also envisaged in any of the other embodiments defined herein. Accordingly, any use of the RNA, the (pharmaceutical) composition or the vaccine according to the invention in co-therapy with any other approach, preferably one or more of the above therapeutic approaches, in particular in combination with surgery, radiation therapy, chemotherapy, chemoradiation, and/or treatment with kinase inhibitors, inhibitory and/or stimulatory checkpoint molecules or antibodies is within the scope of the present invention.

[0336] In this context, antibodies and/or inhibitory and/or stimulatory checkpoint molecules used for combination with the RNA, the vaccine or the (pharmaceutical) composition according to the invention may be encoded by a nucleic acid, preferably an RNA and most preferably by an mRNA.

[0337] For administration, preferably any of the administration routes may be used as defined herein. In particular, an administration route is used, which is suitable for treating or preventing cancer, preferably a cancer disease as defined herein or diseases or disorders related thereto, by inducing or enhancing an adaptive immune response on the basis of an antigen encoded by the RNA according to the invention. Administration of the composition and/or the vaccine according to the invention may then occur prior, concurrent and/or subsequent to administering another composition and/or vaccine as defined herein, which may—in addition—contain another RNA or combination of RNAs encoding a different antigen or combination of antigens, wherein each antigen encoded by the RNA according to the invention is preferably suitable for the treatment or prophylaxis of cancer and diseases or disorders related thereto. In this context, a treatment as defined herein may also comprise the modulation of a disease associated to cancer and of diseases or disorders related thereto.

[0338] According to a preferred embodiment of this aspect of the invention, the (pharmaceutical) composition or the vaccine according to the invention is administered by injection. Any suitable injection technique known in the art may be employed. Preferably, the inventive composition is administered by injection, preferably by needle-less injection, for example by jet-injection.

[0339] In one embodiment, the inventive composition comprises at least two, three, four, five, six, seven, eight, nine, ten, eleven, twelve or more RNAs as defined herein, each of which is preferably injected separately, preferably by needle-less injection. Alternatively, the inventive composition comprises at least two, three, four, five, six seven, eight, nine, ten, eleven, twelve or more RNAs, wherein the at least two, three, four, five, six seven, eight, nine, ten, eleven, twelve or more RNAs are administered, preferably by injection as defined herein, as a mixture.

[0340] The immunization protocol for the immunization of a subject against an antigen or a combination of at least two, three, four, five, six, seven, eight, nine, ten, eleven, twelve or more antigens as defined herein typically comprises a series of single doses or dosages of the (pharmaceutical) composition or the vaccine according to the invention. A single dosage, as used herein, refers to the initial/first dose, a second dose or any further doses, respectively, which are preferably administered in order to “boost” the immune reaction. In this context, each single dosage preferably comprises the administration of the same antigen or the same combination of antigens as defined herein, wherein the interval between the administration of two single dosages can vary from at least one day, preferably 2, 3, 4, 5, 6 or 7 days, to at least one week, preferably 2, 3, 4, 5, 6, 7 or 8 weeks. The intervals between single dosages may be constant or vary over the course of the immunization protocol, e.g. the intervals may be shorter in the beginning and longer towards the and of the protocol. Depending on the total number of single dosages and the interval between single dosages, the immunization protocol may extend over a period of time, which preferably lasts at least one week, more preferably several weeks (e.g. 2, 3, 4, 5, 6, 7, 8, 9, 10, 11 or 12 weeks), even more preferably several months (e.g. 3, 4, 5, 6, 7, 8, 9, 10, 11, 12, 18 or 24 months). Each single dosage preferably encompasses the administration of an antigen, preferably of a combination of at least two, three, four, five, six, seven, eight, nine, ten, eleven, twelve or more antigens as defined herein and may therefore involve at least one, preferably 1, 2, 3, 4, 5, 6, 7, 8, 9, 10, 11 or 12 injections. In some cases, the composition or the vaccine according to the invention is administered as a single dosage typically in one injection. In the case, where the vaccine according to the invention comprises separate RNA formulations encoding distinct antigens as defined herein, the minimum number of injections carried out during the administration of a single dosage corresponds to the number of separate components of the vaccine. In certain embodiments, the administration of a single dosage may encompass more than one injection for each component of the vaccine (e.g. a specific RNA formulation comprising an RNA encoding, for instance, one antigen as defined herein). For example, parts of the total volume of an individual component of the vaccine may be injected into different body parts, thus involving more than one injection. In a more specific example, a single dosage of a vaccine comprising four separate RNA formulations, each of which is administered in two different body parts, comprises eight injections. Typically, a single dosage comprises all injections required to administer all components of the vaccine, wherein a single component may be involve more than one injection as outlined above. In the case., where the administration of a single dosage of the vaccine according to the invention encompasses more than one injection, the injection are carried out essentially simultaneously or concurrently, i.e. typically in a time-staggered fashion within the time-frame that is required for the practitioner to carry out the single injection steps, one after the other. The administration of a single dosage therefore preferably extends over a time period of several minutes, e.g. 2, 3, 4, 5, 10, 15, 30 or 60 minutes.

[0341] Administration of the RNA as defined herein, the (pharmaceutical) composition or the vaccine according to the invention may be carried out in a time staggered treatment. A time staggered treatment may be e.g. administration of the RNA, the composition or the vaccine prior, concurrent and/or subsequent to a conventional therapy of cancer or diseases or disorders related thereto, e.g. by administration of the RNA, the composition or the vaccine prior, concurrent and/or subsequent to a therapy or an administration of a therapeutic suitable for the treatment or prophylaxis of cancer or diseases or disorders related thereto. Such time staggered treatment may be carried out using e.g. a kit, preferably a kit of parts as defined herein.

[0342] Time staggered treatment may additionally or alternatively also comprise an administration of the RNA as defined herein, the (pharmaceutical) composition or the vaccine according to the invention in a form, wherein the RNA encoding an antigen as defined herein or a fragment or variant thereof, preferably forming part of the composition or the vaccine, is administered parallel, prior or subsequent to another RNA encoding an antigen as defined above, preferably forming part of the same inventive composition or vaccine. Preferably, the administration (of all RNAs) occurs within an hour, more preferably within 30 minutes, even more preferably within 15, 10, 5, 4, 3, or 2 minutes or even within 1 minute. Such time staggered treatment may be carried out using e.g. a kit, preferably a kit of parts as defined herein.

[0343] In a preferred embodiment, the pharmaceutical composition or the vaccine of the present invention is administered repeatedly, wherein each administration preferably comprises individual administration of the at least one mRNA of the inventive composition or vaccine. At each time point of administration, the at least one mRNA may be administered more than once (e.g. 2 or 3 times). In a particularly preferred embodiment of the invention, at least two, three, four, five, six or more RNAs (each encoding a distinct one of the antigens as defined herein) are administered at each time point, wherein each RNA is administered twice by injection, distributed over the four limbs.

[0344] According to another aspect of the present invention, the present invention also provides a kit, in particular a kit of parts, comprising the RNA as defined herein, the (pharmaceutical) composition, and/or the vaccine according to the invention, optionally a liquid vehicle for solubilising and optionally technical instructions with information on the administration and dosage of the RNA, the composition and/or the vaccine. The technical instructions may contain information about administration and dosage of the RNA, the composition and/or the vaccine. Such kits, preferably kits of parts, may be applied e.g. for any of the above mentioned applications or uses, preferably for the use of the RNA according to the invention (for the preparation of an inventive medicament, preferably a vaccine) for the treatment or prophylaxis of cancer or diseases or disorders related thereto. The kits may also be applied for the use of the RNA, the composition or the vaccine as defined herein (for the preparation of an inventive vaccine) for the treatment or prophylaxis of cancer or diseases or disorders related thereto, wherein the RNA, the composition and/or the vaccine may be capable of inducing or enhancing an immune response in a mammal as defined above. Such kits may further be applied for the use of the RNA, the composition or the vaccine as defined herein (for the preparation of an inventive vaccine) for modulating, preferably for eliciting, e.g. to induce or enhance, an immune response in a mammal as defined above, and preferably for supporting treatment or prophylaxis of cancer or diseases or disorders related thereto. Kits of parts, as a special form of kits, may contain one or more identical or different compositions and/or one or more identical or different vaccines as described herein in different parts of the kit. Kits of parts may also contain an (e.g. one) composition, an (e.g. one) vaccine and/or the RNA according to the invention in different parts of the kit, e.g. each part of the kit containing an RNA as defined herein, preferably encoding a distinct antigen. Preferably, the kit or the kit of parts contains as a part a vehicle for solubilising the RNA according to the invention, the vehicle preferably being Ringer-lactate solution. Any of the above kits may be used in a treatment or prophylaxis as defined above.

[0345] In another embodiment of this aspect, the kit according to the present invention may additionally contain at least one adjuvant. In a further embodiment, the kit according to the present invention may additionally contain at least one further pharmaceutically active component, preferably a therapeutic compound suitable for treatment and/or prophylaxis of cancer or a related disorder. Moreover, in another embodiment, the kit may additionally contain parts and/or devices necessary or suitable for the administration of the composition or the vaccine according to the invention, including needles, applicators, patches, injection-devices.

### FIGURES

[0346] The figures shown in the following are merely illustrative and shall describe the present invention in a further way. These figures shall not be construed to limit the present invention thereto.

[0347] FIG. 1: shows the presence of IgG2a antibodies specific for the cancer antigen NY-ESO-1 in mice that were vaccinated with NY-ESO-1 mRNA vaccine. A detailed description of the experiment is provided in the example section (see Example 2).

[0348] FIG. 2: shows the induction of antigen-specific T-lymphocytes directed against the cancer antigen NY-ESO-1 in mice that were vaccinated with NY-ESO-1 mRNA vaccine. A detailed description of the experiment is provided in the example section (see Example 2).

[0349] FIG. 3: shows the presence of IgG2a antibodies specific for the cancer antigen PSA in mice that were vaccinated with PSA mRNA vaccine. A detailed description of the experiment is provided in the example section (see Example 3).

[0350] FIG. 4: shows the induction of antigen-specific T-lymphocytes directed against the cancer antigen PSA in mice that were vaccinated with PSA mRNA vaccine. A detailed description of the experiment is provided in the example section (see Example 3).

[0351] FIG. 5: shows the induction of antigen-specific T-lymphocytes directed against the cancer antigen PSM (PSMA) in mice that were vaccinated with PSM (PSMA) mRNA vaccine. A detailed description of the experiment is provided in the example section (see Example 4).

[0352] FIG. 6: shows the induction of antigen-specific T-lymphocytes directed against the cancer antigen MAGE-A2 in mice that were vaccinated with MAGE-A2 mRNA vaccine. A detailed description of the experiment is provided in the example section (see Example 5).

[0353] FIG. 7: shows the induction of antigen-specific T-lymphocytes directed against the cancer antigen MAGE-C2 in mice that were vaccinated with MAGE-C2 mRNA vaccine. A detailed description of the experiment is provided in the example section (see Example 5).

[0354] FIG. 8: shows the induction of antigen-specific T-lymphocytes directed against the cancer antigen MAGE-A3 in mice that were vaccinated with MAGE-A3 mRNA vaccine. A detailed description of the experiment is provided in the example section (see Example 5).

[0355] FIG. 9: shows the induction of antigen-specific T-lymphocytes directed against the cancer antigen PMEL (human gp100, hgp100) in mice that were vaccinated with PMEL mRNA vaccine. A detailed description of the experiment is provided in the example section (see Example B).

### EXAMPLES

[0356] The Examples shown in the following are merely illustrative and shall describe the present invention in a further way. These Examples shall not be construed to limit the present invention thereto.

### Example 1: Preparation of mRNA Cancer Vaccine

[0357] 1.1 Preparation of DNA and mRNA Constructs

[0358] For the present examples, DNA sequences encoding cancer antigens, are prepared and used for subsequent RNA in vitro transcription reactions.

[0359] Most DNA sequences were prepared by modifying the wild type encoding DNA sequences by introducing a GC-optimized sequence. Sequences were introduced into a pUC19 derived vector and modified to comprise stabilizing sequences derived from alpha-globin-3′-UTR, a stretch of 30 cytosines, and a stretch of B4 adenosines at the 3′-terminal and (poly-A-tail).

[0360] The following constructs, coding for the indicated antigens, are used in the present example:

[0361] NY-ESO-1 (SEQ ID NO: 458B), PSA (SEQ ID NO: 4590), PSM (SEQ ID NO: 4589), MAGE-A2 (SEQ ID NO: 4588), MAGE-A3 (SEQ ID NO: 4587), MAGE-C2 (SEQ ID NO: 4585) and PMEL (SEQ ID NO: 4591).

[0362] The obtained plasmid DNA constructs were transformed and propagated in bacteria (Escherichia coli) using common protocols known in the art.

[0363] 1.2. RNA In Vitro Transcription

[0364] The DNA plasmids prepared according to paragraph 1 are enzymatically linearized using EcoRI and transcribed in vitro using DNA dependent T7 RNA polymerase in the presence of a nucleotide mixture and CAP analog (m7GpppG) under suitable buffer conditions. The obtained mRNAs purified using PureMessenger (CureVac, Tobingen, Germany; WO 2008/077592 A1) are used for in vitro vaccination experiments (see Examples 2-B).

[0365] 1.3. Preparation of Protamine Complexed mRNA (“RNActive® Formulation”):

[0366] The obtained antigen mRNA constructs were complexed with protamine prior to use in in vivo vaccination experiments. The mRNA complexation consists of a mixture of 50% free mRNA and 50% mRNA complexed with protamine at a weight ratio of 2:1. First, mRNA is complexed with protamine by addition of protamine-Ringer's lactate solution to mRNA. After incubation for 10 minutes, when the complexes are stably generated, free mRNA is added, and the final concentration of the vaccine is adjusted with Ringer's lactate solution.

### Example 2: Vaccination Experiment with NY-ESO-1 mRNA Vaccine

[0367] To test the NY-ESO-1 mRNA vaccine obtained according to Example 1 in vivo. C57BL/6 mice were intradermally injected with NY-ESO-1 mRNA vaccine. The immune responses of NY-ESO-1 vaccinated mice were analysed (NY-ESO-1 specific immune response and NY-ESDI specific cellular immune response). A detailed description of the experiment is provided below.

[0368] 2.1. Detection of an NY-ESD-1-Specific Immune Response (B-Cell Immune Response):

[0369] For vaccination 5 mice (C57 BL/6) per group were intradermally injected B times within 3 weeks with NY-ESO-1 mRNA vaccine. As negative control lacZ mRNA was injected. Detection of an antigen-specific immune response (B-cell immune response) was carried out by detecting NY-ESO-1 specific antibodies. Therefore, blood samples were taken from the vaccinated mice one week after the last vaccination and sera were prepared. MaxiSorb plates (Nalgene Nuno International) were coated with the antigenic protein (0.5 μg/well). After blocking with 1×PBS containing 0.05% Tween-20 and 1% BSA the plates were incubated with diluted mouse serum (1:30, 1:90, 1:270, 1:810). Subsequently a biotin-coupled secondary antibody (anti-mouse-IgG2a, Pharmingen) was added. After washing, the plate was incubated with horseradish peroxidase-streptavidin and subsequently the conversion of the ABTS substrate (2,2′-azino-bis(3-ethyl-benzthiazoline-B-sulfonic acid) was measured. The result of the experiment is shown in FIG. 1.

[0370] 2.2. Detection of an NY-ESO-1-Specific Cellular Immune Response (CTL) by ELISPOT

[0371] 2 weeks after the last vaccination mice were sacrificed, the spleens were removed and the splenocytes were isolated. The splenocytes were restimulated for 7 days in the presence of NY-ESO-1 peptides (peptide library); a peptide library of HIV antigen was used as control. To determine an antigen-specific cellular immune response IFNgamma secretion was measured after re-stimulation with peptide. For detection of IFNgamma a coat multiscreen plate (Millipore) was incubated overnight with coating buffer (0.1 M Carbonat-Bicarbonat Buffer pH 9.6, 10.59 g/l Na₂CO₃, 8.4 g/l NaHCO₃) comprising antibody against IFNgamma (BD Pharmingen. Heidelberg, Germany). After coating effector cells (5×10⁵/well) were incubated with the antigen-specific peptide library, an unspecific peptide, DMSO or medium as control for 24h in the plate. Subsequently the plate was washed with 1×PBS and incubated with a biotin-coupled secondary antibody. After washing with 1×PBS/0.05% Tween-20 the substrate (5-Bromo-4-Cloro-3-Indolyl Phosphate/Nitro Blue Tetrazolium Liquid Substrate System from Sigma Aldrich. Taufkirchen, Germany) was added to the plate and the conversion of the substrate could be detected visually. The results are shown in FIG. 1.

[0372] Results:

[0373] The data shows that we detected antigen specific IgG2a antibodies in serum of mice vaccinated with the NY-ESO-1 mRNA vaccine demonstrating that the mRNAs are functional and immunogenic in vive. The result is shown in FIG. 1. The presence of antigen-specific cytotoxic T-cells in splenocytes from NY-ESO-1 vaccinated mice was investigated using the ELISPOT technique. As shown in FIG. 2, the stimulation with NY-ESO-1 peptide library led to high IFN-gamma secretion in splenocytes from mice vaccinated with NY-ESO-1 mRNA vaccine and not in splenocytes from control mice, vaccinated with mRNA coding for irrelevant protein beta-galactosidase. None of the splenocytes reacted to the HIV-derived control peptide library. The result is shown in FIG. 2.

[0374] Overall, the results shown in FIG. 1 and FIG. 2 demonstrate that the inventive NY-ESO-1 mRNA vaccine induces antigen specific B-cell and T-cell responses in vive.

### Example 3: Vaccination Experiment with PSA mRNA Vaccine

[0375] To test the PSA mRNA vaccine obtained according to Example 1 in vivo, C57BL/6 mice were intradermally injected with PSA mRNA vaccine. The immune responses of PSA vaccinated mice were analysed (PSA specific immune response and PSA specific cellular immune response). The results of the experiment are shown in FIGS. 3 and 4. A detailed description of the experiment is provided below.

[0376] 3.1. Detection of an PSA-Specific Immune Response (B-Cell Immune Response):

[0377] For vaccination 4 mice (C57 BL/6) per group were intradermally injected 4 times within 3 weeks with 5 μg PSA mRNA vaccine. As negative control, an injection buffer was applied. Detection of an antigen-specific immune response (B-cell immune response) was carried out by detecting PSA specific antibodies. The detection of antigen-specific immune response (B-cell immune response) was performed according to Example 2.2. The results are shown in FIG. 3.

[0378] 3.2. Detection of an PSA-Specific Cellular Immune Response by ELISPOT:

[0379] 2 months after the last vaccination mice were sacrificed, the spleens were removed and the splenocytes were isolated. The splenocytes were incubated for 7 days in presence of IL-4 to select dendritic cells. To determine an antigen-specific cellular immune response INFgamma secretion was measured after re-stimulation. The detection of an antigen-specific cellular immune response by ELISPOT was essentially performed according to Example 2.3. The results are shown in FIG. 4.

[0380] Results:

[0381] The data shows that we detected antigen specific IgG2a antibodies in serum of mice vaccinated with the PSA mRNA vaccine demonstrating that the mRNAs are functional and immunogenic in vivo. The result is shown in FIG. 3. The presence of antigen-specific cytotoxic T-cells in splenocytes from PSA vaccinated mice was investigated using the ELISPOT technique. As shown in FIG. 4, the stimulation with PSA peptide library led to high IFN-gamma secretion in splenocytes from mice vaccinated with PSA mRNA vaccine and not in splenocytes from control mice, vaccinated with buffer. None of the splenocytes reacted to the control peptide library. The result is shown in FIG. 4.

[0382] Overall, the results shown in FIG. 3 and FIG. 4 demonstrate that the inventive PSA mRNA vaccine induces antigen specific B-cell and T-cell responses in vive.

### Example 4: Vaccination Experiment with PSM mRNA Vaccine

[0383] To test the PSM mRNA vaccine obtained according to Example 1 in vivo. C57BL/6 mice were intradermally injected with PSM mRNA vaccine. The immune responses of PSM vaccinated mice were analysed (PSM specific cellular immune response). The result of the experiment is shown in FIG. 5. A detailed description of the experiment is provided below.

[0384] 4.1. Detection of an PSM-Specific Cellular Immune Response by ELISPOT:

[0385] For vaccination B mice (C57 BL/6) per group were intradermally injected 5 times with 32 μg PSA mRNA vaccine. As negative control, ringer lactate (RiLa) buffer was applied. After the last vaccination mice were sacrificed, the spleens were removed and the splenocytes were isolated. For re-stimulation 3×10⁷ splenocytes were incubated for 5 days with a PSM peptide library (1 μg/ml per peptide) in presence of IL-2 (30 U/ml). The detection of an antigen-specific cellular immune response by ELISPOT was essentially performed according to Example 2.3. The result is shown in FIG. 5.

[0386] Results:

[0387] The presence of antigen-specific cytotoxic T-cells in splenocytes from PSM vaccinated mice was investigated using the ELISPOT technique. As shown in FIG. 5, the stimulation with PSM peptide library led to high IFN-gamma secretion in splenocytes from mice vaccinated with PSM mRNA vaccine and not in splenocytes from control mice, vaccinated with RiLa buffer. The result is shown in FIG. 5.

[0388] Overall, the results shown in FIG. 5 demonstrate that the inventive PSM mRNA vaccine induces antigen specific T-cell responses in vivo.

### Example 5: Vaccination Experiment with MAGE-A2, MAGE-A3 and MAGE-C2 mRNA Vaccines

[0389] To test the MAGE-A2, MAGE-A3 and MAGE-C2 mRNA vaccine obtained according to Example 1 in vivo, C57BL/6 mice were intradermally injected with MAGE-A2, MAGE-A3 and MAGE-C2 mRNA vaccines. The immune responses of vaccinated mice were analysed (antigen specific cellular immune response). The results of the experiments are shown in FIGS. 6-8. A detailed description of the experiment is provided below.

[0390] 5.1. Detection of an Antigen-Specific Cellular Immune Response by ELISPOT:

[0391] For the present example, MAGE-A2, MAGE-A3 and MAGE-C2 mRNA vaccines were applied with application regimens as provided below:
[0392] MAGE-A2: C57BL/6 mice were vaccinated intradermally with mRNA encoding human MAGE-A2. (20 μg/mouse/vaccination day, 5 mice per group). Ringer lactate was used as control. After B vaccinations splenocytes were isolated and analyzed by ELISpot assay.
[0393] MAGE-A3: C57BL/6 mice were vaccinated intradermally with mRNA encoding human MAGE-A2. (32 μg/mouse/vaccination day. 8 mice per group). Ringer lactate was used as control. After 5 vaccinations splenocytes were isolated and analyzed by ELISpot assay.
[0394] MAGE-C2: C57BL/6 mice were vaccinated intradermally with mRNA encoding human MAGE-A2. (20 μg/mouse/vaccination day, 5 mice per group). Ringer lactate was used as control. After B vaccinations splenocytes were isolated and analyzed by ELISpot assay.

[0395] After the last vaccination the mice were sacrificed, the spleens were removed and the splenocytes were isolated. For re-stimulation 3×10⁷ splenocytes were incubated for 5 days with the respective antigen-specific peptide or peptide library (1 μg/ml per peptide) in presence of IL-2 (30 U/ml). To determine an antigen-specific cellular immune response IFNy secretion was measured after re-stimulation with peptide. The detection of an antigen-specific cellular immune response by ELISPOT was performed according to Example 2.3. The result is shown in FIGS. 6-8.

[0396] Results:

[0397] The presence of antigen-specific cytotoxic T-cells in splenocytes from MAGE-A2, MAGE-A3 and MAGE-C2 vaccinated mice was investigated using the ELISPOT technique. As shown in FIG. 6, the stimulation with MAGE-A2 peptide library led to high IFN-gamma secretion in splenocytes from mice vaccinated with MAGE-A2 mRNA vaccine. Stimulation with a control peptide library did not lead to IFN-gamma secretion. As shown in FIG. 7, the stimulation with MAGE-C2 peptide library led to high IFN-gamma secretion in splenocytes from mice vaccinated with MAGE-C2 mRNA vaccine. Stimulation with a control peptide library did not lead to IFN-gamma secretion. As shown in FIG. 8, the stimulation with MAGE-A3 peptide library led to high IFN-gamma secretion in splenocytes from mice vaccinated with MAGE-A3 mRNA vaccine and not in splenocytes from control mice, vaccinated with RiLa buffer.

[0398] Overall, the results shown in FIGS. 6-8 demonstrate that the inventive MAGE-A2, MAGE-A3 and MAGE-C2 mRNA vaccine induce antigen specific T-cell responses in vivo.

### Example B: Vaccination Experiment with PMEL mRNA Vaccine

[0399] To test the PMEL mRNA vaccine obtained according to Example 1 in vivo, C57BL/6 mice were intradermally injected with PMEL mRNA vaccines. The immune response of vaccinated mice was analysed (PMEL specific cellular immune response). The result of the experiment is shown in FIG. 9. A detailed description of the experiment is provided below.

[0400] 6.1. Detection of a PMEL-Specific Cellular Immune Response by ELISPOT:

[0401] 8 mice (C57 BL/6) per group were intradermally injected 4 times within 3 weeks with 64 μg PMEL mRNA vaccine. As negative control, RiLa injection buffer was injected. After the last vaccination the mice were sacrificed, the spleens were removed and the splenocytes were isolated. The detection of an antigen-specific cellular immune response by ELISPOT was performed according to Example 2.3. The result is shown in FIG. 9.

[0402] Results:

[0403] The presence of PMEL-specific cytotoxic T-cells in splenocytes from PMEL vaccinated mice was investigated using the ELISPOT technique. As shown in FIG. 9, the stimulation with PMEL peptide library led to high IFN-gamma secretion in splenocytes from mice vaccinated with PMEL mRNA vaccine. Stimulation with a control peptide library did not lead to IFN-gamma secretion.

1. An RNA comprising at least one coding sequence, wherein the coding sequence comprises a nucleic acid sequence selected from the group consisting of SEQ ID NOs: 505-4033; 4561-4591, or a fragment or variant of any one of said nucleic acid sequences.

2. The RNA according to claim 1, wherein the at least one coding sequence encodes a tumor antigen, or a fragment or variant of a tumor antigen, wherein the tumor antigen is preferably selected from the group consisting of 1A01 HLA-A/m; 1A02; 5T4; ACRBP; AFP; AKAP4; alpha-actinin-_4/m; alpha-methylacyl-coenzyme A racemase; ANDR; ART-4; ARTC1/m; AURKB; B2MG; B3GN5; B4GN1; B7H4; BAGE-1; BASI; BCL-2; bcr/abl; beta-catenin/m; BING-4; BIRC7; BRCA1/m; BY55; calreticulin; CAMEL; CASP-8/m; CASPA; cathepsin_B; cathepsin L; CD1A; CD1B; CD1C; CD1D; CD1E; CD20; CD22; CD276; CD33; CD3E; CD3Z; CD44 Isoform_1; CD44_Isoform_6; CD4; CD52; CD55; CD56; CD80; CD86; CD8A; CDC27/m; CDE30; CDK4/m; CDKN2A/m; CEA; CEAM6; CH3L2; CLCA2; CML28; CML66; COA-1/m; coactosin-like_protein; collagen_XXIII; COX-2; CP1B1; CSAG2; CT45A1; CT55; CT-_9/BRD6; CTAG2_Isoform_LAGE-1A; CTAG2_Isoform_LAGE-1B; CTCFL; Cten; cyclin_B1; cyclin_D1; cyp-B; DAM-10; DEP1A; E7; EF1A2; EFTUD2/m; EGFR; EGLN3; ELF2/m; EMMPRIN; EpCam; EphA2; EphA3; ErbB3; ERBB4; ERG; ETV6; EWS; EZH2; FABP7; FCGR3A_Version_1; FCGR3A_Version_2; FGF5; FGFR2; fibronectin; FOS; FOXP3; FUT1; G250; GAGE-1; GAGE-2; GAGE-3; GAGE-4; GAGE-5; GAGE-6; GAGE7b; GAGE-8 (GAGE-2D); GASR; GnT-V; GPC3; GPNMB/m; GRM3; HAGE; hepsin; Her2/neu; HLA-A2/m; homeobox NKX3.1; HOM-TES-85; HPG1; HS71A; HS71B; HST-2; hTERT; iCE; IF2B3; IL10; IL-13Ra2; IL2-RA; IL2-RB; IL2-RG; IL-5; IMP3; ITA5; ITB1; ITB6; kallikrein-2; kallikrein-3; kallikrein-4; KI20A; KIAA0205; KIF2C; KK-LC-1; LDLR; LGMN; LIRB2; LY6K; MAGA5; MAGA8; MAGAB; MAGE-A10; MAGE-A12; MAGE-A1; MAGE-A2; MAGE-A3; MAGE-A4; MAGE-A6; MAGE-A9; MAGE-B10; MAGE-B16; MAGE-B17; MAGE-_B1; MAGE-B2; MAGE-B3; MAGE-B4; MAGE-B5; MAGE-B6; MAGE-C1; MAGE-C2; MAGE-C3; MAGE-D1; MAGE-D2; MAGE-D4; MAGE-_E1; MAGE-E1_(MAGE1); MAGE-E2; MAGE-F1; MAGE-H1; MAGEL2; mammaglobin_A; MART-1/melan-A; MART-2; MC1_R; M-CSF; mesothelin; MITF; MMP1_1; MMP7; MUC-1; MUM-1/m; MUM-2/m; MYCN; MYO1A; MYO1B; MYO1C; MYO1D; MYO1E; MYO1F; MYO1G; MYO1H; NA17; NA88-A; Neo-PAP; NFYC/m; NGEP; NPM; NRCAM; NSE; NUF2; NY-ESO-1; OA1; OGT; OS-9; osteocalcin; osteopontin; p53; PAGE-4; PAI-1; PAI-2; PAP; PATE; PAX3; PAX5; PD1L1; PDCD1; PDEF; PECA1; PGCB; PGFRB; Pim-1_-Kinase; Pin-1; PLAC1; PMEL; PML; POTEF; POTE; PRAME; PRDX5/m; PRM2; prostein; proteinase-3; PSA; PSB9; PSCA; PSGR; PSM; PTPRC; RAB8A; RAGE-1; RARA; RASH; RASK; RASN; RGS5; RHAMM/CD168; RHOC; RSSA; RU1; RU2; RUNX1; S-100; SAGE; SART-_1; SART-2; SART-3; SEPR; SERPINB5; SIA7F; SIA8A; SIAT9; SIRT2/m; SOX10; SP17; SPNXA; SPXN3; SSX-1; SSX-2; SSX3; SSX-4; ST1A1; STAG2; STAMP-1; STEAP-1; Survivin-2B; survivin; SYCP1; SYT-SSX-1; SYT-SSX-2; TARP; TCRg; TF2AA; TGFB1; TGFR2; TGM-4; TIE2; TKTL1; TPI/m; TRGV11; TRGV9; TRPC1; TRP-p8; TSG10; TSPY1; TVC_(TRGV3); TX101; tyrosinase; TYRP1; TYRP2; UPA; VEGFR1; WT1; and XAGE1.

3. (canceled)

4. The RNA according to claim 1, wherein the RNA is mono-, bi-, or multicistronic.

5. The RNA according to claim 1, wherein the RNA is an mRNA, a viral RNA or a replicon RNA.

6. The RNA according to claim 1, wherein the RNA is a modified RNA, preferably a stabilized RNA.

7. The RNA according to claim 1, wherein the G/C content of the at least one coding sequence of the RNA is increased compared to the G/C content of the corresponding coding sequence of the corresponding wild-type RNA, and/or wherein
the C content of the at least one coding sequence of the RNA is increased compared to the C content of the corresponding coding sequence of the corresponding wild-type RNA, and/or wherein
the codons in the at least one coding sequence of the RNA are adapted to human codon usage, wherein the codon adaptation index (CAI) is preferably increased or maximised in the at least one coding sequence of the RNA,
wherein the amino acid sequence encoded by the RNA is preferably not being modified compared to the amino acid sequence encoded by the corresponding wild-type RNA.

8.-10. (canceled)

11. The RNA according to claim 1, which comprises a 5′-CAP structure and/or at least one 3′-untranslated region element (3′-UTR element).

12. The RNA according to claim 1, which comprises at least one histone stem-loop.

13.-15. (canceled)

16. The RNA according to claim 1, wherein the at least one RNA comprises a poly(A) sequence, preferably comprising 10 to 200, 10 to 100, 40 to 80 or 50 to 70 adenosine nucleotides, and/or a poly(C) sequence, preferably comprising 10 to 200, 10 to 100, 20 to 70, 20 to 60 or 10 to 40 cytosine nucleotides.

17. The RNA according to claim 1, which comprises, preferably in 5′ to 3′ direction, the following elements:
a) a 5′-CAP structure, preferably m7GpppN,
b) at least one coding sequence as defined in claim 8,
c) a poly(A) tail, preferably consisting of 10 to 200, 10 to 100, 40 to 80 or 50 to 70 adenosine nucleotides,
d) a poly(C) tail, preferably consisting of 10 to 200, 10 to 100, 20 to 70, 20 to 60 or 10 to 40 cytosine nucleotides, and
e) a histone stem-loop, preferably comprising the RNA sequence according to SEQ ID NO: 4556.

18. The RNA according to claim 11, which comprises a 3′-UTR element and wherein the 3′-UTR element comprises a nucleic acid sequence derived from a 3′-UTR of a gene, which preferably encodes a stable mRNA, or from a homolog, a fragment or a variant of said gene.

19.-20. (canceled)

21. The RNA according to claim 1, which comprises, preferably in 5′ to 3′ direction, the following elements:
a) a 5′-CAP structure, preferably m7GpppN,
b) at least one coding sequence,
c) a 3′-UTR element comprising a nucleic acid sequence, which is derived from an α-globin gene, preferably comprising the corresponding RNA sequence of the nucleic acid sequence according to SEQ ID NO: 4547, or a homolog, a fragment or a variant thereof,
d) a poly(A) tail, preferably consisting of 10 to 200, 10 to 100, 40 to 80 or 50 to 70 adenosine nucleotides,
e) a poly(C) tail, preferably consisting of 10 to 200, 10 to 100, 20 to 70, 20 to 60 or 10 to 40 cytosine nucleotides, and
f) a histone stem-loop, preferably comprising the RNA sequence according to SEQ ID NO: 4556.

22.-23. (canceled)

24. The RNA according to claim 1, wherein the RNA comprises a 5′-UTR element.

25.-28. (canceled)

29. The RNA according to claim 1, which comprises, preferably in 5′ to 3′ direction, the following elements:
a) a 5′-CAP structure, preferably m7GpppN,
b) a 5′-UTR element, which comprises or consists of a nucleic acid sequence, which is derived from the 5′-UTR of a TOP gene, preferably comprising an RNA sequence corresponding to the nucleic acid sequence according to SEQ ID NO: 4537, or a homolog, a fragment or a variant thereof,
c) at least one coding sequence,
d) a 3′-UTR element comprising a nucleic acid sequence, which is derived from an α-globin gene, preferably comprising the corresponding RNA sequence of the nucleic acid sequence according to SEQ ID NO: 4547, or a homolog, a fragment or a variant thereof; and/or
a 3′-UTR element comprising a nucleic acid sequence, which is derived from an albumin gene, preferably comprising the corresponding RNA sequence of the nucleic acid sequence according to SEQ ID NO: 4551 or SEQ ID NO: 4553, or a homolog, a fragment or a variant thereof,
e) a poly(A) tail, preferably consisting of 10 to 200, 10 to 100, 40 to 80 or 50 to 70 adenosine nucleotides,
f) a poly(C) tail, preferably consisting of 10 to 200, 10 to 100, 20 to 70, 20 to 60 or 10 to 40 cytosine nucleotides, and
g) a histone stem-loop, preferably comprising the RNA sequence according to SEQ ID NO: 4556

30. A composition comprising the RNA according to claim 1 and a pharmaceutically acceptable carrier.

31.-35. (canceled)

36. The composition according to claim 30, wherein the RNA is complexed with one or more lipids, thereby forming liposomes, lipid nanoparticles and/or lipoplexes.

37. The composition according to claim 30, wherein the composition comprises at least one adjuvant.

38.-41. (canceled)

42. A kit, preferably kit of parts, comprising an RNA according to claim 1, and optionally a liquid vehicle for solubilising and optionally technical instructions with information on the administration and dosage of the RNA, the RNA.

43.-45. (canceled)

46. A method of treating or preventing cancer comprising administering to a subject in need thereof an RNA according to claim 1.

47.-55. (canceled)

The application's sequence listing, which the Patent Office published only in electronic form, follows.

SEQUENCE LISTING (4591 sequences)

SEQ ID NO: 1 - protein, 365 aa, Artificial Sequence
  P30443
MAVMAPRTLLLLLSGALALTQTWAGSHSMRYFFTSVSRPGRGEPRFIAVGYVDDTQFVRFDSDAASQKMEPRAPWIEQEGPEYWDQETRNMKAHSQTDRANLGTLRGYYNQSEDGSHTIQIMYGCDVGPDGRFLRGYRQDAYDGKDYIALNEDLRSWTAADMAAQITKRKWEAVHAAEQRRVYLEGRCVDGLRRYLENGKETLQRTDPPKTHMTHHPISDHEATLRCWALGFYPAEITLTWQRDGEDQTQDTELVETRPAGDGTFQKWAAVVVPSGEEQRYTCHVQHEGLPKPLTLRWELSSQPTIPIVGIIAGLVLLGAVITGAVVAAVMWRRKSSDRKGGSYTQAASSDSAQGSDVSLTACKV

SEQ ID NO: 2 - protein, 365 aa, Artificial Sequence [sequence omitted]

SEQ ID NO: 3 - protein, 420 aa, Artificial Sequence
  Q13641
MPGGCSRGPAAGDGRLRLARLALVLLGWVSSSSPTSSASSFSSSAPFLASAVSAQPPLPDQCPALCECSEAARTVKCVNRNLTEVPTDLPAYVRNLFLTGNQLAVLPAGAFARRPPLAELAALNLSGSRLDEVRAGAFEHLPSLRQLDLSHNPLADLSPFAFSGSNASVSAPSPLVELILNHIVPPEDERQNRSFEGMVVAALLAGRALQGLRRLELASNHFLYLPRDVLAQLPSLRHLDLSNNSLVSLTYVSFRNLTHLESLHLEDNALKVLHNGTLAELQGLPHIRVFLDNNPWVCDCHMADMVTWLKETEVVQGKDRLTCAYPEKMRNRVLLELNSADLDCDPILPPSLQTSYVFLGIVLALIGAIFLLVLYLNRKGIKKWMHNIRDACRDHMEGYHYRYEINADPRLTNLSSNSDV

SEQ ID NO: 4 - protein, 543 aa, Artificial Sequence
  Q8NEB7
MRKPAAGFLPSLLKVLLLPLAPAAAQDSTQASTPGSPLSPTEYERFFALLTPTWKAETTCRLRATHGCRNPTLVQLDQYENHGLVPDGAVCSNLPYASWFESFCQFTHYRCSNHVYYAKRVLCSQPVSILSPNTLKEIEASAEVSPTTMTSPISPHFTVTERQTFQPWPERLSNNVEELLQSSLSLGGQEQAPEHKQEQGVEHRQEPTQEHKQEEGQKQEEQEEEQEEEGKQEEGQGTKEGREAVSQLQTDSEPKFHSESLSSNPSSFAPRVREVESTPMIMENIQELIRSAQEIDEMNEIYDENSYWRNQNPGSLLQLPHTEALLVLCYSIVENTCIITPTAKAWKYMEEEILGFGKSVCDSLGRRHMSTCALCDFCSLKLEQCHSEASLQRQQCDTSHKTPFVSPLLASQSLSIGNQVGSPESGRFYGLDLYGGLHMDFWCARLATKGCEDVRVSGWLQTEFLSFQDGDFPTKICDTDYIQYPNYCSFKSQQCLMRNRNRKVSRMRCLQNETYSALSPGKSEDVVLRWSQEFSTLTLGQFG

SEQ ID NO: 5 - protein, 609 aa, Artificial Sequence
  P02771
MKWVESIFLIFLLNFTESRTLHRNEYGIASILDSYQCTAEISLADLATIFFAQFVQEATYKEVSKMVKDALTAIEKPTGDEQSSGCLENQLPAFLEELCHEKEILEKYGHSDCCSQSEEGRHNCFLAHKKPTPASIPLFQVPEPVTSCEAYEEDRETFMNKFIYEIARRHPFLYAPTILLWAARYDKIIPSCCKAENAVECFQTKAATVTKELRESSLLNQHACAVMKNFGTRTFQAITVTKLSQKFTKVNFTEIQKLVLDVAHVHEHCCRGDVLDCLQDGEKIMSYICSQQDTLSNKITECCKLTTLERGQCIIHAENDEKPEGLSPNLNRFLGDRDFNQFSSGEKNIFLASFVHEYSRRHPQLAVSVILRVAKGYQELLEKCFQTENPLECQDKGEEELQKYIQESQALAKRSCGLFQKLGEYYLQNAFLVAYTKKAPQLTSSELMAITRKMAATAATCCQLSEDKLLACGEGAADIIIGHLCIRHEMTPVNPGVGQCCTSSYANRRPCFSSLVVDETYVPPAFSDDKFIFHKDLCQAQGVALQTMKQEFLINLVKQKPQITEEQLEAVIADFSGLLEKCCQGQEQEVCFAEEGQKLISKTRAALGV

SEQ ID NO: 6 - protein, 854 aa, Artificial Sequence
  Q5JQC9
MMAYSDTTMMSDDIDWLRSHRGVCKVDLYNPEGQQDQDRKVICFVDVSTLNVEDKDYKDAASSSSEGNLNLGSLEEKEIIVIKDTEKKDQSKTEGSVCLFKQAPSDPVSVLNWLLSDLQKYALGFQHALSPSTSTCKHKVGDTEGEYHRASSENCYSVYADQVNIDYLMNRPQNLRLEMTAAKNTNNNQSPSAPPAKPPSTQRAVISPDGECSIDDLSFYVNRLSSLVIQMAHKEIKEKLEGKSKCLHHSICPSPGNKERISPRTPASKIASEMAYEAVELTAAEMRGTGEESREGGQKSFLYSELSNKSKSGDKQMSQRESKEFADSISKGLMVYANQVASDMMVSLMKTLKVHSSGKPIPASVVLKRVLLRHTKEIVSDLIDSCMKNLHNITGVLMTDSDFVSAVKRNLFNQWKQNATDIMEAMLKRLVSALIGEEKETKSQSLSYASLKAGSHDPKCRNQSLEFSTMKAEMKERDKGKMKSDPCKSLTSAEKVGEHILKEGLTIWNQKQGNSCKVATKACSNKDEKGEKINASTDSLAKDLIVSALKLIQYHLTQQTKGKDTCEEDCPGSTMGYMAQSTQYEKCGGGQSAKALSVKQLESHRAPGPSTCQKENQHLDSQKMDMSNIVLMLIQKLLNENPFKCEDPCEGENKCSEPRASKAASMSNRSDKAEEQCQEHQELDCTSGMKQANGQFIDKLVESVMKLCLIMAKYSNDGAALAELEEQAASANKPNFRGTRCIHSGAMPQNYQDSLGHEVIVNNQCSTNSLQKQLQAVLQWIAASQFNVPMLYFMGDKDGQLEKLPQVSAKAAEKGYSVGGLLQEVMKFAKERQPDEAVGKVARKQLLDWLLANL

SEQ ID NO: 7 - protein, 416 aa, Artificial Sequence
  B4DSX0
MVDYHAANQSYQYGPSSAGNGAGGGGSMGDYMAQEDDWDRDLLLDPAWEKQQRKTFTAWCNSHLRKAGTQIENIDEDFRDGLKLMLLLEVISGERLPKPERGKMRVHKINNVNKALDFIASKGVKLVSIGAEEIVDGNAKMTLGMIWTIILRFAIQDISVEETSAKEGLLLWCQRKTAPYKNVNVQNFHISWKDGLAFNALIHRHRPELIEYDKLRKDDPVTNLNNAFEVAEKYLDIPKMLDAEDIVNTARPDEKAIMTYVSSFYHAFSGAQKAETAANRICKVLAVNQENEHLMEDYEKLASDLLEWIRRTIPWLEDRVPQKTIQEMQQKLEDFRDYRRVHKPPKVQEKCQLEINFNTLQTKLRLSNRPAFMPSWRSRASSSPTSTCAASSPARPMLWGPGSRPRWRRSGASPLR

SEQ ID NO: 8 - protein, 562 aa, Artificial Sequence [sequence omitted]

SEQ ID NO: 9 - protein, 911 aa, Artificial Sequence
  O43707
MVDYHAANQSYQYGPSSAGNGAGGGGSMGDYMAQEDDWDRDLLLDPAWEKQQRKTFTAWCNSHLRKAGTQIENIDEDFRDGLKLMLLLEVISGERLPKPERGKMRVHKINNVNKALDFIASKGVKLVSIGAEEIVDGNAKMTLGMIWTIILRFAIQDISVEETSAKEGLLLWCQRKTAPYKNVNVQNFHISWKDGLAFNALIHRHRPELIEYDKLRKDDPVTNLNNAFEVAEKYLDIPKMLDAEDIVNTARPDEKAIMTYVSSFYHAFSGAQKAETAANRICKVLAVNQENEHLMEDYEKLASDLLEWIRRTIPWLEDRVPQKTIQEMQQKLEDFRDYRRVHKPPKVQEKCQLEINFNTLQTKLRLSNRPAFMPSEGKMVSDINNGWQHLEQAEKGYEEWLLNEIRRLERLDHLAEKFRQKASIHEAWTDGKEAMLKHRDYETATLSDIKALIRKHEAFESDLAAHQDRVEQIAAIAQELNELDYYDSHNVNTRCQKICDQWDALGSLTHSRREALEKTEKQLEAIDQLHLEYAKRAAPFNNWMESAMEDLQDMFIVHTIEEIEGLISAHDQFKSTLPDADREREAILAIHKEAQRIAESNHIKLSGSNPYTTVTPQIINSKWEKVQQLVPKRDHALLEEQSKQQSNEHLRRQFASQANVVGPWIQTKMEEIGRISIEMNGTLEDQLSHLKQYERSIVDYKPNLDLLEQQHQLIQEALIFDNKHTNYTMEHIRVGWEQLLTTIARTINEVENQILTRDAKGISQEQMQEFRASFNHFDKDHGGALGPEEFKACLISLGYDVENDRQGEAEFNRIMSLVDPNHSGLVTFQAFIDFMSRETTDTDTADQVIASFKVLAGDKNFITAEELRRELPPDQAEYCIARMAPYQGPDAVPGALDYKSFSTALYGESDL

SEQ ID NO: 10 - protein, 198 aa, Artificial Sequence [sequence omitted]

SEQ ID NO: 11 - protein, 198 aa, Artificial Sequence [sequence omitted]

SEQ ID NO: 12 - protein, 920 aa, Artificial Sequence
  P10275
MEVQLGLGRVYPRPPSKTYRGAFQNLFQSVREVIQNPGPRHPEAASAAPPGASLLLLQQQQQQQQQQQQQQQQQQQQQQQETSPRQQQQQQGEDGSPQAHRRGPTGYLVLDEEQQPSQPQSALECHPERGCVPEPGAAVAASKGLPQQLPAPPDEDDSAAPSTLSLLGPTFPGLSSCSADLKDILSEASTMQLLQQQQQEAVSEGSSSGRAREASGAPTSSKDNYLGGTSTISDNAKELCKAVSVSMGLGVEALEHLSPGEQLRGDCMYAPLLGVPPAVRPTPCAPLAECKGSLLDDSAGKSTEDTAEYSPFKGGYTKGLEGESLGCSGSAAAGSSGTLELPSTLSLYKSGALDEAAAYQSRDYYNFPLALAGPPPPPPPPHPHARIKLENPLDYGSAWAAAAAQCRYGDLASLHGAGAAGPGSGSPSAAASSSWHTLFTAEEGQLYGPCGGGGGGGGGGGGGGGGGGGGGGGEAGAVAPYGYTRPPQGLAGQESDFTAPDVWYPGGMVSRVPYPSPTCVKSEMGPWMDSYSGPYGDMRLETARDHVLPIDYYFPPQKTCLICGDEASGCHYGALTCGSCKVFFKRAAEGKQKYLCASRNDCTIDKFRRKNCPSCRLRKCYEAGMTLGARKLKKLGNLKLQEEGEASSTTSPTEETTQKLTVSHIEGYECQPIFLNVLEAIEPGVVCAGHDNNQPDSFAALLSSLNELGERQLVHVVKWAKALPGFRNLHVDDQMAVIQYSWMGLMVFAMGWRSFTNVNSRMLYFAPDLVFNEYRMHKSRMYSQCVRMRHLSQEFGWLQITPQEFLCMKALLLFSIIPVDGLKNQKFFDELRMNYIKELDRIIACKRKNPTSCSRRFYQLTKLLDSVQPIARELHQFTFDLLIKSHMVSVDFPEMMAEIISVQVPKILSGKVKPIYFHTQ

SEQ ID NO: 13 - protein, 412 aa, Artificial Sequence [sequence omitted]

SEQ ID NO: 14 - protein, 327 aa, Artificial Sequence
  P52961
MQMPAMMSLLLVSVGLMEALQAQSHPITRRDLFSQEIQLDMALASFDDQYAGCAAAMTAALPDLNHTEFQANQVYADSWTLASSQWQERQARWPEWSLSPTRPSPPPLGFRDEHGVALLAYTANSPLHKEFNAAVREAGRSRAHYLHHFSFKTLHFLLTEALQLLGSGQRPPRCHQVFRGVHGLRFRPAGPRATVRLGGFASASLKHVAAQQFGEDTFFGIWTCLGAPIKGYSFFPGEEEVLIPPFETFQVINASRLAQGPARIYLRALGKHSTYNCEYIKDKKCKSGPCHLDNSAMGQSPLSAVWSLLLLLWFLVVRAFPDGPGLL

SEQ ID NO: 15 - protein, 344 aa, Artificial Sequence
  Q96GD4
MAQKENSYPWPYGRQTAPSGLSTLPQRVLRKEPVTPSALVLMSRSNVQPTAAPGQKVMENSSGTPDILTRHFTIDDFEIGRPLGKGKFGNVYLAREKKSHFIVALKVLFKSQIEKEGVEHQLRREIEIQAHLHHPNILRLYNYFYDRRRIYLILEYAPRGELYKELQKSCTFDEQRTATIMEELADALMYCHGKKVIHRDIKPENLLLGLKGELKIADFGWSVHAPSLRRKTMCGTLDYLPPEMIEGRMHNEKVDLWCIGVLCYELLVGNPPFESASHNETYRRIVKVDLKFPASVPMGAQDLISKLLRHNPSERLPLAQVSAHPWVRANSRRVLPPSALQSVA

SEQ ID NO: 16 - protein, 119 aa, Artificial Sequence
  P61769
MSRSVALAVLALLSLSGLEAIQRTPKIQVYSRHPAENGKSNFLNCYVSGFHPSDIEVDLLKNGERIEKVEHSDLSFSKDWSFYLLYYTEFTPTEKDEYACRVNHVTLSQPKIVKWDRDM

SEQ ID NO: 17 - protein, 378 aa, Artificial Sequence
  Q9BYG0
MRMLVSGRRVKKWQLIIQLFATCFLASLMFFWEPIDNHIVSHMKSYSYRYLINSYDFVNDTLSLKHTSAGPRYQYLINHKEKCQAQDVLLLLFVKTAPENYDRRSGIRRTWGNENYVRSQLNANIKTLFALGTPNPLEGEELQRKLAWEDQRYNDIIQQDFVDSFYNLTLKLLMQFSWANTYCPHAKFLMTADDDIFIHMPNLIEYLQSLEQIGVQDFWIGRVHRGAPPIRDKSSKYYVSYEMYQWPAYPDYTAGAAYVISGDVAAKVYEASQTLNSSLYIDDVFMGLCANKIGIVPQDHVFFSGEGKTPYHPCIYEKMMTSHGHLEDLQDLWKNATDPKVKTISKGFFGQIYCRLMKIILLCKISYVDTYPCRAAFI

SEQ ID NO: 18 - protein, 533 aa, Artificial Sequence
  Q00973
MWLGRRALCALVLLLACASLGLLYASTRDAPGLRLPLAPWAPPQSPRRPELPDLAPEPRYAHIPVRIKEQVVGLLAWNNCSCESSGGGLPLPFQKQVRAIDLTKAFDPAELRAASATREQEFQAFLSRSQSPADQLLIAPANSPLQYPLQGVEVQPLRSILVPGLSLQAASGQEVYQVNLTASLGTWDVAGEVTGVTLTGEGQADLTLVSPGLDQLNRQLQLVTYSSRSYQTNTADTVRFSTEGHEAAFTIRIRHPPNPRLYPPGSLPQGAQYNISALVTIATKTFLRYDRLRALITSIRRFYPTVTVVIADDSDKPERVSGPYVEHYLMPFGKGWFAGRNLAVSQVTTKYVLWVDDDFVFTARTRLERLVDVLERTPLDLVGGAVREISGFATTYRQLLSVEPGAPGLGNCLRQRRGFHHELVGFPGCVVTDGVVNFFLARTDKVREVGFDPRLSRVAHLEFFLDGLGSLRVGSCSDVVVDHASKLKLPWTSRDAGAETYARYRYPGSLDESQMAKHRLLFFKHRLQCMTSQ

SEQ ID NO: 19 - protein, 282 aa, Artificial Sequence
  Q7Z7D3
MASLGQILFWSIISIIIILAGAIALIIGFGISGRHSITVTTVASAGNIGEDGILSCTFEPDIKLSDIVIQWLKEGVLGLVHEFKEGKDELSEQDEMFRGRTAVFADQVIVGNASLRLKNVQLTDAGTYKCYIITSKGKGNANLEYKTGAFSMPEVNVDYNASSETLRCEAPRWFPQPTVVWASQVDQGANFSEVSNTSFELNSENVTMKVVSVLYNVTINNTYSCMIENDIAKATGDIKVTESEIKRRSHLQLLNSKASLCVSSFFAISWALLPLSPYLMLK

SEQ ID NO: 20 - protein, 43 aa, Artificial Sequence
  Q13072
MAARAVFLALSAQLLQARLMKEESPVVSWRLEPEDGTALCFIF

SEQ ID NO: 21 - protein, 385 aa, Artificial Sequence
  P35613
MAAALFVLLGFALLGTHGASGAAGFVQAPLSQQRWVGGSVELHCEAVGSPVPEIQWWFEGQGPNDTCSQLWDGARLDRVHIHATYHQHAASTISIDTLVEEDTGTYECRASNDPDRNHLTRAPRVKWVRAQAVVLVLEPGTVFTTVEDLGSKILLTCSLNDSATEVTGHRWLKGGVVLKEDALPGQKTEFKVDSDDQWGEYSCVFLPEPMGTANIQLHGPPRVKAVKSSEHINEGETAMLVCKSESVPPVTDWAWYKITDSEDKALMNGSESRFFVSSSQGRSELHIENLNMEADPGQYRCNGTSSKGSDQAIITLRVRSHLAALWPFLGIVAEVLVLVTIIFIYEKRRKPEDVLDDDDAGSAPLKSSGQHQNDKGKNVRQRNSS

SEQ ID NO: 22 - protein, 239 aa, Artificial Sequence [sequence omitted]

SEQ ID NO: 23 - protein, 429 aa, Artificial Sequence [sequence omitted]

SEQ ID NO: 24 - protein, 554 aa, Artificial Sequence [sequence omitted]

SEQ ID NO: 25 - protein, 514 aa, Artificial Sequence [sequence omitted]

SEQ ID NO: 26 - protein, 441 aa, Artificial Sequence
  A9UEZ9
MVDPVGFAEAWKAQFPDSEPPRMELRSVGDIEQELERCKASIRRLEQEVNQERFRMIYLQTLLAKEKKSYDRQRWGFRRAAQAPDGASEPRASASRPQPAPADGADPPPAEEPEARPDGEGSPGKARPGTARRPGAAASGERDDRGPPASVAALRSNFERIRKGHGQPGADAEKPFYVNVEFHHERGLVKVNDKEVSDRISSLGSQAMQMERKKSQHGAGSSVGDASRPPYRGRSSESSCGVDGDYEDAELNPRFLKDNLIDANGGSRPPWPPLEYQPYQSIYVGGMMEGEGKGPLLRSQSTSEQEKRLTWPRRSYSPRSFEDCGGGYTPDCSSNENLTSSEEDFSSGQSSRVSPSPTTYRMFRDKSRSPSQNSQQSFDSSSPPTPQCHKRHRHCPVVVSEATIVGVRKTGQIWPNDGEGAFHGDADGSLELQGKPSRWTQ

SEQ ID NO: 27 - protein, 524 aa, Artificial Sequence
  A9UF00
MVDPVGFAEAWKAQFPDSEPPRMELRSVGDIEQELERCKASIRRLEQEVNQERFRMIYLQTLLAKEKKSYDRQRWGFRRAAQAPDGASEPRASASRPQPAPADGADPPPAEEPEARPDGEGSPGKARPGTARRPGAAASGERDDRGPPASVAALRSNFERIRKGHGQPGADAEKPFYVNVEFHHERGLVKVNDKEVSDRISSLGSQAMQMERKKSQHGAGSSVGDASRPPYRGRSSESSCGVDGDYEDAELNPRFLKDNLIDANGGSRPPWPPLEYQPYQSIYVGGMMEGEGKGPLLRSQSTSEQEKRLTWPRRSYSPRSFEDCGGGYTPDCSSNENLTSSEEDFSSGQSSRVSPSPTTYRMFRDKSRSPSQNSQQSFDSSSPPTPQCHKRHRHCPVVVSEATIVGVRKTGQIWPNDGEGAFHGDADGSFGTPPGYGCAADRAEEQRRHQDGLPYIDDSPSSSPHLSSKGRGSRDALVSGALESTKASELDLEKGLEMRKWDPVKMTPTFSLHCMILWPVEITL

SEQ ID NO: 28 - protein, 465 aa, Artificial Sequence
  A9UF01
MVDPVGFAEAWKAQFPDSEPPRMELRSVGDIEQELERCKASIRRLEQEVNQERFRMIYLQTLLAKEKKSYDRQRWGFRRAAQAPDGASEPRASASRPQPAPADGADPPPAEEPEARPDGEGSPGKARPGTARRPGAAASGERDDRGPPASVAALRSNFERIRKGHGQPGADAEKPFYVNVEFHHERGLVKVNDKEVSDRISSLGSQAMQMERKKSQHGAGSSVGDASRPPYRGRSSESSCGVDGDYEDAELNPRFLKDNLIDANGGSRPPWPPLEYQPYQSIYVGGMMEGEGKGPLLRSQSTSEQEKRLTWPRRSYSPRSFEDCGGGYTPDCSSNENLTSSEEDFSSGQSSRVSPSPTTYRMFRDKSRSPSQNSQQSFDSSSPPTPQCHKRHRHCPVVVSEATIVGVRKTGQIWPNDGEGAFHGEHPGAAEEVFQKLLPDIRGAADADQLVCETPDCPQHSADHQ

SEQ ID NO: 29 - protein, 458 aa, Artificial Sequence
  A9UF03
MVDPVGFAEAWKAQFPDSEPPRMELRSVGDIEQELERCKASIRRLEQEVNQERFRMIYLQTLLAKEKKSYDRQRWGFRRAAQAPDGASEPRASASRPQPAPADGADPPPAEEPEARPDGEGSPGKARPGTARRPGAAASGERDDRGPPASVAALRSNFERIRKGHGQPGADAEKPFYVNVEFHHERGLVKVNDKEVSDRISSLGSQAMQMERKKSQHGAGSSVGDASRPPYRGRSSESSCGVDGDYEDAELNPRFLKDNLIDANGGSRPPWPPLEYQPYQSIYVGGMMEGEGKGPLLRSQSTSEQEKRLTWPRRSYSPRSFEDCGGGYTPDCSSNENLTSSEEDFSSGQSSRVSPSPTTYRMFRDKSRSPSQNSQQSFDSSSPPTPQCHKRHRHCPVVVSEATIVGVRKTGQIWPNDGEGAFHGDADGSFGTPPGYCCLCLPAWPSGCTAATARVTRS

SEQ ID NO: 30 - protein, 454 aa, Artificial Sequence
  A9UF04
MVDPVGFAEAWKAQFPDSEPPRMELRSVGDIEQELERCKASIRRLEQEVNQERFRMIYLQTLLAKEKKSYDRQRWGFRRAAQAPDGASEPRASASRPQPAPADGADPPPAEEPEARPDGEGSPGKARPGTARRPGAAASGERDDRGPPASVAALRSNFERIRKGHGQPGADAEKPFYVNVEFHHERGLVKVNDKEVSDRISSLGSQAMQMERKKSQHGAGSSVGDASRPPYRGRSSESSCGVDGDYEDAELNPRFLKDNLIDANGGSRPPWPPLEYQPYQSIYVGGMMEGEGKGPLLRSQSTSEQEKRLTWPRRSYSPRSFEDCGGGYTPDCSSNENLTSSEEDFSSGQSSRVSPSPTTYRMFRDKSRSPSQNSQQSFDSSSPPTPQCHKRHRHCPVVVSEATIVGVRKTGQIWPNDGEGAFHGDADGSFGTPPGYGCAAGRPPHLTELPVQHQ

SEQ ID NO: 31 - protein, 467 aa, Artificial Sequence
  A9UF05
MVDPVGFAEAWKAQFPDSEPPRMELRSVGDIEQELERCKASIRRLEQEVNQERFRMIYLQTLLAKEKKSYDRQRWGFRRAAQAPDGASEPRASASRPQPAPADGADPPPAEEPEARPDGEGSPGKARPGTARRPGAAASGERDDRGPPASVAALRSNFERIRKGHGQPGADAEKPFYVNVEFHHERGLVKVNDKEVSDRISSLGSQAMQMERKKSQHGAGSSVGDASRPPYRGRSSESSCGVDGDYEDAELNPRFLKDNLIDANGGSRPPWPPLEYQPYQSIYVGGMMEGEGKGPLLRSQSTSEQEKRLTWPRRSYSPRSFEDCGGGYTPDCSSNENLTSSEEDFSSGQSSRVSPSPTTYRMFRDKSRSPSQNSQQSFDSSSPPTPQCHKRHRHCPVVVSEATIVGVRKTGQIWPNDGEGAFHGDAVLKTEVPHQGVRRARLSLEALGEDPSFLFPASDGPRHSSTW

SEQ ID NO: 32 - protein, 513 aa, Artificial Sequence
  A9UF06
MVDPVGFAEAWKAQFPDSEPPRMELRSVGDIEQELERCKASIRRLEQEVNQERFRMIYLQTLLAKEKKSYDRQRWGFRRAAQAPDGASEPRASASRPQPAPADGADPPPAEEPEARPDGEGSPGKARPGTARRPGAAASGERDDRGPPASVAALRSNFERIRKGHGQPGADAEKPFYVNVEFHHERGLVKVNDKEVSDRISSLGSQAMQMERKKSQHGAGSSVGDASRPPYRGRSSESSCGVDGDYEDAELNPRFLKDNLIDANGGSRPPWPPLEYQPYQSIYVGGMMEGEGKGPLLRSQSTSEQEKRLTWPRRSYSPRSFEDCGGGYTPDCSSNENLTSSEEDFSSGQSSRVSPSPTTYRMFRDKSRSPSQNSQQSFDSSSPPTPQCHKRHRHCPVVVSEATIVGVRKTGQIWPNDGEGAFHGDADGSFGTPPGYGCAADRAEEQRRHQDGLPYIDDSPSSSPHLSSKGRGSRDALVSGALESTKASELDPVKMTPTFSLHCMILWPVEITL

SEQ ID NO: 33 - protein, 406 aa, Artificial Sequence [sequence omitted]

SEQ ID NO: 34 - protein, 781 aa, Artificial Sequence
  P35222
MATQADLMELDMAMEPDRKAAVSHWQQQSYLDSGIHSGATTTAPSLSGKGNPEEEDVDTSQVLYEWEQGFSQSFTQEQVADIDGQYAMTRAQRVRAAMFPETLDEGMQIPSTQFDAAHPTNVQRLAEPSQMLKHAVVNLINYQDDAELATRAIPELTKLLNDEDQVVVNKAAVMVHQLSKKEASRHAIMRSPQMVSAIVRTMQNTNDVETARCTAGTLHNLSHHREGLLAIFKSGGIPALVKMLGSPVDSVLFYAITTLHNLLLHQEGAKMAVRLAGGLQKMVALLNKTNVKFLAITTDCLQILAYGNQESKLIILASGGPQALVNIMRTYTYEKLLWTTSRVLKVLSVCSSNKPAIVEAGGMQALGLHLTDPSQRLVQNCLWTLRNLSDAATKQEGMEGLLGTLVQLLGSDDINVVTCAAGILSNLTCNNYKNKMMVCQVGGIEALVRTVLRAGDREDITEPAICALRHLTSRHQEAEMAQNAVRLHYGLPVVVKLLHPPSHWPLIKATVGLIRNLALCPANHAPLREQGAIPRLVQLLVRAHQDTQRRTSMGGTQQQFVEGVRMEEIVEGCTGALHILARDVHNRIVIRGLNTIPLFVQLLYSPIENIQRVAAGVLCELAQDKEAAEAIEAEGATAPLTELLHSRNEGVATYAAAVLFRMSEDKPQDYKKRLSVELTSSLFRTEPMAWNETADLGLDIGAQGEPLGYRQDDPSYRSFHSGGYGQDALGMDPMMEHEMGGHHPGADYPVDGLPDLGHAQDLMDGLPPGDSNQLAWFDTDL

SEQ ID NO: 35 - protein, 563 aa, Artificial Sequence
  Q8WYA6
MDVGELLSYQPNRGTKRPRDDEEEEQKMRRKQTGTRERGRYREEEMTVVEEADDDKKRLLQIIDRDGEEEEEEEEPLDESSVKKMILTFEKRSYKNQELRIKFPDNPEKFMESELDLNDIIQEMHVVATMPDLYHLLVELNAVQSLLGLLGHDNTDVSIAVVDLLQELTDIDTLHESEEGAEVLIDALVDGQVVALLVQNLERLDESVKEEADGVHNTLAIVENMAEFRPEMCTEGAQQGLLQWLLKRLKAKMPFDANKLYCSEVLAILLQDNDENRELLGELDGIDVLLQQLSVFKRHNPSTAEEQEMMENLFDSLCSCLMLSSNRERFLKGEGLQLMNLMLREKKISRSSALKVLDHAMIGPEGTDNCHKFVDILGLRTIFPLFMKSPRKIKKVGTTEKEHEEHVCSILASLLRNLRGQQRTRLLNKFTENDSEKVDRLMELHFKYLGAMQVADKKIEGEKHDMVRRGEIIDNDTEEEFYLRRLDAGLFVLQHICYIMAEICNANVPQIRQRVHQILNMRGSSIKIVRHIIKEYAENIGDGRSPEFRENEQKRILGLLENF

SEQ ID NO: 36 - protein, 610 aa, Artificial Sequence
  O15213
METAPKPGKDVPPKKDKLQTKRKKPRRYWEEETVPTTAGASPGPPRNKKNRELRPQRPKNAYILKKSRISKKPQVPKKPREWKNPESQRGLSGTQDPFPGPAPVPVEVVQKFCRIDKSRKLPHSKAKTRSRLEVAEAEEEETSIKAARSELLLAEEPGFLEGEDGEDTAKICQADIVEAVDIASAAKHFDLNLRQFGPYRLNYSRTGRHLAFGGRRGHVAALDWVTKKLMCEINVMEAVRDIRFLHSEALLAVAQNRWLHIYDNQGIELHCIRRCDRVTRLEFLPFHFLLATASETGFLTYLDVSVGKIVAALNARAGRLDVMSQNPYNAVIHLGHSNGTVSLWSPAMKEPLAKILCHRGGVRAVAVDSTGTYMATSGLDHQLKIFDLRGTYQPLSTRTLPHGAGHLAFSQRGLLVAGMGDVVNIWAGQGKASPPSLEQPYLTHRLSGPVHGLQFCPFEDVLGVGHTGGITSMLVPGAGEPNFDGLESNPYRSRKQRQEWEVKALLEKVPAELICLDPRALAEVDVISLEQGKKEQIERLGYDPQAKAPFQPKPKQKGRSSTASLVKRKRKVMDEEHRDKVRQSLQQQHHKEAKAKPTGARPSALDRFVR

SEQ ID NO: 37 - protein, 298 aa, Artificial Sequence
  Q96CA5
MGPKDSAKCLHRGPQPSHWAAGDGPTQERCGPRSLGSPVLGLDTCRAWDHVDGQILGQLRPLTEEEEEEGAGATLSRGPAFPGMGSEELRLASFYDWPLTAEVPPELLAAAGFFHTGHQDKVRCFFCYGGLQSWKRGDDPWTEHAKWFPSCQFLLRSKGRDFVHSVQETHSQLLGSWDPWEEPEDAAPVAPSVPASGYPELPTPRREVQSESAQEPGGVSPAEAQRAWWVLEPPGARDVEAQLRRLQEERTCKVCLDRAVSIVFVPCGHLVCAECAPGLQLCPICRAPVRSRVRTFLS

SEQ ID NO: 38 - protein, 759 aa, Artificial Sequence
  A0A024R1V0
MDLSALRVEEVQNVINAMQKILECPICLELIKEPVSTKCDHIFCKFCMLKLLNQKKGPSQCPLCKNDITKRSLQESTRFSQLVEELLKIICAFQLDTGLEYANSYNFAKKENNSPEHLKDEVSIIQSMGYRNRAKRLLQSEPENPSLQETSLSVQLSNLGTVRTLRTKQRIQPQKTSVYIELGSDSSEDTVNKATYCSVGDQELLQITPQGTRDEISLDSAKKAACEFSETDVTNTEHHQPSNNDLNTTEKRAAERHPEKYQGEAASGCESETSVSEDCSGLSSQSDILTTQQRDTMQHNLIKLQQEMAELEAVLEQHGSQPSNSYPSIISDSSALEDLRNPEQSTSEKVLTSQKSSEYPISQNPEGLSADKFEVSADSSTSKNKEPGVERSSPSKCPSLDDRWYMHSCSGSLQNRNYPSQEELIKVVDVEEQQLEESGPHDLTETSYLPRQDLEGTPYLESGISLFSDDPESDPSEDRAPESARVGNIPSSTSALKVPQLKVAESAQSPAAAHTTDTAGYNAMEESVSREKPELTASTERVNKRMSMVVSGLTPEEFMLVYKFARKHHITLTNLITEETTHVVMKTDAEFVCERTLKYFLGIAGGKWVVSYFWVTQSIKERKMLNEHDFEVRGDVVNGRNHQGPKRARESQDRKIFRGLEICCYGPFTNMPTDQLEWMVQLCGASVVKELSSFTLGTGVHPIVVVQPDAWTEDNGFHAIGQMCEAPVVTREWVLDSVALYQCQELDTYLIPQIPHSHY

SEQ ID NO: 39 - protein, 719 aa, Artificial Sequence
  A0A024R1V7
MDLSALRVEEVQNVINAMQKILECPICLELIKEPVSTKCDHIFCKFCMLKLLNQKKGPSQCPLCKNDITKRSLQESTRFSQLVEELLKIICAFQLDTGLEYANSYNFAKKENNSPEHLKDEVSIIQSMGYRNRAKRLLQSEPENPSLQETSLSVQLSNLGTVRTLRTKQRIQPQKTSVYIELAACEFSETDVTNTEHHQPSNNDLNTTEKRAAERHPEKYQGEAASGCESETSVSEDCSGLSSQSDILTTQQRDTMQHNLIKLQQEMAELEAVLEQHGSQPSNSYPSIISDSSALEDLRNPEQSTSEKAVLTSQKSSEYPISQNPEGLSADKFEVSADSSTSKNKEPGVERSSPSKCPSLDDRWYMHSCSGSLQNRNYPSQEELIKVVDVEEQQLEESGPHDLTETSYLPRQDLEGTPYLESGISLFSDDPESDPSEDRAPESARVGNIPSSTSALKVPQLKVAESAQSPAAAHTTDTAGYNAMEESVSREKPELTASTERVNKRMSMVVSGLTPEEFMLVYKFARKHHITLTNLITEETTHVVMKTDAEFVCERTLKYFLGIAGGKWVVSYFWVTQSIKERKMLNEHDFEVRGDVVNGRNHQGPKRARESQDRKIFRGLEICCYGPFTNMPTDQLEWMVQLCGASVVKELSSFTLGTGVHPIVVVQPDAWTEDNGFHAIGQMCEAPVVTREWVLDSVALYQCQELDTYLIPQIPHSHY

SEQ ID NO: 40 - protein, 721 aa, Artificial Sequence
  A0A024R1Z8
MDLSALRVEEVQNVINAMQKILECPICLELIKEPVSTKCDHIFCKFCMLKLLNQKKGPSQCPLCKNDITKRSLQESTRFSQLVEELLKIICAFQLDTGLEYANSYNFAKKENNSPEHLKDEVSIIQSMGYRNRAKRLLQSEPENPSLQETSLSVQLSNLGTVRTLRTKQRIQPQKTSVYIELGSDSSEDTVNKATYCSVGDQELLQITPQGTRDEISLDSAKKGEAASGCESETSVSEDCSGLSSQSDILTTQQRDTMQHNLIKLQQEMAELEAVLEQHGSQPSNSYPSIISDSSALEDLRNPEQSTSEKAVLTSQKSSEYPISQNPEGLSADKFEVSADSSTSKNKEPGVERSSPSKCPSLDDRWYMHSCSGSLQNRNYPSQEELIKVVDVEEQQLEESGPHDLTETSYLPRQDLEGTPYLESGISLFSDDPESDPSEDRAPESARVGNIPSSTSALKVPQLKVAESAQSPAAAHTTDTAGYNAMEESVSREKPELTASTERVNKRMSMVVSGLTPEEFMLVYKFARKHHITLTNLITEETTHVVMKTDAEFVCERTLKYFLGIAGGKWVVSYFWVTQSIKERKMLNEHDFEVRGDVVNGRNHQGPKRARESQDRKIFRGLEICCYGPFTNMPTDQLEWMVQLCGASVVKELSSFTLGTGVHPIVVVQPDAWTEDNGFHAIGQMCEAPVVTREWVLDSVALYQCQELDTYLIPQIPHSHY

SEQ ID NO: 41 - protein, 11 aa, Artificial Sequence
  A0A068BFX7
MDLSALRVEEV

SEQ ID NO: 42 - protein, 173 aa, Artificial Sequence
  C6YB45
MDAEFVCERTLKYFLGIAGGKWVVSYFWVTQSIKERKMLNEHDFEVRGDVVNGRNHQGPKRARESQDRKIFRGLEICCYGPFTNMPTDQLEWMVQLCGASVVKELSSFTLGTGVHPIVVVQPDAWTEDNGFHAIGQMCEAPVVTREWVLDSVALYQCQELDTYLIPQIPHSHY

SEQ ID NO: 43 - protein, 354 aa, Artificial Sequence [sequence omitted]

SEQ ID NO: 44 - protein, 680 aa, Artificial Sequence
  G3XAC3
MDLSALRVEEVQNVINAMQKILECPICLELIKEPVSTKCDHIFCKFCMLKLLNQKKGPSQCPLCKNDITKRSLQESTRFSQLVEELLKIICAFQLDTGLEYANSYNFAKKENNSPEHLKDEVSIIQSMGYRNRAKRLLQSEPENPSLQETSLSVQLSNLGTVRTLRTKQRIQPQKTSVYIELGEAASGCESETSVSEDCSGLSSQSDILTTQQRDTMQHNLIKLQQEMAELEAVLEQHGSQPSNSYPSIISDSSALEDLRNPEQSTSEKAVLTSQKSSEYPISQNPEGLSADKFEVSADSSTSKNKEPGVERSSPSKCPSLDDRWYMHSCSGSLQNRNYPSQEELIKVVDVEEQQLEESGPHDLTETSYLPRQDLEGTPYLESGISLFSDDPESDPSEDRAPESARVGNIPSSTSALKVPQLKVAESAQSPAAAHTTDTAGYNAMEESVSREKPELTASTERVNKRMSMVVSGLTPEEFMLVYKFARKHHITLTNLITEETTHVVMKTDAEFVCERTLKYFLGIAGGKWVVSYFWVTQSIKERKMLNEHDFEVRGDVVNGRNHQGPKRARESQDRKIFRGLEICCYGPFTNMPTDQLEWMVQLCGASVVKELSSFTLGTGVHPIVVVQPDAWTEDNGFHAIGQMCEAPVVTREWVLDSVALYQCQELDTYLIPQIPHSHY

SEQ ID NO: 45 - protein, 181 aa, Artificial Sequence
  O95971
MLLEPGRGCCALAILLAIVDIQSGGCINITSSASQEGTRLNLICTVWHKKEEAEGFVVFLCKDRSGDCSPETSLKQLRLKRDPGIDGVGEISSQLMFTISQVTPLHSGTYQCCARSQKSGIRLQGHFFSILFTETGNYTVTGLKQRQHLEFSHNEGTLSSGFLQEKVWVMLVTSLVALQAL

SEQ ID NO: 46 - protein, 212 aa, Artificial Sequence [sequence omitted]

SEQ ID NO: 47 - protein, 296 aa, Artificial Sequence
  B4E2Y9
MHGDSEYNIMFGPDICGPGTKKVHVIFNYKGKNVLINKDIRCKDDEFTHLYTLIVRPDNTYEVKIDNSQVESGSLEDDWDFLPPKKIKDPDASKPEDWDERAKIDDPTDSKPEDWDKPEHIPDPDAKKPEDWDEEMDGEWEPPVIQNPEYKGEWKPRQIDNPDYKGTWIHPEIDNPEYSPDPSIYAYDNFGVLGLDLWQVKSGTIFDNFLITNDEAYAEEFGNETWGVTKAAEKQMKDKQDEEQRLKEEEEDKKRKEEEEAEDKEDDEDKDEDEEDEEDKEEDEEEDVPGQAKDEL

SEQ ID NO: 48 - protein, 417 aa, Artificial Sequence
  P27797
MLLSVPLLLGLLGLAVAEPAVYFKEQFLDGDGWTSRWIESKHKSDFGKFVLSSGKFYGDEEKDKGLQTSQDARFYALSASFEPFSNKGQTLVVQFTVKHEQNIDCGGGYVKLFPNSLDQTDMHGDSEYNIMFGPDICGPGTKKVHVIFNYKGKNVLINKDIRCKDDEFTHLYTLIVRPDNTYEVKIDNSQVESGSLEDDWDFLPPKKIKDPDASKPEDWDERAKIDDPTDSKPEDWDKPEHIPDPDAKKPEDWDEEMDGEWEPPVIQNPEYKGEWKPRQIDNPDYKGTWIHPEIDNPEYSPDPSIYAYDNFGVLGLDLWQVKSGTIFDNFLITNDEAYAEEFGNETWGVTKAAEKQMKDKQDEEQRLKEEEEDKKRKEEEEAEDKEDDEDKDEDEEDEEDKEEDEEEDVPGQAKDEL

SEQ ID NO: 49 - protein, 384 aa, Artificial Sequence
  Q96L12
MARALVQLWAICMLRVALATVYFQEEFLDGEHWRNRWLQSTNDSRFGHFRLSSGKFYGHKEKDKGLQTTQNGRFYAISARFKPFSNKGKTLVIQYTVKHEQKMDCGGGYIKVFPADIDQKNLNGKSQYYIMFGPDICGFDIKKVHVILHFKNKYHENKKLIRCKVDGFTHLYTLILRPDLSYDVKIDGQSIESGSIEYDWNLTSLKKETSPAESKDWEQTKDNKAQDWEKHFLDASTSKQSDWNGDLDGDWPAPMLQKPPYQDGLKPEGIHKDVWLHRKMKNTDYLTQYDLSEFENIGAIGLELWQVRSGTIFDNFLITDDEEYADNFGKATWGETKGPEREMDAIQAKEEMKKAREEEEEELLSGKINRHEHYFNQFHRRNEL

SEQ ID NO: 50 - protein, 109 aa, Artificial Sequence [sequence omitted]

SEQ ID NO: 51 - protein, 479 aa, Artificial Sequence
  Q14790
MDFSRNLYDIGEQLDSEDLASLKFLSLDYIPQRKQEPIKDALMLFQRLQEKRMLEESNLSFLKELLFRINRLDLLITYLNTRKEEMERELQTPGRAQISAYRVMLYQISEEVSRSELRSFKFLLQEEISKCKLDDDMNLLDIFIEMEKRVILGEGKLDILKRVCAQINKSLLKIINDYEEFSKERSSSLEGSPDEFSNGEELCGVMTISDSPREQDSESQTLDKVYQMKSKPRGYCLIINNHNFAKAREKVPKLHSIRDRNGTHLDAGALTTTFEELHFEIKPHDDCTVEQIYEILKIYQLMDHSNMDCFICCILSHGDKGIIYGTDGQEAPIYELTSQFTGLKCPSLAGKPKVFFIQACQGDNYQKGIPVETDSEEQPYLEMDLSSPQTRYIPDEADFLLGMATVNNCVSYRNPAEGTWYIQSLCQSLRERCPRGDDILTILTEVNYEVSNKDDKKNMGKQMPQPTFTLRKKLVFPSD

SEQ ID NO: 52 - protein, 522 aa, Artificial Sequence
  Q92851-4
MKSQGQHWYSSSDKNCKVSFREKLLIIDSNLGVQDVENLKFLCIGLVPNKKLEKSSSASDVFEHLLAEDLLSEEDPFFLAELLYIIRQKKLLQHLNCTKEEVERLLPTRQRVSLFRNLLYELSEGIDSENLKDMIFLLKDSLPKTEMTSLSFLAFLEKQGKIDEDNLTCLEDLCKTVVPKLLRNIEKYKREKAIQIVTPPVDKEAESYQGEEELVSQTDVKTFLEALPQESWQNKHAGSNGNRATNGAPSLVSRGMQGASANTLNSETSTKRAAVYRMNRNHRGLCVIVNNHSFTSLKDRQGTHKDAEILSHVFQWLGFTVHIHNNVTKVEMEMVLQKQKCNPAHADGDCFVFCILTHGRFGAVYSSDEALIPIREIMSHFTALQCPRLAEKPKLFFIQACQGEEIQPSVSIEADALNPEQAPTSLQDSIPAEADFLLGLATVPGYVSFRHVEEGSWYIQSLCNHLKKLVPRHEDILSILTAVNDDVSRRVDKQGTKKQMPQPAFTLRKKLVFPVPLDALSL

SEQ ID NO: 53 - protein, 339 aa, Artificial Sequence
  A0A024R374
MWQLWASLCCLLVLANARSRPSFHPLSDELVNYVNKRNTTWQAGHNFYNVDMSYLKRLCGTFLGGPKPPQRVMFTEDLKLPASFDAREQWPQCPTIKEIRDQGSCGSCWAFGAVEAISDRICIHTNAHVSVEVSAEDLLTCCGSMCGDGCNGGYPAEAWNFWTRKGLVSGGLYESHVGCRPYSIPPCEHHVNGSRPPCTGEGDTPKCSKICEPGYSPTYKQDKHYGYNSYSVSNSEKDIMAEIYKNGPVEGAFSVYSDFLLYKSGVYQHVTGEMMGGHAIRILGWGVENGTPYWLVANSWNTDWGDNGFFKILRGQDHCGIESEVVAGIPRTDQYWEKI

SEQ ID NO: 54 - protein, 339 aa, Artificial Sequence; identical to SEQ ID NO: 53
  P07858

SEQ ID NO: 55 - protein, 333 aa, Artificial Sequence [sequence omitted]

SEQ ID NO: 56 - protein, 333 aa, Artificial Sequence [sequence omitted]

SEQ ID NO: 57 - protein, 151 aa, Artificial Sequence
  Q9HBQ7
MDYAFQYVQDNGGLDSEESYPYEATEESCKYNPKYSVANDTGFVDIPKQEKALMKAVATVGPISVAIDAGHESFLFYKEGIYFEPDCSSEDMDHGVLVVGYGFESTESDNNKYWLVKNSWGEEWGMGGYVKMAKDRRNHCGIASAASYPTV

SEQ ID NO: 58 - protein, 327 aa, Artificial Sequence
  P06126
MLFLLLPLLAVLPGDGNADGLKEPLSFHVTWIASFYNHSWKQNLVSGWLSDLQTHTWDSNSSTIVFLCPWSRGNFSNEEWKELETLFRIRTIRSFEGIRRYAHELQFEYPFEIQVTGGCELHSGKVSGSFLQLAYQGSDFVSFQNNSWLPYPVAGNMAKHFCKVLNQNQHENDITHNLLSDTCPRFILGLLDAGKAHLQRQVKPEAWLSHGPSPGPGHLQLVCHVSGFYPKPVWVMWMRGEQEQQGTQRGDILPSADGTWYLRATLEVAAGEAADLSCRVKHSSLEGQDIVLYWEHHSSVGFIILAVIVPLLLLIGLALWFRKRCFC

SEQ ID NO: 59 - protein, 333 aa, Artificial Sequence
  P29016
MLLLPFQLLAVLFPGGNSEHAFQGPTSFHVIQTSSFTNSTWAQTQGSGWLDDLQIHGWDSDSGTAIFLKPWSKGNFSDKEVAELEEIFRVYIFGFAREVQDFAGDFQMKYPFEIQGIAGCELHSGGAIVSFLRGALGGLDFLSVKNASCVPSPEGGSRAQKFCALIIQYQGIMETVRILLYETCPRYLLGVLNAGKADLQRQVKPEAWLSSGPSPGPGRLQLVCHVSGFYPKPVWVMWMRGEQEQQGTQLGDILPNANWTWYLRATLDVADGEAAGLSCRVKHSSLEGQDIILYWRNPTSIGSIVLAIIVPSLLLLLCLALWYMRRRSYQNIP

SEQ ID NO: 60 - protein, 333 aa, Artificial Sequence
  P29017
MLFLQFLLLALLLPGGDNADASQEHVSFHVIQIFSFVNQSWARGQGSGWLDELQTHGWDSESGTIIFLHNWSKGNFSNEELSDLELLFRFYLFGLTREIQDHASQDYSKYPFEVQVKAGCELHSGKSPEGFFQVAFNGLDLLSFQNTTWVPSPGCGSLAQSVCHLLNHQYEGVTETVYNLIRSTCPRFLLGLLDAGKMYVHRQVRPEAWLSSRPSLGSGQLLLVCHASGFYPKPVWVTWMRNEQEQLGTKHGDILPNADGTWYLQVILEVASEEPAGLSCRVRHSSLGGQDIILYWGHHFSMNWIALVVIVPLVILIVLVLWFKKHCSYQDIL

SEQ ID NO: 61 - protein, 335 aa, Artificial Sequence
  P15813
MGCLLFLLLWALLQAWGSAEVPQRLFPLRCLQISSFANSSWTRTDGLAWLGELQTHSWSNDSDTVRSLKPWSQGTFSDQQWETLQHIFRVYRSSFTRDVKEFAKMLRLSYPLELQVSAGCEVHPGNASNNFFHVAFQGKDILSFQGTSWEPTQEAPLWVNLAIQVLNQDKWTRETVQWLLNGTCPQFVSGLLESGKSELKKQVKPKAWLSRGPSPGPGRLLLVCHVSGFYPKPVWVKWMRGEQEQQGTQPGDILPNADETWYLRATLDVVAGEAAGLSCRVKHSSLEGQDIVLYWGGSYTSMGLIALAVLACLLFLLIVGFTSRFKRQTSYQGVL

SEQ ID NO: 62 - protein, 388 aa, Artificial Sequence
  P15812
MLLLFLLFEGLCCPGENTAAPQALQSYHLAAEEQLSFRMLQTSSFANHSWAHSEGSGWLGDLQTHGWDTVLGTIRFLKPWSHGNFSKQELKNLQSLFQLYFHSFIQIVQASAGQFQLEYPFEIQILAGCRMNAPQIFLNMAYQGSDFLSFQGISWEPSPGAGIRAQNICKVLNRYLDIKEILQSLLGHTCPRFLAGLMEAGESELKRKVKPEAWLSCGPSPGPGRLQLVCHVSGFYPKPVWVMWMRGEQEQRGTQRGDVLPNADETWYLRATLDVAAGEAAGLSCRVKHSSLGGHDLIIHWGGYSIFLILICLTVIVTLVILVVVDSRLKKQSSNKNILSPHTPSPVFLMGANTQDTKNSRHQFCLAQVSWIKNRVLKKWKTRLNQLW

SEQ ID NO: 63 - protein, 297 aa, Artificial Sequence
  P11836
MTTPRNSVNGTFPAEPMKGPIAMQSGPKPLFRRMSSLVGPTQSFFMRESKTLGAVQIMNGLFHIALGGLLMIPAGIYAPICVTVWYPLWGGIMYIISGSLLAATEKNSRKCLVKGKMIMNSLSLFAAISGMILSIMDILNIKISHFLKMESLNFIRAHTPYINIYNCEPANPSEKNSPSTQYCYSIQSLFLGILSVMLIFAFFQELVIAGIVENEWKRTCSRPKSNIVLLSAEEKKEQTIEIKEEVVGLTETSSQPKNEEDIEIIPIQEEEEEETETNFPEPPQDQESSPIENDSSP

SEQ ID NO: 64 - protein, 662 aa, Artificial Sequence [sequence omitted]

SEQ ID NO: 65 - protein, 847 aa, Artificial Sequence
  P20273
MHLLGPWLLLLVLEYLAFSDSSKWVFEHPETLYAWEGACVWIPCTYRALDGDLESFILFHNPEYNKNTSKFDGTRLYESTKDGKVPSEQKRVQFLGDKNKNCTLSIHPVHLNDSGQLGLRMESKTEKWMERIHLNVSERPFPPHIQLPPEIQESQEVTLTCLLNFSCYGYPIQLQWLLEGVPMRQAAVTSTSLTIKSVFTRSELKFSPQWSHHGKIVTCQLQDADGKFLSNDTVQLNVKHTPKLEIKVTPSDAIVREGDSVTMTCEVSSSNPEYTTVSWLKDGTSLKKQNTFTLNLREVTKDQSGKYCCQVSNDVGPGRSEEVFLQVQYAPEPSTVQILHSPAVEGSQVEFLCMSLANPLPTNYTWYHNGKEMQGRTEEKVHIPKILPWHAGTYSCVAENILGTGQRGPGAELDVQYPPKKVTTVIQNPMPIREGDTVTLSCNYNSSNPSVTRYEWKPHGAWEEPSLGVLKIQNVGWDNTTIACAACNSWCSWASPVALNVQYAPRDVRVRKIKPLSEIHSGNSVSLQCDFSSSHPKEVQFFWEKNGRLLGKESQLNFDSISPEDAGSYSCWVNNSIGQTASKAWTLEVLYAPRRLRVSMSPGDQVMEGKSATLTCESDANPPVSHYTWFDWNNQSLPYHSQKLRLEPVKVQHSGAYWCQGTNSVGKGRSPLSTLTVYYSPETIGRRVAVGLGSCLAILILAICGLKLQRRWKRTQSQQGLQENSSGQSFFVRNKKVRRAPLSEGPHSLGCYNPMMEDGISYTTLRFPEMNIPRTGDAESSEMQRPPPDCDDTVTYSALHKRQVGDYENVIPDFPEDEGIHYSELIQFGVGERPQAQENVDYVILKH

SEQ ID NO: 66 - protein, 847 aa, Artificial Sequence; identical to SEQ ID NO: 65
  Q0EAF5

SEQ ID NO: 67 - protein, 534 aa, Artificial Sequence
  Q5ZPR3
MLRRRGSPGMGVHVGAALGALWFCLTGALEVQVPEDPVVALVGTDATLCCSFSPEPGFSLAQLNLIWQLTDTKQLVHSFAEGQDQGSAYANRTALFPDLLAQGNASLRLQRVRVADEGSFTCFVSIRDFGSAAVSLQVAAPYSKPSMTLEPNKDLRPGDTVTITCSSYQGYPEAEVFWQDGQGVPLTGNVTTSQMANEQGLFDVHSILRVVLGANGTYSCLVRNPVLQQDAHSSVTITPQRSPTGAVEVQVPEDPVVALVGTDATLRCSFSPEPGFSLAQLNLIWQLTDTKQLVHSFTEGRDQGSAYANRTALFPDLLAQGNASLRLQRVRVADEGSFTCFVSIRDFGSAAVSLQVAAPYSKPSMTLEPNKDLRPGDTVTITCSSYRGYPEAEVFWQDGQGVPLTGNVTTSQMANEQGLFDVHSVLRVVLGANGTYSCLVRNPVLQQDAHGSVTITGQPMTFPPEALWVTVGLSVCLIALLVALAFVCWRKIKQSCEEENAGAEDQDGEGEGSKTALQPLKHSDSKEDDGQEIA

SEQ ID NO: 68 - protein, 212 aa, Artificial Sequence
  B4DF51
MPLLLLLPLLWADLTHRPKILIPGTLEPGHSKNLTCSVSWACEQGTPPIFSWLSAAPTSLGPRTTHSSVLIITPRPQDHGTNLTCQVKFAGAGVTTERTIQLNVTYVPQNPTTGIFPGDGSGKQETRAGVVHGAIGGAGVTALLALCLCLIFFIVKTHRRKAARTAVGRNDTHPTTGSASPVSDGASWHPVCPADTSSQCGPPSCPIQHFQN

SEQ ID NO: 69 - protein, 364 aa, Artificial Sequence
  P20138
MPLLLLLPLLWAGALAMDPNFWLQVQESVTVQEGLCVLVPCTFFHPIPYYDKNSPVHGYWFREGAIISRDSPVATNKLDQEVQEETQGRFRLLGDPSRNNCSLSIVDARRRDNGSYFFRMERGSTKYSYKSPQLSVHVTDLTHRPKILIPGTLEPGHSKNLTCSVSWACEQGTPPIFSWLSAAPTSLGPRTTHSSVLIITPRPQDHGTNLTCQVKFAGAGVTTERTIQLNVTYVPQNPTTGIFPGDGSGKQETRAGVVHGAIGGAGVTALLALCLCLIFFIVKTHRRKAARTAVGRNDTHPTTGSASPKHQKKSKLHGPTETSSCSGAAPTVEMDEELHYASLNFHGMNPSKDTSTEYSEVRTQ

SEQ ID NO: 70 - protein, 364 aa, Artificial Sequence; identical to SEQ ID NO: 69
  Q546G0

SEQ ID NO: 71 - protein, 207 aa, Artificial Sequence
  P07766
MQSGTHWRVLGLCLLSVGVWGQDGNEEMGGITQTPYKVSISGTTVILTCPQYPGSEILWQHNDKNIGGDEDDKNIGSDEDHLSLKEFSELEQSGYYVCYPRGSKPEDANFYLYLRARVCENCMEMDVMSVATIVIVDICITGGLLLLVYYWSKNRKAKAKPVTRGAGAGGRQRGQNKERPPPVPNPDYEPIRKGQRDLYSGLNQRRI

SEQ ID NO: 72 - protein, 164 aa, Artificial Sequence
  P20963
MKWKALFTAAILQAQLPITEAQSFGLLDPKLCYLLDGILFIYGVILTALFLRVKFSRSADAPAYQQGQNQLYNELNLGRREEYDVLDKRRGRDPEMGGKPQRRKNPQEGLYNELQKDKMAEAYSEIGMKGERRRGKGHDGLYQGLSTATKDTYDALHMQALPPR

SEQ ID NO: 73 - protein, 742 aa, Artificial Sequence
  P16070
MDKFWWHAAWGLCLVPLSLAQIDLNITCRFAGVFHVEKNGRYSISRTEAADLCKAFNSTLPTMAQMEKALSIGFETCRYGFIEGHVVIPRIHPNSICAANNTGVYILTSNTSQYDTYCFNASAPPEEDCTSVTDLPNAFDGPITITIVNRDGTRYVQKGEYRTNPEDIYPSNPTDDDVSSGSSSERSSTSGGYIFYTFSTVHPIPDEDSPWITDSTDRIPATTLMSTSATATETATKRQETWDWFSWLFLPSESKNHLHTTTQMAGTSSNTISAGWEPNEENEDERDRHLSFSGSGIDDDEDFISSTISTTPRAFDHTKQNQDWTQWNPSHSNPEVLLQTTTRMTDVDRNGTTAYEGNWNPEAHPPLIHHEHHEEEETPHSTSTIQATPSSTTEETATQKEQWFGNRWHEGYRQTPKEDSHSTTGTAAASAHTSHPMQGRTTPSPEDSSWTDFFNPISHPMGRGHQAGRRMDMDSSHSITLQPTANPNTGLVEDLDRTGPLSMTTQQSNSQSFSTSHEGLEEDKDHPTTSTLTSSNRNDVTGGRRDPNHSEGSTTLLEGYTSHYPHTKESRTFIPVTSAKTGSFGVTAVTVGDSNSNVNRSLSGDQDTFHPSGGSHTTHGSESDGHSHGSQEGGANTTSGPIRTPQIPEWLIILASLLALALILAVCIAVNSRRRCGQKKKLVINSGNGAVEDRKPSGLNGEASKSQEMVHLVNKESSETPDQFMTADETRNLQNVDMKIGV

SEQ ID NO: 74 - protein, 699 aa, Artificial Sequence
  P16070-6
MDKFWWHAAWGLCLVPLSLAQIDLNITCRFAGVFHVEKNGRYSISRTEAADLCKAFNSTLPTMAQMEKALSIGFETCRYGFIEGHVVIPRIHPNSICAANNTGVYILTSNTSQYDTYCFNASAPPEEDCTSVTDLPNAFDGPITITIVNRDGTRYVQKGEYRTNPEDIYPSNPTDDDVSSGSSSERSSTSGGYIFYTFSTVHPIPDEDSPWITDSTDRIPATTLMSTSATATETATKRQETWDWFSWLFLPSESKNHLHTTTQMAGTSSNTISAGWEPNEENEDERDRHLSFSGSGIDDDEDFISSTISTTPRAFDHTKQNQDWTQWNPSHSNPEVLLQTTTRMTDVDRNGTTAYEGNWNPEAHPPLIHHEHHEEEETPHSTSTTASAHTSHPMQGRTTPSPEDSSWTDFFNPISHPMGRGHQAGRRMDMDSSHSITLQPTANPNTGLVEDLDRTGPLSMTTQQSNSQSFSTSHEGLEEDKDHPTTSTLTSSNRNDVTGGRRDPNHSEGSTTLLEGYTSHYPHTKESRTFIPVTSAKTGSFGVTAVTVGDSNSNVNRSLSGDQDTFHPSGGSHTTHGSESDGHSHGSQEGGANTTSGPIRTPQIPEWLIILASLLALALILAVCIAVNSRRRCGQKKKLVINSGNGAVEDRKPSGLNGEASKSQEMVHLVNKESSETPDQFMTADETRNLQNVDMKIGV

SEQ ID NO: 75 - protein, 458 aa, Artificial Sequence
  P01730
MNRGVPFRHLLLVLQLALLPAATQGKKVVLGKKGDTVELTCTASQKKSIQFHWKNSNQIKILGNQGSFLTKGPSKLNDRADSRRSLWDQGNFPLIIKNLKIEDSDTYICEVEDQKEEVQLLVFGLTANSDTHLLQGQSLTLTLESPPGSSPSVQCRSPRGKNIQGGKTLSVSQLELQDSGTWTCTVLQNQKKVEFKIDIVVLAFQKASSIVYKKEGEQVEFSFPLAFTVEKLTGSGELWWQAERASSSKSWITFDLKNKEVSVKRVTQDPKLQMGKKLPLHLTLPQALPQYAGSGNLTLALEAKTGKLHQEVNLVVMRATQLQKNLTCEVWGPTSPKLMLSLKLENKEAKVSKREKAVWVLNPEAGMWQCLLSDSGQVLLESNIKVLPTWSTPVQPMALIVLGGVAGLLLFIGLGIFFCVRCRHRRRQAERMSQIKRLLSEKKTCQCPHRFQKTCSPI

SEQ ID NO: 76 - protein, 61 aa, Artificial Sequence
  P31358
MKRFLFLLLTISLLVMVQIQTGLSGQNDTSQTSSPSASSNISGGIFLFFVANAIIHLFCFS

SEQ ID NO: 77 - protein, 61 aa, Artificial Sequence
  Q6IBD0
MKRFLFLLLTISLLVMVQIQTGLSGQNDTSQTSSPSASSSMSGGIFLFFVANAIIHLFCFS

SEQ ID NO: 78 - protein, 61 aa, Artificial Sequence; identical to SEQ ID NO: 76
  V9HWN9

SEQ ID NO: 79 - protein, 317 aa, Artificial Sequence
  B1AP15
MTVARPSVPAALPLLGELPRLLLLVLLCLPAVWGDCGLPPDVPNAQPALEGRTSFPEDTVITYKCEESFVKIPGEKDSVICLKGSQWSDIEEFCNQKSCPNPGEIRNGQIDVPGGILFGATISFSCNTGYKLFGSTSSFCLISGSSVQWSDPLPECREIYCPAPPQIDNGIIQGERDHYGYRQSVTYACNKGFTMIGEHSIYCTVNNDEGEWSGPPPECRGKSLTSKVPPTVQKPTTVNVPTTEVSPTSQKTTTKTTTPNAQATRSTPVSRTTKHFHETTPNKGSGTTSGTTRLLSGHTCFTLTGLLGTLVTMGLLT

SEQ ID NO: 80 - protein, 293 aa, Artificial Sequence [sequence omitted]

SEQ ID NO: 81 - protein, 267 aa, Artificial Sequence [sequence omitted]

SEQ ID NO: 82 - protein, 381 aa, Artificial Sequence
  P08174
MTVARPSVPAALPLLGELPRLLLLVLLCLPAVWGDCGLPPDVPNAQPALEGRTSFPEDTVITYKCEESFVKIPGEKDSVICLKGSQWSDIEEFCNRSCEVPTRLNSASLKQPYITQNYFPVGTVVEYECRPGYRREPSLSPKLTCLQNLKWSTAVEFCKKKSCPNPGEIRNGQIDVPGGILFGATISFSCNTGYKLFGSTSSFCLISGSSVQWSDPLPECREIYCPAPPQIDNGIIQGERDHYGYRQSVTYACNKGFTMIGEHSIYCTVNNDEGEWSGPPPECRGKSLTSKVPPTVQKPTTVNVPTTEVSPTSQKTTTKTTTPNAQATRSTPVSRTTKHFHETTPNKGSGTTSGTTRLLSGHTCFTLTGLLGTLVTMGLLT

SEQ ID NO: 83 - protein, 858 aa, Artificial Sequence
  P13591
MLQTKDLIWTLFFLGTAVSLQVDIVPSQGEISVGESKFFLCQVAGDAKDKDISWFSPNGEKLTPNQQRISVVWNDDSSSTLTIYNANIDDAGIYKCVVTGEDGSESEATVNVKIFQKLMFKNAPTPQEFREGEDAVIVCDVVSSLPPTIIWKHKGRDVILKKDVRFIVLSNNYLQIRGIKKTDEGTYRCEGRILARGEINFKDIQVIVNVPPTIQARQNIVNATANLGQSVTLVCDAEGFPEPTMSWTKDGEQIEQEEDDEKYIFSDDSSQLTIKKVDKNDEAEYICIAENKAGEQDATIHLKVFAKPKITYVENQTAMELEEQVTLTCEASGDPIPSITWRTSTRNISSEEKASWTRPEKQETLDGHMVVRSHARVSSLTLKSIQYTDAGEYICTASNTIGQDSQSMYLEVQYAPKLQGPVAVYTWEGNQVNITCEVFAYPSATISWFRDGQLLPSSNYSNIKIYNTPSASYLEVTPDSENDFGNYNCTAVNRIGQESLEFILVQADTPSSPSIDQVEPYSSTAQVQFDEPEATGGVPILKYKAEWRAVGEEVWHSKWYDAKEASMEGIVTIVGLKPETTYAVRLAALNGKGLGEISAASEFKTQPVQGEPSAPKLEGQMGEDGNSIKVNLIKQDDGGSPIRHYLVRYRALSSEWKPEIRLPSGSDHVMLKSLDWNAEYEVYVVAENQQGKSKAAHFVFRTSAQPTAIPANGSPTSGLSTGAIVGILIVIFVLLLVVVDITCYFLNKCGLFMCIAVNLCGKAGPGAKGKDMEEGKAAFSKDESKEPIVEVRTEEERTPNHDGGKHTEPNETTPLTEPEKGPVEAKPECQETETKPAPAEVKTVPNDATQTKENESKA

SEQ ID NO: 84 - protein, 288 aa, Artificial Sequence
  A0N0P2
MGHTRRQGTSPSKCPYLNFFQLLVLAGLSHFCSGVIHVTKEVKEVATLSCGHNVSVEELAQTRIYWQKEKKMVLTMMSGDMNIWPEYKNRTIFDITNNLSIVILALRPSDEGTYECVVLKYEKDAFKREHLAEVTLSVKADFPTPSISDFEIPTSNIRRIICSTSGGFPEPHLSWLENGEELNAINTTVSQDPETELYAVSSKLDFNMTTNHSFMCLIKYGHLRVNQTFNWNTTKQEHFPDNLLPSWAITLISVNGIFVICCLTYCFAPRCRERRRNERLRRESVRPV

SEQ ID NO: 85 - protein, 288 aa, Artificial Sequence; identical to SEQ ID NO: 84
  P33681

SEQ ID NO: 86 - protein, 329 aa, Artificial Sequence
  P42081
MDPQCTMGLSNILFVMAFLLSGAAPLKIQAYFNETADLPCQFANSQNQSLSELVVFWQDQENLVLNEVYLGKEKFDSVHSKYMGRTSFDSDSWTLRLHNLQIKDKGLYQCIIHHKKPTGMIRIHQMNSELSVLANFSQPEIVPISNITENVYINLTCSSIHGYPEPKKMSVLLRTKNSTIEYDGVMQKSQDNVTELYDVSISLSVSFPDVTSNMTIFCILETDKTRLLSSPFSIELEDPQPPPDHIPWITAVLPTVIICVMVFCLILWKWKKKKRPRNSYKCGTNTMEREESEQTKKREKIHIPERSDEAQRVFKSSKTSSCDKSDTCF

SEQ ID NO: 87 - protein, 235 aa, Artificial Sequence
  P01732
MALPVTALLLPLALLLHAARPSQFRVSPLDRTWNLGETVELKCQVLLSNPTSGCSWLFQPRGAAASPTFLLYLSQNKPKAAEGLDTQRFSGKRLGDTFVLTLSDFRRENEGYYFCSALSNSIMYFSHFVPVFLPAKPTTTPAPRPPTPAPTIASQPLSLRPEACRPAAGGAVHTRGLDFACDIYIWAPLAGTCGVLLLSLVITLYCNHRNRRRVCKCPRPVVKSGDKPSLSARYV

SEQ ID NO: 88 - protein, 823 aa, Artificial Sequence
  G5EA36
MTVLQEPVQAAIWQALNHYAYRDAVFLAERLYAEVHSEEALFLLATCYYRSGKAYKAYRLLKGHSCTTPQCKYLLAKCCVDLSKLAEGEQILSGGVFNKQKSHDDIVTEFGDSACFTLSLLGHVYCKTDRLAKGSECYQKSLSLNPFLWSPFESLCEIGEKPDPDQTFKFTSLQNFSNCLPNSCTTQVPNHSLSHRQPETVLTETPQDTIELNRLNLESSNSKYSLNTDSSVSYIDSAVISPDTVPLGTGTSILSKQVQNKPKTGRSLLGGPAALSPLTPSFGILPLETPSPGDGSYLQNYTNTPPVIDVPSTGAPSKKSVARIGQTGTKSVFSQSGNSREVTPILAQTQSSGPQTSTTPQVLSPTITSPPNALPRRSSRLFTSDSSTTKENSKKLKMKFPPKIPNRKTKSKTNKGGITQPNINDSLEITKLDSSIISEGKISTITPQIQAFNLQKAAAGLMSLLREMGKGYLALCSYNCKEAINILSHLPSHHYNTGWVLCQIGRAYFELSEYMQAERIFSEVRRIENYRVEGMEIYSTTLWHLQKDVALSVLSKDLTDMDKNSPEAWCAAGNCFSLQREHDIAIKFFQRAIQVDPNYAYAYTLLGHEFVLTEELDKALACFRNAIRVNPRHYNAWYGLGMIYYKQEKFSLAEMHFQKALDINPQSSVLLCHIGVVQHALKKSEKALDTLNKAIVIDPKNPLCKFHRASVLFANEKYKSALQELEELKQIVPKESLVYFLIGKVYKKLGQTHLALMNFSWAMDLDPKGANNQIKEAIDKRYLPDDEEPITQEEQIMGTDESQESSMTDADDTQLHAAESDEF

SEQ ID NO: 89 - protein, 824 aa, Artificial Sequence
  P30260
MTVLQEPVQAAIWQALNHYAYRDAVFLAERLYAEVHSEEALFLLATCYYRSGKAYKAYRLLKGHSCTTPQCKYLLAKCCVDLSKLAEGEQILSGGVFNKQKSHDDIVTEFGDSACFTLSLLGHVYCKTDRLAKGSECYQKSLSLNPFLWSPFESLCEIGEKPDPDQTFKFTSLQNFSNCLPNSCTTQVPNHSLSHRQPETVLTETPQDTIELNRLNLESSNSKYSLNTDSSVSYIDSAVISPDTVPLGTGTSILSKQVQNKPKTGRSLLGGPAALSPLTPSFGILPLETPSPGDGSYLQNYTNTPPVIDVPSTGAPSKKSVARIGQTGTKSVFSQSGNSREVTPILAQTQSSGPQTSTTPQVLSPTITSPPNALPRRSSRLFTSDSSTTKENSKKLKMKFPPKIPNRKTKSKTNKGGITQPNINDSLEITKLDSSIISEGKISTITPQIQAFNLQKAAAEGLMSLLREMGKGYLALCSYNCKEAINILSHLPSHHYNTGWVLCQIGRAYFELSEYMQAERIFSEVRRIENYRVEGMEIYSTTLWHLQKDVALSVLSKDLTDMDKNSPEAWCAAGNCFSLQREHDIAIKFFQRAIQVDPNYAYAYTLLGHEFVLTEELDKALACFRNAIRVNPRHYNAWYGLGMIYYKQEKFSLAEMHFQKALDINPQSSVLLCHIGVVQHALKKSEKALDTLNKAIVIDPKNPLCKFHRASVLFANEKYKSALQELEELKQIVPKESLVYFLIGKVYKKLGQTHLALMNFSWAMDLDPKGANNQIKEAIDKRYLPDDEEPITQEEQIMGTDESQESSMTDADDTQLHAAESDEF

SEQ ID NO: 90 - protein, 595 aa, Artificial Sequence
  P28908
MRVLLAALGLLFLGALRAFPQDRPFEDTCHGNPSHYYDKAVRRCCYRCPMGLFPTQQCPQRPTDCRKQCEPDYYLDEADRCTACVTCSRDDLVEKTPCAWNSSRVCECRPGMFCSTSAVNSCARCFFHSVCPAGMIVKFPGTAQKNTVCEPASPGVSPACASPENCKEPSSGTIPQAKPTPVSPATSSASTMPVRGGTRLAQEAASKLTRAPDSPSSVGRPSSDPGLSPTQPCPEGSGDCRKQCEPDYYLDEAGRCTACVSCSRDDLVEKTPCAWNSSRTCECRPGMICATSATNSCARCVPYPICAAETVTKPQDMAEKDTTFEAPPLGTQPDCNPTPENGEAPASTSPTQSLLVDSQASKTLPIPTSAPVALSSTGKPVLDAGPVLFWVILVLVVVVGSSAFLLCHRRACRKRIRQKLHLCYPVQTSQPKLELVDSRPRRSSTQLRSGASVTEPVAEERGLMSQPLMETCHSVGAAYLESLPLQDASPAGGPSSPRDLPEPRVSTEHTNNKIEKIYIMKADTVIVGTVKAELPEGRGLAGPAEPELEEELEADHTPHYPEQETEPPLGSCSDVMLSVEEEGKEDPLPTAASGK

SEQ ID NO: 91 - protein, 303 aa, Artificial Sequence
  A0A024RBB6
MATSRYEPVAEIGVGAYGTVYKARDPHSGHFVALKSVRVPNGGGGGGGLPISTVREVALLRRLEAFEHPNVVRLMDVCATSRTDREIKVTLVFEHVDQDLRTYLDKAPPPGLPAETIKDLMRQFLRGLDFLHANCIVHRDLKPENILVTSGGTVKLADFGLARIYSYQMALTPVVVTLWYRAPEVLLQSTYATPVDMWSVGCIFAEMFRRKPLFCGNSEADQLGKIFDLIGLPPEDDWPRDVSLPRGAFPPRGPRPVQSVVPEMEESGAQLLLEMLTFNPHKRISAFRALQHSYLHKDEGNPE

SEQ ID NO: 92 - protein, 303 aa, Artificial Sequence; identical to SEQ ID NO: 91
  P11802

SEQ ID NO: 93 - protein, 229 aa, Artificial Sequence
  Q6LC83
MDVCATSRTDREIKVTLVFEHVDQDLRTYLDKAPPPGLPAETIKDLMRQFLRGLDFLHANCIVHRDLKPENILVTSGGTVKLADFGLARIYSYQMALTPVVVTLWYRAPEVLLQSTYATPVDMWSVGCIFAEMFRRKPLFCGNSEADQLGKIFDLIGLPPEDDWPRDVSLPRGAFPPRGPRPVQSVVPEMEESGAQLLLEMLTFNPHKRISAFRALQHSYLHKDEGNPE

SEQ ID NO: 94 - protein, 111 aa, Artificial Sequence
  Q96BE9
MATSRYEPVAEIGVGAYGTVYKARDPHSGHFVALKSVRVPNGGGGGGGLPISTVREVALLRRLEAFEHPNVVRLMDVCATSRTDREIKRCFVESLSSVETLKPTSWAKSLT

SEQ ID NO: 95 - protein, 142 aa, Artificial Sequence [sequence omitted]

SEQ ID NO: 96 - protein, 116 aa, Artificial Sequence
  G3XAG3
MEPAAGSSMEPSADWLATAAARGRVEEVRALLEAGALPNAPNSYGRRPIQVGRGSAAGAGDGGRLWRTKFAGELESGSASILRKKGRLPGEFSEGVCNHRPPPGDALGAWEAKEEE

SEQ ID NO: 97 - protein, 156 aa, Artificial Sequence
  K7PML8
MEPAAGSSMEPSADWLATAAARGRVEEVRALLEAGALPNAPNSYGRRPIQVMMMGSARVAELLLLHGAEPNCADPATLTRPVHDAAREGFLDTLVVLHRAGARLDVRDAWGRLPVDLAEELGHRDVARYLRAAAGGTRGSNHARIDAAEGPSDIPD

SEQ ID NO: 98 - protein, 108 aa, Artificial Sequence
  L8E941
MEVMMMGSARVAELLLLHGAEPNCADPATLTRPVHDAAREGFLDTLVVLHRAGARLDVRDAWGRLPVDLAEELGHRDVARYLRAAAGGTRGSNHARIDAAEGPSDIPD

SEQ ID NO: 99 - protein, 132 aa, Artificial Sequence
  Q8N726
MVRRFLVTLRIRRACGPPRVRVFVVHIPRLTGEWAAPGAPAAVALVLMLLRSQRLGQQPLPRRPGHDDGQRPSGGAAAAPRRGAQLRRPRHSHPTRARRCPGGLPGHAGGAAPGRGAAGRARCLGPSARGPG

SEQ ID NO: 100 - protein, 702 aa, Artificial Sequence
  NP_004354
MESPSAPPHRWCIPWQRLLLTASLLTFWNPPTTAKLTIESTPFNVAEGKEVLLLVHNLPQHLFGYSWYKGERVDGNRQIIGYVIGTQQATPGPAYSGREIIYPNASLLIQNIIQNDTGFYTLHVIKSDLVNEEATGQFRVYPELPKPSISSNNSKPVEDKDAVAFTCEPETQDATYLWWVNNQSLPVSPRLQLSNGNRTLTLFNVTRNDTASYKCETQNPVSARRSDSVILNVLYGPDAPTISPLNTSYRSGENLNLSCHAASNPPAQYSWFVNGTFQQSTQELFIPNITVNNSGSYTCQAHNSDTGLNRTTVTTITVYAEPPKPFITSNNSNPVEDEDAVALTCEPEIQNTTYLWWVNNQSLPVSPRLQLSNDNRTLTLLSVTRNDVGPYECGIQNELSVDHSDPVILNVLYGPDDPTISPSYTYYRPGVNLSLSCHAASNPPAQYSWLIDGNIQQHTQELFISNITEKNSGLYTCQANNSASGHSRTTVKTITVSAELPKPSISSNNSKPVEDKDAVAFTCEPEAQNTTYLWWVNGQSLPVSPRLQLSNGNRTLTLFNVTRNDARAYVCGIQNSVSANRSDPVTLDVLYGPDTPIISPPDSSYLSGANLNLSCHSASNPSPQYSWRINGIPQQHTQVLFIAKITPNNNGTYACFVSNLATGRNNSIVKSITVSASGTSPGLSAGATVGIMIGVLVGVALI

SEQ ID NO: 101 - protein, 344 aa, Artificial Sequence
  P40199
MGPPSAPPCRLHVPWKEVLLTASLLTFWNPPTTAKLTIESTPFNVAEGKEVLLLAHNLPQNRIGYSWYKGERVDGNSLIVGYVIGTQQATPGPAYSGRETIYPNASLLIQNVTQNDTGFYTLQVIKSDLVNEEATGQFHVYPELPKPSISSNNSNPVEDKDAVAFTCEPEVQNTTYLWWVNGQSLPVSPRLQLSNGNMTLTLLSVKRNDAGSYECEIQNPASANRSDPVTLNVLYGPDGPTISPSKANYRPGENLNLSCHAASNPPAQYSWFINGTFQQSTQELFIPNITVNNSGSYMCQAHNSATGLNRTTVTMITVSGSAPVLSAVATVGITIGVLARVALI

SEQ ID NO: 102 - protein, 390 aa, Artificial Sequence
  Q15782
MGATTMDQKSLWAGVVVLLLLQGGSAYKLVCYFTNWSQDRQEPGKFTPENIDPFLCSHLIYSFASIENNKVIIKDKSEVMLYQTINSLKTKNPKLKILLSIGGYLFGSKGFHPMVDSSTSRLEFINSIILFLRNHNFDGLDVSWIYPDQKENTHFTVLIHELAEAFQKDFTKSTKERLLLTAGVSAGRQMIDNSYQVEKLAKDLDFINLLSFDFHGSWEKPLITGHNSPLSKGWQDRGPSSYYNVEYAVGYWIHKGMPSEKVVMGIPTYGHSFTLASAETTVGAPASGPGAAGPITESSGFLAYYEICQFLKGAKITRLQDQQVPYAVKGNQWVGYDDVKSMETKVQFLKNLNLGGAMIWSIDMDDFTGKSCNQGPYPLVQAVKRSLGSL

SEQ ID NO: 103 - protein, 943 aa, Artificial Sequence
  Q9UQC9
MTQRSIAGPICNLKFVTLLVALSSELPFLGAGVQLQDNGYNGLLIAINPQVPENQNLISNIKEMITEASFYLFNATKRRVFFRNIKILIPATWKANNNSKIKQESYEKANVIVTDWYGAHGDDPYTLQYRGCGKEGKYIHFTPNFLLNDNLTAGYGSRGRVFVHEWAHLRWGVFDEYNNDKPFYINGQNQIKVTRCSSDITGIFVCEKGPCPQENCIISKLFKEGCTFIYNSTQNATASIMFMQSLSSVVEFCNASTHNQEAPNLQNQMCSLRSAWDVITDSADFHHSFPMNGTELPPPPTFSLVQAGDKVVCLVLDVSSKMAEADRLLQLQQAAEFYLMQIVEIHTFVGIASFDSKGEIRAQLHQINSNDDRKLLVSYLPTTVSAKTDISICSGLKKGFEVVEKLNGKAYGSVMILVTSGDDKLLGNCLPTVLSSGSTIHSIALGSSAAPNLEELSRLTGGLKFFVPDISNSNSMIDAFSRISSGTGDIFQQHIQLESTGENVKPHHQLKNTVTVDNTVGNDTMFLVTWQASGPPEIILFDPDGRKYYTNNFITNLTFRTASLWIPGTAKPGHWTYTLNNTHHSLQALKVTVTSRASNSAVPPATVEAFVERDSLHFPHPVMIYANVKQGFYPILNATVTATVEPETGDPVTLRLLDDGAGADVIKNDGIYSRYFFSFAANGRYSLKVHVNHSPSISTPAHSIPGSHAMYVPGYTANGNIQMNAPRKSVGRNEEERKWGFSRVSSGGSFSVLGVPAGPHPDVFPPCKIIDLEAVKVEEELTLSWTAPGEDFDQGQATSYEIRMSKSLQNIQDDFNNAILVNTSKRNPQQAGIREIFTFSPQISTNGPEHQPNGETHESHRIYVAIRAMDRNSLQSAVSNIAQAPLFIPPNSDPVPARDYLILKGVLTAMGLIGIICLIIVVTHHTLSRKKRADKKENGTKLL

SEQ ID NO: 104 - protein, 235 aa, Artificial Sequence
  Q9NQT4
MEEETHTDAKIRAENGTGSSPRGPGCSLRHFACEQNLLSRPDGSASFLQGDTSVLAGVYGPAEVKVSKEIFNKATLEVILRPKIGLPGVAEKSRERLIRNTCEAVVLGTLHPRTSITVVLQVVSDAGSLLACCLNAACMALVDAGVPMRALFCGVACALDSDGTLVLDPTSKQEKEARAVLTFALDSVERKLLMSSTKGLYSDTELQQCLAAAQAASQHVFRFYRESLQRRYSKS

SEQ ID NO: 105 - protein, 583 aa, Artificial Sequence
  Q96RS6
MEVAANCSLRVKRPLLDPRFEGYKLSLEPLPCYQLELDAAVAEVKLRDDQYTLEHMHAFGMYNYLHCDSWYQDSVYYIDTLGRIMNLTVMLDTALGKPREVFRLPTDLTACDNRLCASIHFSSSTWVTLSDGTGRLYVIGTGERGNSASEKWEIMFNEELGDPFIIIHSISLLNAEEHSIATLLLRIEKEELDMKGSGFYVSLEWVTISKKNQDNKKYEIIKRDILRGKSVPHYAAIEPDGNGLMIVSYKSLTFVQAGQDLEENMDEDISEKIKEPLYYWQQTEDDLTVTIRLPEDSTKEDIQIQFLPDHINIVLKDHQFLEGKLYSSIDHESSTWIIKESNSLEISLIKKNEGLTWPELVIGDKQGELIRDSAQCAAIAERLMHLTSEELNPNPDKEKPPCNAQELEECDIFFEESSSLCRFDGNTLKTTHVVNLGSNQYLFSVIVDPKEMPCFCLRHDVDALLWQPHSSKQDDMWEHIATFNALGYVQASKRDKKFFACAPNYSYAALCECLRRVFIYRQPAPMSTVLYNRKEGRQVGQVAKQQVASLETNDPILGFQATNERLFVLTTKNLFLIKVNTEN

SEQ ID NO: 106 - protein, 520 aa, Artificial Sequence
  Q5T124
MSSPLASLSKTRKVPLPSEPMNPGRRGIRIYGDEDEVDMLSDGCGSEEKISVPSCYGGIGAPVSRQVPASHDSELMAFMTRKLWDLEQQVKAQTDEILSKDQKIAALEDLVQTLRPHPAEATLQRQEELETMCVQLQRQVREMERFLSDYGLQWVGEPMDQEDSESKTVSEHGERDWMTAKKFWKPGDSLAPPEVDFDRLLASLQDLSELVVEGDTQVTPVPGGARLRTLEPIPLKLYRNGIMMFDGPFQPFYDPSTQRCLRDILDGFFPSELQRLYPNGVPFKVSDLRNQVYLEDGLDPFPGEGRVVGRQLMHKALDRVEEHPGSRMTAEKFLNRLPKFVIRQGEVIDIRGPIRDTLQNCCPLPARIQEIVVETPTLAAERERSQESPNTPAPPLSMLRIKSENGEQAFLLMMQPDNTIGDVRALLAQARVMDASAFEIFSTFPPTLYQDDTLTLQAAGLVPKAALLLRARRAPKSSLKFSPGPCPGPGPGPSPGPGPGPSPGPGPGPSPCPGPSPSPQ

SEQ ID NO: 107 - protein, 142 aa, Artificial Sequence
  Q14019
MATKIDKEACRAAYNLVRDDGSAVIWVTFKYDGSTIVPGEQGAEYQHFIQQCTDDVRLFAFVRFTTGDAMSKRSKFALITWIGENVSGLQRAKTGTDKTLVKEVVQNFAKEFVISDRKELEEDFIKSELKKAGGANYDAQTE

SEQ ID NO: 108 - protein, 164 aa, Artificial Sequence
  L8EAS4
MATRDPWVWMASPDFQARKGKRVHQETLAPGETKDKMELLGLRGPLDLLGPGALLATLGKMAPGEHKAQRAPKESPDKTARWAQRDPQGPRVSLEYLERRATMGHQASLDHQGPRASQGAWGLGERTVWTVPQDRRGSLATEARMELQGPGVPQASRASRETQW

SEQ ID NO: 109 - protein, 540 aa, Artificial Sequence
  Q86Y22
MGPGERAGGGGDAGKGNAAGGGGGGRSATTAGSRAVSALCLLLSVGSAAACLLLGVQAAALQGRVAALEEERELLRRAGPPGALDAWAEPHLERLLREKLDGLAKIRTAREAPSECVCPPGPPGRRGKPGRRGDPGPPGQSGRDGYPGPLGLDGKPGLPGPKGEKGAPGDFGPRGDQGQDGAAGPPGPPGPPGARGPPGDTGKDGPRGAQGPAGPKGEPGQDGEMGPKGPPGPKGEPGVPGKKGDDGTPSQPGPPGPKGEPGSMGPRGENGVDGAPGPKGEPGHRGTDGAAGPRGAPGLKGEQGDTVVIDYDGRILDALKGPPGPQGPPGPPGIPGAKGELGLPGAPGIDGEKGPKGQKGDPGEPGPAGLKGEAGEMGLSGLPGADGLKGEKGESASDSLQESLAQLIVEPGPPGPPGPPGPMGLQGIQGPKGLDGAKGEKGASGERGPSGLPGPVGPPGLIGLPGTKGEKGRPGEPGLDGFPGPRGEKGDRSERGEKGERGVPGRKGVKGQKGEPGPPGLDQPCPVGPDGLPVPGCWHK

SEQ ID NO: 110 - protein, 163 aa, Artificial Sequence
  Q6ZYK7
MLARALLLCAVLALSHTANPCCSHPCQNRGVCMSVGFDQYKCDCTRTGFYGENCSTPEFLTRIKLFLKPTPNTVHYILTHFKGFWNVVNNIPFLRNAIMSYVLTSRSHLIDSPPTYNADYGYKSWEAFSNLSYYTRALPPVPDDCPTPLGVKALHASVFQDRS

SEQ ID NO: 111 - protein, 543 aa, Artificial Sequence
  Q16678
MGTSLSPNDPWPLNPLSIQQTTLLLLLSVLATVHVGQRLLRQRRRQLRSAPPGPFAWPLIGNAAAVGQAAHLSFARLARRYGDVFQIRLGSCPIVVLNGERAIHQALVQQGSAFADRPAFASFRVVSGGRSMAFGHYSEHWKVQRRAAHSMMRNFFTRQPRSRQVLEGHVLSEARELVALLVRGSADGAFLDPRPLTVVAVANVMSAVCFGCRYSHDDPEFRELLSHNEEFGRTVGAGSLVDVMPWLQYFPNPVRTVFREFEQLNRNFSNFILDKFLRHCESLRPGAAPRDMMDAFILSAEKKAAGDSHGGGARLDLENVPATITDIFGASQDTLSTALQWLLLLFTRYPDVQTRVQAELDQVVGRDRLPCMGDQPNLPYVLAFLYEAMRFSSFVPVTIPHATTANTSVLGYHIPKDTVVFVNQWSVNHDPLKWPNPENFDPARFLDKDGLINKDLTSRVMIFSVGKRRCIGEELSKMQLFLFISILAHQCDFRANPNEPAKMNFSYGLTIKPKSFKVNVTLRESMELLDSAVQNLQAKETCQ

SEQ ID NO: 112 - protein, 110 aa, Artificial Sequence
  Q9Y5P2-2
MWMGLIQLVEGVKRKDQGFLEKEFYHKTNIKMRCEFLACWPAFTVLGEAWRDQVDWSRLLRDAGLVKMSRKPRASSPLSNNHPPTPKRFPRQPGREKGPIKEVPGTKGSP

SEQ ID NO: 113 - protein, 127 aa, Artificial Sequence
  Q9Y5P2
MWMGLIQLVEGVKRKDQGFLEKEFYHKTNIKMRCEFLACWPAFTVLGEAWRDQVDWSRLLRDAGLVKMSRKPRASSPLSNNHPPTPKRRGSGRHPLNPGPEALSKFPRQPGREKGPIKEVPGTKGSP

SEQ ID NO: 114 - protein, 189 aa, Artificial Sequence
  Q5HYN5
MTDKTEKVAVDPETVFKRPRECDSPSYQKRQRMALLARKQGAGDSLIAGSAMSKAKKLMTGHAIPPSQLDSQIDDFTGFSKDRMMQKPGSNAPVGGNVTSSFSGDDLECRETASSPKSQREINADIKRKLVKELRCVGQKYEKIFEMLEGVQGPTAVRKRFFESIIKEAARCMRRDFVKHLKKKLKRMI

SEQ ID NO: 115 - protein, 264 aa, Artificial Sequence
  Q8WUE5
MLRLLRLALAFYGRTADPAERQGPQQQGLPQGDTQLTTVQGVVTSFCGDYGMIDESIYFSSDVVTGNVPLKVGQKVNVVVEEDKPHYGLRAIKVDVVPRHLYGAGPSDSGTRVLIGCVTSINEDNIYISNSIYFSIAIVSEDFVPYKGDLLEVEYSTEPGISNIKATSVKPIRCIHTEEVCITSVHGRNGVIDYTIFFTLDSVKLPDGYVPQVDDIVNVVMVESIQFCFIWRAISITPVHKSSSGFQDDGGLGRPKRERRSQSI

SEQ ID NO: 116 - protein, 947 aa, Artificial Sequence
  Q58F21
MSLPSRQTAIIVNPPPPEYINTKKNGRLTNQLQYLQKVVLKDLWKHSFSWPFQRPVDAVKLQLPDYYTIIKNPMDLNTIKKRLENKYYAKASECIEDFNTMFSNCYLYNKPGDDIVLMAQALEKLFMQKLSQMPQEEQVVGVKERIKKGTQQNIAVSSAKEKSSPSATEKVFKQQEIPSVFPKTSISPLNVVQGASVNSSSQTAAQVTKGVKRKADTTTPATSAVKASSEFSPTFTEKSVALPPIKENMPKNVLPDSQQQYNVVKTVKVTEQLRHCSEILKEMLAKKHFSYAWPFYNPVDVNALGLHNYYDVVKNPMDLGTIKEKMDNQEYKDAYKFAADVRLMFMNCYKYNPPDHEVVTMARMLQDVFETHFSKIPIEPVESMPLCYIKTDITETTGRENTNEASSEGNSSDDSEDERVKRLAKLQEQLKAVHQQLQVLSQVPFRKLNKKKEKSKKEKKKEKVNNSNENPRKMCEQMRLKEKSKRNQPKKRKQQFIGLKSEDEDNAKPMNYDEKRQLSLNINKLPGDKLGRVVHIIQSREPSLSNSNPDEIEIDFETLKASTLRELEKYVSACLRKRPLKPPAKKIMMSKEELHSQKKQELEKRLLDVNNQLNSRKRQTKSDKTQPSKAVENVSRLSESSSSSSSSSESESSSSDLSSSDSSDSESEMFPKFTEVKPNDSPSKENVKKMKNECIPPEGRTGVTQIGYCVQDTTSANTTLVHQTTPSHVMPPNHHQLAFNYQELEHLQTVKNISPLQILPPSGDSEQLSNGITVMHPSGDSDTTMLESECQAPVQKDIKIKNADSWKSLGKPVKPSGVMKSSDELFNQFRKAAIEKEVKARTQELIRKHLEQNTKELKASQENQRDLGNGLTVESFSNKIQNKCSGEEQKEHQQSSEAQDKSKLWLLKDRDLARQKEQERRRREAMVGTIDMTLQSDIMTMFENNFD

SEQ ID NO: 117 - protein, 180 aa, Artificial Sequence
  O75638-2
MQAEGRGTGGSTGDADGPGGPGIPDGPGGNAGGPGEAGATGGRGPRGAGAARASGPRGGAPRGPHGGAASAQDGRCPCGARRPDSRLLELHITMPFSSPMEAELVRRILSRDAAPLPRPGAVLKDFTVSGNLLFIRLTAADHRQLQLSISSCLQQLSLLMWITQCFLPVFLAQAPSGQRR

SEQ ID NO: 118 - protein, 210 aa, Artificial Sequence
  O75638
MQAEGQGTGGSTGDADGPGGPGIPDGPGGNAGGPGEAGATGGRGPRGAGAARASGPRGGAPRGPHGGAASAQDGRCPCGARRPDSRLLQLHITMPFSSPMEAELVRRILSRDAAPLPRPGAVLKDFTVSGNLLFMSVRDQDREGAGRMRVVGWGLGSASPEGQKARDLRTPKHKVSEQRPGTPGPPPPEGAQGDGCRGVAFNVMFSAPHI

SEQ ID NO: 119 - protein, 663 aa, Artificial Sequence
  Q8NI51
MAATEISVLSEQFTKIKELELMPEKGLKEEEKDGVCREKDHRSPSELEAERTSGAFQDSVLEEEVELVLAPSEESEKYILTLQTVHFTSEAVELQDMSLLSIQQQEGVQVVVQQPGPGLLWLEEGPRQSLQQCVAISIQQELYSPQEMEVLQFHALEENVMVASEDSKLAVSLAETTGLIKLEEEQEKNQLLAERTKEQLFFVETMSGDERSDEIVLTVSNSNVEEQEDQPTAGQADAEKAKSTKNQRKTKGAKGTFHCDVCMFTSSRMSSFNRHMKTHTSEKPHLCHLCLKTFRTVTLLRNHVNTHTGTRPYKCNDCNMAFVTSGELVRHRRYKHTHEKPFKCSMCKYASVEASKLKRHVRSHTGERPFQCCQCSYASRDTYKLKRHMRTHSGEKPYECHICHTRFTQSGTMKIHILQKHGENVPKYQCPHCATIIARKSDLRVHMRNLHAYSAAELKCRYCSAVFHERYALIQHQKTHKNEKRFKCKHCSYACKQERHMTAHIRTHTGEKPFTCLSCNKCFRQKQLLNAHFRKYHDANFIPTVYKCSKCGKGFSRWINLHRHSEKCGSGEAKSAASGKGRRTRKRKQTILKEATKGQKEAAKGWKEAANGDEAAAEEASTTKGEQFPGEMFPVACRETTARVKEEVDEGVTCEMLLNTMDK

SEQ ID NO: 120 - protein, 715 aa, Artificial Sequence
  Q8IZW8
MSQVMSSPLLAGGHAVSLAPCDEPRRTLHPAPSPSLPPQCSYYTTEGWGAQALMAPVPCMGPPGRLQQAPQVEAKATCFLPSPGEKALGTPEDLDSYIDFSLESLNQMILELDPTFQLLPPGTGGSQAELAQSTMSMRKKEESEALDIKYIEVTSARSRCHDGPQHCSSPSVTPPFGSLRSGGLLLSRDVPRETRSSSESLIFSGNQGRGHQRPLPPSEGLSPRPPNSPSISIPCMGSKASSPHGLGSPLVASPRLEKRLGGLAPQRGSRISVLSASPVSDVSYMFGSSQSLLHSSNSSHQSSSRSLESPANSSSSLHSLGSVSLCTRPSDFQAPRNPTLTMGQPRTPHSPPLAKEHASSCPPSITNSMVDIPIVLINGCPEPGSSPPQRTPGHQNSVQPGAASPSNPCPATRSNSQTLSDAPFTTCPEGPARDMQPTMKFVMDTSKYWFKPNITREQAIELLRKEEPGAFVIRDSSSYRGSFGLALKVQEVPASAQSRPGEDSNDLIRHFLIESSAKGVHLKGADEEPYFGSLSAFVCQHSIMALALPCKLTIPQRELGGADGASDSTDSPASCQKKSAGCHTLYLSSVSVETLTGALAVQKAISTTFERDILPTPTVVHFKVTEQGITLTDVQRKVFFRRHYPLTTLRFCGMDPEQRKWQKYCKPSWIFGFVAKSQTEPQENVCHLFAEYDMVQPASQVIGLVTALLQDAERM

SEQ ID NO: 121 - protein, 433 aa, Artificial Sequence
  P14635
MALRVTRNSKINAENKAKINMAGAKRVPTAPAATSKPGLRPRTALGDIGNKVSEQLQAKMPMKKEAKPSATGKVIDKKLPKPLEKVPMLVPVPVSEPVPEPEPEPEPEPVKEEKLSPEPILVDTASPSPMETSGCAPAEEDLCQAFSDVILAVNDVDAEDGADPNLCSEYVKDIYAYLRQLEEEQAVRPKYLLGREVTGNMRAILIDWLVQVQMKFRLLQETMYMTVSIIDRFMQNNCVPKKMLQLVGVTAMFIASKYEEMYPPEIGDFAFVTDNTYTKHQIRQMEMKILRALNFGLGRPLPLHFLRRASKIGEVDVEQHTLAKYLMELTMLDYDMVHFPPSQIAAGAFCLALKILDNGEWTPTLQHYLSYTEESLLPVMQHLAKNVVMVNQGLTKHMTVKNKYATSKHAKISTLPQLNSALVQDLAKAVAKV

SEQ ID NO: 122 - protein, 295 aa, Artificial Sequence
  P24385
MEHQLLCCEVETIRRAYPDANLLNDRVLRAMLKAEETCAPSVSYFKCVQKEVLPSMRKIVATWMLEVCEEQKCEEEVFPLAMNYLDRFLSLEPVKKSRLQLLGATCMFVASKMKETIPLTAEKLCIYTDNSIRPEELLQMELLLVNKLKWNLAAMTPHDFIEHFLSKMPEAEENKQIIRKHAQTFVALCATDVKFISNPPSMVAAGSVVAAVQGLNLRSPNNFLSYYRLTRFLSRVIKCDPDCLRACQEQIEALLESSLRQAQQNMDPKAAEEEEEEEEEVDLACTPTDVRDVDI

SEQ ID NO: 123 - protein, 216 aa, Artificial Sequence
  P23284
MLRLSERNMKVLLAAALIAGSVFFLLLPGPSAADEKKKGPKVTVKVYFDLRIGDEDVGRVIFGLFGKTVPKTVDNFVALATGEKGFGYKNSKFHRVIKDFMIQGGDFTRGDGTGGKSIYGERFPDENFKLKHYGPGWVSMANAGKDTNGSQFFITTVKTAWLDGKHVVFGKVLEGMEVVRKVESTKTDSRDKPLKDVIIADCGKIEVEKPFAIAKE

SEQ ID NO: 124 - protein, 347 aa, Artificial Sequence
  P43366
MPRGQKSKLRAREKRRKAREETQGLKVAHATAAEKEECPSSSPVLGDTPTSSPAAGIPQKPQGAPPTTTAAAAVSCTESDEGAKCQGEENASFSQATTSTESSVKDPVAWEAGMLMHFILRKYKMREPIMKADMLKVVDEKYKDHFTEILNGASRRLELVFGLDLKEDNPSGHTYTLVSKLNLTNDGNLSNDWDFPRNGLLMPLLGVIFLKGNSATEEEIWKFMNVLGAYDGEEHLIYGEPRKFITQDLVQEKYLKYEQVPNSDPPRYQFLWGPRAYAETTKMKVLEFLAKMNGATPRDFPSHYEEALRDEEERAQVRSSVRARRRTTATTFRARSRAPFSRSSHPM

SEQ ID NO: 125 - protein, 811 aa, Artificial Sequence
  Q5TB30
MESQGVPPGPYRATKLWNEVTTSFRAGMPLRKHRQHFKKYGNCFTAGEAVDWLYDLLRNNSNFGPEVTRQQTIQLLRKFLKNHVIEDIKGRWGSENVDDNNQLFRFPATSPLKTLPRRYPELRKNNIENFSKDKDSIFKLRNLSRRTPKRHGLHLSQENGEKIKHEIINEDQENAIDNRELSQEDVEEVWRYVILIYLQTILGVPSLEEVINPKQVIPQYIMYNMANTSKRGVVILQNKSDDLPHWVLSAMKCLANWPRSNDMNNPTYVGFERDVFRTIADYFLDLPEPLLTFEYYELFVNILVVCGYITVSDRSSGIHKIQDDPQSSKFLHLNNLNSFKSTECLLLSLLHREKNKEESDSTERLQISNPGFQERCAKKMQLVNLRNRRVSANDIMGGSCHNLIGLSNMHDLSSNSKPRCCSLEGIVDVPGNSSKEASSVFHQSFPNIEGQNNKLFLESKPKQEFLLNLHSEENIQKPFSAGFKRTSTLTVQDQEELCNGKCKSKQLCRSQSLLLRSSTRRNSYINTPVAEIIMKPNVGQGSTSVQTAMESELGESSATINKRLCKSTIELSENSLLPASSMLTGTQSLLQPHLERVAIDALQLCCLLLPPPNRRKLQLLMRMISRMSQNVDMPKLHDAMGTRSLMIHTFSRCVLCCAEEVDLDELLAGRLVSFLMDHHQEILQVPSYLQTAVEKHLDYLKKGHIENPGDGLFAPLPTYSYCKQISAQEFDEQKVSTSQAAIAELLENIIKNRSLPLKEKRKKLKQFQKEYPLIYQKRFPTTESEAALFGDKPTIKQPMLILRKPKFRSLR

SEQ ID NO: 126 - protein, 98 aa, Artificial Sequence
  P03129
MHGDTPTLHEYMLDLQPETTDLYCYEQLNDSSEEEDEIDGPAGQAEPDRAHYNIVTFCCKCDSTLRLCVQSTHVDIRTLEDLLMGTLGIVCPICSQKP

SEQ ID NO: 127 - protein, 105 aa, Artificial Sequence
  P06788
MHGPKATLQDIVLHLEPQNEIPVDLLCHEQLSDSEEENDEIDGVNHQHLPARRAEPQRHTMLCMCCKCEARIKLVVESSADDLRAFQQLFLNTLSFVCPWCASQQ

SEQ ID NO: 128 - protein, 98 aa, Artificial Sequence
  P17387
MRGETPTLQDYVLDLQPEATDLHCYEQLPDSSDEEDVIDSPAGQAEPDTSNYNIVTFCCQCKSTLRLCVQSTQVDIRILQELLMGSFGIVCPNCSTRL

SEQ ID NO: 129 - protein, 97 aa, Artificial Sequence
  P06429
MRGHKPTLKEYVLDLYPEPTDLYCYEQLSDSSDEDEGLDRPDGQAQPATADYYIVTCCHTCNTTVRLCVNSTASDLRTIQQLLMGTVNIVCPTCAQQ

SEQ ID NO: 130 - protein, 99 aa, Artificial Sequence
  P27230
MHGEITTLQDYVLDLEPEATDLYCYEQLCDSSEEEEDTIDGPAGQAKPDTSNYNIVTSCCKCEATLRLCVQSTHIDIRKLEDLLMGTFGIVCPGCSQRA

SEQ ID NO: 131 - protein, 109 aa, Artificial Sequence
  P24837
MRGPKPTLQEIVLDLCPYNEIQPVDLVCHEQLGESEDEIDEPDHAVNHQHQLLARRDEPQRHTIQCSCCKCNNTLQLVVEASRDTLRQLQQLFMDSLGFVCPWCATANQ

SEQ ID NO: 132 - protein, 106 aa, Artificial Sequence
  P21736
MHGPRETLQEIVLHLEPQNELDPVDLLCYEQLSESEEENDEADGVSHAQLPARRAEPQRHKILCVCCKCDGRIELTVESSAEDLRTLQQLFLSTLSFVCPWCATNQ

SEQ ID NO: 133 - protein, 101 aa, Artificial Sequence
  P26558
MRGNVPQLKDVVLHLTPQTEIDLQCYEQFDSSEEEDEVDNMRDQLPERRAGQATCYRIEAPCCRCSSVVQLAVESSGDTLRVVQQMLMGELSLVCPCCANN

SEQ ID NO: 134 - protein, 99 aa, Artificial Sequence
  P36831
MRGDKATIKDYILDLQPETTDLHCYEQLGDSSDEEDTDGVDRPDGQAEQATSNYYIVTYCHSCDSTLRLCIHSTATDLRTLQQMLLGTLQVVCPGCARL

SEQ ID NO: 135 - protein, 105 aa, Artificial Sequence
  P36833
MHGKVPTLQDVVLELTPQTEIDLQCNEQLDSSEDEDEDEVDHLQERPQQARQAKQHTCYLIHVPCCECKFVVQLDIQSTKEDLRVVQQLLMGALTVTCPLCASSN

SEQ ID NO: 136 - protein, 98 aa, Artificial Sequence
  Q9QCZ1
MRGNNPTLREYILDLHPEPTDLFCYEQLCDSSDEDEIGLDRPDGQAQPATANYYIVTCCYTCDTTVRLCINSTTTDVRTLQQLLMGTCTIVCPSCAQQ

SEQ ID NO: 137 - protein, 107 aa, Artificial Sequence
  Q81965
MHGPKATLCDIVLDLEPQNYEEVDLVCYEQLPDSDSENEKDEPDGVNHPLLLARRAEPQRHNIVCVCCKCNNQLQLVVETSQDGLRALQQLFMDTLSFVCPLCAANQ

SEQ ID NO: 138 - protein, 105 aa, Artificial Sequence
  Q80956
MHGKVPTLQEVILELAPQTEIDLQCNEQLDSSEDEDEDEIDHLLERPQQARQAEQHKCYLIHVPCCKCELVVQLDIQSTKEELRVVQQLLMGALTVTCPLCASSK

SEQ ID NO: 139 - protein, 463 aa, Artificial Sequence
  Q05639
MGKEKTHINIVVIGHVDSGKSTTTGHLIYKCGGIDKRTIEKFEKEAAEMGKGSFKYAWVLDKLKAERERGITIDISLWKFETTKYYITIIDAPGHRDFIKNMITGTSQADCAVLIVAAGVGEFEAGISKNGQTREHALLAYTLGVKQLIVGVNKMDSTEPAYSEKRYDEIVKEVSAYIKKIGYNPATVPFVPISGWHGDNMLEPSPNMPWFKGWKVERKEGNASGVSLLEALDTILPPTRPTDKPLRLPLQDVYKIGGIGTVPVGRVETGILRPGMVVTFAPVNITTEVKSVEMHHEALSEALPGDNVGFNVKNVSVKDIRRGNVCGDSKSDPPQEAAQFTSQVIILNHPGQISAGYSPVIDCHTAHIACKFAELKEKIDRRSGKKLEDNPKSLKSGDAAIVEMVPGKPMCVESFSQYPPLGRFAVRDMRQTVAVGVIKNVEKKSGGAGKVTKSAQKAQKAGK

SEQ ID NO: 140 - protein, 972 aa, Artificial Sequence
  Q15029
MDTDLYDEFGNYIGPELDSDEDDDELGRETKDLDEMDDDDDDDDVGDHDDDHPGMEVVLHEDKKYYPTAEEVYGPEVETIVQEEDTQPLTEPIIKPVKTKKFTLMEQTLPVTVYEMDFLADLMDNSELIRNVTLCGHLHHGKTCFVDCLIEQTHPEIRKRYDQDLCYTDILFTEQERGVGIKSTPVTVVLPDTKGKSYLFNIMDTPGHVNFSDEVTAGLRISDGVVLFIDAAEGVMLNTERLIKHAVQERLAVTVCINKIDRLILELKLPPTDAYYKLRHIVDEVNGLISMYSTDENLILSPLLGNVCFSSSQYSICFTLGSFAKIYADTFGDINYQEFAKRLWGDIYFNPKTRKFTKKAPTSSSQRSFVEFILEPLYKILAQVVGDVDTSLPRTLDELGIHLTKEELKLNIRPLLRLVCKKFFGEFTGFVDMCVQHIPSPKVGAKPKIEHTYTGGVDSDLGEAMSDCDPDGPLMCHTTKMYSTDDGVQFHAFGRVLSGTIHAGQPVKVLGENYTLEDEEDSQICTVGRLWISVARYHIEVNRVPAGNWVLIEGVDQPIVKTATITEPRGNEEAQIFRPLKFNTTSVIKIAVEPVNPSELPKMLDGLRKVNKSYPSLTTKVEESGEHVILGTGELYLDCVMHDLRKMYSEIDIKVADPVVTFCETVVETSSLKCFAETPNKKNKITMIAEPLEKGLAEDIENEVVQITWNRKKLGEFFQTKYDWDLLAARSIWAFGPDATGPNILVDDTLPSEVDKALLGSVKDSIVQGFQWGTREGPLCDELIRNVKFKILDAVVAQEPLHRGGGQIIPTARRVVYSAFLMATPRLMEPYYFVEVQAPADCVSAVYTVLARRRGHVTQDAPIPGSPLYTIKAFIPAIDSFGFETDLRTHTQGQAFSLSVFHHWQIVPGDPLDKSIVIRPLEPQPAPHLAREFMIKTRRRKGLSEDVSISKFFDDPMLLELAKQDVVLNYPM

SEQ ID NO: 141 - protein, 657 aa, Artificial Sequence
  A0A0B4J1Y5
MRPSGTAGAALLALLAALCPASRALEEKKVCQGTSNKLTQLGTFEDHFLSLQRMFNNCEVVLGNLEITYVQRNYDLSFLKTIQEVAGYVLIALNTVERIPLENLQIIRGNMYYENSYALAVLSNYDANKTGLKELPMRNLQEILHGAVRFSNNPALCNVESIQWRDIVSSDFLSNMSMDFQNHLGSCQKCDPSCPNGSCWGAGEENCQKLTKIICAQQCSGRCRGKSPSDCCHNQCAAGCTGPRESDCLVCRKFRDEATCKDTCPPLMLYNPTTYQMDVNPEGKYSFGATCVKKCPRNYVVTDHGSCVRACGADSYEMEEDGVRKCKKCEGPCRKVCNGIGIGEFKDSLSINATNIKHFKNCTSISGDLHILPVAFRGDSFTHTPPLDPQELDILKTVKEITGFLLIQAWPENRTDLHAFENLEIIRGRTKQHGQFSLAVVSLNITSLGLRSLKEISDGDVIISGNKNLCYANTINWKKLFGTSGQKTKIISNRGENSCKATGQVCHALCSPEGCWGPEPRDCVSCRNVSRGRECVDKCNLLEGEPREFVENSECIQCHPECLPQAMNITCTGRGPDNCIQCAHYIDGPHCVKTCPAGVMGENNTLVWKYADAGHVCHLCHPNCTYGCTGPGLEGCPTNGSYIVSHFPRSFYKMSVH

SEQ ID NO: 142 - protein, 1136 aa, Artificial Sequence
  E7BSV0
MRPSGTAGAALLALLAALCPASRALEEKKVCQGTSNKLTQLGTFEDHFLSLQRMFNNCEVVLGNLEITYVQRNYDLSFLKTIQEVAGYVLIALNTVERIPLENLQIIRGNMYYENSYALAVLSNYDANKTGLKELPMRNLQEILHGAVRFSNNPALCNVESIQWRDIVSSDFLSNMSMDFQNHLGSCQKCDPSCPNGSCWGAGEENCQKLTKIICAQQCSGRCRGKSPSDCCHNQCAAGCTGPRESDCLVCRKFRDEATCKDTCPPLMLYNPTTYQMDVNPEGKYSFGATCVKKCPRNYVVTDHGSCVRACGADSYEMEEDGVRKCKKCEGPCRKVCNGIGIGEFKDSLSINATNIKHFKNCTSISGDLHILPVAFRGDSFTHTPPLDPQELDILKTVKEITGFLLIQAWPENRTDLHAFENLEIIRGRTKQHGQFSLAVVSLNITSLGLRSLKEISDGDVIISGNKNLCYANTINWKKLFGTSGQKTKIISNRGENSCKATGQVCHALCSPEGCWGPEPRDCVSCRNVSRGRECVDKCNLLEGEPREFVENSECIQCHPECLPQAMNITCTGRGPDNCIQCAHYIDGPHCVKTCPAGVMGENNTLVWKYADAGHVCHLCHPNCTYGCTGPGLEGCPTNGPKIPSIATGMVGALLLLLVVALGIGLFMRRRHIVRKRTLRRLLQERELVEPLTPSGEAPNQALLRILKETEFKKIKVLGSGAFGTVYKGLWIPEGEKVKIPVAIKELREATSPKANKEILDEAYVMASVDNPHVCRLLGICLTSTVQLITQLMPFGCLLDYVREHKDNIGSQYLLNWCVQIAKGMNYLEDRRLVHRDLAARNVLVKTPQHVKITDFGLAKLLGAEEKEYHAEGGKVPIKWMALESILHRIYTHQSDVWSYGVTVWELMTFGSKPYDGIPASEISSILEKGERLPQPPICTIDVYMIMVKCWMIDADSRPKFRELIIEFSKMARDPQRYLVIQGDERMHLPSPTDSNFYRALMDEEDMDDVVDADEYLIPQQGFFSSPSTSRTPLLSSLSATSNNSTVACIDRNGLQSCPIKEDSFLQRYSSDPTGALTEDSIDDTFLPVPGEWLVWKQSCSSTSSTHSAAASLQCPSQVLPPASPEGETVADLQTQ

SEQ ID NO: 143 - protein, 49 aa, Artificial Sequence
  L0R6G1
MCATCAIQTAPTGPNKSSLSDFSLPLKLHFLSTISISPFASNKVLTLFI

SEQ ID NO: 144 - protein, 405 aa, Artificial Sequence
  P00533-2
MRPSGTAGAALLALLAALCPASRALEEKKVCQGTSNKLTQLGTFEDHFLSLQRMFNNCEVVLGNLEITYVQRNYDLSFLKTIQEVAGYVLIALNTVERIPLENLQIIRGNMYYENSYALAVLSNYDANKTGLKELPMRNLQEILHGAVRFSNNPALCNVESIQWRDIVSSDFLSNMSMDFQNHLGSCQKCDPSCPNGSCWGAGEENCQKLTKIICAQQCSGRCRGKSPSDCCHNQCAAGCTGPRESDCLVCRKFRDEATCKDTCPPLMLYNPTTYQMDVNPEGKYSFGATCVKKCPRNYVVTDHGSCVRACGADSYEMEEDGVRKCKKCEGPCRKVCNGIGIGEFKDSLSINATNIKHFKNCTSISGDLHILPVAFRGDSFTHTPPLDPQELDILKTVKEITGLS

SEQ ID NO: 145 - protein, 1210 aa, Artificial Sequence [sequence omitted]

SEQ ID NO: 146 - protein, 464 aa, Artificial Sequence [sequence omitted]

SEQ ID NO: 147 - protein, 1091 aa, Artificial Sequence
  Q504U8
MRPSGTAGAALLALLAALCPASRALEEKKVCQGTSNKLTQLGTFEDHFLSLQRMFNNCEVVLGNLEITYVQRNYDLSFLKTIQEVAGYVLIALNTVERIPLENLQIIRGNMYYENSYALAVLSNYDANKTGLKELPMRNLQGQKCDPSCPNGSCWGAGEENCQKLTKIICAQQCSGRCRGKSPSDCCHNQCAAGCTGPRESDCLVCRKFRDEATCKDTCPPLMLYNPTTYQMDVNPEGKYSFGATCVKKCPRNYVVTDHGSCVRACGADSYEMEEDGVRKCKKCEGPCRKVCNGIGIGEFKDSLSINATNIKHFKNCTSISGDLHILPVAFRGDSFTHTPPLDPQELDILKTVKEITGFLLIQAWPENRTDLHAFENLEIIRGRTKQHGQFSLAVVSLNITSLGLRSLKEISDGDVIISGNKNLCYANTINWKKLFGTSGQKTKIISNRGENSCKATGQVCHALCSPEGCWGPEPRDCVSCRNVSRGRECVDKCNLLEGEPREFVENSECIQCHPECLPQAMNITCTGRGPDNCIQCAHYIDGPHCVKTCPAGVMGENNTLVWKYADAGHVCHLCHPNCTYGCTGPGLEGCPTNGPKIPSIATGMVGALLLLLVVALGIGLFMRRRHIVRKRTLRRLLQERELVEPLTPSGEAPNQALLRILKETEFKKIKVLGSGAFGTVYKGLWIPEGEKVKIPVAIKELREATSPKANKEILDEAYVMASVDNPHVCRLLGICLTSTVQLITQLMPFGCLLDYVREHKDNIGSQYLLNWCVQIAKGMNYLEDRRLVHRDLAARNVLVKTPQHVKITDFGLAKLLGAEEKEYHAEGGKVPIKWMALESILHRIYTHQSDVWSYGVTVWELMTFGSKPYDGIPASEISSILEKGERLPQPPICTIDVYMIMVKCWMIDADSRPKFRELIIEFSKMARDPQRYLVIQGDERMHLPSPTDSNFYRALMDEEDMDDVVDADEYLIPQQGFFSSPSTSRTPLLSSLSATSNNSTVACIDRNGLQSCPIKEDSFLQRYSSDPTGALTEDSIDDTFLPVPGEWLVWKQSCSSTSSTHSAAASLQCPSQVLPPASPEGETVADLQTQ

SEQ ID NO: 148 - protein, 71 aa, Artificial Sequence
  Q8NDU8
MRPSGTAGAALLALLAALCPASRALEEKKGKGVSRRLPRRPRIAPRTPQPAQPRTGAPARARAPARPFLFP

SEQ ID NO: 149 - protein, 239 aa, Artificial Sequence
  Q9H6Z9
MPLGHIMRLDLEKIALEYIVPCLHEVGFCYLDNFLGEVVGDCVLERVKQLHCTGALRDGQLAGPRAGVSKRHLRGDQITWIGGNEEGCEAISFLLSLIDRLVLYCGSRLGKYYVKERSKAMVACYPGNGTGYVRHVDNPNGDGRCITCIYYLNKNWDAKLHGGILRIFPEGKSFIADVEPIFDRLLFFWSDRRNPHEVQPSYATRYAMTVWYFDAEERAEAKKKFRNLTRKTESALTED

SEQ ID NO: 150 - protein, 521 aa, Artificial Sequence
  B7Z720
MATSLHEGPTNQLDLLIRAVEASVHSSNAHCTDKTIEAAEALLHMESPTCLRDSRSPEFIHAAMRPDVITETVVEVSTEESEPMDTSPIPTSPDSHEPMKKKKVGRKPKTQQSPISNGSPELGIKKKPREGKGNTTYLWEFLLDLLQDKNTCPRYIKWTQREKGIFKLVDSKAVSKLWGKHKNKPDMNYETMGRALRYYYQRGILAKVEGQRLVYQFKDMPKNIVVIDDDKSETCNEDLAGTTDEKSLERVSLSAESLLKAASSVRSGKNSSPINCSRAEKGVARVVNITSPGHDASSRSPTTTASVSATAAPRTVRVAMQVPVVMTSLGQKISTVAVQSVNAGAPLITSTSPTTATSPKVVIQTIPTVMPASTENGDKITMQPAKIITIPATQLAQCQLQTKSNLTGSGSINIVGTPLAVRALTPVSIAHGTPVMRLSMPTQQASGQTPPRVISAVIKGPEVKSEAVAKKQEHDVKTLQLVEEKPADGNKTVTHVVVVSAPSAIALPVTMKTEGLVTCEK

SEQ ID NO: 151 - protein, 269 aa, Artificial Sequence
  Q54A51
MAAALFVLLGFALLGTHGASGAAGTVFTTVEDLGSKILLTCSLNDSATEVTGHRWLKGGVVLKEDALPGQKTEFKVDSDDQWGEYSCVFLPEPMGTANIQLHGPPRVKAVKSSEHINEGETAMLVCKSESVPPVTDWAWYKITDSEDKALMNGSESRFFVSSSQGRSELHIENLNMEADPGQYRCNGTSSKGSDQAIITLRVRSHLAALWPFLGIVAEVLVLVTIIFIYEKRRKPEDVLDDDDAGSAPLKSSGQHQNDKGKNVRQRNSS

SEQ ID NO: 152 - protein, 314 aa, Artificial Sequence
  P16422
MAPPQVLAFGLLLAAATATFAAAQEECVCENYKLAVNCFVNNNRQCQCTSVGAQNTVICSKLAAKCLVMKAEMNGSKLGRRAKPEGALQNNDGLYDPDCDESGLFKAKQCNGTSMCWCVNTAGVRRTDKDTEITCSERVRTYWIIIELKHKAREKPYDSKSLRTALQKEITTRYQLDPKFITSILYENNVITIDLVQNSSQKTQNDVDIADVAYYFEKDVKGESLFHSKKMDLTVNGEQLDLDPGQTLIYYVDEKAPEFSMQGLKAGVIAVIVVVVIAVVAGIVVLVISRKKRMAKYEKAEIKEMGEMHRELNA

SEQ ID NO: 153 - protein, 976 aa, Artificial Sequence
  P29317
MELQAARACFALLWGCALAAAAAAQGKEVVLLDFAAAGGELGWLTHPYGKGWDLMQNIMNDMPIYMYSVCNVMSGDQDNWLRTNWVYRGEAERIFIELKFTVRDCNSFPGGASSCKETFNLYYAESDLDYGTNFQKRLFTKIDTIAPDEITVSSDFEARHVKLNVEERSVGPLTRKGFYLAFQDIGACVALLSVRVYYKKCPELLQGLAHFPETIAGSDAPSLATVAGTCVDHAVVPPGGEEPRMHCAVDGEWLVPIGQCLCQAGYEKVEDACQACSPGFFKFEASESPCLECPEHTLPSPEGATSCECEEGFFRAPQDPASMPCTRPPSAPHYLTAVGMGAKVELRWTPPQDSGGREDIVYSVTCEQCWPESGECGPCEASVRYSEPPHGLTRTSVTVSDLEPHMNYTFTVEARNGVSGLVTSRSFRTASVSINQTEPPKVRLEGRSTTSLSVSWSIPPPQQSRVWKYEVTYRKKGDSNSYNVRRTEGFSVTLDDLAPDTTYLVQVQALTQEGQGAGSKVHEFQTLSPEGSGNLAVIGGVAVGVVLLLVLAGVGFFIHRRRKNQRARQSPEDVYFSKSEQLKPLKTYVDPHTYEDPNQAVLKFTTEIHPSCVTRQKVIGAGEFGEVYKGMLKTSSGKKEVPVAIKTLKAGYTEKQRVDFLGEAGIMGQFSHHNIIRLEGVISKYKPMMIITEYMENGALDKFLREKDGEFSVLQLVGMLRGIAAGMKYLANMNYVHRDLAARNILVNSNLVCKVSDFGLSRVLEDDPEATYTTSGGKIPIRWTAPEAISYRKFTSASDVWSFGIVMWEVMTYGERPYWELSNHEVMKAINDGFRLPTPMDCPSAIYQLMMQCWQQERARRPKFADIVSILDKLIRAPDSLKTLADFDPRVSIRLPSTSGSEGVPFRTVSEWLESIKMQQYTEHFMAAGYTAIEKVVQMTNDDIKRIGVRLPGHQKRIAYSLLGLKDQVNTVGIPI

SEQ ID NO: 154 - protein, 983 aa, Artificial Sequence
  P29320
MDCQLSILLLLSCSVLDSFGELIPQPSNEVNLLDSKTIQGELGWISYPSHGWEEISGVDEHYTPIRTYQVCNVMDHSQNNWLRTNWVPRNSAQKIYVELKFTLRDCNSIPLVLGTCKETFNLYYMESDDDHGVKFREHQFTKIDTIAADESFTQMDLGDRILKLNTEIREVGPVNKKGFYLAFQDVGACVALVSVRVYFKKCPFTVKNLAMFPDTVPMDSQSLVEVRGSCVNNSKEEDPPRMYCSTEGEWLVPIGKCSCNAGYEERGFMCQACRPGFYKALDGNMKCAKCPPHSSTQEDGSMNCRCENNYFRADKDPPSMACTRPPSSPRNVISNINETSVILDWSWPLDTGGRKDVTFNIICKKCGWNIKQCEPCSPNVRFLPRQFGLTNTTVTVTDLLAHTNYTFEIDAVNGVSELSSPPRQFAAVSITTNQAAPSPVLTIKKDRTSRNSISLSWQEPEHPNGIILDYEVKYYEKQEQETSYTILRARGTNVTISSLKPDTIYVFQIRARTAAGYGTNSRKFEFETSPDSFSISGESSQVVMIAISAAVAIILLTVVIYVLIGRFCGYKSKHGADEKRLHFGNGHLKLPGLRTYVDPHTYEDPTQAVHEFAKELDATNISIDKVVGAGEFGEVCSGRLKLPSKKEISVAIKTLKVGYTEKQRRDFLGEASIMGQFDHPNIIRLEGVVTKSKPVMIVTEYMENGSLDSFLRKHDAQFTVIQLVGMLRGIASGMKYLSDMGYVHRDLAARNILINSNLVCKVSDFGLSRVLEDDPEAAYTTRGGKIPIRWTSPEAIAYRKFTSASDVWSYGIVLWEVMSYGERPYWEMSNQDVIKAVDEGYRLPPPMDCPAALYQLMLDCWQKDRNNRPKFEQIVSILDKLIRNPGSLKIITSAAARPSNLLLDQSNVDITTFRTTGDWLNGVWTAHCKEIFTGVEYSSCDTIAKISTDDMKKVGVTVVGPQKKIISSIKALETQSKNGPVPV

SEQ ID NO: 155 - protein, 983 aa, Artificial Sequence [sequence omitted]

SEQ ID NO: 156 - protein, 462 aa, Artificial Sequence
  B3KWG5
MPMSTILPVTSPCLPATGVTVWELMTFGAEPYAGLRLAEVPDLLEKGERLAQPQICTIDVYMVMVKCWMIDENIRPTFKELANEFTRMARDPPRYLVIKRESGPGIAPGPEPHGLTNKKLEEVELEPELDLDLDLEAEEDNLATTTLGSALSLPVGTLNRPRGSQSLLSPSSGYMPMNQGNLGESCQESAVSGSSERCPRPVSLHPMPRGCLASESSEGHVTGSEAELQEKVSMCRSRSRSRSPRPRGDSAYHSQRHSLLTPVTPLSPPGLEEEDVNGYVMPDTHLKGTPSSREGTLSSVGLSSVLGTEEEDEDEEYEYMNRRRRHSPPHPPRPSSLEELGYEYMDVGSDLSASLGSTQSCPLHPVPIMPTAGTTPDEDYEYMNRQRDGGGPGGDYAAMGACPASEQGYEEMRAFQGPGHQAPHVHYARLKTLRSLEATDSAFDNPDYWHSRLFPKANAQRT

SEQ ID NO: 157 - protein, 921 aa, Artificial Sequence
  B4DGQ7
MRANDALQVLGLLFSLARGSEVGNSQAVCPGTLNGLSVTGDAENQYQTLYKLYERCEVVMGNLEIVLTGHNADLSFLQWIREVTGYVLVAMNEFSTLPLPNLRVVRGTQVYDGKFAIFVMLNYNTNSSHALRQLRLTQLTEILSGGVYIEKNDKLCHMDTIDWRDIVRDRDAEIVVKDNGRSCPPCHEVCKGRCWGPGSEDCQTLTKTICAPQCNGHCFGPNPNQCCHDECAGGCSGPQDTDCFACRHFNDSGACVPRCPQPLVYNKLTFQLEPNPHTKYQYGGVCVASCPHNFVVDQTSCVRACPPDKMEVDKNGLKMCEPCGGLCPKACEGTGSGSRFQTVDSSNIDGFVNCTKILGNLDFLITGLNGDPWHKIPALDPEKLNVFRTVREITGYLNIQSWPPHMHNFSVFSNLTTIGGRSLYNRGFSLLIMKNLNVTSLGFRSLKEISAGRIYISANRQLCYHHSLNWTKVLRGPTEERLDIKHNRPRRDCVAEGKVCDPLCSSGGCWGPGPGQCLSCRNYSRGGVCVTHCNFLNGEPREFAHEAECFSCHPECQPMEGTATCNGSGSDTCAQCAHFRDGPHCVSSCPHGVLGAKGPIYKYPDVQNECRPCHENCTQGCKGPELQDCLGQTLVLIGKTHLTMALTVIAGLVVIFMMLGGTFLYWRGRRIQNKRAMRRYLERGESIEPLDPSEKANKVLARIFKETELRKLKVLGSGVFGTVHKGVWIPEGESIKIPVCIKVIEDKSGRQSFQAVTDHMLAIGSLDHAHIVRLLGLCPGSSLQLVTQYLPLGSLLDHVRQHRGALGPQLLLNWGVQIAKGMYYLEEHGMVHRNLAARNVLLKSPSQVQVADFGVADLLPPDDKQLLYSEAKTPIKWMALESIHFGKYTHQSDVWSYGQCIWMPSLPSLAPVSNLPFETPS

SEQ ID NO: 158 - protein, 1308 aa, Artificial Sequence
  Q15303
MKPATGLWVWVSLLVAAGTVQPSDSQSVCAGTENKLSSLSDLEQQYRALRKYYENCEVVMGNLEITSIEHNRDLSFLRSVREVTGYVLVALNQFRYLPLENLRIIRGTKLYEDRYALAIFLNYRKDGNFGLQELGLKNLTEILNGGVYVDQNKFLCYADTIHWQDIVRNPWPSNLTLVSTNGSSGCGRCHKSCTGRCWGPTENHCQTLTRTVCAEQCDGRCYGPYVSDCCHRECAGGCSGPKDTDCFACMNFNDSGACVTQCPQTFVYNPTTFQLEHNFNAKYTYGAFCVKKCPHNFVVDSSSCVRACPSSKMEVEENGIKMCKPCTDICPKACDGIGTGSLMSAQTVDSSNIDKFINCTKINGNLIFLVTGIHGDPYNAIEAIDPEKLNVFRTVREITGFLNIQSWPPNMTDFSVFSNLVTIGGRVLYSGLSLLILKQQGITSLQFQSLKEISAGNIYITDNSNLCYYHTINWTTLFSTINQRIVIRDNRKAENCTAEGMVCNHLCSSDGCWGPGPDQCLSCRRFSRGRICIESCNLYDGEFREFENGSICVECDPQCEKMEDGLLTCHGPGPDNCTKCSHFKDGPNCVEKCPDGLQGANSFIFKYADPDRECHPCHPNCTQGCNGPTSHDCIYYPWTGHSTLPQHARTPLIAAGVIGGLFILVIVGLTFAVYVRRKSIKKKRALRRFLETELVEPLTPSGTAPNQAQLRILKETELKRVKVLGSGAFGTVYKGIWVPEGETVKIPVAIKILNETTGPKANVEFMDEALIMASMDHPHLVRLLGVCLSPTIQLVTQLMPHGCLLEYVHEHKDNIGSQLLLNWCVQIAKGMMYLEERRLVHRDLAARNVLVKSPNHVKITDFGLARLLEGDEKEYNADGGKMPIKWMALECIHYRKFTHQSDVWSYGVTIWELMTFGGKPYDGIPTREIPDLLEKGERLPQPPICTIDVYMVMVKCWMIDADSRPKFKELAAEFSRMARDPQRYLVIQGDDRMKLPSPNDSKFFQNLLDEEDLEDMMDAEEYLVPQAFNIPPPIYTSRARIDSNRSEIGHSPPPAYTPMSGNQFVYRDGGFAAEQGVSVPYRAPTSTIPEAPVAQGATAEIFDDSCCNGTLRKPVAPHVQEDSSTQRYSADPTVFAPERSPRGELDEEGYMTPMRDKPKQEYLNPVEENPFVSRRKNGDLQALDNPEYHNASNGPPKAEDEYVNEPLYLNTFANTLGKAEYLKNNILSMPEKAKKAFDNPDYWNHSLPPRSTLQHPDYLQEYSTKYFYKQNGRIRPIVAENPEYLSEFSLKPGTVLPPPPYRHRNTVV

SEQ ID NO: 159 - protein, 486 aa, Artificial Sequence
  P11308
MIQTVPDPAAHIKEALSVVSEDQSLFECAYGTPHLAKTEMTASSSSDYGQTSKMSPRVPQQDWLSQPPARVTIKMECNPSQVNGSRNSPDECSVAKGGKMVGSPDTVGMNYGSYMEEKHMPPPNMTTNERRVIVPADPTLWSTDHVRQWLEWAVKEYGLPDVNILLFQNIDGKELCKMTKDDFQRLTPSYNADILLSHLHYLRETPLPHLTSDDVDKALQNSPRLMHARNTGGAAFIFPNTSVYPEATQRITTRPDLPYEPPRRSAWTGHGHPTPQSKAAQPSPSTVPKTEDQRPQLDPYQILGPTSSRLANPGSGQIQLWQFLLELLSDSSNSSCITWEGTNGEFKMTDPDEVARRWGERKSKPNMNYDKLSRALRYYYDKNIMTKVHGKRYAYKFDFHGIAQALQPHPPESSLYKYPSDLPYMGSYHAHPQKMNFVAPHPPALPVTSSSFFAAPNPYWNSPTGGIYPNTRLPTSHMPSHLGTYY

SEQ ID NO: 160 - protein, 452 aa, Artificial Sequence
  P41212
MSETPAQCSIKQERISYTPPESPVPSYASSTPLHVPVPRALRMEEDSIRLPAHLRLQPIYWSRDDVAQWLKWAENEFSLRPIDSNTFEMNGKALLLLTKEDFRYRSPHSGDVLYELLQHILKQRKPRILFSPFFHPGNSIHTQPEVILHQNHEEDNCVQRTPRPSVDNVHHNPPTIELLHRSRSPITTNHRPSPDPEQRPLRSPLDNMIRRLSPAERAQGPRPHQENNHQESYPLSVSPMENNHCPASSESHPKPSSPRQESTRVIQLMPSPIMHPLILNPRHSVDFKQSRLSEDGLHREGKPINLSHREDLAYMNHIMVSVSPPEEHAMPIGRIADCRLLWDYVYQLLSDSRYENFIRWEDKESKIFRIVDPNGLARLWGNHKNRTNMTYEKMSRALRHYYKLNIIRKEPGQRLLFRFMKTPDEIMSGRTDRLEHLESQELDEQIYQEDEC

SEQ ID NO: 161 - protein, 656 aa, Artificial Sequence
  Q01844
MASTDYSTYSQAAAQQGYSAYTAQPTQGYAQTTQAYGQQSYGTYGQPTDVSYTQAQTTATYGQTAYATSYGQPPTGYTTPTAPQAYSQPVQGYGTGAYDTTTATVTTTQASYAAQSAYGTQPAYPAYGQQPAATAPTRPQDGNKPTETSQPQSSTGGYNQPSLGYGQSNYSYPQVPGSYPMQPVTAPPSYPPTSYSSTQPTSYDQSSYSQQNTYGQPSSYGQQSSYGQQSSYGQQPPTSYPPQTGSYSQAPSQYSQQSSSYGQQSSFRQDHPSSMGVYGQESGGFSGPGENRSMSGPDNRGRGRGGFDRGGMSRGGRGGGRGGMGSAGERGGFNKPGGPMDEGPDLDLGPPVDPDEDSDNSAIYVQGLNDSVTLDDLADFFKQCGVVKMNKRTGQPMIHIYLDKETGKPKGDATVSYEDPPTAKAAVEWFDGKDFQGSKLKVSLARKKPPMNSMRGGLPPREGRGMPPPLRGGPGGPGGPGGPMGRMGGRGGDRGGFPPRGPRGSRGNPSGGGNVQHRAGDWQCPNPGCGNQNFAWRTECNQCKAPKPEGFLPPPFPPPGGDRGRGGPGGMRGGRGGLMDRGGPGGMFRGGRGGDRGGFRGGRGMDRGGFGGGRRGGPGGPPGPLMEQMGGRRGGRGGPGKMDKGEHRQERRDRPY

SEQ ID NO: 162 - protein, 665 aa, Artificial Sequence
  F2YMM1
MGQTGKKSEKGPVCWRKRVKSEYMRLRQLKRFRRADEVKSMFSSNRQKILERTEILNQEWKQRRIQPVHILTSVSSLRGTREVEDETVLHNIPYMGDEVLDQDGTFIEELIKNYDGKVHGDRECGFINDEIFVELVNALGQYNDDDDDDDGDDPEEREEKQKDLEDHRDDKESRPPRKFPSDKIFEAISSMFPDKGTAEELKEKYKELTEQQLPGALPPECTPNIDGPNAKSVQREQSLHSFHTLFCRRCFKYDCFLHPFHATPNTYKRKNTETALDNKPCGPQCYQHLEGAKEFAAALTAERIKTPPKRPGGRRRGRLPNNSSRPSTPTINVLESKDTDSDREAGTETGGENNDKEEEEKKDETSSSSEANSRCQTPIKMKPNIEPPENVEWSGAEASMFRVLIGTYYDNFCAIARLIGTKTCRQVYEFRVKESSIIAPAPAEDVDTPPRKKKRKHRLWAAHCRKIQLKKGQNRFPGCRCKAQCNTKQCPCYLAVRECDPDLCLTCGAADHWDSKNVSCKNCSIQRGSKKHLLLAPSDVAGWGIFIKDPVQKNEFISEYCGEIISQDEADRRGKVYDKYMCSFLFNLNNDFVVDATRKGNKIRFANHSVNPNCYAKVMMVNGDHRIGIFAKRAIQTGEELFFDYRYSQADALKYVGIEREMEIP

SEQ ID NO: 163 - protein, 334 aa, Artificial Sequence
  G3XAL2
MGQTGKKSEKGPVCWRKRVKSEYMRLRQLKRFRRADEVKSMFSSNRQKILERTEILNQEWKQRRIQPVHILTSVSSLRGTRECSVTSDLDFPTQVIPLKTLNAVASVPIMYSWSPLQQNFMVEDETVLHNIPYMGDEVLDQDGTFIEELIKNYDGKVHGDRECGFINDEIFVELVNALGQYNDDDDDDDGDDPEEREEKQKDLEDHRDDKESRPPRKFPSDKIFEAISSMFPDKGTAEELKEKYKELTEQQLPGALPPECTPNIDGPNAKSVQREQSLHSFHTLFCRRCFKYDCFLHPFHATPNTYKRKNTETALDNKPCGPQCYQHLPLLPRN

SEQ ID NO: 164 - protein, 64 aa, Artificial Sequence
  L0R855
MPLVNIMMMTMMMMETILKKEKKSRKIWRITEMIKKAAHLGNFLLIKFLKPFPQCFQIRAQQKN

SEQ ID NO: 165 - protein, 746 aa, Artificial Sequence
  Q15910
MGQTGKKSEKGPVCWRKRVKSEYMRLRQLKRFRRADEVKSMFSSNRQKILERTEILNQEWKQRRIQPVHILTSVSSLRGTRECSVTSDLDFPTQVIPLKTLNAVASVPIMYSWSPLQQNFMVEDETVLHNIPYMGDEVLDQDGTFIEELIKNYDGKVHGDRECGFINDEIFVELVNALGQYNDDDDDDDGDDPEEREEKQKDLEDHRDDKESRPPRKFPSDKIFEAISSMFPDKGTAEELKEKYKELTEQQLPGALPPECTPNIDGPNAKSVQREQSLHSFHTLFCRRCFKYDCFLHPFHATPNTYKRKNTETALDNKPCGPQCYQHLEGAKEFAAALTAERIKTPPKRPGGRRRGRLPNNSSRPSTPTINVLESKDTDSDREAGTETGGENNDKEEEEKKDETSSSSEANSRCQTPIKMKPNIEPPENVEWSGAEASMFRVLIGTYYDNFCAIARLIGTKTCRQVYEFRVKESSIIAPAPAEDVDTPPRKKKRKHRLWAAHCRKIQLKKDGSSNHVYNYQPCDHPRQPCDSSCPCVIAQNFCEKFCQCSSECQNRFPGCRCKAQCNTKQCPCYLAVRECDPDLCLTCGAADHWDSKNVSCKNCSIQRGSKKHLLLAPSDVAGWGIFIKDPVQKNEFISEYCGEIISQDEADRRGKVYDKYMCSFLFNLNNDFVVDATRKGNKIRFANHSVNPNCYAKVMMVNGDHRIGIFAKRAIQTGEELFFDYRYSQADALKYVGIEREMEIP

SEQ ID NO: 166 - protein, 707 aa, Artificial Sequence
  S4S3R8
MGQTGKKSEKGPVCWRKRVKSEYMRLRQLKRFRRADEVKSMFSSNRQKILERTEILNQEWKQRRIQPVHILTSVSSLRGTREVEDETVLHNIPYMGDEVLDQDGTFIEELIKNYDGKVHGDRECGFINDEIFVELVNALGQYNDDDDDDDGDDPEEREEKQKDLEDHRDDKESRPPRKFPSDKIFEAISSMFPDKGTAEELKEKYKELTEQQLPGALPPECTPNIDGPNAKSVQREQSLHSFHTLFCRRCFKYDCFLHPFHATPNTYKRKNTETALDNKPCGPQCYQHLEGAKEFAAALTAERIKTPPKRPGGRRRGRLPNNSSRPSTPTINVLESKDTDSDREAGTETGGENNDKEEEEKKDETSSSSEANSRCQTPIKMKPNIEPPENVEWSGAEASMFRVLIGTYYDNFCAIARLIGTKTCRQVYEFRVKESSIIAPAPAEDVDTPPRKKKRKHRLWAAHCRKIQLKKDGSSNHVYNYQPCDHPRQPCDSSCPCVIAQNFCEKFCQCSSECQNRFPGCRCKAQCNTKQCPCYLAVRECDPDLCLTCGAADHWDSKNVSCKNCSIQRGSKKHLLLAPSDVAGWGIFIKDPVQKNEFISEYCGEIISQDEADRRGKVYDKYMCSFLFNLNNDFVVDATRKGNKIRFANHSVNPNCYAKVMMVNGDHRIGIFAKRAIQTGEELFFDYRYSQADALKYVGIEREMEIP

SEQ ID NO: 167 - protein, 132 aa, Artificial Sequence
  O15540
MVEAFCATWKLTNSQNFDEYMKALGVGFATRQVGNVTKPTVIISQEGDKVVIRTLSTFKNTEISFQLGEEFDETTADDRNCKSVVSLDGDKLVHIQKWDGKETNFVREIKDGKMVMTLTFGDVVAVRHYEKA

SEQ ID NO: 168 - protein, 254 aa, Artificial Sequence
  P08637
MWQLLLPTALLLLVSAGMRTEDLPKAVVFLEPQWYRVLEKDSVTLKCQGAYSPEDNSTQWFHNESLISSQASSYFIDAATVDDSGEYRCQTNLSTLSDPVQLEVHIGWLLLQAPRWVFKEEDPIHLRCHSWKNTALHKVTYLQNGKGRKYFHHNSDFYIPKATLKDSGSYFCRGLFGSKNVSSETVNITITQGLAVSTISSFFPPGYQVSFCLVMVLLFAVDTGLYFSVKTNIRSSTRDWKDHKFKWRKDPQDK

SEQ ID NO: 169 - protein, 290 aa, Artificial Sequence
  CCDS1232.1
MGGGAGERLFTSSCLVGLVPLGLRISLVTCPLQCGIMWQLLLPTALLLLVSAGMRTEDLPKAVVFLEPQWYRVLEKDSVTLKCQGAYSPEDNSTQWFHNESLISSQASSYFIDAATVDDSGEYRCQTNLSTLSDPVQLEVHIGWLLLQAPRWVFKEEDPIHLRCHSWKNTALHKVTYLQNGKGRKYFHHNSDFYIPKATLKDSGSYFCRGLFGSKNVSSETVNITITQGLAVSTISSFFPPGYQVSFCLVMVLLFAVDTGLYFSVKTNIRSSTRDWKDHKFKWRKDPQDK

SEQ ID NO: 170 - protein, 268 aa, Artificial Sequence
  P12034
MSLSFLLLLFFSHLILSAWAHGEKRLAPKGQPGPAATDRNPRGSSSRQSSSSAMSSSSASSSPAASLGSQGSGLEQSSFQWSPSGRRTGSLYCRVGIGFHLQIYPDGKVNGSHEANMLSVLEIFAVSQGIVGIRGVFSNKFLAMSKKGKLHASAKFTDDCKFRERFQENSYNTYASAIHRTEKTGREWYVALNKRGKAKRGCSPRVKPQHISTHFLPRFKQSEQPELSFTVTVPEKKKPPSPIKPKIPLSAPRKNTNSVKYRLKFRFG

SEQ ID NO: 171 - protein, 38 aa, Artificial Sequence
  Q60518
MSTRCGEAGRARGTQPHRGYRAQNQPYKMHLGPPRLEE

SEQ ID NO: 172 - protein, 821 aa, Artificial Sequence
  P21802
MVSWGRFICLVVVTMATLSLARPSFSLVEDTTLEPEEPPTKYQISQPEVYVAAPGESLEVRCLLKDAAVISWTKDGVHLGPNNRTVLIGEYLQIKGATPRDSGLYACTASRTVDSETWYFMVNVTDAISSGDDEDDTDGAEDFVSENSNNKRAPYWTNTEKMEKRLHAVPAANTVKFRCPAGGNPMPTMRWLKNGKEFKQEHRIGGYKVRNQHWSLIMESVVPSDKGNYTCVVENEYGSINHTYHLDVVERSPHRPILQAGLPANASTVVGGDVEFVCKVYSDAQPHIQWIKHVEKNGSKYGPDGLPYLKVLKAAGVNTTDKEIEVLYIRNVTFEDAGEYTCLAGNSIGISFHSAWLTVLPAPGREKEITASPDYLEIAIYCIGVFLIACMVVTVILCRMKNTTKKPDFSSQPAVHKLTKRIPLRRQVTVSAESSSSMNSNTPLVRITTRLSSTADTPMLAGVSEYELPEDPKWEFPRDKLTLGKPLGEGCFGQVVMAEAVGIDKDKPKEAVTVAVKMLKDDATEKDLSDLVSEMEMMKMIGKHKNIINLLGACTQDGPLYVIVEYASKGNLREYLRARRPPGMEYSYDINRVPEEQMTFKDLVSCTYQLARGMEYLASQKCIHRDLAARNVLVTENNVMKIADFGLARDINNIDYYKKTTNGRLPVKWMAPEALFDRVYTHQSDVWSFGVLMWEIFTLGGSPYPGIPVEELFKLLKEGHRMDKPANCTNELYMMMRDCWHAVPSQRPTFKQLVEDLDRILTLTTNEEYLDLSQPLEQYSPSYPDTRSSCSSGDDSVFSPDPMPYEPCLPQYPHINGSVKT

SEQ ID NO: 173 - protein, 635 aa, Artificial Sequence
  A0A024R5I6
MAPPLLLLLLASGAAACPLPCVCQNLSESLSTLCAHRGLLFVPPNVDRRTVELRLADNFIQALGPPDFRNMTGLVDLTLSRNAITRIGARAFGDLESLRSLHLDGNRLVELGTGSLRGPVNLQHLILSGNQLGRIAPGAFDDFLESLEDLDLSYNNLRQVPWAGIGAMPALHTLNLDHNLIDALPPGAFAQLGQLSRLDLTSNRLATLAPDPLFSRGRDAEASPAPLVLSFSGNPLHCNCELLWLRRLARPDDLETCASPPGLAGRYFWAVPEGEFSCEPPLIARHTQRLWVLEGQRATLRCRALGDPAPTMHWVGPDDRLVGNSSRARAFPNGTLEIGVTGAGDAGGYTCIATNPAGEATARVELRVLALPHGGNSSAEGGRPGPSDIAASARTAAEGEGTLESEPAVQVTEVTATSGLVSWGPGRPADPVWMFQIQYNSSEDETLIYRIVPASSHHFLLKHLVPGADYDLCLLALSPAAGPSDLTATRLLGCAHFSTLPASPLCHALQAHVLGGTLTVAVGGVLVAALLVFTVALLVRGRGAGNGRLPLKLSHVQSQTNGGPSPTPKAHPPRSPPPRPQRSCSLDLGDAGCYGYARRLGGAWARRSHSVHGGLLGAGCRGVGGSAERLEESVV

SEQ ID NO: 174 - protein, 1098 aa, Artificial Sequence
  A0A024RB01
MPPRQPPRQAGGGLSREFGKLLPALSHSPLGGLGSGSGSVAPGQGRAGAMGSRTPESPLHAVQLRWGPRRRPPLLPLLLLLLPPPPRVGGFNLDAEAPAVLSGPPGSFFGFSVEFYRPGTDGVSVLVGAPKANTSQPGVLQGGAVYLCPWGASPTQCTPIEFDSKGSRLLESSLSSSEGEEPVEYKSLQWFGATVRAHGSSILACAPLYSWRTEKEPLSDPVGTCYLSTDNFTRILEYAPCRSDFSWAAGQGYCQGGFSAEFTKTGRVVLGGPGSYFWQGQILSATQEQIAESYYPEYLINLVQGQLQTRQASSIYDDSYLGYSVAVGEFSGDDTEDFVAGVPKGNLTYGYVTILNGSDIRSLYNFSGEQMASYFGYAVAATDVNGDGLDDLLVGAPLLMDRTPDGRPQEVGRVYVYLQHPAGIEPTPTLTLTGHDEFGRFGSSLTPLGDLDQDGYNDVAIGAPFGGETQQGVVFVFPGGPGGLGSKPSQVLQPLWAASHTPDFFGSALRGGRDLDGNGYPDLIVGSFGVDKAVVYRGRPIVSASASLTIFPAMFNPEERSCSLEGNPVACINLSFCLNASGKHVADSIGFTVELQLDWQKQKGGVRRALFLASRQATLTQTLLIQNGAREDCREMKIYLRNESEFRDKLSPIHIALNFSLDPQAPVDSHGLRPALHYQSKSRIEDKAQILLDCGEDNICVPDLQLEVFGEQNHVYLGDKNALNLTFHAQNVGEGGAYEAELRVTAPPEAEYSGLVRHPGNFSSLSCDYFAVNQSRLLVCDLGNPMKAGASLWGGLRFTVPHLRDTKKTIQFDFQILSKNLNNSQSDVVSFRLSVEAQAQVTLNGVSKPEAVLFPVSDWHPRDQPQKEEDLGPAVHHVYELINQGPSSISQGVLELSCPQALEGQQLLYVTRVTGLNCTTNHPINPKGLELDPEGSLHHQQKREAPSRSSASSGPQILKCPEAECFRLRCELGPLHQQESQSLQLHFRVWAKTFLQREHQPFSLQCEAVYKALKMPYRILPRQLPQKERQVATAVQWTKAEGSYGVPLWIIILAILFGLLLLGLLIYILYKLGFFKRSLPYGTAMEKAQLKPPATSDA

SEQ ID NO: 175 - protein, 1198 aa, Artificial Sequence
  A0A024RDT9
MAEHPPLLDTTQILSSDISLLSAPIVSADGTQQVILVQVNPGEAFTIRREDGQFQCITGPAQVPMMSPNGSVPPIYVPPGYAPQVIEDNGVRRVVVVPQAPEFHPGSHTVLHRSPHPPLPGFIPVPTMMPPPPRHMYSPVTGAGDMTTQYMPQYQSSQVYGDVDAHSTHGRSNFRDERSSKTYERLQKKLKDRQGTQKDKMSSPPSSPQKCPSPINEHNGLIKGQIAGGINTGSAKIKSGKGKGGTQVDTEIEEKDEETKAFEALLSNIVKPVASDIQARTVVLTWSPPSSLINGETDESSVPELYGYEVLISSTGKDGKYKSVYVGEETNITLNDLKPAMDYHAKVQAEYNSIKGTPSEAEIFTTLSCEPDIPNPPRIANRTKNSLTLQWKAPSDNGSKIQNFVLEWDEGKGNGEFCQCYMGSQKQFKITKLSPAMGCKFRLSARNDYGTSGFSEEVLYYTSGCAPSMPASPVLTKAGITWLSLQWSKPSGTPSDEGISYILEMEEETSGYGFKPKYDGEDLAYTVKNLRRSTKYKFKVIAYNSEGKSNPSEVVEFTTCPDKPGIPVKPSVKGKIHSHSFKITWDPPKDNGGATINKYVVEMAEGSNGNKWEMIYSGATREHLCDRLNPGCFYRLRVYCISDGGQSAVSESLLVQTPAVPPGPCLPPRLQGRPKAKEIQLRWGPPLVDGGSPISCYSVEMSPIEKDEPREVYQGSEVECTVSSLLPGKTYSFRLRAANKMGFGPFSEKCDITTAPGPPDQCKPPQVTCRSATCAQVNWEVPLSNGTDVTEYRLEWGGVEGSMQICYCGPGLSYEIKGLSPATTYYCRVQALSVVGAGPFSEVVACVTPPSVPGIVTCLQEISDDEIENPHYSPSTCLAISWEKPCDHGSEILAYSIDFGDKQSLTVGKVTSYIINNLQPDTTYRIRIQALNSLGAGPFSHMIKLKTKPLPPDPPRLECVAFSHQNLKLKWGEGTPKTLSTDSIQYHLQMEDKNGRFVSLYRGPCHTYKVQRLNESTSYKFCIQACNEAGEGPLSQEYIFTTPKSVPAALKAPKIEKVNDHICEITWECLQPMKGDPVIYSLQVMLGKDSEFKQIYKGPDSSFRYSSLQLNCEYRFRVCAIRQCQDSLGHQDLVGPYSTTVLFISQRTEPPASTNRDTVESTRTRRALSDEQCAAVILVLFAFFSILIAFIIQYFVIK

SEQ ID NO: 176 - protein, 1142 aa, Artificial Sequence
  A0A024RDV5
MSGPAQVPMMSPNGSVPPIYVPPGYAPQVIEDNGVRRVVVVPQAPEFHPGSHTVLHRSPHPPLPGFIPVPTMMPPPPRHMYSPVTGAGDMTTQYMPQYQSSQVYGDVDAHSTHGRSNFRDERSSKTYERLQKKLKDRQGTQKDKMSSPPSSPQKCPSPINEHNGLIKGQIAGGINTGSAKIKSGKGKGGTQVDTEIEEKDEETKAFEALLSNIVKPVASDIQARTVVLTWSPPSSLINGETDESSVPELYGYEVLISSTGKDGKYKSVYVGEETNITLNDLKPAMDYHAKVQAEYNSIKGTPSEAEIFTTLSCEPDIPNPPRIANRTKNSLTLQWKAPSDNGSKIQNFVLEWDEGKGNGEFCQCYMGSQKQFKITKLSPAMGCKFRLSARNDYGTSGFSEEVLYYTSGCAPSMPASPVLTKAGITWLSLQWSKPSGTPSDEGISYILEMEEETSGYGFKPKYDGEDLAYTVKNLRRSTKYKFKVIAYNSEGKSNPSEVVEFTTCPDKPGIPVKPSVKGKIHSHSFKITWDPPKDNGGATINKYVVEMAEGSNGNKWEMIYSGATREHLCDRLNPGCFYRLRVYCISDGGQSAVSESLLVQTPAVPPGPCLPPRLQGRPKAKEIQLRWGPPLVDGGSPISCYSVEMSPIEKDEPREVYQGSEVECTVSSLLPGKTYSFRLRAANKMGFGPFSEKCDITTAPGPPDQCKPPQVTCRSATCAQVNWEVPLSNGTDVTEYRLEWGGVEGSMQICYCGPGLSYEIKGLSPATTYYCRVQALSVVGAGPFSEVVACVTPPSVPGIVTCLQEISDDEIENPHYSPSTCLAISWEKPCDHGSEILAYSIDFGDKQSLTVGKVTSYIINNLQPDTTYRIRIQALNSLGAGPFSHMIKLKTKPLPPDPPRLECVAFSHQNLKLKWGEGTPKTLSTDSIQYHLQMEDKNGRFVSLYRGPCHTYKVQRLNESTSYKFCIQACNEAGEGPLSQEYIFTTPKSVPAALKAPKIEKVNDHICEITWECLQPMKGDPVIYSLQVMLGKDSEFKQIYKGPDSSFRYSSLQLNCEYRFRVCAIRQCQDSLGHQDLVGPYSTTVLFISQRTEPPASTNRDTVESTRTRRALSDEQCAAVILVLFAFFSILIAFIIQYFVIK

SEQ ID NO: 177 - protein, 339 aa, Artificial Sequence
  A6NH44
MPPSKPHPPVVGKVTHHSIELYWDLEKKAKRQGPQEQWFRFSIEEEDPKMHTYGIIYTGYATKHVVEGLEPRTLYRFRLKVTSPSGECEYSPLVSVSTTREPISSEHLHRAVSVNDEDLLVRILQGGRVKVDVPNKFGFTALMVAAQKGYTRLVKILVSNGTDVNLKNGSGKDSLMLACYAGHLDVVKYLRRHGASWQARDLGGCTALHWAADGGHCSVIEWMIKDGCEVDVVDTGSGWTPLMRVSAVSGNQRVASLLIDAGANVNVKDRNGKTPLMVAVLNNHEELVQLLLDKGADASVKNEFGKGVLEMARVFDRQSVVSLLEERKKKQRPKKSCVC

SEQ ID NO: 178 - protein, 1049 aa, Artificial Sequence [sequence omitted]

SEQ ID NO: 179 - protein, 1049 aa, Artificial Sequence [sequence omitted]

SEQ ID NO: 180 - protein, 466 aa, Artificial Sequence
  B3KXM5
MLSLRQRMMHARFRNPLSRQPARPSYRQGYNGRPNVEGKVLPGSNGKPNGQRIINGPQGTKWVVDLDRGLVLNAEGRYLQDSHGNPLRIKLGGDGRTIVDLEGTPVVSPDGLPLFGQGRHGTPLANAQDKPILSLGGKPLVGLEVIKKTTHPPTTTMQPTTTTTPLPTTTTPRPTTATTRRTTTRRPTTTVRTTTRTTTTTTPKPTTPIPTCPPGTLERHDDDGNLIMSSNGIPECYAEEDEFSGLETDTAVPTEEAYVIYDEDYEFETSRPPTTTEPSTTATTPRVIPEEGAISSFPEEEFDLAGRKRFVAPYVTYLNKDPSAPCSLTDALDHFQVDSLDEIIPNDLKKSDLPPQHAPRNITVVAVEGCHSFVIVDWDKATPGDVVTGYLVYSASYEDFIRNKWSTQASSVTHLPIENLKPNTRYYFKVQAQNPHGYGPISPSVSFVTESDNPLLVVRPPGGEPI

SEQ ID NO: 181 - protein, 156 aa, Artificial Sequence
  B4DIC5
MEEQRNEEIQSFIYSLKQMLLNVEANSAKVQEDLEAEFQSLFSLLEELKEGMLMKIKQDRASRTYELQNQLAACTRALESSEELLETANQTLQAMDSEDFPQAAKQIKDGVTMAPAFRLSLKAKVSDNMSHLMVDFAQERQMLQALKFLPGERGTH

SEQ ID NO: 182 - protein, 306 aa, Artificial Sequence
  B4DN21
MIFEEHGFRRTTPPTTATPIRHRPRPYPPNVGQEALSQTTISWAPFQDTSEYIISCHPVGTDEEPLQFRVPGTSTSATLTGLTRGATYNIIVEALKDQQRHKVREEVVTVGNSVNEGLNQPTDDSCFDPYTVSHYAVGDEWERMSESGFKLLCQCLGFGSGHFRCDSSRWCHDNGVNYKIGEKWDRQGENGQMMSCTCLGNGKGEFKCDPHEATCYDDGKTYHVGEQWQKEYLGAICSCTCFGGQRGWRCDNCRRPGGEPSPEGTTGQSYNQYSQRYHQRTNTNVNCPIECFMPLDVQADREDSRE

SEQ ID NO: 183 - protein, 639 aa, Artificial Sequence [sequence omitted]

SEQ ID NO: 184 - protein, 337 aa, Artificial Sequence [sequence omitted]

SEQ ID NO: 185 - protein, 1014 aa, Artificial Sequence [sequence omitted]

SEQ ID NO: 186 - protein, 894 aa, Artificial Sequence [sequence omitted]

SEQ ID NO: 187 - protein, 383 aa, Artificial Sequence
  B7Z3W5
MASAFRLSLKPKVSDNMTHLMVDFSQERQMLQTLKFLPVPKAPEIDPVECLVADNSVTVAWRMPEEDNKIDHFILEHRKTNFDGLPRVKDERCWEIIDNIKGTEYTLSGLKFDSKYMNFRVRACNKAVAGEYSDPVTLETKALNFNLDNSSSHLNLKVEDTCVEWDPTGGKGQESKIKGKENKGSVHVTSLKKHTSGTPSPKRTSVGSRPPAVRGSRDRFTGESYTVLGDTAIESGQHYWEVKAQKDCKSYSVGVAYKTLGKFDQLGKTNTSWCIHVNNWLQNTFAAKHNNKVKALDVTVPEKIGVFCDFDGGQLSFYDANSKQLLYSFKTKFTQPVLPGFMVWCGGLSLSTGMQVPSAVRTLQKSENGMTGSASSLNNVVTQ

SEQ ID NO: 188 - protein, 146 aa, Artificial Sequence
  B7Z939
MPPSKPHPPVVGKVTHHSIELYWDLEKKAKRQGPQEQWFRFSIEEEDPKMHTYGIIYTGYATKHVVEGLEPRTLYRFRLKVTSPSGECEYSPLVSVSTTSEYSDRPHSPLSRSMEMTSNLEKIFCLSFGLTRSRNDTIFKHCNNIC

SEQ ID NO: 189 - protein, 684 aa, Artificial Sequence
  G5E9X3
MAEHPPLLDTTQILSSDISLLSAPIVSADGTQQVILVQVNPGEAFTIRREDGQFQCITGPAQVPMMSPNGSVPPIYVPPGYAPQVIEDNGVRRVVVVPQAPEFHPGSHTVLHRSPHPPLPGFIPVPTMMPPPPRHMYSPVTGAGDMTTQYMPQYQSSQVYGDVDAHSTHGRSNFRDERSSKTYERLQKKLKDRQGTQKDKMSSPPSSPQKCPSPINEHNGLIKGQIAGGINTGSAKIKSGKGKGGTQVDTEIEEKDEETKAFEALLSNIVKPVASDIQARTVVLTWSPPSSLINGETDESSVPELYGYEVLISSTGKDGKYKSVYVGEETNITLNDLKPAMDYHAKVQAEYNSIKGTPSEAEIFTTLSCEPDIPNPPRIANRTKNSLTLQWKAPSDNGSKIQNFVLEWDEGKGNGEFCQCYMGSQKQFKITKLSPAMGCKFRLSARNDYGTSGFSEEVLYYTSGCAPSMPASPVLTKAGITWLSLQWSKPSGTPSDEGISYILEMEEETSGYGFKPKYDGEDLAYTVKNLRRSTKYKFKVIAYNSEGKSNPSEVVEFTTCPDKPGIPVKPSVKGKIHSHSFKITWDPPKDNGGATINKYVVEMAEGSNGNKWEMIYSGATREHLCDRLNPGCFYRLRVYCISDGGQSAVSESLLVQTPAVPPGPCLPPRLQGRPKAKEIQTPSG

SEQ ID NO: 190 - protein, 163 aa, Artificial Sequence
  Q9H382
MSESGFKLLCQCLGFGSGHFRCDSSRWCHDNGVNYKIGEKWDRQGENGQMMSCTCLGNGKGEFKCDPHEATCYDDGKTYHVGEQWQKEYLGAICSCTCFGGQRGWRCDNCRRPGGEPSPEGTTGQSYNQYSQRYHQRTNTNVNCPIECFMPLDVQADREDSRE

SEQ ID NO: 191 - protein, 380 aa, Artificial Sequence
  P01100
MMFSGFNADYEASSSRCSSASPAGDSLSYYHSPADSFSSMGSPVNAQDFCTDLAVSSANFIPTVTAISTSPDLQWLVQPALVSSVAPSQTRAPHPFGVPAPSAGAYSRAGVVKTMTGGRAQSIGRRGKVEQLSPEEEEKRRIRRERNKMAAAKCRNRRRELTDTLQAETDQLEDEKSALQTEIANLLKEKEKLEFILAAHRPACKIPDDLGFPEEMSVASLDLTGGLPEVATPESEEAFTLPLLNDPEPKPSVEPVKSISSMELKTEPFDDFLFPASSRPSGSETARSVPDMDLSGSFYAADWEPLHSGSLGMGPMATELEPLCTPVVTCTPSCTAYTSSFVFTYPEADSFPSCAAAHRKGSSSNEPSSDSLSSPTLLAL

SEQ ID NO: 192 - protein, 431 aa, Artificial Sequence
  Q9BZS1
MPNPRPGKPSAPSLALGPSPGASPSWRAAPKASDLLGARGPGGTFQGRDLRGGAHASSSSLNPMPPSQLQLPTLPLVMVAPSGARLGPLPHLQALLQDRPHFMHQLSTVDAHARTPVLQVHPLESPAMISLTPPTTATGVFSLKARPGLPPGINVASLEWVSREPALLCTFPNPSAPRKDSTLSAVPQSSYPLLANGVCKWPGCEKVFEEPEDFLKHCQADHLLDEKGRAQCLLQREMVQSLEQQLVLEKEKLSAMQAHLAGKMALTKASSVASSDKGSCCIVAAGSQGPVVPAWSGPREAPDSLFAVRRHLWGSHGNSTFPEFLHNMDYFKFHNMRPPFTYATLIRWAILEAPEKQRTLNEIYHWFTRMFAFFRNHPATWKNAIRHNLSLHKCFVRVESEKGAVWTVDELEFRKKRSQRPSRCSNPTPGP

SEQ ID NO: 193 - protein, 365 aa, Artificial Sequence
  P19526
MWLRSHRQLCLAFLLVCVLSVIFFLHIHQDSFPHGLGLSILCPDRRLVTPPVAIFCLPGTAMGPNASSSCPQHPASLSGTWTVYPNGRFGNQMGQYATLLALAQLNGRRAFILPAMHAALAPVFRITLPVLAPEVDSRTPWRELQLHDWMSEEYADLRDPFLKLSGFPCSWTFFHHLREQIRREFTLHDHLREEAQSVLGQLRLGRTGDRPRTFVGVHVRRGDYLQVMPQRWKGVVGDSAYLRQAMDWFRARHEAPVFVVTSNGMEWCKENIDTSQGDVTFAGDGQEATPWKDFALLTQCNHTIMTIGTFGFWAAYLAGGDTVYLANFTLPDSEFLKIFKPEAAFLPEWVGINADLSPLWTLAKP

SEQ ID NO: 194 - protein, 459 aa, Artificial Sequence
  Q16790
MAPLCPSPWLPLLIPAPAPGLTVQLLLSLLLLVPVHPQRLPRMQEDSPLGGGSSGEDDPLGEEDLPSEEDSPREEDPPGEEDLPGEEDLPGEEDLPEVKPKSEEEGSLKLEDLPTVEAPGDPQEPQNNAHRDKEGDDQSHWRYGGDPPWPRVSPACAGRFQSPVDIRPQLAAFCPALRPLELLGFQLPPLPELRLRNNGHSVQLTLPPGLEMALGPGREYRALQLHLHWGAAGRPGSEHTVEGHRFPAEIHVVHLSTAFARVDEALGRPGGLAVLAAFLEEGPEENSAYEQLLSRLEEIAEEGSETQVPGLDISALLPSDFSRYFQYEGSLTTPPCAQGVIWTVFNQTVMLSAKQLHTLSDTLWGPGDSRLQLNFRATQPLNGRVIEASFPAGVDSSPRAAEPVQLNSCLAAGDILALVFGLLFAVTSVAFLVQMRRQHRRGTKGGVSYRPAEVAETGA

SEQ ID NO: 195 - protein, 138 aa, Artificial Sequence
  AAA82744
MSWRGRSTYRPRPRRYVEPPEMIGPMRPEQFSDEVEPATPEEGEPATQRQDPAAAQEGEDEGASAGQGPKPEADSQEQGHPQTGCECEDGPDGQEMDPPNPEEVKTPEEEMRSHYVAQTGILWLLMNNCFLNLSPRKP

SEQ ID NO: 196 - protein, 116 aa, Artificial Sequence
  Q6NT46
MSWRGRSTYRPRPRRYVEPPEMIGPMRPEQFSDEVEPATPEEGEPATQRQDPAAAQEGQDEGASAGQGPKPEAHSQEQGHPQTGCECEDGPDGQEMDPPNPEEVKTPEEGEKQSQC

SEQ ID NO: 197 - protein, 118 aa, Artificial Sequence
  Q13067
MNLSRGKSTYYWPRPRRYVQPPEVIGPMRPEQFSDEVEPATPEEGEPATQRQDPAAAQEGEDEGASAGQGPKPEADSQEQGHPQTGCECEDGPDGQEMDPPNPEEVKTPEEGEKQSQC

SEQ ID NO: 198 - protein, 117 aa, Artificial Sequence
  Q13068
MSWRGRSTYYWPRPRRYVQPPEMIGPMRPEQFSDEVEPATPEEGEPATQRQDPAAAQEGEDEGASAGQGPKPEADSQEQGHPQTGCECEDGPDGQEMDPPNPEEVKTPEEGEGQSQC

SEQ ID NO: 199 - protein, 117 aa, Artificial Sequence
  Q13069
MSWRGRSTYYWPRPRRYVQPPEVIGPMRPEQFSDEVEPATPEEGEPATQRQDPAAAQEGEDEGASAGQGPKPEADSQEQGHPQTGCECEDGPDGQEMDPPNPEEVKTPEEGEKQSQC

SEQ ID NO: 200 - protein, 117 aa, Artificial Sequence
  Q13070
MSWRGRSTYYWPRPRRYVQPPEVIGPMRPEQFSDEVEPATPEEGEPATQRQDPAAAQEGEDEGASAGQGPKPEADSQEQGHPQTGCECEDGPDGQEVDPPNPEEVKTPEEGEKQSQC

SEQ ID NO: 201 - protein, 117 aa, Artificial Sequence
  O76087
MSWRGRSTYYWPRPRRYVQPPEMIGPMRPEQFSDEVEPATPEEGEPATQRQDPAAAQEGEDEGASAGQGPKPEAHSQEQGHPQTGCECEDGPDGQEMDPPNPEEVKTPEEGEKQSQC

SEQ ID NO: 202 - protein, 116 aa, Artificial Sequence
  Q9UEU5
MSWRGRSTYRPRPRRYVEPPEMIGPMRPEQFSDEVEPATPEEGEPATQRQDPAAAQEGEDEGASAGQGPKPEADSQEQGHPQTGCECEDGPDGQEMDPPNPEEVKTPEEGEKQSQC

SEQ ID NO: 203 - protein, 447 aa, Artificial Sequence
  P32239
MELLKLNRSVQGTGPGPGASLCRPGAPLLNSSSVGNLSCEPPRIRGAGTRELELAIRITLYAVIFLMSVGGNMLIIVVLGLSRRLRTVTNAFLLSLAVSDLLLAVACMPFTLLPNLMGTFIFGTVICKAVSYLMGVSVSVSTLSLVAIALERYSAICRPLQARVWQTRSHAARVIVATWLLSGLLMVPYPVYTVVQPVGPRVLQCVHRWPSARVRQTWSVLLLLLLFFIPGVVMAVAYGLISRELYLGLRFDGDSDSDSQSRVRNQGGLPGAVHQNGRCRPETGAVGEDSDGCYVQLPRSRPALELTALTAPGPGSGSRPTQAKLLAKKRVVRMLLVIVVLFFLCWLPVYSANTWRAFDGPGAHRALSGAPISFIHLLSYASACVNPLVYCFMHRRFRQACLETCARCCPRPPRARPRALPDEDPPTPSIASLSRLSYTTISTLGPG

SEQ ID NO: 204 - protein, 741 aa, Artificial Sequence
  Q09328
MALFTPWKLSSQKLGFFLVTFGFIWGMMLLHFTIQQRTQPESSSMLREQILDLSKRYIKALAEENRNVVDGPYAGVMTAYDLKKTLAVLLDNILQRIGKLESKVDNLVVNGTGTNSTNSTTAVPSLVALEKINVADIINGAQEKCVLPPMDGYPHCEGKIKWMKDMWRSDPCYADYGVDGSTCSFFIYLSEVENWCPHLPWRAKNPYEEADHNSLAEIRTDFNILYSMMKKHEEFRWMRLRIRRMADAWIQAIKSLAEKQNLEKRKRKKVLVHLGLLTKESGFKIAETAFSGGPLGELVQWSDLITSLYLLGHDIRISASLAELKEIMKKVVGNRSGCPTVGDRIVELIYIDIVGLAQFKKTLGPSWVHYQCMLRVLDSFGTEPEFNHANYAQSKGHKTPWGKWNLNPQQFYTMFPHTPDNSFLGFVVEQHLNSSDIHHINEIKRQNQSLVYGKVDSFWKNKKIYLDIIHTYMEVHATVYGSSTKNIPSYVKNHGILSGRDLQFLLRETKLFVGLGFPYEGPAPLEAIANGCAFLNPKFNPPKSSKNTDFFIGKPTLRELTSQHPYAEVFIGRPHVWTVDLNNQEEVEDAVKAILNQKIEPYMPYEFTCEGMLQRINAFIEKQDFCHGQVMWPPLSALQVKLAEPGQSCKQVCQESQLICEPSFFQHLNKDKDMLKYKVTCQSSELAKDILVPSFDPKNKHCVFQGDLLLFSCAGAHPRHQRVCPCRDFIKGQVALCKDCL

SEQ ID NO: 205 - protein, 580 aa, Artificial Sequence
  I6QTG3
MAGTVRTACLVVAMLLSLDFPGQAQPPPPPPDATCHQVRSFFQRLQPGLKWVPETPVPGSDLQVCLPKGPTCCSRKMEEKYQLTARLNMEQLLQSASMELKFLIIQNAAVFQEAFEIVVRHAKNYTNAMFKNNYPSLTPQAFEFVGEFFTDVSLYILGSDINVDDMVNELFDSLFPVIYTQLMNPGLPDSALDINECLRGARRDLKVFGNFPKLIMTQVSKSLQVTRIFLQALNLGIEVINTTDHLKFSKDCGRMLTRMWYCSYCQGLMMVKPCGGYCNVVMQGCMAGVVEIDKYWREYILSLEELVNGMYRIYDMENVLLGLFSTIHDSIQYVQKNAGKLTTTIGKLCAHSQQRQYRSAYYPEDLFIDKKVLKVAHVEHEETLSSRRRELIQKLKSFISFYSALPGYICSHSPVAENDTLCWNGQELVERYSQKAARNGMKNQFNLHELKMKGPEPVVSQIIDKLKHINQLLRTMSMPKGRVLDKNLDEEGFESGDCGDDEDECIGGSGDGMIKVKNQLRFLAELAYDLDVDDAPGNSQQATPKDNEISTFHNLGNVHSPLKLLTSMAISVVCFFFLVH

SEQ ID NO: 206 - protein, 580 aa, Artificial Sequence; identical to SEQ ID NO: 205
  P51654

SEQ ID NO: 207 - protein, 580 aa, Artificial Sequence [sequence omitted]

SEQ ID NO: 208 - protein, 560 aa, Artificial Sequence
  A0A024RA55
MECLYYFLGFLLLAARLPLDAAKRFHDVLGNERPSAYMREHNQLNGWSSDENDWNEKLYPVWKRGDMRWKNSWKGGRVQAVLTSDSPALVGSNITFAVNLIFPRCQKEDANGNIVYEKNCRNEAGLSADPYVYNWTAWSEDSDGENGTGQSHHNVFPDGKPFPHHPGWRRWNFIYVFHTLGQYFQKLGRCSVRVSVNTANVTLGPQLMEVTVYRRHGRAYVPIAQVKDVYVVTDQIPVFVTMFQKNDRNSSDETFLKDLPIMFDVLIHDPSHFLNYSTINYKWSFGDNTGLFVSTNHTVNHTYVLNGTFSLNLTVKAAAPGPCPPPPPPPRPSKPTPSLGPAGDNPLELSRIPDENCQINRYGHFQATITIVEGILEVNIIQMTDVLMPVPWPESSLIDFVVTCQGSIPTEVCTIISDPTCEITQNTVCSPVDVDEMCLLTVRRTFNGSGTYCVNLTLGDDTSLALTSTLISVPDRDPASPLRMANSALISVGCLAIFVTVISLLVYKKHKEYNPIENSPGNVVRSKGLSVFLNRAKAVFFPGNQEKDPLLKNQEFKGVS

SEQ ID NO: 209 - protein, 572 aa, Artificial Sequence
  Q14956
MECLYYFLGFLLLAARLPLDAAKRFHDVLGNERPSAYMREHNQLNGWSSDENDWNEKLYPVWKRGDMRWKNSWKGGRVQAVLTSDSPALVGSNITFAVNLIFPRCQKEDANGNIVYEKNCRNEAGLSADPYVYNWTAWSEDSDGENGTGQSHHNVFPDGKPFPHHPGWRRWNFIYVFHTLGQYFQKLGRCSVRVSVNTANVTLGPQLMEVTVYRRHGRAYVPIAQVKDVYVVTDQIPVFVTMFQKNDRNSSDETFLKDLPIMFDVLIHDPSHFLNYSTINYKWSFGDNTGLFVSTNHTVNHTYVLNGTFSLNLTVKAAAPGPCPPPPPPPRPSKPTPSLATTLKSYDSNTPGPAGDNPLELSRIPDENCQINRYGHFQATITIVEGILEVNIIQMTDVLMPVPWPESSLIDFVVTCQGSIPTEVCTIISDPTCEITQNTVCSPVDVDEMCLLTVRRTFNGSGTYCVNLTLGDDTSLALTSTLISVPDRDPASPLRMANSALISVGCLAIFVTVISLLVYKKHKEYNPIENSPGNVVRSKGLSVFLNRAKAVFFPGNQEKDPLLKNQEFKGVS

SEQ ID NO: 210 - protein, 206 aa, Artificial Sequence [sequence omitted]

SEQ ID NO: 211 - protein, 206 aa, Artificial Sequence
  Q96F58
MECLYYFLGFLLLAARLPLDAAKRFHDVLGNERPSAYMREHNQLNGWSSDENDWNEKLYPVWKRGDMRWKNSWKGGRVQAVLTSDSPALVGSNITFAVNLIFPRCQKEDANGNIVYEKNCRNEAGLSADPYVYNWTAWSEDSDGENGTGQSHHNVFPDGKPFPHHPGWRRWNFIYVFHTLGWLLQTPKLLLYLSLKFQPSLFLLYN

SEQ ID NO: 212 - protein, 879 aa, Artificial Sequence
  Q14832
MKMLTRLQVLTLALFSKGFLLSLGDHNFLRREIKIEGDLVLGGLFPINEKGTGTEECGRINEDRGIQRLEAMLFAIDEINKDDYLLPGVKLGVHILDTCSRDTYALEQSLEFVRASLTKVDEAEYMCPDGSYAIQENIPLLIAGVIGGSYSSVSIQVANLLRLFQIPQISYASTSAKLSDKSRYDYFARTVPPDFYQAKAMAEILRFFNWTYVSTVASEGDYGETGIEAFEQEARLRNICIATAEKVGRSNIRKSYDSVIRELLQKPNARVVVLFMRSDDSRELIAAASRANASFTWVASDGWGAQESIIKGSEHVAYGAITLELASQPVRQFDRYFQSLNPYNNHRNPWFRDFWEQKFQCSLQNKRNHRRVCDKHLAIDSSNYEQESKIMFVVNAVYAMAHALHKMQRTLCPNTTKLCDAMKILDGKKLYKDYLLKINFTAPFNPNKDADSIVKFDTFGDGMGRYNVFNFQNVGGKYSYLKVGHWAETLSLDVNSIHWSRNSVPTSQCSDPCAPNEMKNMQPGDVCCWICIPCEPYEYLADEFTCMDCGSGQWPTADLTGCYDLPEDYIRWEDAWAIGPVTIACLGFMCTCMVVTVFIKHNNTPLVKASGRELCYILLFGVGLSYCMTFFFIAKPSPVICALRRLGLGSSFAICYSALLTKTNCIARIFDGVKNGAQRPKFISPSSQVFICLGLILVQIVMVSVWLILEAPGTRRYTLAEKRETVILKCNVKDSSMLISLTYDVILVILCTVYAFKTRKCPENFNEAKFIGFTMYTTCIIWLAFLPIFYVTSSDYRVQTTTMCISVSLSGFVVLGCLFAPKVHIILFQPQKNVVTHRLHLNRFSVSGTGTTYSQSSASTYVPTVCNGREVLDSTTSSL

SEQ ID NO: 213 - protein, 648 aa, Artificial Sequence
  Q9NXZ2
MSHHGGAPKASTWVVASRRSSTVSRAPERRPAEELNRTGPEGYSVGRGGRWRGTSRPPEAVAAGHEELPLCFALKSHFVGAVIGRGGSKIKNIQSTTNTTIQIIQEQPESLVKIFGSKAMQTKAKAVIDNFVKKLEENYNSECGIDTAFQPSVGKDGSTDNNVVAGDRPLIDWDQIREEGLKWQKTKWADLPPIKKNFYKESTATSAMSKVEADSWRKENFNITWDDLKDGEKRPIPNPTCTFDDAFQCYPEVMENIKKAGFQKPTPIQSQAWPIVLQGIDLIGVAQTGTGKTLCYLMPGFIHLVLQPSLKGQRNRPGMLVLTPTRELALQVEGECCKYSYKGLRSVCVYGGGNRDEQIEELKKGVDIIIATPGRLNDLQMSNFVNLKNITYLVLDEADKMLDMGFEPQIMKILLDVRPDRQTVMTSATWPHSVHRLAQSYLKEPMIVYVGTLDLVAVSSVKQNIIVTTEEEKWSHMQTFLQSMSSTDKVIVFVSRKAVADHLSSDLILGNISVESLHGDREQRDREKALENFKTGKVRILIATDLASRGLDVHDVTHVYNFDFPRNIEEYVHRIGRTGRAGRTGVSITTLTRNDWRVASELINILERANQSIPEELVSMAERFKAHQQKREMERKMERPQGRPKKFH

SEQ ID NO: 214 - protein, 402 aa, Artificial Sequence
  B2ZDQ2
MAQKEGGRTVPCCSRPKVAALTAGTLLLLTAIGAASWAIVAVLLRSDQEPLYPVQVSSADARLMVFDKTEGTWRLLCSSRSNARVAGLSCEEMGFLRALTHSELDVRTAGANGTSGFFCVDEGRLPHTQRLLEVISVCDCPRGRFLAAICQDCGRRKLPVDRIVGGRDTSLGRWPWQVSLRYDGAHLCGGSLLSGDWVLTAAHCFPERNRVLSRWRVFAGAVAQASPHGLQLGVQAVVYHGGYLPFRDPNSEENSNDIALVHLSSPLPLTEYIQPVCLPAAGQALVDGKICTVTGWGNTQYYGQQAGVLQEARVPIISNDVCNGADFYGNQIKPKMFCAGYPEGGIDACQGDSGGPFVCEDSISRTPRWRLCGIVSWGTGCALAQKPGVYTKVSDFREWIFQ

SEQ ID NO: 215 - protein, 417 aa, Artificial Sequence
  P05981
MAQKEGGRTVPCCSRPKVAALTAGTLLLLTAIGAASWAIVAVLLRSDQEPLYPVQVSSADARLMVFDKTEGTWRLLCSSRSNARVAGLSCEEMGFLRALTHSELDVRTAGANGTSGFFCVDEGRLPHTQRLLEVISVCDCPRGRFLAAICQDCGRRKLPVDRIVGGRDTSLGRWPWQVSLRYDGAHLCGGSLLSGDWVLTAAHCFPERNRVLSRWRVFAGAVAQASPHGLQLGVQAVVYHGGYLPFRDPNSEENSNDIALVHLSSPLPLTEYIQPVCLPAAGQALVDGKICTVTGWGNTQYYGQQAGVLQEARVPIISNDVCNGADFYGNQIKPKMFCAGYPEGGIDACQGDSGGPFVCEDSISRTPRWRLCGIVSWGTGCALAQKPGVYTKVSDFREWIFQAIKTHSEASGMVTQL

SEQ ID NO: 216 - protein, 979 aa, Artificial Sequence
  B4DTR1
MELAALCRWGLLLALLPPGAASTQDNYLSTDVGSCTLVCPLHNQEVTAEDGTQRCEKCSKPCARVCYGLGMEHLREVRAVTSANIQEFAGCKKIFGSLAFLPESFDGDPASNTAPLQPEQLQVFETLEEITGYLYISAWPDSLPDLSVFQNLQVIRGRILHNGAYSLTLQGLGISWLGLRSLRELGSGLALIHHNTHLCFVHTVPWDQLFRNPHQALLHTANRPEDECVGEGLACHQLCARGHCWGPGPTQCVNCSQFLRGQECVEECRVLQGLPREYVNARHCLPCHPECQPQNGSVTCFGPEADQCVACAHYKDPPFCVARCPSGVKPDLSYMPIWKFPDEEGACQPCPINCTHSCVDLDDKGCPAEQRASPLTSIISAVVGILLVVVLGVVFGILIKRRQQKIRKYTMRRLLQETELVEPLTPSGAMPNQAQMRILKETELRKVKVLGSGAFGTVYKGIWIPDGENVKIPVAIKVLRENTSPKANKEILDEAYVMAGVGSPYVSRLLGICLTSTVQLVTQLMPYGCLLDHVRENRGRLGSQDLLNWCMQIAKGMSYLEDVRLVHRDLAARNVLVKSPNHVKITDFGLARLLDIDETEYHADGGKVPIKWMALESILRRRFTHQSDVWSYGVTVWELMTFGAKPYDGIPAREIPDLLEKGERLPQPPICTIDVYMIMVKCWMIDSECRPRFRELVSEFSRMARDPQRFVVIQNEDLGPASPLDSTFYRSLLEDDDMGDLVDAEEYLVPQQGFFCPDPAPGAGGMVHHRHRSSSTRSGGGDLTLGLEPSEEEAPRSPLAPSEGAGSDVFDGDLGMGAAKGLQSLPTHDPSPLQRYSEDPTVPLPSETDGYVAPLTCSPQPEYVNQPDVRPQPPSPREGPLPAARPAGATLERPKTLSPGKNGVVKDVFAFGGAVENPEYLTPQGGAAPQPHPPPAFSPAFDNLYYWDQDPPERGAPPSTFKGTPTAENPEYLGLDVPV

SEQ ID NO: 217 - protein, 87 aa, Artificial Sequence
  L8E8G2
MMRMKTFVMIHFHLMNGGKAKLYSRPHAKLLPEQRVTDKTGAPVEWPGQTQCSTETQTLAAMPAQAVMRVTCTVVDMHKSECAPAQT

SEQ ID NO: 218 - protein, 1255 aa, Artificial Sequence [sequence omitted]

SEQ ID NO: 219 - protein, 419 aa, Artificial Sequence
  Q9UK79
MELAALCRWGLLLALLPPGAASTQVCTGTDMKLRLPASPETHLDMLRHLYQGCQVVQGNLELTYLPTNASLSFLQDIQEVQGYVLIAHNQVRQVPLQRLRIVRGTQLFEDNYALAVLDNGDPLNNTTPVTGASPGGLRELQLRSLTEILKGGVLIQRNPQLCYQDTILWKDIFHKNNQLALTLIDTNRSRACHPCSPMCKGSRCWGESSEDCQSLTRTVCAGGCARCKGPLPTDCCHEQCAAGCTGPKHSDCLACLHFNHSGICELHCPALVTYNTDTFESMPNPEGRYTFGASCVTACPYNYLSTDVGSCTLVCPLHNQEVTAEDGTQRCEKCSKPCARGTHSLPPRPAAVPVPLRMQPGPAHPVLSFLRPSWDLVSAFYSLPLAPLSPTSVPISPVSVGRGPDPDAHVAVDLSRYEG

SEQ ID NO: 220 - protein, 182 aa, Artificial Sequence
  Q95387
GSHSMRYFFTSVSRPGRGEPRFIAVGYVDDTQFVRFDSDAASQRMEPRAPWIEQEGPEYWDGETRKVKAHSQTHRVDLGTLRGYYNQSEAGSHTVQRMYGCDVGSDWRFLRGYHQYAYDGKDYIALKEDLRSWTAADMAAQTTKHKWETAHVAEQLRAYLEGTCVEWLRRYLENGKETLQRT

SEQ ID NO: 221 - protein, 181 aa, Artificial Sequence
  Q9MYF8
SHSMRYFFTSVSRPGRGEPRFIAVGYVDDTQFVRFDSDAASQRMEPRAPWIEQEGPEYWDGETRKVKAHSQTHRVDLGTLRGYYNQSEAGSHTVQRMYGCDVGSDWRFLRGYHQYAYDGKDYIALKEDLRSWTAADMAAQTTKHKWEAAHVAEQLRAYLEGTCVEWLRRYLENGKETLQRT

SEQ ID NO: 222 - protein, 234 aa, Artificial Sequence
  Q99801
MLRVPEPRPGEAKAEGAAPPTPSKPLTSFLIQDILRDGAQRQGGRTSSQRQRDPEPEPEPEPEGGRSRAGAQNDQLSTGPRAAPEEAETLAETEPERHLGSYLLDSENTSGALPRLPQTPKQPQKRSRAAFSHTQVIELERKFSHQKYLSAPERAHLAKNLKLTETQVKIWFQNRRYKTKRKQLSSELGDLEKHSSLPALKEEAFSRASLVSVYNSYPYYPYLYCVGSWSPAFW

SEQ ID NO: 223 - protein, 313 aa, Artificial Sequence
  B2RBQ6
MASFRKLTLSEKVPPNHPSRKKVNFLDMSLDDIIIYKELEGTNAEEEKNKRQNHSKKESPSRQQSKAHRHRHRRDYSRCRSNSEEGNHDKKPSQKPSGFKSGQHPLNGQPLIEQEKCSDNYEAQAEKNQGQSEGNQHQSEGNPDKSEESQGQPEENHHSERSRNHLERSLSQSDRSQGQLKRHHPQYERSHGQYKRSHGQSERSHGHSERSHGHSERSHGHSERSHGHSKRSRSQGDLVDTQSDLIATQRDLIATQKDLIATQRDLIATQRDLIVTQRDLVATERDLINQSGRSHGQSERHQRYSTGKNTITT

SEQ ID NO: 224 - protein, 313 aa, Artificial Sequence
  Q9P127
MASFRKLTLSEKVPPNHPSRKKVNFLDMSLDDIIIYKELEGTNAEEEKNKRQNHSKKESPSRQQSKAHRHRHRRGYSRCRSNSEEGNHDKKPSQKPSGFKSGQHPLNGQPLIEQEKCSDNYEAQAEKNQGQSEGNQHQSEGNPDKSEESQGQPEENHHSERSRNHLERSLSQSDRSQGQLKRHHPQYERSHGQYKRSHGQSERSHGHSERSHGHSERSHGHSERSHGHSKRSRSQGDLVDTQSDLIATQRDLIATQKDLIATQRDLIATQRDLIVTQRDLVATERDLINQSGRSHGQSERHQRYSTGKNTITT

SEQ ID NO: 225 - protein, 127 aa, Artificial Sequence
  12543784
MIKKNLKKLGIEETYLNIIKAIYDRPTASIQKTENLSTKTGTSQEYHLSPLWFYIVLEILASTIRQEKNLKDIHTEKEEVKLSLFADAMILYLKKPNDSTRKLLELIKKIHSSCRIKINIHFAFCSQ

SEQ ID NO: 226 - protein, 641 aa, Artificial Sequence
  P0DMV8
MAKAAAIGIDLGTTYSCVGVFQHGKVEIIANDQGNRTTPSYVAFTDTERLIGDAAKNQVALNPQNTVFDAKRLIGRKFGDPVVQSDMKHWPFQVINDGDKPKVQVSYKGETKAFYPEEISSMVLTKMKEIAEAYLGYPVTNAVITVPAYFNDSQRQATKDAGVIAGLNVLRIINEPTAAAIAYGLDRTGKGERNVLIFDLGGGTFDVSILTIDDGIFEVKATAGDTHLGGEDFDNRLVNHFVEEFKRKHKKDISQNKRAVRRLRTACERAKRTLSSSTQASLEIDSLFEGIDFYTSITRARFEELCSDLFRSTLEPVEKALRDAKLDKAQIHDLVLVGGSTRIPKVQKLLQDFFNGRDLNKSINPDEAVAYGAAVQAAILMGDKSENVQDLLLLDVAPLSLGLETAGGVMTALIKRNSTIPTKQTQIFTTYSDNQPGVLIQVYEGERAMTKDNNLLGRFELSGIPPAPRGVPQIEVTFDIDANGILNVTATDKSTGKANKITITNDKGRLSKEEIERMVQEAEKYKAEDEVQRERVSAKNALESYAFNMKSAVEDEGLKGKISEADKKKVLDKCQEVISWLDANTLAEKDEFEHKRKELEQVCNPIISGLYQGAGGPGPGGFGAQGPKGGSGSGPTIEEVD

SEQ ID NO: 227 - protein, 641 aa, Artificial Sequence; identical to SEQ ID NO: 226
  P0DMV9

SEQ ID NO: 228 - protein, 208 aa, Artificial Sequence
  P10767
MALGQKLFITMSRGAGRLQGTLWALVFLGILVGMVVPSPAGTRANNTLLDSRGWGTLLSRSRAGLAGEIAGVNWESGYLVGIKRQRRLYCNVGIGFHLQVLPDGRISGTHEENPYSLLEISTVERGVVSLFGVRSALFVAMNSKGRLYATPSFQEECKFRETLLPNNYNAYESDLYQGTYIALSKYGRVKRGSKVSPIMTVTHFLPRI

SEQ ID NO: 229 - protein, 523 aa, Artificial Sequence
  O94807
MPRAPRCRAVRSLLRSHYREVLPLATFVRRLGPQGWRLVQRGDPAAFRALVAQCLVCVPWDARPPPAAPSFRQVSCLKELVARVLQRLCERGAKNVLAFGFALLDGARGGPPEAFTTSVRSYLPNTVTDALRGSGAWGLLLRRVGDDVLVHLLARCALFVLVAPSCAYQVCGPPLYQLGAATQARPPPHASGPRRRLGCERAWNHSVREAGVPLGLPAPGARRRGGSASRSLPLPKRPRRGAAPEPERTPVGQGSWAHPGRTRGPSDRGFCVVSPARPAEEATSLEGALSGTRHSHPSVGRQHHAGPPSTSRPPRPWDTPCPPVYAETKHFLYSSGDKEQLRPSFLLSSLRPILTGARRLVETIFLGSSPGCQGLPAGCPACPSATGKCGPCFWSCLGTTRSAPTGCSSRRTARCELRSPQQPVSVPGRSPRALWRPPRRRTQTPVAWCSCSASTAPLAGVRLRAGLPAPAGAPRPLGLQAQRRRFLRNTKKFISLGKHAKLSLQELTWKMSVRDCAWLRRSP

SEQ ID NO: 230 - protein, 559 aa, Artificial Sequence
  O00748
MRLHRLRARLSAVACGLLLLLVRGQGQDSASPIRTTHTGQVLGSLVHVKGANAGVQTFLGIPFAKPPLGPLRFAPPEPPESWSGVRDGTTHPAMCLQDLTAVESEFLSQFNMTFPSDSMSEDCLYLSIYTPAHSHEGSNLPVMVWIHGGALVFGMASLYDGSMLAALENVVVVIIQYRLGVLGFFSTGDKHATGNWGYLDQVAALRWVQQNIAHFGGNPDRVTIFGESAGGTSVSSLVVSPISQGLFHGAIMESGVALLPGLIASSADVISTVVANLSACDQVDSEALVGCLRGKSKEEILAINKPFKMIPGVVDGVFLPRHPQELLASADFQPVPSIVGVNNNEFGWLIPKVMRIYDTQKEMDREASQAALQKMLTLLMLPPTFGDLLREEYIGDNGDPQTLQAQFQEMMADSMFVIPALQVAHFQCSRAPVYFYEFQHQPSWLKNIRPPHMKADHGDELPFVFRSFFGGNYIKFTEEEEQLSRKMMKYWANFARNGNPNGEGLPHWPLFDQEEQYLQLNLQPAVGRALKAHRLQFWKKALPQKIQELEEPEERHTEL

SEQ ID NO: 231 - protein, 579 aa, Artificial Sequence
  O00425
MNKLYIGNLSENAAPSDLESIFKDAKIPVSGPFLVKTGYAFVDCPDESWALKAIEALSGKIELHGKPIEVEHSVPKRQRIRKLQIRNIPPHLQWEVLDSLLVQYGVVESCEQVNTDSETAVVNVTYSSKDQARQALDKLNGFQLENFTLKVAYIPDEMAAQQNPLQQPRGRRGLGQRGSSRQGSPGSVSKQKPCDLPLRLLVPTQFVGAIIGKEGATIRNITKQTQSKIDVHRKENAGAAEKSITILSTPEGTSAACKSILEIMHKEAQDIKFTEEIPLKILAHNNFVGRLIGKEGRNLKKIEQDTDTKITISPLQELTLYNPERTITVKGNVETCAKAEEEIMKKIRESYENDIASMNLQAHLIPGLNLNALGLFPPTSGMPPPTSGPPSAMTPPYPQFEQSETETVHLFIPALSVGAIIGKQGQHIKQLSRFAGASIKIAPAEAPDAKVRMVIITGPPEAQFKAQGRIYGKIKEENFVSPKEEVKLEAHIRVPSFAAGRVIGKGGKTVNELQNLSSAEVVVPRDQTPDENDQVVVKITGHFYACQVAQRKIQEILTQVKQHQQQKALQSGPPQSRRK

SEQ ID NO: 232 - protein, 178 aa, Artificial Sequence
  P22301
MHSSALLCCLVLLTGVRASPGQGTQSENSCTHFPGNLPNMLRDLRDAFSRVKTFFQMKDQLDNLLLKESLLEDFKGYLGCQALSEMIQFYLEEVMPQAENQDPDIKAHVNSLGENLKTLRLRLRRCHRFLPCENKSKAVEQVKNAFNKLQEKGIYKAMSEFDIFINYIEAYMTMKIRN

SEQ ID NO: 233 - protein, 380 aa, Artificial Sequence
  Q14627
MAFVCLAIGCLYTFLISTTFGCTSSSDTEIKVNPPQDFEIVDPGYLGYLYLQWQPPLSLDHFKECTVEYELKYRNIGSETWKTIITKNLHYKDGFDLNKGIEAKIHTLLPWQCTNGSEVQSSWAETTYWISPQGIPETKVQDMDCVYYNWQYLLCSWKPGIGVLLDTNYNLFYWYEGLDHALQCVDYIKADGQNIGCRFPYLEASDYKDFYICVNGSSENKPIRSSYFTFQLQNIVKPLPPVYLTFTRESSCEIKLKWSIPLGPIPARCFDYEIEIREDDTTLVTATVENETYTLKTTNETRQLCFVVRSKVNIYCSDDGIWSEWSDKQCWEGEDLSKKTLLRFWLPFGFILILVIFVTGLLLRKPNTYPKMIPEFFCDT

SEQ ID NO: 234 - protein, 272 aa, Artificial Sequence
  P01589
MDSYLLMWGLLTFIMVPGCQAELCDDDPPEIPHATFKAMAYKEGTMLNCECKRGFRRIKSGSLYMLCTGNSSHSSWDNQCQCTSSATRNTTKQVTPQPEEQKERKTTEMQSPMQPVDQASLPGHCREPPPWENEATERIYHFVVGQMVYYQCVQGYRALHRGPAESVCKMTHGKTRWTQPQLICTGEMETSQFPGEEKPQASPEGRPESETSCLVTTTDFQIQTEMAATMETSIFTTEYQVAVAGCVFLLISVLLLSGLTWQRRQRKSRRTI

SEQ ID NO: 235 - protein, 551 aa, Artificial Sequence
  P14784
MAAPALSWRLPLLILLLPLATSWASAAVNGTSQFTCFYNSRANISCVWSQDGALQDTSCQVHAWPDRRRWNQTCELLPVSQASWACNLILGAPDSQKLTTVDIVTLRVLCREGVRWRVMAIQDFKPFENLRLMAPISLQVVHVETHRCNISWEISQASHYFERHLEFEARTLSPGHTWEEAPLLTLKQKQEWICLETLTPDTQYEFQVRVKPLQGEFTTWSPWSQPLAFRTKPAALGKDTIPWLGHLLVGLSGAFGFIILVYLLINCRNTGPWLKKVLKCNTPDPSKFFSQLSSEHGGDVQKWLSSPFPSSSFSPGGLAPEISPLEVLERDKVTQLLLQQDKVPEPASLSSNHSLTSCFTNQGYFFFHLPDALEIEACQVYFTYDPYSEEDPDEGVAGAPTGSSPQPLQPLSGEDDAYCTFPSRDDLLLFSPSLLGGPSPPSTAPGGSGAGEERMPPSLQERVPRDWDPQPLGPPTPGVPDLVDFQPPPELVLREAGEEVPDAGPREGVSFPWSRPPGQGEFRALNARLPLNTDAYLSLQELQGQDPTHLV

SEQ ID NO: 236 - protein, 369 aa, Artificial Sequence
  P31785
MLKPSLPFTSLLFLQLPLLGVGLNTTILTPNGNEDTTADFFLTTMPTDSLSVSTLPLPEVQCFVFNVEYMNCTWNSSSEPQPTNLTLHYWYKNSDNDKVQKCSHYLFSEEITSGCQLQKKEIHLYQTFVVQLQDPREPRRQATQMLKLQNLVIPWAPENLTLHKLSESQLELNWNNRFLNHCLEHLVQYRTDWDHSWTEQSVDYRHKFSLPSVDGQKRYTFRVRSRFNPLCGSAQHWSEWSHPIHWGSNTSKENPFLFALEAVVISVGSMGLIISLLCVYFWLERTMPRIPTLKNLEDLVTEYHGNFSAWSGVSKGLAESLQPDYSERLCLVSEIPPKGGALGEGPGASPCNQHSPYWAPPCYTLKPET

SEQ ID NO: 237 - protein, 134 aa, Artificial Sequence
  P05113
MRMLLHLSLLALGAAYVYAIPTEIPTSALVKETLALLSTHRTLLIANETLRIPVPVHKNHQLCTEEIFQGIGTLESQTVQGGTVERLFKNLSLIKKYIDGQKKKCGEERRRVNQFLDYLQEFLGVMNTEWIIES

SEQ ID NO: 238 - protein, 184 aa, Artificial Sequence
  Q9NV31
MVRKLKFHEQKLLKQVDFLNWEVTDHNLHELRVLRRYRLQRREDYTRYNQLSRAVRELARRLRDLPERDQFRVRASAALLDKLYALGLVPTRGSLELCDFVTASSFCRRRLPTVLLKLRMAQHLQAAVAFVEQGHVRVGPDVVTDPAFLVTRSMEDFVTWVDSSKIKRHVLEYNEERDDFDLEA

SEQ ID NO: 239 - protein, 1049 aa, Artificial Sequence
  P08648
MGSRTPESPLHAVQLRWGPRRRPPLLPLLLLLLPPPPRVGGFNLDAEAPAVLSGPPGSFFGFSVEFYRPGTDGVSVLVGAPKANTSQPGVLQGGAVYLCPWGASPTQCTPIEFDSKGSRLLESSLSSSEGEEPVEYKSLQWFGATVRAHGSSILACAPLYSWRTEKEPLSDPVGTCYLSTDNFTRILEYAPCRSDFSWAAGQGYCQGGFSAEFTKTGRVVLGGPGSYFWQGQILSATQEQIAESYYPEYLINLVQGQLQTRQASSIYDDSYLGYSVAVGEFSGDDTEDFVAGVPKGNLTYGYVTILNGSDIRSLYNFSGEQMASYFGYAVAATDVNGDGLDDLLVGAPLLMDRTPDGRPQEVGRVYVYLQHPAGIEPTPTLTLTGHDEFGRFGSSLTPLGDLDQDGYNDVAIGAPFGGETQQGVVFVFPGGPGGLGSKPSQVLQPLWAASHTPDFFGSALRGGRDLDGNGYPDLIVGSFGVDKAVVYRGRPIVSASASLTIFPAMFNPEERSCSLEGNPVACINLSFCLNASGKHVADSIGFTVELQLDWQKQKGGVRRALFLASRQATLTQTLLIQNGAREDCREMKIYLRNESEFRDKLSPIHIALNFSLDPQAPVDSHGLRPALHYQSKSRIEDKAQILLDCGEDNICVPDLQLEVFGEQNHVYLGDKNALNLTFHAQNVGEGGAYEAELRVTAPPEAEYSGLVRHPGNFSSLSCDYFAVNQSRLLVCDLGNPMKAGASLWGGLRFTVPHLRDTKKTIQFDFQILSKNLNNSQSDVVSFRLSVEAQAQVTLNGVSKPEAVLFPVSDWHPRDQPQKEEDLGPAVHHVYELINQGPSSISQGVLELSCPQALEGQQLLYVTRVTGLNCTTNHPINPKGLELDPEGSLHHQQKREAPSRSSASSGPQILKCPEAECFRLRCELGPLHQQESQSLQLHFRVWAKTFLQREHQPFSLQCEAVYKALKMPYRILPRQLPQKERQVATAVQWTKAEGSYGVPLWIIILAILFGLLLLGLLIYILYKLGFFKRSLPYGTAMEKAQLKPPATSDA

SEQ ID NO: 240 - protein, 798 aa, Artificial Sequence
  P05556
MNLQPIFWIGLISSVCCVFAQTDENRCLKANAKSCGECIQAGPNCGWCTNSTFLQEGMPTSARCDDLEALKKKGCPPDDIENPRGSKDIKKNKNVTNRSKGTAEKLKPEDITQIQPQQLVLRLRSGEPQTFTLKFKRAEDYPIDLYYLMDLSYSMKDDLENVKSLGTDLMNEMRRITSDFRIGFGSFVEKTVMPYISTTPAKLRNPCTSEQNCTSPFSYKNVLSLTNKGEVFNELVGKQRISGNLDSPEGGFDAIMQVAVCGSLIGWRNVTRLLVFSTDAGFHFAGDGKLGGIVLPNDGQCHLENNMYTMSHYYDYPSIAHLVQKLSENNIQTIFAVTEEFQPVYKELKNLIPKSAVGTLSANSSNVIQLIIDAYNSLSSEVILENGKLSEGVTISYKSYCKNGVNGTGENGRKCSNISIGDEVQFEISITSNKCPKKDSDSFKIRPLGFTEEVEVILQYICECECQSEGIPESPKCHEGNGTFECGACRCNEGRVGRHCECSTDEVNSEDMDAYCRKENSSEICSNNGECVCGQCVCRKRDNTNEIYSGKFCECDNFNCDRSNGLICGGNGVCKCRVCECNPNYTGSACDCSLDTSTCEASNGQICNGRGICECGVCKCTDPKFQGQTCEMCQTCLGVCAEHKECVQCRAFNKGEKKDTCTQECSYFNITKVESRDKLPQPVQPDPVSHCKEKDVDDCWFYFTYSVNGNNEVMVHVVENPECPTGPDIIPIVAGVVAGIVLIGLALLLIWKLLMIIHDRREFAKFEKEKMNAKWDTGENPIYKSAVTTVVNPKYEGK

SEQ ID NO: 241 - protein, 788 aa, Artificial Sequence
  P18564
MGIELLCLFFLFLGRNDHVQGGCALGGAETCEDCLLIGPQCAWCAQENFTHPSGVGERCDTPANLLAKGCQLNFIENPVSQVEILKNKPLSVGRQKNSSDIVQIAPQSLILKLRPGGAQTLQVHVRQTEDYPVDLYYLMDLSASMDDDLNTIKELGSRLSKEMSKLTSNFRLGFGSFVEKPVSPFVKTTPEEIANPCSSIPYFCLPTFGFKHILPLTNDAERFNEIVKNQKISANIDTPEGGFDAIMQAAVCKEKIGWRNDSLHLLVFVSDADSHFGMDSKLAGIVIPNDGLCHLDSKNEYSMSTVLEYPTIGQLIDKLVQNNVLLIFAVTQEQVHLYENYAKLIPGATVGLLQKDSGNILQLIISAYEELRSEVELEVLGDTEGLNLSFTAICNNGTLFQHQKKCSHMKVGDTASFSVTVNIPHCERRSRHIIIKPVGLGDALELLVSPECNCDCQKEVEVNSSKCHHGNGSFQCGVCACHPGHMGPRCECGEDMLSTDSCKEAPDHPSCSGRGDCYCGQCICHLSPYGNIYGPYCQCDNFSCVRHKGLLCGGNGDCDCGECVCRSGWTGEYCNCTTSTDSCVSEDGVLCSGRGDCVCGKCVCTNPGASGPTCERCPTCGDPCNSKRSCIECHLSAAGQAREECVDKCKLAGATISEEEDFSKDGSVSCSLQGENECLITFLITTDNEGKTIIHSINEKDCPKPPNIPMIMLGVSLAILLIGVVLLCIWKLLVSFHDRKEVAKFEAERSKAKWQTGTNPLYRGSTSTFKNVTYKHREKQKVDLSTDC

SEQ ID NO: 242 - protein, 261 aa, Artificial Sequence
  A0A024R4J4
MWDLVLSIALSVGCTGAVPLIQSRIVGGWECEKHSQPWQVAVYSHGWAHCGGVLVHPQWVLTAAHCLKKNSQVWLGRHNLFEPEDTGQRVPVSHSFPHPLYNMSLLKHQSLRPDEDSSHDLMLLRLSEPAKITDVVKVLGLPTQEPALGTTCYASGWGSIEPEEFLRPRSLQCVSLHLLSNDMCARAYSEKVTEFMLCAGLWTGGKDTCGGDSGGPLVCNGVLQGITSWGPEPCALPEKPAVYTKVVHYRKWIKDTIAANP

SEQ ID NO: 243 - protein, 223 aa, Artificial Sequence
  A0A024R4N3
MWDLVLSIALSVGCTGAVPLIQSRIVGGWECEKHSQPWQVAVYSHGWAHCGGVLVHPQWVLTAAHCLKKNSQVWLGRHNLFEPEDTGQRVPVSHSFPHPLYNMSLLKHQSLRPDEDSSHDLMLLRLSEPAKITDVVKVLGLPTQEPALGTTCYASGWGSIEPEEFLRPRSLQCVSLHLLSNDMCARAYSEKVTEFMLCAGLWTGGKDTCGVSHPYSQHLEGKG

SEQ ID NO: 244 - protein, 62 aa, Artificial Sequence
  B0AZU9
MSLLKHQSLRPDEDSSHDLMLLRLSEPAKITDVVKVLGLPTQEPALGTTCYASGWGSIEPEE

SEQ ID NO: 245 - protein, 244 aa, Artificial Sequence [sequence omitted]

SEQ ID NO: 246 - protein, 261 aa, Artificial Sequence; identical to SEQ ID NO: 242
  P20151

SEQ ID NO: 247 - protein, 49 aa, Artificial Sequence
  Q6T774
MWDLVLSIALSVGCTGIARSGWVGTTCLSLKTQARGSLSATASHTRSTI

SEQ ID NO: 248 - protein, 180 aa, Artificial Sequence
  Q6T775
MWDLVLSIALSVGCTGAVPLIQSRIVGGWECEKHSQPWQVAVYSHGWAHCGGVLVHPQWVLTAAHCLKKNSQVWLGRHNLFEPEDTGQRVPVSHSFPHPLYNMSLLKHQSLRPDEDSSHDLMLLRLSEPAKITDVVKVLGLPTQEPALGTTCYASGWGSIEPEECTPGPDGVAGSPDAWV

SEQ ID NO: 249 - protein, 254 aa, Artificial Sequence
  A0A0C4DFQ5
MATAGNPWGWFLGYLILGVAGSLVSGSCSQIINGEDCSPHSQPWQAALVMENELFCSGVLVHPQWVLSAAHCFQNSYTIGLGLHSLEADQEPGSQMVEASLSVRHPEYNRPLLANDLMLIKLDESVSESDTIRSISIASQCPTAGNSCLVSGWGLLANGRMPTVLQCVNVSVVSEEVCSKLYDPLYHPSMFCAGGGQDQKDSCNGDSGGPLICNGYLQGLVSFGKAPCGQVGVPGVYTNLCKFTEWIEKTVQAS

SEQ ID NO: 250 - protein, 75 aa, Artificial Sequence
  Q5BQA0
MATAGNPWGWFLGYLILGVAGSLVSGSCSQIINGEDCSPHSQPWQAALVMENELFCSGVLVHPQWVLSAAHCFQK

SEQ ID NO: 251 - protein, 195 aa, Artificial Sequence
  Q96PT0
MATAGNPWGWFLGYLILGVAGSLVSGSCSQIINGEDCSPHSQPWQAALVMENELFCSGVLVHPQWVLSAAHCFQNSYTIGLGLHSLEADQEPGSQMVEASLSVRHPEYNRPLLANDLMLIKLDESVSESDTIRSISIASQCPTAGNSCLVSGWGLLANGELTGVCLPSSRRSSAQSRGLTQSSASQAECLPCCSA

SEQ ID NO: 252 - protein, 159 aa, Artificial Sequence
  Q96PT1
MATAGNPWGWFLGYLILGVAGSLVSGSCSQIINGEDCSPHSQPWQAALVMENELFCSGVLVHPQWVLSAAHCFQNSYTIGLGLHSLEADQEPGSQMVEASLSVRHPEYNRPLLANDLMLIKLDESVSESDTIRSISIASQCPTAGNSCLVSGWGLLANG

SEQ ID NO: 253 - protein, 254 aa, Artificial Sequence
  Q9Y5K2
MATAGNPWGWFLGYLILGVAGSLVSGSCSQIINGEDCSPHSQPWQAALVMENELFCSGVLVHPQWVLSAAHCFQNSYTIGLGLHSLEADQEPGSQMVEASLSVRHPEYNRPLLANDLMLIKLDESVSESDTIRSISIASQCPTAGNSCLVSGWGLLANGRMPTVLQCVNVSVVSEEVCSKLYDPLYHPSMFCAGGGHDQKDSCNGDSGGPLICNGYLQGLVSFGKAPCGQVGVPGVYTNLCKFTEWIEKTVQAS

SEQ ID NO: 254 - protein, 890 aa, Artificial Sequence
  O95235
MSQGILSPPAGLLSDDDVVVSPMFESTAADLGSVVRKNLLSDCSVVSTSLEDKQQVPSEDSMEKVKVYLRVRPLLPSELERQEDQGCVRIENVETLVLQAPKDSFALKSNERGIGQATHRFTFSQIFGPEVGQASFFNLTVKEMVKDVLKGQNWLIYTYGVTNSGKTHTIQGTIKDGGILPRSLALIFNSLQGQLHPTPDLKPLLSNEVIWLDSKQIRQEEMKKLSLLNGGLQEEELSTSLKRSVYIESRIGTSTSFDSGIAGLSSISQCTSSSQLDETSHRWAQPDTAPLPVPANIRFSIWISFFEIYNELLYDLLEPPSQQRKRQTLRLCEDQNGNPYVKDLNWIHVQDAEEAWKLLKVGRKNQSFASTHLNQNSSRSHSIFSIRILHLQGEGDIVPKISELSLCDLAGSERCKDQKSGERLKEAGNINTSLHTLGRCIAALRQNQQNRSKQNLVPFRDSKLTRVFQGFFTGRGRSCMIVNVNPCASTYDETLHVAKFSAIASQLVHAPPMQLGFPSLHSFIKEHSLQVSPSLEKGAKADTGLDDDIENEADISMYGKEELLQVVEAMKTLLLKERQEKLQLEMHLRDEICNEMVEQMQQREQWCSEHLDTQKELLEEMYEEKLNILKESLTSFYQEEIQERDEKIEELEALLQEARQQSVAHQQSGSELALRRSQRLAASASTQQLQEVKAKLQQCKAELNSTTEELHKYQKMLEPPPSAKPFTIDVDKKLEEGQKNIRLLRTELQKLGESLQSAERACCHSTGAGKLRQALTTCDDILIKQDQTLAELQNNMVLVKLDLRKKAACIAEQYHTVLKLQGQVSAKKRLGTNQENQQPNQQPPGKKPFLRNLLPRTPTCQSSTDCSPYARILRSRRSPLLKSGPFGKKY

SEQ ID NO: 255 - protein, 370 aa, Artificial Sequence
  Q92604
MAITLEEAPWLGWLLVKALMRFAFMVVNNLVAIPSYICYVIILQPLRVLDSKRFWYIEGIMYKWLLGMVASWGWYAGYTVMEWGEDIKAVSKDEAVMLVNHQATGDVCTLMMCLQDKGLVVAQMMWLMDHIFKYTNFGIVSLVHGDFFIRQGRSYRDQQLLLLKKHLENNYRSRDRKWIVLFPEGGFLRKRRETSQAFAKKNNLPFLTNVTLPRSGATKIILNALVAQQKNGSPAGGDAKELDSKSKGLQWIIDTTIAYPKAEPIDIQTWILGYRKPTVTHVHYRIFPIKDVPLETDDLTTWLYQRFVEKEDLLSHFYETGAFPPSKGHKEAVSREMTLSNLWIFLIQSFAFLSGYMWYNIIQYFYHCLF

SEQ ID NO: 256 - protein, 725 aa, Artificial Sequence
  Q99661
MAMDSSLQARLFPGLAIKIQRSNGLIHSANVRTVNLEKSCVSVEWAEGGATKGKEIDFDDVAAINPELLQLLPLHPKDNLPLQENVTIQKQKRRSVNSKIPAPKESLRSRSTRMSTVSELRITAQENDMEVELPAAANSRKQFSVPPAPTRPSCPAVAEIPLRMVSEEMEEQVHSIRGSSSANPVNSVRRKSCLVKEVEKMKNKREEKKAQNSEMRMKRAQEYDSSFPNWEFARMIKEFRATLECHPLTMTDPIEEHRICVCVRKRPLNKQELAKKEIDVISIPSKCLLLVHEPKLKVDLTKYLENQAFCFDFAFDETASNEVVYRFTARPLVQTIFEGGKATCFAYGQTGSGKTHTMGGDLSGKAQNASKGIYAMASRDVFLLKNQPCYRKLGLEVYVTFFEIYNGKLFDLLNKKAKLRVLEDGKQQVQVVGLQEHLVNSADDVIKMIDMGSACRTSGQTFANSNSSRSHACFQIILRAKGRMHGKFSLVDLAGNERGADTSSADRQTRMEGAEINKSLLALKECIRALGQNKAHTPFRESKLTQVLRDSFIGENSRTCMIATISPGISSCEYTLNTLRYADRVKELSPHSGPSGEQLIQMETEEMEACSNGALIPGNLSKEEEELSSQMSSFNEAMTQIRELEEKAMEELKEIIQQGPDWLELSEMTEQPDYDLETFVNKAESALAQQAKHFSALRDVIKALRLAMQLEEQASRQISSKKRPQ

SEQ ID NO: 257 - protein, 113 aa, Artificial Sequence
  Q5H943
MNFYLLLASSILCALIVFWKYRRFQRNTGEMSSNSTALALVRPSSSGLINSNTDNNLAVYDLSRDILNNFPHSIARQKRILVNLSMVENKLVELEHTLLSKGFRGASPHRKST

SEQ ID NO: 258 - protein, 860 aa, Artificial Sequence [sequence omitted]

SEQ ID NO: 259 - protein, 433 aa, Artificial Sequence
  Q99538
MVWKVAVFLSVALGIGAVPIDDPEDGGKHWVVIVAGSNGWYNYRHQADACHAYQIIHRNGIPDEQIVVMMYDDIAYSEDNPTPGIVINRPNGTDVYQGVPKDYTGEDVTPQNFLAVLRGDAEAVKGIGSGKVLKSGPQDHVFIYFTDHGSTGILVFPNEDLHVKDLNETIHYMYKHKMYRKMVFYIEACESGSMMNHLPDNINVYATTAANPRESSYACYYDEKRSTYLGDWYSVNWMEDSDVEDLTKETLHKQYHLVKSHTNTSHVMQYGNKTISTMKVMQFQGMKRKASSPVPLPPVTHLDLTPSPDVPLTIMKRKLMNTNDLEESRQLTEEIQRHLDARHLIEKSVRKIVSLLAASEAEVEQLLSERAPLTGHSCYPEALLHFRTHCFNWHSPTYEYALRHLYVLVNLCEKPYPLHRIKLSMDHVCLGHY

SEQ ID NO: 260 - protein, 598 aa, Artificial Sequence
  Q8N423
MTPIVTVLICLGLSLGPRTHVQTGTIPKPTLWAEPDSVITQGSPVTLSCQGSLEAQEYRLYREKKSASWITRIRPELVKNGQFHIPSITWEHTGRYGCQYYSRARWSELSDPLVLVMTGAYPKPTLSAQPSPVVTSGGRVTLQCESQVAFGGFILCKEGEEEHPQCLNSQPHARGSSRAIFSVGPVSPNRRWSHRCYGYDLNSPYVWSSPSDLLELLVPGVSKKPSLSVQPGPVVAPGESLTLQCVSDVGYDRFVLYKEGERDLRQLPGRQPQAGLSQANFTLGPVSRSYGGQYRCYGAHNLSSECSAPSDPLDILITGQIRGTPFISVQPGPTVASGENVTLLCQSWRQFHTFLLTKAGAADAPLRLRSIHEYPKYQAEFPMSPVTSAHAGTYRCYGSLNSDPYLLSHPSEPLELVVSGPSMGSSPPPTGPISTPAGPEDQPLTPTGSDPQSGLGRHLGVVIGILVAVVLLLLLLLLLFLILRHRRQGKHWTSTQRKADFQHPAGAVGPEPTDRGLQWRSSPAADAQEENLYAAVKDTQPEDGVEMDTRAAASEAPQDVTYAQLHSLTLRRKATEPPPSQEREPPAEPSIYATLAIH

SEQ ID NO: 261 - protein, 165 aa, Artificial Sequence
  Q17RY6
MALLALLLVVALPRVWTDANLTARQRDPEDSQRTDEGDNRVWCHVCERENTFECQNPRRCKWTEPYCVIAAVKIFPRFFMVAKQCSAGCAAMERPKPEEKRFLLEEPMPFFYLKCCKIRYCNLEGPPINSSVFKEYAGSMGESCGGLWLAILLLLASIAAGLSLS

SEQ ID NO: 262 - protein, 124 aa, Artificial Sequence
  P43359
MSLEQKSQHCKPEEGLDTQEEALGLVGVQAATTEEQEAVSSSSPLVPGTLGEVPAAGSPGPLKSPQGASAIPTAIDFTLWRQSIKGSSNQEEEGPSTSPDPESVFRAALSKKVADLIHFLLLKY

SEQ ID NO: 263 - protein, 318 aa, Artificial Sequence
  P43361
MLLGQKSQRYKAEEGLQAQGEAPGLMDVQIPTAEEQKAASSSSTLIMGTLEEVTDSGSPSPPQSPEGASSSLTVTDSTLWSQSDEGSSSNEEEGPSTSPDPAHLESLFREALDEKVAELVRFLLRKYQIKEPVTKAEMLESVIKNYKNHFPDIFSKASECMQVIFGIDVKEVDPAGHSYILVTCLGLSYDGLLGDDQSTPKTGLLIIVLGMILMEGSRAPEEAIWEALSVMGLYDGREHSVYWKLRKLLTQEWVQENYLEYRQAPGSDPVRYEFLWGPRALAETSYVKVLEHVVRVNARVRISYPSLHEEALGEEKGV

SEQ ID NO: 264 - protein, 429 aa, Artificial Sequence
  P43364
METQFRRGGLGCSPASIKRKKKREDSGDFGLQVSTMFSEDDFQSTERAPYGPQLQWSQDLPRVQVFREQANLEDRSPRRTQRITGGEQVLWGPITQIFPTVRPADLTRVIMPLEQRSQHCKPEEGLQAQEEDLGLVGAQALQAEEQEAAFFSSTLNVGTLEELPAAESPSPPQSPQEESFSPTAMDAIFGSLSDEGSGSQEKEGPSTSPDLIDPESFSQDILHDKIIDLVHLLLRKYRVKGLITKAEMLGSVIKNYEDYFPEIFREASVCMQLLFGIDVKEVDPTSHSYVLVTSLNLSYDGIQCNEQSMPKSGLLIIVLGVIFMEGNCIPEEVMWEVLSIMGVYAGREHFLFGEPKRLLTQNWVQEKYLVYRQVPGTDPACYEFLWGPRAHAETSKMKVLEYIANANGRDPTSYPSLYEDALREEGEGV

SEQ ID NO: 265 - protein, 369 aa, Artificial Sequence
  A0A024RC14
MPRAPKRQRCMPEEDLQSQSETQGLEGAQAPLAVEEDASSSTSTSSSFPSSFPSSSSSSSSSCYPLIPSTPEEVSADDETPNPPQSAQIACSSPSVVASLPLDQSDEGSSSQKEESPSTLQVLPDSESLPRSEIDEKVTDLVQFLLFKYQMKEPITKAEILESVIKNYEDHFPLLFSEASECMLLVFGIDVKEVDPTGHSFVLVTSLGLTYDGMLSDVQSMPKTGILILILSIIFIEGYCTPEEVIWEALNMMGLYDGMEHLIYGEPRKLLTQDWVQENYLEYRQVPGSDPARYEFLWGPRAHAEIRKMSLLKFLAKVNGSDPRSFPLWYEEALKDEEERAQDRIATTDDTTAMASASSSATGSFSYPE

SEQ ID NO: 266 - protein, 314 aa, Artificial Sequence
  P43365
MPLEQRSQHCKPEEGLEAQGEALGLVGAQAPATEEQETASSSSTLVEVTLREVPAAESPSPPHSPQGASTLPTTINYTLWSQSDEGSSNEEQEGPSTFPDLETSFQVALSRKMAELVHFLLLKYRAREPFTKAEMLGSVIRNFQDFFPVIFSKASEYLQLVFGIEVVEVVRIGHLYILVTCLGLSYDGLLGDNQIVPKTGLLIIVLAIIAKEGDCAPEEKIWEELSVLEASDGREDSVFAHPRKLLTQDLVQENYLEYRQVPGSDPACYEFLWGPRALVETSYVKVLHHLLKISGGPHISYPPLHEWAFREGEE

SEQ ID NO: 267 - protein, 309 aa, Artificial Sequence
  P43355
MSLEQRSLHCKPEEALEAQQEALGLVCVQAATSSSSPLVLGTLEEVPTAGSTDPPQSPQGASAFPTTINFTRQRQPSEGSSSREEEGPSTSCILESLFRAVITKKVADLVGFLLLKYRAREPVTKAEMLESVIKNYKHCFPEIFGKASESLQLVFGIDVKEADPTGHSYVLVTCLGLSYDGLLGDNQIMPKTGFLIIVLVMIAMEGGHAPEEEIWEELSVMEVYDGREHSAYGEPRKLLTQDLVQEKYLEYRQVPDSDPARYEFLWGPRALAETSYVKVLEYVIKVSARVRFFFPSLREAALREEEEGV

SEQ ID NO: 268 - protein, 314 aa, Artificial Sequence
  P43356
MPLEQRSQHCKPEEGLEARGEALGLVGAQAPATEEQQTASSSSTLVEVTLGEVPAADSPSPPHSPQGASSFSTTINYTLWRQSDEGSSNQEEEGPRMFPDLESEFQAAISRKMVELVHFLLLKYRAREPVTKAEMLESVLRNCQDFFPVIFSKASEYLQLVFGIEVVEVVPISHLYILVTCLGLSYDGLLGDNQVMPKTGLLIIVLAIIAIEGDCAPEEKIWEELSMLEVFEGREDSVFAHPRKLLMQDLVQENYLEYRQVPGSDPACYEFLWGPRALIETSYVKVLHHTLKIGGEPHISYPPLHERALREGEE

SEQ ID NO: 269 - protein, 314 aa, Artificial Sequence
  P43357
MPLEQRSQHCKPEEGLEARGEALGLVGAQAPATEEQEAASSSSTLVEVTLGEVPAAESPDPPQSPQGASSLPTTMNYPLWSQSYEDSSNQEEEGPSTFPDLESEFQAALSRKVAELVHFLLLKYRAREPVTKAEMLGSVVGNWQYFFPVIFSKASSSLQLVFGIELMEVDPIGHLYIFATCLGLSYDGLLGDNQIMPKAGLLIIVLAIIAREGDCAPEEKIWEELSVLEVFEGREDSILGDPKKLLTQHFVQENYLEYRQVPGSDPACYEFLWGPRALVETSYVKVLHHMVKISGGPHISYPPLHEWVLREGEE

SEQ ID NO: 270 - protein, 317 aa, Artificial Sequence
  A0A024RC12
MSSEQKSQHCKPEEGVEAQEEALGLVGAQAPTTEEQEAAVSSSSPLVPGTLEEVPAAESAGPPQSPQGASALPTTISFTCWRQPNEGSSSQEEEGPSTSPDAESLFREALSNKVDELAHFLLRKYRAKELVTKAEMLERVIKNYKRCFPVIFGKASESLKMIFGIDVKEVDPASNTYTLVTCLGLSYDGLLGNNQIFPKTGLLIIVLGTIAMEGDSASEEEIWEELGVMGVYDGREHTVYGEPRKLLTQDWVQENYLEYRQVPGSNPARYEFLWGPRALAETSYVKVLEHVVRVNARVRIAYPSLREAALLEEEEGV

SEQ ID NO: 271 - protein, 317 aa, Artificial Sequence; identical to SEQ ID NO: 270
  P43358

SEQ ID NO: 272 - protein, 317 aa, Artificial Sequence
  Q1RN33
MSSEQKSQHCKPEEGVEAQEEALGLVGAQAPTTEEQEAAVSSSSPLVPGTLEEVPAAESAGPPQSPQGASALPTTISFTCWRQPNEGSSSQEEEGPSTSPDAESLFREALSNKVDELAHFLLRKYRAKELVTKAEMLERVIKNYKRCFPVIFGKASESLKMIFGIDVKEVDPTSNTYTLVTCLGLSYDGLLGNNQIFPKTGLLIIVLGTIAMEGDSASEEEIWEELGVMGVYDGREHTVYGEPRKLLTQDWVQENYLEYRQVPGSNPARYEFLWGPRALAETSYVKVLEHVVRVNARVRIAYPSLREAALLEEEEGV

SEQ ID NO: 273 - protein, 314 aa, Artificial Sequence [sequence omitted]

SEQ ID NO: 274 - protein, 314 aa, Artificial Sequence
  P43360
MPLEQRSQHCKPEEGLEARGEALGLVGAQAPATEEQEAASSSSTLVEVTLGEVPAAESPDPPQSPQGASSLPTTMNYPLWSQSYEDSSNQEEEGPSTFPDLESEFQAALSRKVAKLVHFLLLKYRAREPVTKAEMLGSVVGNWQYFFPVIFSKASDSLQLVFGIELMEVDPIGHVYIFATCLGLSYDGLLGDNQIMPKTGFLIIILAIIAKEGDCAPEEKIWEELSVLEVFEGREDSIFGDPKKLLTQYFVQENYLEYRQVPGSDPACYEFLWGPRALIETSYVKVLHHMVKISGGPRISYPLLHEWALREGEE

SEQ ID NO: 275 - protein, 314 aa, Artificial Sequence [sequence omitted]

SEQ ID NO: 276 - protein, 315 aa, Artificial Sequence
  P43362
MSLEQRSPHCKPDEDLEAQGEDLGLMGAQEPTGEEEETTSSSDSKEEEVSAAGSSSPPQSPQGGASSSISVYYTLWSQFDEGSSSQEEEEPSSSVDPAQLEFMFQEALKLKVAELVHFLLHKYRVKEPVTKAEMLESVIKNYKRYFPVIFGKASEFMQVIFGTDVKEVDPAGHSYILVTALGLSCDSMLGDGHSMPKAALLIIVLGVILTKDNCAPEEVIWEALSVMGVYVGKEHMFYGEPRKLLTQDWVQENYLEYRQVPGSDPAHYEFLWGSKAHAETSYEKVINYLVMLNAREPICYPSLYEEVLGEEQEGV

SEQ ID NO: 277 - protein, 347 aa, Artificial Sequence
  Q96LZ2
MPRGQKSKLRAREKRRQARGGLEDLIDALDILEEEEESPPSASACLKDVFQSSLDGASNNPHGLREAQSTSTSATAASHTRHPEGVNDQMEERPICTQDLEATDSFPRGPVDEKVIILVHYLLYKYQMKEPITKADMLRNVTQMSKSQFPVILSRASEHLELIFGLDLKEVEPNKHIYVLVNKLDLGCDAKLSDETGVPKTGLLMTVLGIIFTNGNCVAEEEVWKVFNTMGLYDGIEHFMFGEPRKLLTKDLVKENYLEYQQVPNSDPPRYQFLWGPRAHAETSKMKVLEFLAKVNDTAPSEFSNWYTEALQDEEERARARVAAKARVSATAGARSKVKSSKSSQLQ

SEQ ID NO: 278 - protein, 324 aa, Artificial Sequence
  A2A368
MSQDQESPRCTHDQHLQTFSETQSLEVAQVSKALEKTLLSSSHPLVPGKLKEAPAAKAESPLEVPQSFCSSSIAVTTTSSSESDEASSNQEEEDSPSSSEDTSDPRNVPADALDQKVAFLVNFMLHKCQMKKPITKADMLKIIIKDDESHFSEILLRASEHLEMIFGLDVVEVDPTTHCYGLFIKLGLTYDGMLSGEKGVPKTGLLIIVLGVIFMKGNRATEEEVWEVLNLTGVYSGKKHFIFGEPRMLITKDFVKEKYLEYQQVANSDPARYEFLWGPRAKAETSKMKVLEFVAKVHGSYPHSFPSQYAEALKEEEERARARI

SEQ ID NO: 279 - protein, 336 aa, Artificial Sequence
  A8MXT2
MPRGQASKRRAREKRRQARGEDQCLGGAQATAAEKEKLPSSSSPACQSPPQSFPNAGIPQESQRASYPSSPASAVSLTSSDEGAKGQKGESPNSFHGPSSSESTGRDLLNTKTGELVQFLLNKYIRKEPITREAMLKVINRKYKQHFPEILRRSTENVEVVFGLYLKEMDPSRQSYVLVGKLDFPNQGSLSDGGGFPLSGLLMVLLSTIFMHGNRATEEEMWECLNALGMYKGRKHFIYGEPQELVTKDLVREGYLEYQQVPSSDPPRYEFLWGPRARAETSKMKVLEFVAKLNDTVASTYKSRYEEALREEEEQARARAVARDSARARASRSFQP

SEQ ID NO: 280 - protein, 347 aa, Artificial Sequence [sequence omitted]

SEQ ID NO: 281 - protein, 319 aa, Artificial Sequence
  O15479
MPRGQKSKLRAREKRRKARDETRGLNVPQVTEAEEEEAPCCSSSVSGGAASSSPAAGIPQEPQRAPTTAAAAAAGVSSTKSKKGAKSHQGEKNASSSQASTSTKSPSEDPLTRKSGSLVQFLLYKYKIKKSVTKGEMLKIVGKRFREHFPEILKKASEGLSVVFGLELNKVNPNGHTYTFIDKVDLTDEESLLSSWDFPRRKLLMPLLGVIFLNGNSATEEEIWEFLNMLGVYDGEEHSVFGEPWKLITKDLVQEKYLEYKQVPSSDPPRFQFLWGPRAYAETSKMKVLEFLAKVNGTTPCAFPTHYEEALKDEEKAGV

SEQ ID NO: 282 - protein, 346 aa, Artificial Sequence
  O15480
MPRGQKSTLHAREKRQQTRGQTQDHQGAQITATNKKKVSFSSPLILGATIQKKSAGRSRSALKKPQRALSTTTSVDVSYKKSYKGANSKIEKKQSFSQGLSSTVQSRTDPLIMKTNMLVQFLMEMYKMKKPIMKADMLKIVQKSHKNCFPEILKKASFNMEVVFGVDLKKVDSTKDSYVLVSKMDLPNNGTVTRGRGFPKTGLLLNLLGVIFMKGNCATEEKIWEFLNKMRIYDGKKHFIFGEPRKLITQDLVKLKYLEYRQVPNSNPARYEFLWGPRAHAETSKMKVLEFWAKVNKTVPSAFQFWYEEALRDEEERVQAAAMLNDGSSAMGRKCSKAKASSSSHA

SEQ ID NO: 283 - protein, 346 aa, Artificial Sequence
  O15481
MPRGQKSKLRAREKRQRTRGQTQDLKVGQPTAAEKEESPSSSSSVLRDTASSSLAFGIPQEPQREPPTTSAAAAMSCTGSDKGDESQDEENASSSQASTSTERSLKDSLTRKTKMLVQFLLYKYKMKEPTTKAEMLKIISKKYKEHFPEIFRKVSQRTELVFGLALKEVNPTTHSYILVSMLGPNDGNQSSAWTLPRNGLLMPLLSVIFLNGNCAREEEIWEFLNMLGIYDGKRHLIFGEPRKLITQDLVQEKYLEYQQVPNSDPPRYQFLWGPRAHAETSKMKVLEFLAKVNDTTPNNFPLLYEEALRDEEERAGARPRVAARRGTTAMTSAYSRATSSSSSQPM

SEQ ID NO: 284 - protein, 275 aa, Artificial Sequence
  Q9BZ81
MTSAGVFNAGSDERANSRDEEYPCSSEVSPSTESSCSNFINIKVGLLEQFLLYKFKMKQRILKEDMLKIVNPRYQNQFAEIHRRASEHIEVVFAVDLKEVNPTCHLYDLVSKLKLPNNGRIHVGKVLPKTGLLMTFLVVIFLKGNCANKEDTWKFLDMMQIYDGKKYYIYGEPRKLITQDFVRLTYLEYHQVPCSYPAHYQFLWGPRAYTETSKMKVLEYLAKVNDIAPGAFSSQYEEALQDEEESPSQRCSRNWHYCSGQDCLRAKFSSFSQPY

SEQ ID NO: 285 - protein, 407 aa, Artificial Sequence
  Q8N7X4
MPRGHKSKLRTCEKRQETNGQPQGLTGPQATAEKQEESHSSSSSSRACLGDCRRSSDASIPQESQGVSPTGSPDAVVSYSKSDVAANGQDEKSPSTSRDASVPQESQGASPTGSPDAGVSGSKYDVAANGQDEKSPSTSHDVSVPQESQGASPTGSPDAGVSGSKYDVAAEGEDEESVSASQKAIIFKRLSKDAVKKKACTLAQFLQKKFEKKESILKADMLKCVRREYKPYFPQILNRTSQHLVVAFGVELKEMDSSGESYTLVSKLGLPSEGILSGDNALPKSGLLMSLLVVIFMNGNCATEEEVWEFLGLLGIYDGILHSIYGDARKIITEDLVQDKYVVYRQVCNSDPPCYEFLWGPRAYAETTKMRVLRVLADSSNTSPGLYPHLYEDALIDEVERALRLRA

SEQ ID NO: 286 - protein, 1142 aa, Artificial Sequence
  O60732
MGDKDMPTAGMPSLLQSSSESPQSCPEGEDSQSPLQIPQSSPESDDTLYPLQSPQSRSEGEDSSDPLQRPPEGKDSQSPLQIPQSSPEGDDTQSPLQNSQSSPEGKDSLSPLEISQSPPEGEDVQSPLQNPASSFFSSALLSIFQSSPESTQSPFEGFPQSVLQIPVSAASSSTLVSIFQSSPESTQSPFEGFPQSPLQIPVSRSFSSTLLSIFQSSPERTQSTFEGFAQSPLQIPVSPSSSSTLLSLFQSFSERTQSTFEGFAQSSLQIPVSPSFSSTLVSLFQSSPERTQSTFEGFPQSPLQIPVSSSSSSTLLSLFQSSPERTHSTFEGFPQSLLQIPMTSSFSSTLLSIFQSSPESAQSTFEGFPQSPLQIPGSPSFSSTLLSLFQSSPERTHSTFEGFPQSPLQIPMTSSFSSTLLSILQSSPESAQSAFEGFPQSPLQIPVSSSFSYTLLSLFQSSPERTHSTFEGFPQSPLQIPVSSSSSSSTLLSLFQSSPECTQSTFEGFPQSPLQIPQSPPEGENTHSPLQIVPSLPEWEDSLSPHYFPQSPPQGEDSLSPHYFPQSPPQGEDSLSPHYFPQSPQGEDSLSPHYFPQSPPQGEDSMSPLYFPQSPLQGEEFQSSLQSPVSICSSSTPSSLPQSFPESSQSPPEGPVQSPLHSPQSPPEGMHSQSPLQSPESAPEGEDSLSPLQIPQSPLEGEDSLSSLHFPQSPPEWEDSLSPLHFPQFPPQGEDFQSSLQSPVSICSSSTSLSLPQSFPESPQSPPEGPAQSPLQRPVSSFFSYTLASLLQSSHESPQSPPEGPAQSPLQSPVSSFPSSTSSSLSQSSPVSSFPSSTSSSLSKSSPESPLQSPVISFSSSTSLSPFSEESSSPVDEYTSSSDTLLESDSLTDSESLIESEPLFTYTLDEKVDELARFLLLKYQVKQPITKAEMLTNVISRYTGYFPVIFRKAREFIEILFGISLREVDPDDSYVFVNTLDLTSEGCLSDEQGMSQNRLLILILSIIFIKGTYASEEVIWDVLSGIGVRAGREHFAFGEPRELLTKVWVQEHYLEYREVPNSSPPRYEFLWGPRAHSEVIKRKVVEFLAMLKNTVPITFPSSYKDALKDVEERAQAIIDTTDDSTATESASSSVMSPSFSSE

SEQ ID NO: 287 - protein, 373 aa, Artificial Sequence
  Q9UBF1
MPPVPGVPFRNVDNDSPTSVELEDWVDAQHPTDEEEEEASSASSTLYLVFSPSSFSTSSSLILGGPEEEEVPSGVIPNLTESIPSSPPQGPPQGPSQSPLSSCCSSFSWSSFSEESSSQKGEDTGTCQGLPDSESSFTYTLDEKVAELVEFLLLKYEAEEPVTEAEMLMIVIKYKDYFPVILKRAREFMELLFGLALIEVGPDHFCVFANTVGLTDEGSDDEGMPENSLLIIILSVIFIKGNCASEEVIWEVLNAVGVYAGREHFVYGEPRELLTKVWVQGHYLEYREVPHSSPPYYEFLWGPRAHSESIKKKVLEFLAKLNNTVPSSFPSWYKDALKDVEERVQATIDTADDATVMASESLSVMSSNVSFSE

SEQ ID NO: 288 - protein, 643 aa, Artificial Sequence
  Q8TD91
MLLPCHWVLDATFSDGSLGQWVKNTCATYALSPVVLPPQPQPRKKATDKDYSAFHLGHLREVRLFLRGGTSDQRMDSLVLCPTYFKLWRTLSGSPGLQLSDLHFGSQPEGKFSLRRAVSVKQREEPQDWPLNEKRTLWKDSDLPTWRRGTGYTLSLPAVSPGKRLWGEKAGSLPESEPLFTYTLDEKVDKLVQFLLLKYQAKEPLTRAEMQMNVINTYTGYFPMIFRKAREFIEILFGISLTEVDPDHFYVFVNTLDLTCEGSLSDEQGMPQNRLLILILSVIFIKGNCASEEVIWEVLNAIGPWSALAGFADVLSRLALWESEGPEAFCEESGLRSAEGSVLDLANPQGLAGHRQEDGRRGLTEASPQQKKGGEDEDMPAAGMPPLPQSPPEIPPQGPPKISPQGPPQSPPQSPLDSCSSPLLWTRLDEESSSEEEDTATWHALPESESLPRYALDEKVAELVQFLLLKYQTKEPVTKAEMLTTVIKKYKDYFPMIFGKAHEFIELIFGIALTDMDPDNHSYFFEDTLDLTYEGSLIDDQGMPKNCLLILILSMIFIKGSCVPEEVIWEVLSAIGPIQRPAREVLEFLSKLSSIIPSAFPSWYMDALKDMEDRAQAIIDTTDDATAMASASPSVMSTNFCPE

SEQ ID NO: 289 - protein, 778 aa, Artificial Sequence
  Q9Y5V3
MAQKMDCGAGLLGFQAEASVEDSALLMQTLMEAIQISEAPPTNQATAAASPQSSQPPTANEMADIQVSAAAARPKSAFKVQNATTKGPNGVYDFSQAHNAKDVPNTQPKAAFKSQNATPKGPNAAYDFSQAATTGELAANKSEMAFKAQNATTKVGPNATYNFSQSLNANDLANSRPKTPFKAWNDTTKAPTADTQTQNVNQAKMATSQADIETDPGISEPDGATAQTSADGSQAQNLESRTIIRGKRTRKINNLNVEENSSGDQRRAPLAAGTWRSAPVPVTTQNPPGAPPNVLWQTPLAWQNPSGWQNQTARQTPPARQSPPARQTPPAWQNPVAWQNPVIWPNPVIWQNPVIWPNPIVWPGPVVWPNPLAWQNPPGWQTPPGWQTPPGWQGPPDWQGPPDWPLPPDWPLPPDWPLPTDWPLPPDWIPADWPIPPDWQNLRPSPNLRPSPNSRASQNPGAAQPRDVALLQERANKLVKYLMLKDYTKVPIKRSEMLRDIIREYTDVYPEIIERACFVLEKKFGIQLKEIDKEEHLYILISTPESLAGILGTTKDTPKLGLLLVILGVIFMNGNRASEAVLWEALRKMGLRPGVRHPLLGDLRKLLTYEFVKQKYLDYRRVPNSNPPEYEFLWGLRSYHETSKMKVLRFIAEVQKRDPRDWTAQFMEAADEALDALDAAAAEAEARAEARTRMGIGDEAVSGPWSWDDIEFELLTWDEEGDFGDPWSRIPFTFWARYHQNARSRFPQTFAGPIIGPGGTASANFAANFGAIGFFWVE

SEQ ID NO: 290 - protein, 606 aa, Artificial Sequence
  Q9UNF1
MSDTSESGAGLTRFQAEASEKDSSSMMQTLLTVTQNVEVPETPKASKALEVSEDVKVSKASGVSKATEVSKTPEAREAPATQASSTTQLTDTQVLAAENKSLAADTKKQNADPQAVTMPATETKKVSHVADTKVNTKAQETEAAPSQAPADEPEPESAAAQSQENQDTRPKVKAKKARKVKHLDGEEDGSSDQSQASGTTGGRRVSKALMASMARRASRGPIAFWARRASRTRLAAWARRALLSLRSPKARRGKARRRAAKLQSSQEPEAPPPRDVALLQGRANDLVKYLLAKDQTKIPIKRSDMLKDIIKEYTDVYPEIIERAGYSLEKVFGIQLKEIDKNDHLYILLSTLEPTDAGILGTTKDSPKLGLLMVLLSIIFMNGNRSSEAVIWEVLRKLGLRPGIHHSLFGDVKKLITDEFVKQKYLDYARVPNSNPPEYEFFWGLRSYYETSKMKVLKFACKVQKKDPKEWAAQYREAMEADLKAAAEAAAEAKARAEIRARMGIGLGSENAAGPCNWDEADIGPWAKARIQAGAEAKAKAQESGSASTGASTSTNNSASASASTSGGFSAGASLTATLTFGLFAGLGGAGASTSGSSGACGFSYK

SEQ ID NO: 291 - protein, 741 aa, Artificial Sequence
  Q96JG8
MAEGSFSVQSESYSVEDMDEGSDEVGEEEMVEGNDYEEFGAFGGYGTLTSFDIHILRAFGSLGPGLRILSNEPWELENPVLAQTLVEALQLDPETLANETAARAANVARAAASNRAARAAAAAARTAFSQVVASHRVATPQVSGEDTQPTTYAAEAQGPTPEPPLASPQTSQMLVTSKMAAPEAPATSAQSQTGSPAQEAATEGPSSACAFSQAPCAREVDANRPSTAFLGQNDVFDFTQPAGVSGMAFPRPKRPAPAQEAATEGPSAASGVPQTGPGREVAATRPKTTKSGKALAKTRWVEPQNVVAAAAAKAKMATSIPEPEGAAAATAQHSAEPWARMGGKRTKKSKHLDDEYESSEEERETPAVPPTWRASQPSLTVRAQLAPRPPMAPRSQIPSRHVLCLPPRNVTLLQERANKLVKYLMIKDYKKIPIKRADMLKDVIREYDEHFPEIIERATYTLEKKFGIHLKEIDKEEHLYILVCTRDSSARLLGKTKDTPRLSLLLVILGVIFMNGNRASEAVLWEALRKMGLRPGVRHPFLGDLRKLITDDFVKQKYLEYKKIPNSNPPEYEFLWGLRARHETSKMRVLRFIAQNQNRDPREWKAHFLEAVDDAFKTMDVDMAEEHARAQMRAQMNIGDEALIGRWSWDDIQVELLTWDEDGDFGDAWARIPFAFWARYHQYILNSNRANRRATWRAGVSSGTNGGASTSVLDGPSTSSTIRTRNAARAGASFFSWIQHR

SEQ ID NO: 292 - protein, 373 aa, Artificial Sequence [sequence omitted]

SEQ ID NO: 293 - protein, 957 aa, Artificial Sequence
  Q9HCI5
MSLVSQNSRRRRRRVAKATAHNSSWGEMQAPNAPGLPADVPGSDVPQGPSDSQILQGLCASEGPSTSVLPTSAEGPSTFVPPTISEASSASGQPTISEGPGTSVLPTPSEGLSTSGPPTISKGLCTSVTLAASEGRNTSRPPTSSEEPSTSVPPTASEVPSTSLPPTPGEGTSTSVPPTAYEGPSTSVVPTPDEGPSTSVLPTPGEGPGTSVPLAATEGLSTSVQATPDEGPSTSVPPTATEGLSTPVPPTRDEGPSTSVPATPGEGPSTSVLPAASDGQSISLVPTRGKGSSTSVPPTATEGLSTSVQPTAGEGSSTSVPPTPGGGLSTSVPPTATEELSTSVPPTPGEGPSTSVLPIPGEGLSTSVPPTASDGSDTSVPPTPGEGASTLVQPTAPDGPGSSVLPNPGEGPSTLFSSSASVDRNPSKCSLVLPSPRVTKASVDSDSEGPKGAEGPIEFEVLRDCESPNSISIMGLNTSRVAITLKPQDPMEQNVAELLQFLLVKDQSKYPIRESEMREYIVKEYRNQFPEILRRAAAHLECIFRFELRELDPEAHTYILLNKLGPVPFEGLEESPNGPKMGLLMMILGQIFLNGNQAKEAEIWEMLWRMGVQRERRLSIFGNPKRLLSVEFVWQRYLDYRPVTDCKPVEYEFFWGPRSHLETTKMKILKFMAKIYNKDPMDWPEKYNEALEEDAARAFAEGWQALPHFRRPFFEEAAAEVPSPDSEVSSYSSKYAPHSWPESRLESKARKLVQLFLLMDSTKLPIPKKGILYYIGRECSKVFPDLLNRAARTLNHVYGTELVVLDPRNHSYTLYNRREMEETEEIVDSPNRPGNNFLMQVLSFIFIMGNHARESAVWAFLRGLGVQAGRKHVITCRYLSQRYIDSLRVPDSDPVQYEFVWGPRARLETSKMKALRYVARIHRKEPQDWPQQYREAMEDEANRADVGHRQIFVHNFR

SEQ ID NO: 294 - protein, 523 aa, Artificial Sequence
  Q8TD90
MSLVSQNARHCSAEITADYGDGRGEIQATNASGSPTSMLVVDAPQCPQAPINSQCVNTSQAVQDPNDLEVLIDEQSRRLGALRVHDPLEDRSIALVNFMRMKSQTEGSIQQSEMLEFLREYSDQFPEILRRASAHLDQVFGLNLRVIDPQADTYNLVSKRGFQITDRIAESLDMPKASLLALVLGHILLNGNRAREASIWDLLLKVDMWDKPQRINNLFGNTRNLLTTDFVCMRFLEYWPVYGTNPLEFEFLWGSRAHREITKMEALKFVSDAHDEEPWSWPEEYNKALEGDKTKERSLTAGLEFWSEDTMNDKANDLVQLAISVTEEMLPIHQDELLAHTGKEFEDVFPNILNRATLILDMFYGLSLIEVDTSEHIYLLVQQPESEEEQVMLESLGRPTQEYVMPILGLIFLMGNRVKEANVWNLLRRFSVDVGRKHSITRKLMRQRYLECRPLSYSNPVEYELLWGPRAHHETIKMKVLEYMARLYRKRPQNWPEQYREAVEDEEARAKSEATIMFFLDPT

SEQ ID NO: 295 - protein, 307 aa, Artificial Sequence
  Q9HAY2
MLQTPESRGLPVPQAEGEKDGGHDGETRAPTASQERPKEELGAGREEGAAEPALTRKGARALAAKALARRRAYRRLNRTVAELVQFLLVKDKKKSPITRSEMVKYVIGDLKILFPDIIARAAEHLRYVFGFELKQFDRKHHTYILINKLKPLEEEEEEDLGGDGPRLGLLMMILGLIYMRGNSAREAQVWEMLRRLGVQPSKYHFLFGYPKRLIMEDFVQQRYLSYRRVPHTNPPEYEFSWGPRSNLEISKMEVLGFVAKLHKKEPQHWPVQYREALADEADRARAKARAEASMRARASARAGIHLW

SEQ ID NO: 296 - protein, 219 aa, Artificial Sequence
  Q9H213
MPRGRKSRRRRNARAAEENRNNRKIQASEASETPMAASVVASTPEDDLSGPEEDPSTPEEASTTPEEASSTAQAQKPSVPRSNFQGTKKSLLMSILALIFIMGNSAKEALVWKVLGKLGMQPGRQHSIFGDPKKIVTEEFVRRGYLIYKPVPRSSPVEYEFFWGPRAHVESSKLKVMHFVARVRNRCSKDWPCNYDWDSDDDAEVEAILNSGARGYSAP

SEQ ID NO: 297 - protein, 1249 aa, Artificial Sequence
  Q9UJ55
MSQLSKNLGDSSPPAEAPKPPVYSRPTVLMRAPPASSRAPPVPWDPPPIDLQASLAAWQAPQPAWEAPQGQLPAPVVPMTQPPALGGPIVPAPPLGGPMGKPPTPGVLMVHPPPPGAPMAQPPTPGVLMVHPSAPGAPMAHPPPPGTPMSHPPPPGTPMAHPPPPGTPMAHPPPPGTPMVHPPPPGTPMAHPPPPGTPMAHPPPPGTPMAHPPPPGTPMAHPPPPGTPMAQPPAPGVLMAQPLTPGVLMVQPAAPGAPMVQPPPAAMMTQPQPSGAPMAKPPGPGVLMIHPPGARAPMTQPPASGAPMAQPAAPPAQPMAPPAQPMASWAPQAQPLILQIQSQVIRAPPQVPQGPQAPPAQLATPPGWQATSPGWQATQQGWQATPLTWQTTQVTWQAPAVTWQVPPPMRQGPPPIRPGPPPIRPGPPPVRQAPPLIRQAPPVIRQAPPVIRQAPPVIRQAPAVIRQAPPVIRQAPPVIRQAPPVIRQAPPLIRQAPPPIRPAPQVLATQPPLWQALPPPPPLRQAPQARLPAPQVQAAPQVPTAPPATQVPAAPPAGPQVPQPVLPAPLSAPLSAPQAVHCPSIIWQAPKGQPPVPHEIPTSMEFQEVQQTQALAWQAQKAPTHIWQPLPAQEAQRQAPPLVQLEQPFQGAPPSQKAVQIQLPPQQAQASGPQAEVPTLPLQPSWQAPPAVLQAQPGPPVAAANFPLGSAKSLMTPSGECRASSIDRRGSSKERRTSSKERRAPSKDRMIFAATFCAPKAVSAARAHLPAAWKNLPATPETFAPSSSVFPATSQFQPASLNAFKGPSAASETPKSLPYALQDPFACVEALPAVPWVPQPNMNASKASQAVPTFLMATAAAPQATATTQEASKTSVEPPRRSGKATRKKKHLEAQEDSRGHTLAFHDWQGPRPWENLNLSDWEVQSPIQVSGDWEHPNTPRGLSGWEGPSTSRILSGWEGPSASWALSAWEGPSTSRALGLSESPGSSLPVVVSEVASVSPGSSATQDNSKVEAQPLSPLDERANALVQFLLVKDQAKVPVQRSEMVKVILREYKDECLDIINRANNKLECAFGYQLKEIDTKNHAYIIINKLGYHTGNLVASYLDRPKFGLLMVVLSLIFMKGNCVREDLIFNFLFKLGLDVRETNGLFGNTKKLITEVFVRQKYLEYRRIPYTEPAEYEFLWGPRAFLETSKMLVLRFLAKLHKKDPQSWPFHYLEALAECEWEDTDEDEPDTGDSAHGPTSRPPPR

SEQ ID NO: 298 - protein, 93 aa, Artificial Sequence
  Q13296
MKLLMVLMLAALSQHCYAGSGCPLLENVISKTINPQVSKTEYKELLQEFIDDNATTNAIDELKECFLNQTDETLSNVEVFMQLIYDSSLCDLF

SEQ ID NO: 299 - protein, 120 aa, Artificial Sequence
  Q6NX70
MKLLMVLMLAALSQHCYAGSGCPLLENVISKTINPQVSKTEYKELLQEFIDDNATTNAIDELKECFLNQTDETLSNVEVFMVISFSSYKLFKSPDQGQVGSSFLTDNAKATSEQAFSYIG

SEQ ID NO: 300 - protein, 118 aa, Artificial Sequence
  Q16655
MPREDAHFIYGYPKKGHGHSYTTAEEAAGIGILTVILGVLLLIGCWYCRRRNGYRALMDKSLHVGTQCALTRRCPQEGFDHRDSKVSLQEKNCEPVVPNAPPAYEKLSAEQSPPPYSP

SEQ ID NO: 301 - protein, 493 aa, Artificial Sequence
  Q5VTY9
MLPRWELALYLLASLGFHFYSFYEVYKVSREHEEELDQEFELETDTLFGGLKKDATDFEWSFWMEWGKQWLVWLLLGHMVVSQMATLLARKHRPWILMLYGMWACWCVLGTPGVAMVLLHTTISFCVAQFRSQLLTWLCSLLLLSTLRLQGVEEVKRRWYKTENEYYLLQFTLTVRCLYYTSFSLELCWQQLPAASTSYSFPWMLAYVFYYPVLHNGPILSFSEFIKQMQQQEHDSLKASLCVLALGLGRLLCWWWLAELMAHLMYMHAIYSSIPLLETVSCWTLGGLALAQVLFFYVKYLVLFGVPALLMRLDGLTPPALPRCVSTMFSFTGMWRYFDVGLHNFLIRYVYIPVGGSQHGLLGTLFSTAMTFAFVSYWHGGYDYLWCWAALNWLGVTVENGVRRLVETPCIQDSLARYFSPQARRRFHAALASCSTSMLILSNLVFLGGNEVGKTYWNRIFIQGWPWVTLSVLGFLYCYSHVGIAWAQTYATD

SEQ ID NO: 302 - protein, 317 aa, Artificial Sequence
  Q01726
MAVQGSQRRLLGSLNSTPTAIPQLGLAANQTGARCLEVSISDGLFLSLGLVSLVENALVVATIAKNRNLHSPMYCFICCLALSDLLVSGSNVLETAVILLLEAGALVARAAVLQQLDNVIDVITCSSMLSSLCFLGAIAVDRYISIFYALRYHSIVTLPRARRAVAAIWVASVVFSTLFIAYYDHVAVLLCLVVFFLAMLVLMAVLYVHMLARACQHAQGIARLHKRQRPVHQGFGLKGAVTLTILLGIFFLCWGPFFLHLTLIVLCPEHPTCGCIFKNFNLFLALIICNAIIDPLIYAFHSQELRRTLKEVLTCSW

SEQ ID NO: 303 - protein, 317 aa, Artificial Sequence; identical to SEQ ID NO: 302
  Q1JUL4

SEQ ID NO: 304 - protein, 317 aa, Artificial Sequence
  Q1JUL6
MAVQGSQRRLLGSLNSTPTAIPQLGLAANQTGARCLEVSISDGLFLSLGLVSLVENALVVATIAKNRNLHSPMYCFICCLALSDLLVSGSNVLETAVILLLEAGALVARAAVLQQLDNVIDVITCSSMLSSLCFLGAIAVDRYISIFYALRYHSIVTLPRARQAVAAIWVASVVFSTLFIAYYDHVAVLLCLVVFFLAMLVLMAVLYVHMLARACQHAQGIARLHKRQRPVHQGFGLKGAVTLTILLGIFFLCWGPFFLHLTLIVLCPEHPTCGCIFKNFNLFLALIICNAIIDPLIYAFHSQELRRTLKEVLTCSW

SEQ ID NO: 305 - protein, 317 aa, Artificial Sequence
  Q1JUL8
MAVQGSQRRLLGSLNSTPTAIPQLGLAANQTGARCLEVSISDGLFLSLGLVSLVENALVVATIAKNRNLHSPMYCFICCLALSDLLVSGSNVLETAVILLLEAGALVARAAVLQQLDNVTDVITCSSMLSSLCFLGAIAVDRYISIFYALRYHSIVTLPRARRAVAAIWVASVVFSTLFIAYYDHVAVLLCLVVFFLAMLVLMAVLYVHMLARACQHAQGIARLHKRQRPVHQGFGLKGAVTLTILLGIFFLCWGPFFLHLTLIVLCPEHPTCGCIFKNFNLFLALIICNAIIDPLIYAFHSQELRRTLKEVLTCSW

SEQ ID NO: 306 - protein, 317 aa, Artificial Sequence [sequence omitted]

SEQ ID NO: 307 - protein, 317 aa, Artificial Sequence [sequence omitted]

SEQ ID NO: 308 - protein, 317 aa, Artificial Sequence [sequence omitted]

SEQ ID NO: 309 - protein, 317 aa, Artificial Sequence [sequence omitted]

SEQ ID NO: 310 - protein, 317 aa, Artificial Sequence [sequence omitted]

SEQ ID NO: 311 - protein, 316 aa, Artificial Sequence
  Q1JUM5
MAVQGSQRRLLGSLNSTPTAIPQLGLAANQTGARCLEVSISDGLFLSLGLVSLVENALVVATIAKNRNLHSPMYCFICCLALSDLLVSGSNVLETAVILLLEAGALVARAAVLQQLDNVIDVITCSSMLSSLCFLGAIAVDRYISIYALRYHSIVTLPRARQAVAAIWVASVVFSTLFIAYYDHVAVLLCLVVFFLAMLVLMAVLYVHMLARACQHAQGIARLHKRQRPVHQGFGLKGAVTLTILLGIFFLCWGPFFLHLTLIVLCPEHPTCGCIFKNFNLFLALIICNAIIDPLIYAFHSQELRRTLKEVLTCSW

SEQ ID NO: 312 - protein, 317 aa, Artificial Sequence [sequence omitted]

SEQ ID NO: 313 - protein, 317 aa, Artificial Sequence [sequence omitted]

SEQ ID NO: 314 - protein, 317 aa, Artificial Sequence [sequence omitted]

SEQ ID NO: 315 - protein, 317 aa, Artificial Sequence [sequence omitted]

SEQ ID NO: 316 - protein, 317 aa, Artificial Sequence [sequence omitted]

SEQ ID NO: 317 - protein, 317 aa, Artificial Sequence [sequence omitted]

SEQ ID NO: 318 - protein, 317 aa, Artificial Sequence [sequence omitted]

SEQ ID NO: 319 - protein, 317 aa, Artificial Sequence [sequence omitted]

SEQ ID NO: 320 - protein, 317 aa, Artificial Sequence [sequence omitted]

SEQ ID NO: 321 - protein, 317 aa, Artificial Sequence [sequence omitted]

SEQ ID NO: 322 - protein, 317 aa, Artificial Sequence [sequence omitted]

SEQ ID NO: 323 - protein, 317 aa, Artificial Sequence [sequence omitted]

SEQ ID NO: 324 - protein, 317 aa, Artificial Sequence
  V9Q7F1
MAVQGSQRRLLGSLNSTPTAIPQLGLAANQTGARCLEVSISDGLFLSLGLVSLVENALVVATIAKNRNLHSPMYCFICCLALSDLLVSGSNVLETAVILLLEAGALVARAAVLQQLDNVIDVITCSSMLSSLCFLGAIAVDRYISIFYALRYHSTVTLPRARRAVAAIWVASVVFSTLFIAYYDHVAVLLCLVVFFLAMLVLMAVLYVHMLARACQHAQGIARLHKRQRPVHQGFGLKGAVTLTILLGIFFLCWGPFFLHLTLIVLCPEHPTCGCIFKNFNLFLALIICNAIIDPLIYAFHSQELRRTLKEVLTCSW

SEQ ID NO: 325 - protein, 317 aa, Artificial Sequence [sequence omitted]

SEQ ID NO: 326 - protein, 317 aa, Artificial Sequence [sequence omitted]

SEQ ID NO: 327 - protein, 317 aa, Artificial Sequence [sequence omitted]

SEQ ID NO: 328 - protein, 317 aa, Artificial Sequence [sequence omitted]

SEQ ID NO: 329 - protein, 317 aa, Artificial Sequence [sequence omitted]

SEQ ID NO: 330 - protein, 317 aa, Artificial Sequence [sequence omitted]

SEQ ID NO: 331 - protein, 317 aa, Artificial Sequence [sequence omitted]

SEQ ID NO: 332 - protein, 317 aa, Artificial Sequence [sequence omitted]

SEQ ID NO: 333 - protein, 317 aa, Artificial Sequence [sequence omitted]

SEQ ID NO: 334 - protein, 317 aa, Artificial Sequence [sequence omitted]

SEQ ID NO: 335 - protein, 317 aa, Artificial Sequence [sequence omitted]

SEQ ID NO: 336 - protein, 317 aa, Artificial Sequence [sequence omitted]

SEQ ID NO: 337 - protein, 317 aa, Artificial Sequence [sequence omitted]

SEQ ID NO: 338 - protein, 317 aa, Artificial Sequence [sequence omitted]

SEQ ID NO: 339 - protein, 317 aa, Artificial Sequence [sequence omitted]

SEQ ID NO: 340 - protein, 317 aa, Artificial Sequence [sequence omitted]

SEQ ID NO: 341 - protein, 554 aa, Artificial Sequence
  P09603
MTAPGAAGRCPPTTWLGSLLLLVCLLASRSITEEVSEYCSHMIGSGHLQSLQRLIDSQMETSCQITFEFVDQEQLKDPVCYLKKAFLLVQDIMEDTMRFRDNTPNAIAIVQLQELSLRLKSCFTKDYEEHDKACVRTFYETPLQLLEKVKNVFNETKNLLDKDWNIFSKNCNNSFAECSSQDVVTKPDCNCLYPKAIPSSDPASVSPHQPLAPSMAPVAGLTWEDSEGTEGSSLLPGEQPLHTVDPGSAKQRPPRSTCQSFEPPETPVVKDSTIGGSPQPRPSVGAFNPGMEDILDSAMGTNWVPEEASGEASEIPVPQGTELSPSRPGGGSMQTEPARPSNFLSASSPLPASAKGQQPADVTGTALPRVGPVRPTGQDWNHTPQKTDHPSALLRDPPEPGSPRISSLRPQGLSNPSTLSAQPQLSRSHSSGSVLPLGELEGRRSTRDRRSPAEPEGGPASEGAARPLPRFNSVPLTDTGHERQSEGSFSPQLQESVFHLLVPSVILVLLAVGGLLFYRWRRRSHQEPQRADSPLEQPEGSPLTQDDRQVELPV

SEQ ID NO: 342 - protein, 630 aa, Artificial Sequence
  Q13421
MALPTARPLLGSCGTPALGSLLFLLFSLGWVQPSRTLAGETGQEAAPLDGVLANPPNISSLSPRQLLGFPCAEVSGLSTERVRELAVALAQKNVKLSTEQLRCLAHRLSEPPEDLDALPLDLLLFLNPDAFSGPQACTRFFSRITKANVDLLPRGAPERQRLLPAALACWGVRGSLLSEADVRALGGLACDLPGRFVAESAEVLLPRLVSCPGPLDQDQQEAARAALQGGGPPYGPPSTWSVSTMDALRGLLPVLGQPIIRSIPQGIVAAWRQRSSRDPSWRQPERTILRPRFRREVEKTACPSGKKAREIDESLIFYKKWELEACVDAALLATQMDRVNAIPFTYEQLDVLKHKLDELYPQGYPESVIQHLGYLFLKMSPEDIRKWNVTSLETLKALLEVNKGHEMSPQAPRRPLPQVATLIDRFVKGRGQLDKDTLDTLTAFYPGYLCSLSPEELSSVPPSSIWAVRPQDLDTCDPRQLDVLYPKARLAFQNMNGSEYFVKIQSFLGGAPTEDLKALSQQNVSMDLATFMKLRTDAVLPLTVAEVQKLLGPHVEGLKAEERHRPVRDWILRQRQDDLDTLGLGLQGGIPNGYLVLDLSMQEALSGTPCLLGPGPVLTVLALLLASTLA

SEQ ID NO: 343 - protein, 504 aa, Artificial Sequence
  O75030-8
MEALRVQMFMPCSFESLYLSSAEHPGASKPPISSSSMTSRILLRQQLMREQMQEQERREQQQKLQAAQFMQQRVPVSQTPAINVSVPTTLPSATQVPMEVLKVQTHLENPTKYHIQQAQRQQVKQYLSTTLANKHANQVLSLPCPNQPGDHVMPPVPGSSAPNSPMAMLTLNSNCEKEGFYKFEEQNRAESECPGMNTHSRASCMQMDDVIDDIISLESSYNEEILGLMDPALQMANTLPVSGNLIDLYGNQGLPPPGLTISNSCPANLPNIKRELTESEARALAKERQKKDNHNLIERRRRFNINDRIKELGTLIPKSNDPDMRWNKGTILKASVDYIRKLQREQQRAKELENRQKKLEHANRHLLLRIQELEMQARAHGLSLIPSTGLCSPDLVNRIIKQEPVLENCSQDLLQHHADLTCTTTLDLTDGTITFNNNLGTGTEANQAYSVPTKMGSKLEDILMDDTLSPVGVTDPLLSSVSPGASKTSSRRSSMSMEETEHTC

SEQ ID NO: 344 - protein, 419 aa, Artificial Sequence
  O75030-9
MLEMLEYNHYQVQTHLENPTKYHIQQAQRQQVKQYLSTTLANKHANQVLSLPCPNQPGDHVMPPVPGSSAPNSPMAMLTLNSNCEKEGFYKFEEQNRAESECPGMNTHSRASCMQMDDVIDDIISLESSYNEEILGLMDPALQMANTLPVSGNLIDLYGNQGLPPPGLTISNSCPANLPNIKRELTACIFPTESEARALAKERQKKDNHNLIERRRRFNINDRIKELGTLIPKSNDPDMRWNKGTILKASVDYIRKLQREQQRAKELENRQKKLEHANRHLLLRIQELEMQARAHGLSLIPSTGLCSPDLVNRIIKQEPVLENCSQDLLQHHADLTCTTTLDLTDGTITFNNNLGTGTEANQAYSVPTKMGSKLEDILMDDTLSPVGVTDPLLSSVSPGASKTSSRRSSMSMEETEHTC

SEQ ID NO: 345 - protein, 526 aa, Artificial Sequence
  O75030
MQSESGIVPDFEVGEEFHEEPKTYYELKSQPLKSSSSAEHPGASKPPISSSSMTSRILLRQQLMREQMQEQERREQQQKLQAAQFMQQRVPVSQTPAINVSVPTTLPSATQVPMEVLKVQTHLENPTKYHIQQAQRQQVKQYLSTTLANKHANQVLSLPCPNQPGDHVMPPVPGSSAPNSPMAMLTLNSNCEKEGFYKFEEQNRAESECPGMNTHSRASCMQMDDVIDDIISLESSYNEEILGLMDPALQMANTLPVSGNLIDLYGNQGLPPPGLTISNSCPANLPNIKRELTACIFPTESEARALAKERQKKDNHNLIERRRRFNINDRIKELGTLIPKSNDPDMRWNKGTILKASVDYIRKLQREQQRAKELENRQKKLEHANRHLLLRIQELEMQARAHGLSLIPSTGLCSPDLVNRIIKQEPVLENCSQDLLQHHADLTCTTTLDLTDGTITFNNNLGTGTEANQAYSVPTKMGSKLEDILMDDTLSPVGVTDPLLSSVSPGASKTSSRRSSMSMEETEHTC

SEQ ID NO: 346 - protein, 354 aa, Artificial Sequence [sequence omitted]

SEQ ID NO: 347 - protein, 267 aa, Artificial Sequence
  P09237
MRLTVLCAVCLLPGSLALPLPQEAGGMSELQWEQAQDYLKRFYLYDSETKNANSLEAKLKEMQKFFGLPITGMLNSRVIEIMQKPRCGVPDVAEYSLFPNSPKWTSKVVTYRIVSYTRDLPHITVDRLVSKALNMWGKEIPLHFRKVVWGTADIMIGFARGAHGDSYPFDGPGNTLAHAFAPGTGLGGDAHFDEDERWTDGSSLGINFLYAATHELGHSLGMGHSSDPNAVMYPTYGNGDPQNFKLSQDDIKGIQKLYGKRSNSRKK

SEQ ID NO: 348 - protein, 1255 aa, Artificial Sequence
  AAA60019
MTPGTQSPFFLLLLLTVLTVVTGSGHASSTPGGEKETSATQRSSVPSSTEKNAVSMTSSVLSSHSPGSGSSTTQGQDVTLAPATEPASGSAATWGQDVTSVPVTRPALGSTTPPAHDVTSAPDNKPAPGSTAPPAHGVTSAPDTRPAPGSTAPPAHGVTSAPDTRPAPGSTAPPAHGVTSAPDTRPAPGSTAPPAHGVTSAPDTRPAPGSTAPPAHGVTSAPDTRPAPGSTAPPAHGVTSAPDTRPAPGSTAPPAHGVTSAPDTRPAPGSTAPPAHGVTSAPDTRPAPGSTAPPAHGVTSAPDTRPAPGSTAPPAHGVTSAPDTRPAPGSTAPPAHGVTSAPDTRPAPGSTAPPAHGVTSAPDTRPAPGSTAPPAHGVTSAPDTRPAPGSTAPPAHGVTSAPDTRPAPGSTAPPAHGVTSAPDTRPAPGSTAPPAHGVTSAPDTRPAPGSTAPPAHGVTSAPDTRPAPGSTAPPAHGVTSAPDTRPAPGSTAPPAHGVTSAPDTRPAPGSTAPPAHGVTSAPDTRPAPGSTAPPAHGVTSAPDTRPAPGSTAPPAHGVTSAPDTRPAPGSTAPPAHGVTSAPDTRPAPGSTAPPAHGVTSAPDTRPAPGSTAPPAHGVTSAPDTRPAPGSTAPPAHGVTSAPDTRPAPGSTAPPAHGVTSAPDTRPAPGSTAPPAHGVTSAPDTRPAPGSTAPPAHGVTSAPDTRPAPGSTAPPAHGVTSAPDTRPAPGSTAPPAHGVTSAPDTRPAPGSTAPPAHGVTSAPDTRPAPGSTAPPAHGVTSAPDTRPAPGSTAPPAHGVTSAPDTRPAPGSTAPPAHGVTSAPDTRPAPGSTAPPAHGVTSAPDTRPAPGSTAPPAHGVTSAPDTRPAPGSTAPPAHGVTSAPDTRPAPGSTAPPAHGVTSAPDTRPAPGSTAPPAHGVTSAPDTRPAPGSTAPPAHGVTSAPDNRPALGSTAPPVHNVTSASGSASGSASTLVHNGTSARATTTPASKSTPFSIPSHHSDTPTTLASHSTKTDASSTHHSSVPPLTSSNHSTSPQLSTGVSFFFLSFHISNLQFNSSLEDPSTDYYQELQRDISEMFLQIYKQGGFLGLSNIKFRPGSVVVQLTLAFREGTINVHDVETQFNQYKTEAASRYNLTISDVSVSDVPFPFSAQSGAGVPGWGIALLVLVCVLVALAIVYLIALAVCQCRRKNYGQLDIFPARDTYHPMSEYPTYHTHGRYVPPSSTDRSPYEKVSAGNGGSSLSYTNPAVAAASANL

SEQ ID NO: 349 - protein, 711 aa, Artificial Sequence
  NP_116242
MMADAKYVLCRWEKRLWPAKVLARTATSTKNKRRKEYFLAVQILSLEEKIKVKSTEVEILEKSQIEAIASSLASQNEVPAAPLEELAYRRSLRVALDVLSEGSIWSQESSAGTGRADRSLRGKPMEHVSSPCDSNSSSLPRGDVLGSSRPHRRRPCVQQSLSSSFTCEKDPECKVDHKKGLRKSENPRGPLVLPAGGGAQDESGSRIHHKNWTLASKRGGNSAQKASLCLNGSSLSEDDTERDMGSKGGSWAAPSLPSGVREDDPCANAEGHDPGLPLGSLTAPPAPEPSACSEPGECPAKKRPRLDGSQRPPAVQLEPMAAGAAPSPGPGPGPRESVTPRSTARLGPPPSHASADATRCLPCPDSQKLEKECQSSEESMGSNSMRSILEEDEEDEEPPRVLLYHEPRSFEVGMLVWHKHKKYPFWPAVVKSVRQRDKKASVLYIEGHMNPKMKGFTVSLKSLKHFDCKEKQTLLNQAREDFNQDIGWCVSLITDYRVRLGCGSFAGSFLEYYAADISYPVRKSIQQDVLGTKLPQLSKGSPEEPVVGCPLGQRQPCRKMLPDRSRAARDRANQKLVEYIVKAKGAESHLRAILKSRKPSRWLQTFLSSSQYVTCVETYLEDEGQLDLVVKYLQGVYQEVGAKVLQRTNGDRIRFILDVLLPEAIICAISAVDEVDYKTAEEKYIKGPSLSYREKEIFDNQLLEERNRRRR

SEQ ID NO: 350 - protein, 145 aa, Artificial Sequence
  Q9Y5R8
MTVHNLYLFDRNGVCLHYSEWHRKKQAGIPKEEEYKLMYGMLFSIRSFVSKMSPLDMKDGFLAFQTSRYKLHYYETPTGIKVVMNTDLGVGPIRDVLHHIYSALYVELVVKNPLCPLGQTVQSELFRSRLDSYVRSLPFFSARAG

SEQ ID NO: 351 - protein, 464 aa, Artificial Sequence
  P04198
MPSCSTSTMPGMICKNPDLEFDSLQPCFYPDEDDFYFGGPDSTPPGEDIWKKFELLPTPPLSPSRGFAEHSSEPPSWVTEMLLENELWGSPAEEDAFGLGGLGGLTPNPVILQDCMWSGFSAREKLERAVSEKLQHGRGPPTAGSTAQSPGAGAASPAGRGHGGAAGAGRAGAALPAELAHPAAECVDPAVVFPFPVNKREPAPVPAAPASAPAAGPAVASGAGIAAPAGAPGVAPPRPGGRQTSGGDHKALSTSGEDTLSDSDDEDDEEEDEEEEIDVVTVEKRRSSSNTKAVTTFTITVRPKNAALGPGRAQSSELILKRCLPIHQQHNYAAPSPYVESEDAPPQKKIKSEASPRPLKSVIPPKAKSLSPRNSDSEDSERRRNHNILERQRRNDLRSSFLTLRDHVPELVKNEKAAKVVILKKATEYVHSLQAEEHQLLLEKEKLQARQQQLLKKIEHARTC

SEQ ID NO: 352 - protein, 1043 aa, Artificial Sequence
  Q9UBC5
MPLLEGSVGVEDLVLLEPLVEESLLKNLQLRYENKEIYTYIGNVVISVNPYQQLPIYGPEFIAKYQDYTFYELKPHIYALANVAYQSLRDRDRDQCILITGESGSGKTEASKLVMSYVAAVCGKGEQVNSVKEQLLQSNPVLEAFGNAKTIRNNNSSRFGKYMDIEFDFKGSPLGGVITNYLLEKSRLVKQLKGERNFHIFYQLLAGADEQLLKALKLERDTTGYAYLNHEVSRVDGMDDASSFRAVQSAMAVIGFSEEEIRQVLEVTSMVLKLGNVLVADEFQASGIPASGIRDGRGVREIGEMVGLNSEEVERALCSRTMETAKEKVVTALNVMQAQYARDALAKNIYSRLFDWIVNRINESIKVGIGEKKKVMGVLDIYGFEILEDNSFEQFVINYCNEKLQQVFIEMTLKEEQEEYKREGIPWTKVDYFDNGIICKLIEHNQRGILAMLDEECLRPGVVSDSTFLAKLNQLFSKHGHYESKVTQNAQRQYDHTMGLSCFRICHYAGKVTYNVTSFIDKNNDLLFRDLLQAMWKAQHPLLRSLFPEGNPKQASLKRPPTAGAQFKSSVAILMKNLYSKSPNYIRCIKPNEHQQRGQFSSDLVATQARYLGLLENVRVRRAGYAHRQGYGPFLERYRLLSRSTWPHWNGGDREGVEKVLGELSMSSGELAFGKTKIFIRSPKTLFYLEEQRRLRLQQLATLIQKIYRGWRCRTHYQLMRKSQILISSWFRGNMQKKCYGKIKASVLLIQAFVRGWKARKNYRKYFRSEAALTLADFIYKSMVQKFLLGLKNNLPSTNVLDKTWPAAPYKCLSTANQELQQLFYQWKCKRFRDQLSPKQVEILREKLCASELFKGKKASYPQSVPIPFCGDYIGLQGNPKLQKLKGGEEGPVLMAEAVKKVNRGNGKTSSRILLLTKGHVILTDTKKSQAKIVIGLDNVAGVSVTSLKDGLFSLHLSEMSSVGSKGDFLLVSEHVIELLTKMYRAVLDATQRQLTVTVTEKFSVRFKENSVAVKVVQGPAGGDNSKLRYKKKGSHCLEVTVQ

SEQ ID NO: 353 - protein, 1136 aa, Artificial Sequence
  O43795
MAKMEVKTSLLDNMIGVGDMVLLEPLNEETFINNLKKRFDHSEIYTYIGSVVISVNPYRSLPIYSPEKVEEYRNRNFYELSPHIFALSDEAYRSLRDQDKDQCILITGESGAGKTEASKLVMSYVAAVCGKGAEVNQVKEQLLQSNPVLEAFGNAKTVRNDNSSRFGKYMDIEFDFKGDPLGGVISNYLLEKSRVVKQPRGERNFHVFYQLLSGASEELLNKLKLERDFSRYNYLSLDSAKVNGVDDAANFRTVRNAMQIVGFMDHEAESVLAVVAAVLKLGNIEFKPESRVNGLDESKIKDKNELKEICELTGIDQSVLERAFSFRTVEAKQEKVSTTLNVAQAYYARDALAKNLYSRLFSWLVNRINESIKAQTKVRKKVMGVLDIYGFEIFEDNSFEQFIINYCNEKLQQIFIELTLKEEQEEYIREDIEWTHIDYFNNAIICDLIENNTNGILAMLDEECLRPGTVTDETFLEKLNQVCATHQHFESRMSKCSRFLNDTSLPHSCFRIQHYAGKVLYQVEGFVDKNNDLLYRDLSQAMWKASHALIKSLFPEGNPAKINLKRPPTAGSQFKASVATLMKNLQTKNPNYIRCIKPNDKKAAHIFNEALVCHQIRYLGLLENVRVRRAGYAFRQAYEPCLERYKMLCKQTWPHWKGPARSGVEVLFNELEIPVEEYSFGRSKIFIRNPRTLFKLEDLRKQRLEDLATLIQKIYRGWKCRTHFLLMKKSQIVIAAWYRRYAQQKRYQQTKSSALVIQSYIRGWKARKILRELKHQKRCKEAVTTIAAYWHGTQARRELRRLKEEARNKHAIAVIWAYWLGSKARRELKRLKEEARRKHAVAVIWAYWLGLKVRREYRKFFRANAGKKIYEFTLQRIVQKYFLEMKNKMPSLSPIDKNWPSRPYLFLDSTHKELKRIFHLWRCKKYRDQFTDQQKLIYEEKLEASELFKDKKALYPSSVGQPFQGAYLEINKNPKYKKLKDAIEEKIIIAEVVNKINRANGKSTSRIFLLTNNNLLLADQKSGQIKSEVPLVDVTKVSMSSQNDGFFAVHLKEGSEAASKGDFLFSSDHLIEMATKLYRTTLSQTKQKLNIEISDEFLVQFRQDKVCVKFIQGNQKNGSVPTCKRKNNRLLEVAVP

SEQ ID NO: 354 - protein, 1063 aa, Artificial Sequence
  O00159
MALQVELVPTGEIIRVVHPHRPCKLALGSDGVRVTMESALTARDRVGVQDFVLLENFTSEAAFIENLRRRFRENLIYTYIGPVLVSVNPYRDLQIYSRQHMERYRGVSFYEVPPHLFAVADTVYRALRTERRDQAVMISGESGAGKTEATKRLLQFYAETCPAPERGGAVRDRLLQSNPVLEAFGNAKTLRNDNSSRFGKYMDVQFDFKGAPVGGHILSYLLEKSRVVHQNHGERNFHIFYQLLEGGEEETLRRLGLERNPQSYLYLVKGQCAKVSSINDKSDWKVVRKALTVIDFTEDEVEDLLSIVASVLHLGNIHFAANEESNAQVTTENQLKYLTRLLSVEGSTLREALTHRKIIAKGEELLSPLNLEQAAYARDALAKAVYSRTFTWLVGKINRSLASKDVESPSWRSTTVLGLLDIYGFEVFQHNSFEQFCINYCNEKLQQLFIELTLKSEQEEYEAEGIAWEPVQYFNNKIICDLVEEKFKGIISILDEECLRPGEATDLTFLEKLEDTVKHHPHFLTHKLADQRTRKSLGRGEFRLLHYAGEVTYSVTGFLDKNNDLLFRNLKETMCSSKNPIMSQCFDRSELSDKKRPETVATQFKMSLLQLVEILQSKEPAYVRCIKPNDAKQPGRFDEVLIRHQVKYLGLLENLRVRRAGFAYRRKYEAFLQRYKSLCPETWPTWAGRPQDGVAVLVRHLGYKPEEYKMGRTKIFIRFPKTLFATEDALEVRRQSLATKIQAAWRGFHWRQKFLRVKRSAICIQSWWRGTLGRRKAAKRKWAAQTIRRLIRGFVLRHAPRCPENAFFLDHVRTSFLLNLRRQLPQNVLDTSWPTPPPALREASELLRELCIKNMVWKYCRSISPEWKQQLQQKAVASEIFKGKKDNYPQSVPRLFISTRLGTDEISPRVLQALGSEPIQYAVPVVKYDRKGYKPRSRQLLLTPNAVVIVEDAKVKQRIDYANLTGISVSSLSDSLFVLHVQRADNKQKGDVVLQSDHVIETLTKTALSANRVNSININQGSITFAGGPGRDGTIDFTPGSELLITKAKNGHLAVVAPRLNSR

SEQ ID NO: 355 - protein, 1006 aa, Artificial Sequence
  O94832
MAEQESLEFGKADFVLMDTVSMPEFMANLRLRFEKGRIYTFIGEVVVSVNPYKLLNIYGRDTIEQYKGRELYERPPHLFAIADAAYKAMKRRSKDTCIVISGESGAGKTEASKYIMQYIAAITNPSQRAEVERVKNMLLKSNCVLEAFGNAKTNRNDNSSRFGKYMDINFDFKGDPIGGHINNYLLEKSRVIVQQPGERSFHSFYQLLQGGSEQMLRSLHLQKSLSSYNYIHVGAQLKSSINDAAEFRVVADAMKVIGFKPEEIQTVYKILAAILHLGNLKFVVDGDTPLIENGKVVSIIAELLSTKTDMVEKALLYRTVATGRDIIDKQHTEQEASYGRDAFAKAIYERLFCWIVTRINDIIEVKNYDTTIHGKNTVIGVLDIYGFEIFDNNSFEQFCINYCNEKLQQLFIQLVLKQEQEEYQREGIPWKHIDYFNNQIIVDLVEQQHKGIIAILDDACMNVGKVTDEMFLEALNSKLGKHAHFSSRKLCASDKILEFDRDFRIRHYAGDVVYSVIGFIDKNKDTLFQDFKRLMYNSSNPVLKNMWPEGKLSITEVTKRPLTAATLFKNSMIALVDNLASKEPYYVRCIKPNDKKSPQIFDDERCRHQVEYLGLLENVRVRRAGFAFRQTYEKFLHRYKMISEFTWPNHDLPSDKEAVKKLIERCGFQDDVAYGKTKIFIRTPRTLFTLEELRAQMLIRIVLFLQKVWRGTLARMRYKRTKAALTIIRYYRRYKVKSYIHEVARRFHGVKTMRDYGKHVKWPSPPKVLRRFEEALQTIFNRWRASQLIKSIPASDLPQVRAKVAAVEMLKGQRADLGLQRAWEGNYLASKPDTPQTSGTFVPVANELKRKDKYMNVLFSCHVRKVNRFSKVEDRAIFVTDRHLYKMDPTKQYKVMKTIPLYNLTGLSVSNGKDQLVVFHTKDNKDLIVCLFSKQPTHESRIGELVGVLVNHFKSEKRHLQVNVTNPVQCSLHGKKCTVSVETRLNQPQPDFTKNRSGFILSVPGN

SEQ ID NO: 356 - protein, 1108 aa, Artificial Sequence
  Q12965
MGSKGVYQYHWQSHNVKHSGVDDMVLLSKITENSIVENLKKRYMDDYIFTYIGSVLISVNPFKQMPYFGEKEIEMYQGAAQYENPPHIYALADNMYRNMIIDRENQCVIISGESGAGKTVAAKYIMSYISRVSGGGTKVQHVKDIILQSNPLLEAFGNAKTVRNNNSSRFGKYFEIQFSPGGEPDGGKISNFLLEKSRVVMRNPGERSFHIFYQLIEGASAEQKHSLGITSMDYYYYLSLSGSYKVDDIDDRREFQETLHAMNVIGIFAEEQTLVLQIVAGILHLGNISFKEVGNYAAVESEEFLAFPAYLLGINQDRLKEKLTSRQMDSKWGGKSESIHVTLNVEQACYTRDALAKALHARVFDFLVDSINKAMEKDHEEYNIGVLDIYGFEIFQKNGFEQFCINFVNEKLQQIFIELTLKAEQEEYVQEGIRWTPIEYFNNKIVCDLIENKVNPPGIMSILDDVCATMHAVGEGADQTLLQKLQMQIGSHEHFNSWNQGFIIHHYAGKVSYDMDGFCERNRDVLFMDLIELMQSSELPFIKSLFPENLQADKKGRPTTAGSKIKKQANDLVSTLMKCTPHYIRCIKPNETKKPRDWEESRVKHQVEYLGLKENIRVRRAGYAYRRIFQKFLQRYAILTKATWPSWQGEEKQGVLHLLQSVNMDSDQFQLGRSKVFIKAPESLFLLEEMRERKYDGYARVIQKSWRKFVARKKYVQMREEASDLLLNKKERRRNSINRNFIGDYIGMEEHPELQQFVGKREKIDFADTVTKYDRRFKGVKRDLLLTPKCLYLIGREKVKQGPDKGLVKEVLKRKIEIERILSVSLSTMQDDIFILHEQEYDSLLESVFKTEFLSLLAKRYEEKTQKQLPLKFSNTLELKLKKENWGPWSAGGSRQVQFHQGFGDLAVLKPSNKVLQVSIGPGLPKNSRPTRRNTTQNTGYSSGTQNANYPVRAAPPPPGYHQNGVIRNQYVPYPHAPGSQRSNQKSLYTSMARPPLPRQQSTSSDRVSQTPESLDFLKVPDQGAAGVRRQTTSRPPPAGGRPKPQPKPKPQVPQCKALYAYDAQDTDELSFNANDIIDIIKEDPSGWWTGRLRGKQGLFPNNYVTKI

SEQ ID NO: 357 - protein, 1098 aa, Artificial Sequence
  O00160
MGSKERFHWQSHNVKQSGVDDMVLLPQITEDAIAANLRKRFMDDYIFTYIGSVLISVNPFKQMPYFTDREIDLYQGAAQYENPPHIYALTDNMYRNMLIDCENQCVIISGESGAGKTVAAKYIMGYISKVSGGGEKVQHVKDIILQSNPLLEAFGNAKTVRNNNSSRFGKYFEIQFSRGGEPDGGKISNFLLEKSRVVMQNENERNFHIYYQLLEGASQEQRQNLGLMTPDYYYYLNQSDTYQVDGTDDRSDFGETLSAMQVIGIPPSIQQLVLQLVAGILHLGNISFCEDGNYARVESVDLLAFPAYLLGIDSGRLQEKLTSRKMDSRWGGRSESINVTLNVEQAAYTRDALAKGLYARLFDFLVEAINRAMQKPQEEYSIGVLDIYGFEIFQKNGFEQFCINFVNEKLQQIFIELTLKAEQEEYVQEGIRWTPIQYFNNKVVCDLIENKLSPPGIMSVLDDVCATMHATGGGADQTLLQKLQAAVGTHEHFNSWSAGFVIHHYAGKVSYDVSGFCERNRDVLFSDLIELMQTSEQAFLRMLFPEKLDGDKKGRPSTAGSKIKKQANDLVATLMRCTPHYIRCIKPNETKRPRDWEENRVKHQVEYLGLKENIRVRRAGFAYRRQFAKFLQRYAILTPETWPRWRGDERQGVQHLLRAVNMEPDQYQMGSTKVFVKNPESLFLLEEVRERKFDGFARTIQKAWRRHVAVRKYEEMREEASNILLNKKERRRNSINRNFVGDYLGLEERPELRQFLGKRERVDFADSVTKYDRRFKPIKRDLILTPKCVYVIGREKVKKGPEKGQVCEVLKKKVDIQALRGVSLSTRQDDFFILQEDAADSFLESVFKTEFVSLLCKRFEEATRRPLPLTFSDTLQFRVKKEGWGGGGTRSVTFSRGFGDLAVLKVGGRTLTVSVGDGLPKSSKPTRKGMAKGKPRRSSQAPTRAAPAPPRGMDRNGVPPSARGGPLPLEIMSGGGTHRPPRGPPSTSLGASRRPRARPPSEHNTEFLNVPDQGMAGMQRKRSVGQRPVPGVGRPKPQPRTHGPRCRALYQYVGQDVDELSFNVNEVIEILMEDPSGWWKGRLHGQEGLFPGNYVEKI

SEQ ID NO: 358 - protein, 1018 aa, Artificial Sequence
  B0I1T2
MEDEEGPEYGKPDFVLLDQVTMEDFMRNLQLRFEKGRIYTYIGEVLVSVNPYQELPLYGPEAIARYQGRELYERPPHLYAVANAAYKAMKHRSRDTCIVISGESGAGKTEASKHIMQYIAAVTNPSQRAEVERVKDVLLKSTCVLEAFGNARTNRNHNSSRFGKYMDINFDFKGDPIGGHIHSYLLEKSRVLKQHVGERNFHAFYQLLRGSEDKQLHELHLERNPAVYNFTHQGAGLNMTVHSALDSDEQSHQAVTEAMRVIGFSPEEVESVHRILAAILHLGNIEFVETEEGGLQKEGLAVAEEALVDHVAELTATPRDLVLRSLLARTVASGGRELIEKGHTAAEASYARDACAKAVYQRLFEWVVNRINSVMEPRGRDPRRDGKDTVIGVLDIYGFEVFPVNSFEQFCINYCNEKLQQLFIQLILKQEQEEYEREGITWQSVEYFNNATIVDLVERPHRGILAVLDEACSSAGTITDRIFLQTLDMHHRHHLHYTSRQLCPTDKTMEFGRDFRIKHYAGDVTYSVEGFIDKNRDFLFQDFKRLLYNSTDPTLRAMWPDGQQDITEVTKRPLTAGTLFKNSMVALVENLASKEPFYVRCIKPNEDKVAGKLDENHCRHQVAYLGLLENVRVRRAGFASRQPYSRFLLRYKMTCEYTWPNHLLGSDKAAVSALLEQHGLQGDVAFGHSKLFIRSPRTLVTLEQSRARLIPIIVLLLQKAWRGTLARWRCRRLRAIYTIMRWFRRHKVRAHLAELQRRFQAARQPPLYGRDLVWPLPPAVLQPFQDTCHALFCRWRARQLVKNIPPSDMPQIKAKVAAMGALQGLRQDWGCRRAWARDYLSSATDNPTASSLFAQRLKTLQDKDGFGAVLFSSHVRKVNRFHKIRNRALLLTDQHLYKLDPDRQYRVMRAVPLEAVTGLSVTSGGDQLVVLHARGQDDLVVCLHRSRPPLDNRVGELVGVLAAHCQGEGRTLEVRVSDCIPLSHRGVRRLISVEPRPEQPEPDFRCARGSFTLLWPSR

SEQ ID NO: 359 - protein, 1022 aa, Artificial Sequence
  NP_001094891
MEGALTARDKVGVQDFVLLDAYTSESAFVDNLRKRFSENLIYTYIGTLLVSVNPYQELGIYTVSQMELYQGVNFFELPPHVYAIADNAYRMMCAELNNHFILISGESGAGKTEASKKILEYFAVTCPMTQSLQIARDRLLFSNPVLEAFGNARTLRNDNSSRFGKYMDIQFDFQGIPVGGHIISYLIEKSRVVYQNEGERNFHIFYQLLAGGEEERLSYLGLERDPQLYKYLSQGHCAKESSISDKNDWKTVSNAFSVIDFTEADLENLFGIIASVLHLGNIGFEEDDQGCATIPDTHEIKWIAKLLGVHPSVLLEALTHRKIEAKTEEVICPLTLELSVYARDAMAKAVYGRTFTWLVNKINSSLVNKDFTRKTVIGLLDIYGFEVFDKNGFEQFCINYCNEKLQQLLIERTLKAEQAEYEMEGIEWEPIKYFNNKIICDLVEERHKGIISILDEECIRPGPATDLSFLEKLEEKVGKHAHFETRKLAGPKGRKRIGWMEFRLLHYAGEVTYCTKGFLEKNNDLLYRHLKEVLCKSKNIILRECFLLAELENRRRPPTVGTQFKNSLSSLLETLISKEPSYIRCIKPNDRKEPSKFDDFLIRHQIKYLGLMEHLRVRRAGFAYRRKYEHFLQRYKSLCPDTWPHWHGPPAEGVERLIKYIGYKPEEYKLGKTKIFIRFPRTLFATEDAFEFSKHQLVARIQATYKRCLGRREYVKKRQAAIKLEAHWRGALARKAIQRRKWAVRIIRKFIKGFISRNKPLCPDNEEFIVFVRKNYILNLRYHLPKTVLDKSWLRPPGILENASDLLRKMCVRNLVQKYCRGITAERKAMMQQKVVTSEIFRGRKDGYTESLNQPFVNSRIDEGDINPKVLQLISHEKIQYGVPVIKYDRKGFKARQRQLILTQKAAYVVELAKIKQKIEYSALKGVSTSNLSDGILVIHVSPEDSKQKGDAVLQCGHVFEAVTKLVMLVKKENIVNVVQGSLQFFISPGKEGTIVFDTGLEEQVYKNKNGQLTVVSVRRKS

SEQ ID NO: 360 - protein, 792 aa, Artificial Sequence
  Q3V5L5
MITVNPDGKIMVRRCLVTLRPFRLFVLGIGFFTLCFLMTSLGGQFSARRLGDSPFTIRTEVMGGPESRGVLRKMSDLLELMVKRMDALARLENSSELHRAGGDLHFPADRMPPGAGLMERIQAIAQNVSDIAVKVDQILRHSLLLHSKVSEGRRDQCEAPSDPKFPDCSGKVEWMRARWTSDPCYAFFGVDGTECSFLIYLSEVEWFCPPLPWRNQTAAQRAPKPLPKVQAVFRSNLSHLLDLMGSGKESLIFMKKRTKRLTAQWALAAQRLAQKLGATQRDQKQILVHIGFLTEESGDVFSPRVLKGGPLGEMVQWADILTALYVLGHGLRVTVSLKELQSNLGVPPGRGSCPLTMPLPFDLIYTDYHGLQQMKRHMGLSFKKYRCRIRVIDTFGTEPAYNHEEYATLHGYRTNWGYWNLNPKQFMTMFPHTPDNSFMGFVSEELNETEKRLIKGGKASNMAVVYGKEASIWKLQGKEKFLGILNKYMEIHGTVYYESQRPPEVPAFVKNHGLLPQPEFQQLLRKAKLFIGFGFPYEGPAPLEAIANGCIFLQSRFSPPHSSLNHEFFRGKPTSREVFSQHPYAENFIGKPHVWTVDYNNSEEFEAAIKAIMRTQVDPYLPYEYTCEGMLERIHAYIQHQDFCRAPDPALPEAHAPQSPFVLAPNATHLEWARNTSLAPGAWPPAHALRAWLAVPGRACTDTCLDHGLICEPSFFPFLNSQDAFLKLQVPCDSTESEMNHLYPAFAQPGQECYLQKEPLLFSCAGSNTKYRRLCPCRDFRKGQVALCQGCL

SEQ ID NO: 361 - protein, 11 aa, Artificial Sequence
  10790436
MTQGQHFLQKV

SEQ ID NO: 362 - protein, 736 aa, Artificial Sequence
  Q9BWT3
MKEMSANTVLDSQRQQKHYGITSPISLASPKEIDHIYTQKLIDAMKPFGVFEDEEELNHRLVVLGKLNNLVKEWISDVSESKNLPPSVVATVGGKIFTFGSYRLGVHTKGADIDALCVAPRHVERSDFFQSFFEKLKHQDGIRNLRAVEDAFVPVIKFEFDGIEIDLVFARLAIQTISDNLDLRDDSRLRSLDIRCIRSLNGCRVTDEILHLVPNKETFRLTLRAVKLWAKRRGIYSNMLGFLGGVSWAMLVARTCQLYPNAAASTLVHKFFLVFSKWEWPNPVLLKQPEESNLNLPVWDPRVNPSDRYHLMPIITPAYPQQNSTYNVSTSTRTVMVEEFKQGLAVTDEILQGKSDWSKLLEPPNFFQKYRHYIVLTASASTEENHLEWVGLVESKIRVLVGNLERNEFITLAHVNPQSFPGNKEHHKDNNYVSMWFLGIIFRRVENAESVNIDLTYDIQSFTDTVYRQANNINMLKEGMKIEATHVKKKQLHHYLPAEILQKKKKQSLSDVNRSSGGLQSKRLSLDSSCLDSSRDTDNGTPFNSPASKSDSPSVGETERNSAEPAAVIVEKPLSVPPAQGLSIPVIGAKVDSTVKTVSPPTVCTIPTVVGRNVIPRITTPHNPAQGQPHLNGMSNITKTVTPKRSHSPSIDGTPKRLKDVEKFIRLESTFKDPRTAEERKRKSVDAIGGESMPIPTIDTSRKKRLPSKELPDSSSPVPANNIRVIKNSIRLTLNR

SEQ ID NO: 363 - protein, 458 aa, Artificial Sequence
  Q13952
MSTEGGFGGTSSSDAQQSLQSFWPRVMEEIRNLTVKDFRVQELPLARIKKIMKLDEDVKMISAEAPVLFAKAAQIFITELTLRAWIHTEDNKRRTLQRNDIAMAITKFDQFDFLIDIVPRDELKPPKRQEEVRQSVTPAEPVQYYFTLAQQPTAVQVQGQQQGQQTTSSTTTIQPGQIIIAQPQQGQTTPVTMQVGEGQQVQIVQAQPQGQAQQAQSGTGQTMQVMQQIITNTGEIQQIPVQLNAGQLQYIRLAQPVSGTQVVQGQIQTLATNAQQGQRNASQGKPRRCLKETLQITQTEVQQGQQQFSQFTDGQRNSVQQARVSELTGEAEPREVKATGNSTPCTSSLPTTHPPSHRAGASCVCCSQPQQSSTSPPPSDALQWVVVEVSGTPNQLETHRELHAPLPGMTSLSPLHPSQQLYQIQQVTMPAGQDLAQPMFIQSANQPSDGQAPQVTGD

SEQ ID NO: 364 - protein, 933 aa, Artificial Sequence
  Q6IWH7
MRMAATAWAGLQGPPLPTLCPAVRTGLYCRDQAHAERWAMTSETSSGSHCARSRMLRRRAQEEDSTVLIDVSPPEAEKRGSYGSTAHASEPGGQQAAACRAGSPAKPRIADFVLVWEEDLKLDRQQDSAARDRTDMHRTWRETFLDNLRAAGLCVDQQDVQDGNTTVHYALLSASWAVLCYYAEDLRLKLPLQELPNQASNWSAGLLAWLGIPNVLLEVVPDVPPEYYSCRFRVNKLPRFLGSDNQDTFFTSTKRHQILFEILAKTPYGHEKKNLLGIHQLLAEGVLSAAFPLHDGPFKTPPEGPQAPRLNQRQVLFQHWARWGKWNKYQPLDHVRRYFGEKVALYFAWLGFYTGWLLPAAVVGTLVFLVGCFLVFSDIPTQELCGSKDSFEMCPLCLDCPFWLLSSACALAQAGRLFDHGGTVFFSLFMALWAVLLLEYWKRKSATLAYRWDCSDYEDTEERPRPQFAASAPMTAPNPITGEDEPYFPERSRARRMLAGSVVIVVMVAVVVMCLVSIILYRAIMAIVVSRSGNTLLAAWASRIASLTGSVVNLVFILILSKIYVSLAHVLTRWEMHRTQTKFEDAFTLKVFIFQFVNFYSSPVYIAFFKGRFVGYPGNYHTLFGVRNEECAAGGCLIELAQELLVIMVGKQVINNMQEVLIPKLKGWWQKFRLRSKKRKAGASAGASQGPWEDDYELVPCEGLFDEYLEMVLQFGFVTIFVAACPLAPLFALLNNWVEIRLDARKFVCEYRRPVAERAQDIGIWFHILAGLTHLAVISNAFLLAFSSDFLPRAYYRWTRAHDLRGFLNFTLARAPSSFAAAHNRTCRYRAFRDDDGHYSQTYWNLLAIRLAFVIVFEHVVFSVGRLLDLLVPDIPESVEIKVKREYYLAKQALAENEVLFGTNGTKDEQPEGSELSSHWTPFTVPKASQLQQ

SEQ ID NO: 365 - protein, 294 aa, Artificial Sequence
  P06748
MEDSMDMDMSPLRPQNYLFGCELKADKDYHFKVDNDENEHQLSLRTVSLGAGAKDELHIVEAEAMNYEGSPIKVTLATLKMSVQPTVSLGGFEITPPVVLRLKCGSGPVHISGQHLVAVEEDAESEDEEEEDVKLLSISGKRSAPGGGSKVPQKKVKLAADEDDDDDDEEDDDEDDDDDDFDDEEAEEKAPVKKSIRDTPAKNAQKSNQNGKDSKPSSTPRSKGQESFKKQEKTPKTPKGPSSVEDIKAKMQASIEKGGSLPKVEAKFINYVKNCFRMTDQEAIQDLWQWRKSL

SEQ ID NO: 366 - protein, 1304 aa, Artificial Sequence
  Q92823
MQLKIMPKKKRLSAGRVPLILFLCQMISALEVPLDPKLLEDLVQPPTITQQSPKDYIIDPRENIVIQCEAKGKPPPSFSWTRNGTHFDIDKDPLVTMKPGTGTLIINIMSEGKAETYEGVYQCTARNERGAAVSNNIVVRPSRSPLWTKEKLEPITLQSGQSLVLPCRPPIGLPPPIIFWMDNSFQRLPQSERVSQGLNGDLYFSNVLPEDTREDYICYARFNHTQTIQQKQPISVKVISVDELNDTIAANLSDTEFYGAKSSRERPPTFLTPEGNASNKEELRGNVLSLECIAEGLPTPIIYWAKEDGMLPKNRTVYKNFEKTLQIIHVSEADSGNYQCIAKNALGAIHHTISVRVKAAPYWITAPQNLVLSPGEDGTLICRANGNPKPRISWLTNGVPIEIAPDDPSRKIDGDTIIFSNVQERSSAVYQCNASNEYGYLLANAFVNVLAEPPRILTPANTLYQVIANRPALLDCAFFGSPLPTIEWFKGAKGSALHEDIYVLHENGTLEIPVAQKDSTGTYTCVARNKLGMAKNEVHLEIKDPTWIVKQPEYAVVQRGSMVSFECKVKHDHTLSLTVLWLKDNRELPSDERFTVDKDHLVVADVSDDDSGTYTCVANTTLDSVSASAVLSVVAPTPTPAPVYDVPNPPFDLELTDQLDKSVQLSWTPGDDNNSPITKFIIEYEDAMHKPGLWHHQTEVSGTQTTAQLKLSPYVNYSFRVMAVNSIGKSLPSEASEQYLTKASEPDKNPTAVEGLGSEPDNLVITWKPLNGFESNGPGLQYKVSWRQKDGDDEWTSVVVANVSKYIVSGTPTFVPYLIKVQALNDMGFAPEPAVVMGHSGEDLPMVAPGNVRVNVVNSTLAEVHWDPVPLKSIRGHLQGYRIYYWKTQSSSKRNRRHIEKKILTFQGSKTHGMLPGLEPFSHYTLNVRVVNGKGEGPASPDRVFNTPEGVPSAPSSLKIVNPTLDSLTLEWDPPSHPNGILTEYTLKYQPINSTHELGPLVDLKIPANKTRWTLKNLNFSTRYKFYFYAQTSAGSGSQITEEAVTTVDEAGILPPDVGAGKVQAVNPRISNLTAAAAETYANISWEYEGPEHVNFYVEYGVAGSKEEWRKEIVNGSRSFFGLKGLMPGTAYKVRVGAVGDSGFVSSEDVFETGPAMASRQVDIATQGWFIGLMCAVALLILILLIVCFIRRNKGGKYPVKEKEDAHADPEIQPMKEDDGTFGEYSDAEDHKPLKKGSRTPSDRTVKKEDSDDSLVDYGEGVNGQFNEDGSFIGQYSGKKEKEPAEGNESSEAPSPVNAMNSFV

SEQ ID NO: 367 - protein, 434 aa, Artificial Sequence
  P09104
MSIEKIWAREILDSRGNPTVEVDLYTAKGLFRAAVPSGASTGIYEALELRDGDKQRYLGKGVLKAVDHINSTIAPALISSGLSVVEQEKLDNLMLELDGTENKSKFGANAILGVSLAVCKAGAAERELPLYRHIAQLAGNSDLILPVPAFNVINGGSHAGNKLAMQEFMILPVGAESFRDAMRLGAEVYHTLKGVIKDKYGKDATNVGDEGGFAPNILENSEALELVKEAIDKAGYTEKIVIGMDVAASEFYRDGKYDLDFKSPTDPSRYITGDQLGALYQDFVRDYPVVSIEDPFDQDDWAAWSKFTANVGIQIVGDDLTVTNPKRIERAVEEKACNCLLLKVNQIGSVTEAIQACKLAQENGWGVMVSHRSGETEDTFIADLVVGLCTGQIKTGAPCRSERLAKYNQLMRIEEELGDEARFAGHNFRNPSVL

SEQ ID NO: 368 - protein, 464 aa, Artificial Sequence
  Q9BZD4
METLSFPRYNVAEIVIHIRNKILTGADGKNLTKNDLYPNPKPEVLHMIYMRALQIVYGIRLEHFYMMPVNSEVMYPHLMEGFLPFSNLVTHLDSFLPICRVNDFETADILCPKAKRTSRFLSGIINFIHFREACRETYMEFLWQYKSSADKMQQLNAAHQEALMKLERLDSVPVEEQEEFKQLSDGIQELQQSLNQDFHQKTIVLQEGNSQKKSNISEKTKRLNELKLSVVSLKEIQESLKTKIVDSPEKLKNYKEKMKDTVQKLKNARQEVVEKYEIYGDSVDCLPSCQLEVQLYQKKIQDLSDNREKLASILKESLNLEDQIESDESELKKLKTEENSFKRLMIVKKEKLATAQFKINKKHEDVKQYKRTVIEDCNKVQEKRGAVYERVTTINQEIQKIKLGIQQLKDAAEREKLKSQEIFLNLKTALEKYHDGIEKAAEDSYAKIDEKTAELKRKMFKMST

SEQ ID NO: 369 - protein, 180 aa, Artificial Sequence
  P78358
MQAEGRGTGGSTGDADGPGGPGIPDGPGGNAGGPGEAGATGGRGPRGAGAARASGPGGGAPRGPHGGAASGLNGCCRCGARGPESRLLEFYLAMPFATPMEAELARRSLAQDAPPLPVPGVLLKEFTVSGNILTIRLTAADHRQLQLSISSCLQQLSLLMWITQCFLPVFLAQPPSGQRR

SEQ ID NO: 370 - protein, 404 aa, Artificial Sequence
  P51810
MASPRLGTFCCPTRDAATQLVLSFQPRAFHALCLGSGGLRLALGLLQLLPGRRPAGPGSPATSPPASVRILRAAAACDLLGCLGMVIRSTVWLGFPNFVDSVSDMNHTEIWPAAFCVGSAMWIQLLYSACFWWLFCYAVDAYLVIRRSAGLSTILLYHIMAWGLATLLCVEGAAMLYYPSVSRCERGLDHAIPHYVTMYLPLLLVLVANPILFQKTVTAVASLLKGRQGIYTENERRMGAVIKIRFFKIMLVLIICWLSNIINESLLFYLEMQTDINGGSLKPVRTAAKTTWFIMGILNPAQGFLLSLAFYGWTGCSLGFQSPRKEIQWESLTTSAAEGAHPSPLMPHENPASGKVSQVGGQTSDEALSMLSEGSDASTIEIHTASESCNKNEGDPALPTHGDL

SEQ ID NO: 371 - protein, 1046 aa, Artificial Sequence
  O15294
MASSVGNVADSTEPTKRMLSFQGLAELAHREYQAGDFEAAERHCMQLWRQEPDNTGVLLLLSSIHFQCRRLDRSAHFSTLAIKQNPLLAEAYSNLGNVYKERGQLQEAIEHYRHALRLKPDFIDGYINLAAALVAAGDMEGAVQAYVSALQYNPDLYCVRSDLGNLLKALGRLEEAKACYLKAIETQPNFAVAWSNLGCVFNAQGEIWLAIHHFEKAVTLDPNFLDAYINLGNVLKEARIFDRAVAAYLRALSLSPNHAVVHGNLACVYYEQGLIDLAIDTYRRAIELQPHFPDAYCNLANALKEKGSVAEAEDCYNTALRLCPTHADSLNNLANIKREQGNIEEAVRLYRKALEVFPEFAAAHSNLASVLQQQGKLQEALMHYKEAIRISPTFADAYSNMGNTLKEMQDVQGALQCYTRAIQINPAFADAHSNLASIHKDSGNIPEAIASYRTALKLKPDFPDAYCNLAHCLQIVCDWTDYDERMKKLVSIVADQLEKNRLPSVHPHHSMLYPLSHGFRKAIAERHGNLCLDKINVLHKPPYEHPKDLKLSDGRLRVGYVSSDFGNHPTSHLMQSIPGMHNPDKFEVFCYALSPDDGTNFRVKVMAEANHFIDLSQIPCNGKAADRIHQDGIHILVNMNGYTKGARNELFALRPAPIQAMWLGYPGTSGALFMDYIITDQETSPAEVAEQYSEKLAYMPHTFFIGDHANMFPHLKKKAVIDFKSNGHIYDNRIVLNGIDLKAFLDSLPDVKIVKMKCPDGGDNADSSNTALNMPVIPMNTIAEAVIEMINRGQIQITINGFSISNGLATTQINNKAATGEEVPRTIIVTTRSQYGLPEDAIVYCNFNQLYKIDPSTLQMWANILKRVPNSVLWLLRFPAVGEPNIQQYAQNMGLPQNRIIFSPVAPKEEHVRRGQLADVCLDTPLCNGHTTGMDVLWAGTPMVTMPGETLASRVAASQLTCLGCLELIAKNRQEYEDIAVKLGTDLEYLKKVRGKVWKQRISSPLFNTKQYTMELERLYLQMWEHYAAGNKPDHMIKPVEVTESA

SEQ ID NO: 372 - protein, 146 aa, Artificial Sequence [sequence omitted]

SEQ ID NO: 373 - protein, 406 aa, Artificial Sequence
  B4E321
MAAETLLSSLLGLLLLGLLLPASLTGGVGSLNLEELSEMRYGIEILPLPVMGGQSQSSDVVIVSSKYKQRYECRLPAGAIHFQREREEETPAYQGPGIPELLSPMRDAPCLLKTKDWWTYEFCYGRHIQQYHMEDSASGAPNDFQNNVQVKVIRSPADLIRFIEELKGGTKKGKPNIGQEQPVDDAAEVPQREPEKERGDPERQREMEEEEDEDEDEDEDEDERQLLGEFEKELEGILLPSDRDRLRSEVKAGMERELENIIQETEKELDPDGLKKESERDRAMLALTSTLNKLIKRLEEKQSPELVKKHKKKRVVPKKPPPSPQPTGKIEIKIVRPWAEGTEEGARWLTDEDTRNLKEIFFNILVPGAEEAQKERQRQKELESNYRRVWGSPGGEGTGDLDEFDF

SEQ ID NO: 374 - protein, 740 aa, Artificial Sequence
  B7Z8E7
MAVETLLSSLLGLLLLGLLLPASLTGGVGSLNLEELSEMRYGIEILPLPVMGGQSQSSDVVIVSSKYKQRYECRLPAGAIHFQREREEETPAYQGPGIPELLSPMRDAPCLLKTKDWWTYEFCYGRHIQQYHMEDSEIKGEVLYLGYYQSAFDWDDETAKASKQHRLKRYHSQTYGNGSKCDLNGRPREAEVRFLCDEGAGISGDYIDRVDEPLSCSYVLTIRTPRLCPHPLLRPPPSAAPQAILCHPSLQPEEYMAYVQRQADSKQYGDKIIEELQDLGPQVWSETKSGVAPQKMAGRTLFHLFREIHFHFFPSPDLTVLTDWWGGGGVEKYHGPSSLGDRGGEGTPSYLLPSVSPLLSDQSLPVLCTLGASPTKDDSKDSDFWKMLNEPEDQAPGGEEVPAEEQDPSPEAADSASGAPNDFQNNVQVKVIRSPADLIRFIEELKGGTKKGKPNIGQEQPVDDAAEVPQREPEKERGDPERQREMEEEEDEDEDEDEDEDERQLLGEFEKELEGILLPSDRDRLRSEVKAGMERELENIIQETEKELDPDGLKKESERDRAMLALTSTLNKLIKRLEEKQSPELVKKHKKKRVVPKKPPPSPQPTEEDPEHRVRVRVTKLRLGGPNQDLTVLEMKRENPQLKQIEGLVKELLEREGLTAAGKIEIKIVRPWAEGTEEGARWLTDEDTRNLKEIFFNILVPGAEEAQKERQRQKELESNYRRVWGSPGGEGTGDLDEFDF

SEQ ID NO: 375 - protein, 667 aa, Artificial Sequence
  Q13438
MAAETLLSSLLGLLLLGLLLPASLTGGVGSLNLEELSEMRYGIEILPLPVMGGQSQSSDVVIVSSKYKQRYECRLPAGAIHFQREREEETPAYQGPGIPELLSPMRDAPCLLKTKDWWTYEFCYGRHIQQYHMEDSEIKGEVLYLGYYQSAFDWDDETAKASKQHRLKRYHSQTYGNGSKCDLNGRPREAEVRFLCDEGAGISGDYIDRVDEPLSCSYVLTIRTPRLCPHPLLRPPPSAAPQAILCHPSLQPEEYMAYVQRQADSKQYGDKIIEELQDLGPQVWSETKSGVAPQKMAGASPTKDDSKDSDFWKMLNEPEDQAPGGEEVPAEEQDPSPEAADSASGAPNDFQNNVQVKVIRSPADLIRFIEELKGGTKKGKPNIGQEQPVDDAAEVPQREPEKERGDPERQREMEEEEDEDEDEDEDEDERQLLGEFEKELEGILLPSDRDRLRSEVKAGMERELENIIQETEKELDPDGLKKESERDRAMLALTSTLNKLIKRLEEKQSPELVKKHKKKRVVPKKPPPSPQPTEEDPEHRVRVRVTKLRLGGPNQDLTVLEMKRENPQLKQIEGLVKELLEREGLTAAGKIEIKIVRPWAEGTEEGARWLTDEDTRNLKEIFFNILVPGAEEAQKERQRQKELESNYRRVWGSPGGEGTGDLDEFDF

SEQ ID NO: 376 - protein, 100 aa, Artificial Sequence
  P02818
MRALTLLALLALAALCIAGQAGAKPSGAESSKGAAFVSKQEGSEVVKRPRRYLYQWLGAPVPYPDPLEPRREVCELNPDCDELADHIGFQEAYRRFYGPV

SEQ ID NO: 377 - protein, 314 aa, Artificial Sequence
  A0A024RDE2
MRIAVICFCLLGITCAIPVKQADSGSSEEKQLYNKYPDAVATWLNPDPSQKQNLLAPQNAVSSEETNDFKQETLPSKSNESHDHMDDMDDEDDDDHVDSQDSIDSNDSDDVDDTDDSHQSDESHHSDESDELVTDFPTDLPATEVFTPVVPTVDTYDGRGDSVVYGLRSKSKKFRRPDIQYPDATDEDITSHMESEELNGAYKAIPVAQDLNAPSDWDSRGKDSYETSQLDDQSAETHSHKQSRLYKRKANDESNEHSDVIDSQELSKVSREFHSHEFHSHEDMLVVDPKSKEEDKHLKFRISHELDSASSEVN

SEQ ID NO: 378 - protein, 300 aa, Artificial Sequence
  A0A024RDE6
MRIAVICFCLLGITCAIPVKQADSGSSEEKQLYNKYPDAVATWLNPDPSQKQNLLAPQTLPSKSNESHDHMDDMDDEDDDDHVDSQDSIDSNDSDDVDDTDDSHQSDESHHSDESDELVTDFPTDLPATEVFTPVVPTVDTYDGRGDSVVYGLRSKSKKFRRPDIQYPDATDEDITSHMESEELNGAYKAIPVAQDLNAPSDWDSRGKDSYETSQLDDQSAETHSHKQSRLYKRKANDESNEHSDVIDSQELSKVSREFHSHEFHSHEDMLVVDPKSKEEDKHLKFRISHELDSASSEVN

SEQ ID NO: 379 - protein, 287 aa, Artificial Sequence
  A0A024RDJ0
MRIAVICFCLLGITCAIPVKQADSGSSEEKQNAVSSEETNDFKQETLPSKSNESHDHMDDMDDEDDDDHVDSQDSIDSNDSDDVDDTDDSHQSDESHHSDESDELVTDFPTDLPATEVFTPVVPTVDTYDGRGDSVVYGLRSKSKKFRRPDIQYPDATDEDITSHMESEELNGAYKAIPVAQDLNAPSDWDSRGKDSYETSQLDDQSAETHSHKQSRLYKRKANDESNEHSDVIDSQELSKVSREFHSHEFHSHEDMLVVDPKSKEEDKHLKFRISHELDSASSEVN

SEQ ID NO: 380 - protein, 327 aa, Artificial Sequence
  B7Z351
MGIVPRSLDKKAHRVQFQLNRIKAKIELPWGSLQLDCLMKTLKELYNKYPDAVATWLNPDPSQKQNLLAPQNAVSSEETNDFKQETLPSKSNESHDHMDDMDDEDDDDHVDSQDSIDSNDSDDVDDTDDSHQSDESHHSDESDELVTDFPTDLPATEVFTPVVPTVDTYDGRGDSVVYGLRSKSKKFRRPDIQYPDATDEDITSHMESEELNGAYKAIPVAQDLNAPSDWDSRGKDSYETSQLDDQSAETHSHKQSRLYKRKANDESNEHSDVIDSQELSKVSREFHSHEFHSHEDMLVVDPKSKEEDKHLKFRISHELDSASSEVN

SEQ ID NO: 381 - protein, 292 aa, Artificial Sequence
  F2YQ21
MRIAVICFCLLGITCAIPVKQADSGSSEEKQLYNKYPDAVATWLNPDPSQKQNLLAPQNAVSSEETNDFKQETLPSKSNESHDHMDDMDDEDDDSHQSDESHHSDESDELVTDFPTDLPATEVFTPVVPTVDTYDGRGDSVVYGLRSKSKKFRRPDIQYPDATDEDITSHMESEELNGAYKAIPVAQDLNAPSDWDSRGKDSYETSQLDDQSAETHSHKQSRLYKRKANDESNEHSDVIDSQELSKVSREFHSHEFHSHEDMLVVDPKSKEEDKHLKFRISHELDSASSEVN

SEQ ID NO: 382 - protein, 314 aa, Artificial Sequence; identical to SEQ ID NO: 377
  P10451

SEQ ID NO: 383 - protein, 393 aa, Artificial Sequence [sequence omitted]

SEQ ID NO: 384 - protein, 102 aa, Artificial Sequence
  O60829
MSARVRSRSRGRGDGQEAPDVVAFVAPGESQQEEPPTDNQDIEPGQEREGTPPIEERKVEGDCQEMDLEKTRSERGDGSDVKEKTPPNPKHAKTKEAGDGQP

SEQ ID NO: 385 - protein, 402 aa, Artificial Sequence [sequence omitted]

SEQ ID NO: 386 - protein, 415 aa, Artificial Sequence
  P05120
MEDLCVANTLFALNLFKHLAKASPTQNLFLSPWSISSTMAMVYMGSRGSTEDQMAKVLQFNEVGANAVTPMTPENFTSCGFMQQIQKGSYPDAILQAQAADKIHSSFRSLSSAINASTGNYLLESVNKLFGEKSASFREEYIRLCQKYYSSEPQAVDFLECAEEARKKINSWVKTQTKGKIPNLLPEGSVDGDTRMVLVNAVYFKGKWKTPFEKKLNGLYPFRVNSAQRTPVQMMYLREKLNIGYIEDLKAQILELPYAGDVSMFLLLPDEIADVSTGLELLESEITYDKLNKWTSKDKMAEDEVEVYIPQFKLEEHYELRSILRSMGMEDAFNKGRANFSGMSERNDLFLSEVFHQAMVDVNEEGTEAAAGTGGVMTGRTGHGGPQFVADHPFLFLIMHKITNCILFFGRFSSP

SEQ ID NO: 387 - protein, 175 aa, Artificial Sequence
  Q06141
MLPPMALPSVSWMLLSCLMLLSQVQGEEPQRELPSARIRCPKGSKAYGSHCYALFLSPKSWTDADLACQKRPSGNLVSVLSGAEGSFVSSLVKSIGNSYSYVWIGLHDPTQGTEPNGEGWEWSSSDVMNYFAWERNPSTISSPGHCASLSRSTAFLRWKDYNCNVRLPYVCKFTD

SEQ ID NO: 388 - protein, 175 aa, Artificial Sequence; identical to SEQ ID NO: 387
  Q53S56

SEQ ID NO: 389 - protein, 126 aa, Artificial Sequence
  Q8WXA2
MDKSLLLELPILLCCFRALSGSLSMRNDAVNEIVAVKNNFPVIEIVQCRMCHLQFPGEKCSRGRGICTATTEEACMVGRMFKRDGNPWLTFMGCLKNCADVKGIRWSVYLVNFRCCRSHDLCNEDL

SEQ ID NO: 390 - protein, 479 aa, Artificial Sequence
  P23760
MTTLAGAVPRMMRPGPGQNYPRSGFPLEVSTPLGQGRVNQLGGVFINGRPLPNHIRHKIVEMAHHGIRPCVISRQLRVSHGCVSKILCRYQETGSIRPGAIGGSKPKQVTTPDVEKKIEEYKRENPGMFSWEIRDKLLKDAVCDRNTVPSVSSISRILRSKFGKGEEEEADLERKEAEESEKKAKHSIDGILSERASAPQSDEGSDIDSEPDLPLKRKQRRSRTTFTAEQLEELERAFERTHYPDIYTREELAQRAKLTEARVQVWFSNRRARWRKQAGANQLMAFNHLIPGGFPPTAMPTLPTYQLSETSYQPTSIPQAVSDPSSTVHRPQPLPPSTVHQSTIPSNPDSSSAYCLPSTRHGFSSYTDSFVPPSGPSNPMNPTIGNGLSPQVMGLLTNHGGVPHQPQTDYALSPLTGGLEPTTTVSASCSQRLDHMKSLDSLPTSQSYCPPTYSTTGYSMDPVTGYQYGQYGQSKPWTF

SEQ ID NO: 391 - protein, 391 aa, Artificial Sequence
  Q02548
MDLEKNYPTPRTSRTGHGGVNQLGGVFVNGRPLPDVVRQRIVELAHQGVRPCDISRQLRVSHGCVSKILGRYYETGSIKPGVIGGSKPKVATPKVVEKIAEYKRQNPTMFAWEIRDRLLAERVCDNDTVPSVSSINRIIRTKVQQPPNQPVPASSHSIVSTGSVTQVSSVSTDSAGSSYSISGILGITSPSADTNKRKRDEGIQESPVPNGHSLPGRDFLRKQMRGDLFTQQQLEVLDRVFERQHYSDIFTTTEPIKPEQTTEYSAMASLAGGLDDMKANLASPTPADIGSSVPGPQSYPIVTGRDLASTTLPGYPPHVPPAGQGSYSAPTLTGMVPGSEFSGSPYSHPQYSSYNDSWRFPNPGLLGSPYYYSAAARGAAPPAAATAYDRH

SEQ ID NO: 392 - protein, 290 aa, Artificial Sequence
  Q9NZQ7
MRIFAVFIFMTYWHLLNAFTVTVPKDLYVVEYGSNMTIECKFPVEKQLDLAALIVYWEMEDKNIIQFVHGEEDLKVQHSSYRQRARLLKDQLSLGNAALQITDVKLQDAGVYRCMISYGGADYKRITVKVNAPYNKINQRILVVDPVTSEHELTCQAEGYPKAEVIWTSSDHQVLSGKTTTTNSKREEKLFNVTSTLRINTTTNEIFYCTFRRLDPEENHTAELVIPELPLAHPPNERTHLVILGAILLCLGVALTFIFRLRKGRMMDVKKCGIQDTNSKKQSDTHLEET

SEQ ID NO: 393 - protein, 288 aa, Artificial Sequence
  Q15116
MQIPQAPWPVVWAVLQLGWRPGWFLDSPDRPWNPPTFSPALLVVTEGDNATFTCSFSNTSESFVLNWYRMSPSNQTDKLAAFPEDRSQPGQDCRFRVTQLPNGRDFHMSVVRARRNDSGTYLCGAISLAPKAQIKESLRAELRVTERRAEVPTAHPSPSPRPAGQFQTLVVGVVGGLLGSLVLLVWVLAVICSRAARGTIGARRTGQPLKEDPSAVPVFSVDYGELDFQWREKTPEPPVPCVPEQTEYATIVFPSGMGTSSPARRGSADGPRSAQPLRPEDGHCSWPL

SEQ ID NO: 394 - protein, 335 aa, Artificial Sequence
  O95238
MGSASPGLSSVSPSHLLLPPDTVSRTGLEKAAAGAVGLERRDWSPSPPATPEQGLSAFYLSYFDMLYPEDSSWAAKAPGASSREEPPEEPEQCPVIDSQAPAGSLDLVPGGLTLEEHSLEQVQSMVVGEVLKDIETACKLLNITADPMDWSPSNVQKWLLWTEHQYRLPPMGKAFQELAGKELCAMSEEQFRQRSPLGGDVLHAHLDIWKSAAWMKERTSPGAIHYCASTSEESWTDSEVDSSCSGQPIHLWQFLKELLLKPHSYGRFIRWLNKEKGIFKIEDSAQVARLWGIRKNRPAMNYDKLSRSIRQYYKKGIIRKPDISQRLVYQFVHPI

SEQ ID NO: 395 - protein, 738 aa, Artificial Sequence
  P16284
MQPRWAQGATMWLGVLLTLLLCSSLEGQENSFTINSVDMKSLPDWTVQNGKNLTLQCFADVSTTSHVKPQHQMLFYKDDVLFYNISSMKSTESYFIPEVRIYDSGTYKCTVIVNNKEKTTAEYQLLVEGVPSPRVTLDKKEAIQGGIVRVNCSVPEEKAPIHFTIEKLELNEKMVKLKREKNSRDQNFVILEFPVEEQDRVLSFRCQARIISGIHMQTSESTKSELVTVTESFSTPKFHISPTGMIMEGAQLHIKCTIQVTHLAQEFPEIIIQKDKAIVAHNRHGNKAVYSVMAMVEHSGNYTCKVESSRISKVSSIVVNITELFSKPELESSFTHLDQGERLNLSCSIPGAPPANFTIQKEDTIVSQTQDFTKIASKSDSGTYICTAGIDKVVKKSNTVQIVVCEMLSQPRISYDAQFEVIKGQTIEVRCESISGTLPISYQLLKTSKVLENSTKNSNDPAVFKDNPTEDVEYQCVADNCHSHAKMLSEVLRVKVIAPVDEVQISILSSKVVESGEDIVLQCAVNEGSGPITYKFYREKEGKPFYQMTSNATQAFWTKQKASKEQEGEYYCTAFNRANHASSVPRSKILTVRVILAPWKKGLIAVVIIGVIIALLIIAAKCYFLRKAKAKQMPVEMSRPAVPLLNSNNEKMSDPNMEANSHYGHNDDVRNHAMKPINDNKEPLNSDVQYTEVQVSSAESHKDLGKKDTETVYSEVRKAVPDAVESRYSRTEGSLDGT

SEQ ID NO: 396 - protein, 911 aa, Artificial Sequence
  Q96GW7
MAQLFLPLLAALVLAQAPAALADVLEGDSSEDRAFRVRIAGDAPLQGVLGGALTIPCHVHYLRPPPSRRAVLGSPRVKWTFLSRGREAEVLVARGVRVKVNEAYRFRVALPAYPASLTDVSLALSELRPNDSGIYRCEVQHGIDDSSDAVEVKVKGVVFLYREGSARYAFSFSGAQEACARIGAHIATPEQLYAAYLGGYEQCDAGWLSDQTVRYPIQTPREACYGDMDGFPGVRNYGVVDPDDLYDVYCYAEDLNGELFLGDPPEKLTLEEARAYCQERGAEIATTGQLYAAWDGGLDHCSPGWLADGSVRYPIVTPSQRCGGGLPGVKTLFLFPNQTGFPNKHSRFNVYCFRDSAQPSAIPEASNPASNPASDGLEAIVTVTETLEELQLPQEATESESRGAIYSIPIMEDGGGGSSTPEDPAEAPRTLLEFETQSMVPPTGFSEEEGKALEEEEKYEDEEEKEEEEEEEEVEDEALWAWPSELSSPGPEASLPTEPAAQEESLSQAPARAVLQPGASPLPDGESEASRPPRVHGPPTETLPTPRERNLASPSPSTLVEAREVGEATGGPELSGVPRGESEETGSSEGAPSLLPATRAPEGTRELEAPSEDNSGRTAPAGTSVQAQPVLPTDSASRGGVAVVPASGDCVPSPCHNGGTCLEEEEGVRCLCLPGYGGDLCDVGLRFCNPGWDAFQGACYKHFSTRRSWEEAETQCRMYGAHLASISTPEEQDFINNRYREYQWIGLNDRTIEGDFLWSDGVPLLYENWNPGQPDSYFLSGENCVVMVWHDQGQWSDVPCNYHLSYTCKMGLVSCGPPPELPLAQVFGRPRLRYEVDTVLRYRCREGLAQRNLPLIRCQENGRWEAPQISCVPRRPARALHPEEDPEGRQGRLLGRWKALLIPPSSPMPGP

SEQ ID NO: 397 - protein, 1106 aa, Artificial Sequence
  P09619
MRLPGAMPALALKGELLLLSLLLLLEPQISQGLVVTPPGPELVLNVSSTFVLTCSGSAPVVWERMSQEPPQEMAKAQDGTFSSVLTLTNLTGLDTGEYFCTHNDSRGLETDERKRLYIFVPDPTVGFLPNDAEELFIFLTEITEITIPCRVTDPQLVVTLHEKKGDVALPVPYDHQRGFSGIFEDRSYICKTTIGDREVDSDAYYVYRLQVSSINVSVNAVQTVVRQGENITLMCIVIGNEVVNFEWTYPRKESGRLVEPVTDFLLDMPYHIRSILHIPSAELEDSGTYTCNVTESVNDHQDEKAINITVVESGYVRLLGEVGTLQFAELHRSRTLQVVFEAYPPPTVLWFKDNRTLGDSSAGEIALSTRNVSETRYVSELTLVRVKVAEAGHYTMRAFHEDAEVQLSFQLQINVPVRVLELSESHPDSGEQTVRCRGRGMPQPNIIWSACRDLKRCPRELPPTLLGNSSEEESQLETNVTYWEEEQEFEVVSTLRLQHVDRPLSVRCTLRNAVGQDTQEVIVVPHSLPFKVVVISAILALVVLTIISLIILIMLWQKKPRYEIRWKVIESVSSDGHEYIYVDPMQLPYDSTWELPRDQLVLGRTLGSGAFGQVVEATAHGLSHSQATMKVAVKMLKSTARSSEKQALMSELKIMSHLGPHLNVVNLLGACTKGGPIYIITEYCRYGDLVDYLHRNKHTFLQHHSDKRRPPSAELYSNALPVGLPLPSHVSLTGESDGGYMDMSKDESVDYVPMLDMKGDVKYADIESSNYMAPYDNYVPSAPERTCRATLINESPVLSYMDLVGFSYQVANGMEFLASKNCVHRDLAARNVLICEGKLVKICDFGLARDIMRDSNYISKGSTFLPLKWMAPESIFNSLYTTLSDVWSFGILLWEIFTLGGTPYPELPMNEQFYNAIKRGYRMAQPAHASDEIYEIMQKCWEEKFEIRPPFSQLVLLLERLLGEGYKKKYQQVDEEFLRSDHPAILRSQARLPGFHGLRSPLDTSSVLYTAVQPNEGDNDYIIPLPDPKPEVADEGPLEGSPSLASSTLNEVNTSSTISCDSPLEPQDEPEPEPQLELQVEPEPELEQLPDSGCPAPRAEAEDSFL

SEQ ID NO: 398 - protein, 313 aa, Artificial Sequence
  A0A024RD25
MLLSKINSLAHLRAAPCNDLHATKLAPGKEKEPLESQYQVGPLLGSGGFGSVYSGIRVSDNLPVAIKHVEKDRISDWGELPNGTRVPMEVVLLKKVSSGFSGVIRLLDWFERPDSFVLILERPEPVQDLFDFITERGALQEELARSFFWQVLEAVRHCHNCGVLHRDIKDENILIDLNRGELKLIDFGSGALLKDTVYTDFDGTRVYSPPEWIRYHRYHGRSAAVWSLGILLYDMVCGDIPFEHDEEIIRGQVFFRQRVSSECQHLIRWCLALRPSDRPTFEEIQNHPWMQDVLLPQETAEIHLHSLSPGPSK

SEQ ID NO: 399 - protein, 100 aa, Artificial Sequence
  O15428
MADEEKLPPGWEKRMSRPSGRGYYFNHITNPSQWERPSGNSSSGGKIWQGEPARVRRSHLLVKPVKAALDLAAGNHPDQGGGPGADQRLHPEDQGRREGL

SEQ ID NO: 400 - protein, 163 aa, Artificial Sequence
  Q13526
MADEEKLPPGWEKRMSRSSGRVYYFNHITNASQWERPSGNSSSGGKNGQGEPARVRCSHLLVKHSQSRRPSSWRQEKITRTKEEALELINGYIQKIKSGEEDFESLASQFSDCSSAKARGDLGAFSRGQMQKPFEDASFALRTGEMSGPVFTDSGIHIILRTE

SEQ ID NO: 401 - protein, 45 aa, Artificial Sequence
  Q49AR7
MQKPFEDASFALRTGEMSGPVFTDSGIHIILRTECWRQTRGPNCF

SEQ ID NO: 402 - protein, 212 aa, Artificial Sequence
  Q9HBJ0
MKVFKFIGLMILLTSAFSAGSGQSPMTVLCSIDWFMVTVHPFMLNNDVCVHFHELHLGLGCPPNHVQPHAYQFTYRVTECGIRAKAVSQDMVIYSTEIHYSSKGTPSKFVIPVSCAAPQKSPWLTKPCSMRVASKSRATAQKDEKCYEVFSLSQSSQRPNCDCPPCVFSEEEHTQVPCHQAGAQEAQPLQPSHFLDISEDWSLHTDDMIGSM

SEQ ID NO: 403 - protein, 661 aa, Artificial Sequence
  P40967
MDLVLKRCLLHLAVIGALLAVGATKVPRNQDWLGVSRQLRTKAWNRQLYPEWTEAQRLDCWRGGQVSLKVSNDGPTLIGANASFSIALNFPGSQKVLPDGQVIWVNNTIINGSQVWGGQPVYPQETDDACIFPDGGPCPSGSWSQKRSFVYVWKTWGQYWQVLGGPVSGLSIGTGRAMLGTHTMEVTVYHRRGSRSYVPLAHSSSAFTITDQVPFSVSVSQLRALDGGNKHFLRNQPLTFALQLHDPSGYLAEADLSYTWDFGDSSGTLISRALVVTHTYLEPGPVTAQVVLQAAIPLTSCGSSPVPGTTDGHRPTAEAPNTTAGQVPTTEVVGTTPGQAPTAEPSGTTSVQVPTTEVISTAPVQMPTAESTGMTPEKVPVSEVMGTTLAEMSTPEATGMTPAEVSIVVLSGTTAAQVTTTEWVETTARELPIPEPEGPDASSIMSTESITGSLGPLLDGTATLRLVKRQVPLDCVLYRYGSFSVTLDIVQGIESAEILQAVPSGEGDAFELTVSCQGGLPKEACMEISSPGCQPPAQRLCQPVLPSPACQLVLHQILKGGSGTYCLNVSLADTNSLAVVSTQLIMPGQEAGLGQVPLIVGILLVLMAVVLASLIYRRRLMKQDFSVPQLPHSSSHWLRLPRIFCSCPIGENSPLLSGQQV

SEQ ID NO: 404 - protein, 882 aa, Artificial Sequence
  P29590
MEPAPARSPRPQQDPARPQEPTMPPPETPSEGRQPSPSPSPTERAPASEEEFQFLRCQQCQAEAKCPKLLPCLHTLCSGCLEASGMQCPICQAPWPLGADTPALDNVFFESLQRRLSVYRQIVDAQAVCTRCKESADFWCFECEQLLCAKCFEAHQWFLKHEARPLAELRNQSVREFLDGTRKTNNIFCSNPNHRTPTLTSIYCRGCSKPLCCSCALLDSSHSELKCDISAEIQQRQEELDAMTQALQEQDSAFGAVHAQMHAAVGQLGRARAETEELIRERVRQVVAHVRAQERELLEAVDARYQRDYEEMASRLGRLDAVLQRIRTGSALVQRMKCYASDQEVLDMHGFLRQALCRLRQEEPQSLQAAVRTDGFDEFKVRLQDLSSCITQGKDAAVSKKASPEAASTPRDPIDVDLPEEAERVKAQVQALGLAEAQPMAVVQSVPGAHPVPVYAFSIKGPSYGEDVSNTTTAQKRKCSQTQCPRKVIKMESEEGKEARLARSSPEQPRPSTSKAVSPPHLDGPPSPRSPVIGSEVFLPNSNHVASGAGEAEERVVVISSSEDSDAENSSSRELDDSSSESSDLQLEGPSTLRVLDENLADPQAEDRPLVFFDLKIDNETQKISQLAAVNRESKFRVVIQPEAFFSIYSKAVSLEVGLQHFLSFLSSMRRPILACYKLWGPGLPNFFRALEDINRLWEFQEAISGFLAALPLIRERVPGASSFKLKNLAQTYLARNMSERSAMAAVLAMRDLCRLLEVSPGPQLAQHVYPFSSLQCFASLQPLVQAAVLPRAEARLLALHNVSFMELLSAHRRDRQGGLKKYSRYLSLQTTTLPPAQPAFNLQALGTYFEGLLEGPALARAEGVSTPLAGRGLAERASQQS

SEQ ID NO: 405 - protein, 1075 aa, Artificial Sequence
  A5A3E0
MVVEVDSMPAASSVKKPFGLRSKMGKWCCRCFPCCRESGKSNVGTSGDHDDSAMKTLRSKMGKWCRHCFPCCRGSGKSNVGASGDHDDSAMKTLRNKMGKWCCHCFPCCRGSSKSKVGAWGDYDDSAFMEPRYHVRGEDLDKLHRAAWWGKVPRKDLIVMLRDTDVNKQDKQKRTALHLASANGNSEVVKLLLDRRCQLNVLDNKKRTALIKAVQCQEDECALMLLEHGTDPNIPDEYGNTTLHYAIYNEDKLMAKALLLYGADIESKNKHGLTPLLLGVHEQKQQVVKFLIKKKANLNALDRYGRTALILAVCCGSASIVSLLLEQNIDVSSQDLSGQTAREYAVSSHHHVICQLLSDYKEKQMLKISSENSNPEQDLKLTSEEESQRFKGSENSQPEKMSQEPEINKDGDREVEEEMKKHESNNVGLLENLTNGVTAGNGDNGLIPQRKSRTPENQQFPDNESEEYHRICELLSDYKEKQMPKYSSENSNPEQDLKLTSEEESQRLKGSENGQPEKRSQEPEINKDGDRELENFMAIEEMKKHRSTHVGFPENLTNGATAGNGDDGLIPPRKSRTPESQQFPDTENEEYHSDEQNDTQKQFCEEQNTGILHDEILIHEEKQIEVVEKMNSELSLSCKKEKDILHENSTLREEIAMLRLELDTMKHQSQLREKKYLEDIESVKKRNDNLLKALQLNELTMDDDTAVLVIDNGSGMCKAGFAGDDAPRAVFPSIVGRPRQQGMMGGMHQKESYVGKEAQSKRGILTLKYPMEHGIITNWDDMEKIWHHTFYNELRVAPEEHPVLLTEATLNPKANREKMTQIMFETFNTPAMYVAIQAVLSLYTSGRTTGIVMDSGDGVTHTVPIYEGNALPHATLRLDLAGRELPDYLMKILTEHGYRFTTMAEREIVRDIKEKLCYVALDFEQEMATVASSSSLEKSYELPDGQVITIGNERFRCPEALFQPCFLGMESCGIHETTFNSIMKSDVDIRKDLYTNTVLSGGTTMYPGMAHRMQKEIAALAPSMMKIRIIAPPKRKYSVWVGGSILASLSTFQQMWISKQEYDESGPSIVHRKCL

SEQ ID NO: 406 - protein, 584 aa, Artificial Sequence
  Q86YR6
MVAEVCSMPTASTVKKPFDLRSKMGKWCHHRFPCCRGSGKSNMGTSGDHDDSFMKMLRSKMGKCCRHCFPCCRGSGTSNVGTSGDHENSFMKMLRSKMGKWCCHCFPCCRGSGKSNVGAWGDYDHSAFMEPRYHIRREDLDKLHRAAWWGKVPRKDLIVMLRDTDMNKRDKEKRTALHLASANGNSEVVQLLLDRRCQLNVLDNKKRTALIKAIQCQEDECVLMLLEHGADRNIPDEYGNTALHYAIYNEDKLMAKALLLYGADIESKNKCGLTPLLLGVHEQKQQVVKFLIKKKANLNVLDRYGRTALILAVCCGSASIVNLLLEQNVDVSSQDLSGQTAREYAVSSHHHVICELLSDYKEKQMLKISSENSNPEQDLKLTSEEESQRLKVSENSQPEKMSQEPEINKDCDREVEEEIKKHGSNPVGLPENLTNGASAGNGDDGLIPQRRSRKPENQQFPDTENEEYHSDEQNDTRKQLSEEQNTGISQDEILTNKQKQIEVAEQKMNSELSLSHKKEEDLLRENSVLQEEIAMLRLELDETKHQNQLRENKILEEIESVKEKTDKLLRAMQLNEEALTKTNI

SEQ ID NO: 407 - protein, 509 aa, Artificial Sequence
  A0A024R1E6
MERRRLWGSIQSRYISMSVWTSPRRLVELAGQSLLKDEALAIAALELLPRELFPPLFMAAFDGRHSQTLKAMVQAWPFTCLPLGVLMKGQHLHLETFKAVLDGLDVLLAQEVRPRRWKLQVLDLRKNSHQDFWTVWSGNRASLYSFPEPEAAQPMTKKRKVDGLSTEAEQPFIPVEVLVDLFLKEGACDELFSYLIEKVKRKKNVLRLCCKKLKIFAMPMQDIKMILKMVQLDSIEDLEVTCTWKLPTLAKFSPYLGQMINLRRLLLSHIHASSYISPEKEEQYIAQFTSQFLSLQCLQALYVDSLFFLRGRLDQLLRHVMNPLETLSITNCRLSEGDVMHLSQSPSVSQLSVLSLSGVMLTDVSPEPLQALLERASATLQDLVFDECGITDDQLLALLPSLSHCSQLTTLSFYGNSISISALQSLLQHLIGLSNLTHVLYPVPLESYEDIHGTLHLERLAYLHARLRELLCELGRPSMVWLSANPCPHCGDRTFYDPEPILCPCFMPN

SEQ ID NO: 408 - protein, 509 aa, Artificial Sequence; identical to SEQ ID NO: 407
  P78395

SEQ ID NO: 409 - protein, 214 aa, Artificial Sequence
  P30044
MGLAGVCALRRSAGYILVGGAGGQSAAAAARRYSEGEWASGGVRSFSRAAAAMAPIKVGDAIPAVEVFEGEPGNKVNLAELFKGKKGVLFGVPGAFTPGCSKTHLPGFVEQAEALKAKGVQVVACLSVNDAFVTGEWGRAHKAEGKVRLLADPTGAFGKETDLLLDDSLVSIFGNRRLKRFSMVVQDGIVKALNVEPDGTGLTCSLAPNIISQL

SEQ ID NO: 410 - protein, 102 aa, Artificial Sequence
  P04554
MVRYRVRSLSERSHEVYRQQLHGQEQGHHGQEEQGLSPEHVEVYERTHGQSHYRRRHCSRRRLHRIHRRQHRSCRRRKRRSCRHRRRHRRGCRTRKRTCRRH

SEQ ID NO: 411 - protein, 553 aa, Artificial Sequence
  Q96JT2
MVQRLWVSRLLRHRKAQLLLVNLLTFGLEVCLAAGITYVPPLLLEVGVEEKFMTMVLGIGPVLGLVCVPLLGSASDHWRGRYGRRRPFIWALSLGILLSLFLIPRAGWLAGLLCPDPRPLELALLILGVGLLDFCGQVCFTPLEALLSDLFRDPDHCRQAYSVYAFMISLGGCLGYLLPAIDWDTSALAPYLGTQEECLFGLLTLIFLTCVAATLLVAEEAALGPTEPAEGLSAPSLSPHCCPCRARLAFRNLGALLPRLHQLCCRMPRTLRRLFVAELCSWMALMTFTLFYTDFVGEGLYQGVPRAEPGTEARRHYDEGVRMGSLGLFLQCAISLVFSLVMDRLVQRFGTRAVYLASVAAFPVAAGATCLSHSVAVVTASAALTGFTFSALQILPYTLASLYHREKQVFLPKYRGDTGGASSEDSLMTSFLPGPKPGAPFPNGHVGAGGSGLLPPPPALCGASACDVSVRVVVGEPTEARVVPGRGICLDLAILDSAFLLSQVAPSLFMGSIVQLSQSVTAYMVSAAGLGLVAIYFATQVVFDKSDLAKYSA

SEQ ID NO: 412 - protein, 215 aa, Artificial Sequence [sequence omitted]

SEQ ID NO: 413 - protein, 256 aa, Artificial Sequence
  P24158
MAHRPPSPALASVLLALLLSGAARAAEIVGGHEAQPHSRPYMASLQMRGNPGSHFCGGTLIHPSFVLTAAHCLRDIPQRLVNVVLGAHNVRTQEPTQQHFSVAQVFLNNYDAENKLNDVLLIQLSSPANLSASVATVQLPQQDQPVPHGTQCLAMGWGRVGAHDPPAQVLQELNVTVVTFFCRPHNICTFVPRRKAGICFGDSGGPLICDGIIQGIDSFVIWGCATRLFPDFFTRVALYVDWIRSTLRRVEAKGRP

SEQ ID NO: 414 - protein, 919 aa, Artificial Sequence
  P55786
MWLAAAAPSLARRLLFLGPPPPPLLLLVFSRSSRRRLHSLGLAAMPEKRPFERLPADVSPINYSLCLKPDLLDFTFEGKLEAAAQVRQATNQIVMNCADIDIITASYAPEGDEEIHATGFNYQNEDEKVTLSFPSTLQTGTGTLKIDFVGELNDKMKGFYRSKYTTPSGEVRYAAVTQFEATDARRAFPCWDEPAIKATFDISLVVPKDRVALSNMNVIDRKPYPDDENLVEVKFARTPVMSTYLVAFVVGEYDFVETRSKDGVCVRVYTPVGKAEQGKFALEVAAKTLPFYKDYFNVPYPLPKIDLIAIADFAAGAMENWGLVTYRETALLIDPKNSCSSSRQWVALVVGHELAHQWFGNLVTMEWWTHLWLNEGFASWIEYLCVDHCFPEYDIWTQFVSADYTRAQELDALDNSHPIEVSVGHPSEVDEIFDAISYSKGASVIRMLHDYIGDKDFKKGMNMYLTKFQQKNAATEDLWESLENASGKPIAAVMNTWTKQMGFPLIYVEAEQVEDDRLLRLSQKKFCAGGSYVGEDCPQWMVPITISTSEDPNQAKLKILMDKPEMNVVLKNVKPDQWVKLNLGTVGFYRTQYSSAMLESLLPGIRDLSLPPVDRLGLQNDLFSLARAGIISTVEVLKVMEAFVNEPNYTVWSDLSCNLGILSTLLSHTDFYEEIQEFVKDVFSPIGERLGWDPKPGEGHLDALLRGLVLGKLGKAGHKATLEEARRRFKDHVEGKQILSADLRSPVYLTVLKHGDGTTLDIMLKLHKQADMQEEKNRIERVLGATLLPDLIQKVLTFALSEEVRPQDTVSVIGGVAGGSKHGRKAAWKFIKDNWEELYNRYQGGFLISRLIKLSVEGFAVDKMAGEVKAFFESHPAPSAERTIQQCCENILLNAAWLKRDAESIHQYLLQRKASPPTV

SEQ ID NO: 415 - protein, 219 aa, Artificial Sequence
  P28065
MLRAGAPTGDLPRAGEVHTGTTIMAVEFDGGVVMGSDSRVSAGEAVVNRVFDKLSPLHERIYCALSGSAADAQAVADMAAYQLELHGIELEEPPLVLAAANVVRNISYKYREDLSAHLMVAGWDQREGGQVYGTLGGMLTRQPFAIGGSGSTFIYGYVDAAYKPGMSPEECRRFTTDAIALAMSRDGSSGGVIYLVTITAAGVDHRVILGNELPKFYDE

SEQ ID NO: 416 - protein, 114 aa, Artificial Sequence
  D3DWI6
MAGLALQPGTALLCYSCKAQVSNEDCLQVENCTQLGEQCWTARIRAVGLLTVISKGCSLNCVDDSQDYYVGKKNITCCDTDLCNASGAHALQPAAAILALLPALGLLLWGPGQL

SEQ ID NO: 417 - protein, 123 aa, Artificial Sequence
  O43653
MKAVLLALLMAGLALQPGTALLCYSCKAQVSNEDCLQVENCTQLGEQCWTARIRAVGLLTVISKGCSLNCVDDSQDYYVGKKNITCCDTDLCNASGAHALQPAAAILALLPALGLLLWGPGQL

SEQ ID NO: 418 - protein, 320 aa, Artificial Sequence
  Q9H255
MSSCNFTHATFVLIGIPGLEKAHFWVGFPLLSMYVVAMFGNCIVVFIVRTERSLHAPMYLFLCMLAAIDLALSTSTMPKILALFWFDSREISFEACLTQMFFIHALSAIESTILLAMAFDRYVAICHPLRHAAVLNNTVTAQIGIVAVVRGSLFFFPLPLLIKRLAFCHSNVLSHSYCVHQDVMKLAYADTLPNVVYGLTAILLVMGVDVMFISLSYFLIIRTVLQLPSKSERAKAFGTCVSHIGVVLAFYVPLIGLSVVHRFGNSLHPIVRVVMGDIYLLLPPVINPIIYGAKTKQIRTRVLAMFKISCDKDLQAVGGK

SEQ ID NO: 419 - protein, 750 aa, Artificial Sequence
  Q04609
MWNLLHETDSAVATARRPRWLCAGALVLAGGFFLLGFLFGWFIKSSNEATNITPKHNMKAFLDELKAENIKKFLYNFTQIPHLAGTEQNFQLAKQIQSQWKEFGLDSVELAHYDVLLSYPNKTHPNYISIINEDGNEIFNTSLFEPPPPGYENVSDIVPPFSAFSPQGMPEGDLVYVNYARTEDFFKLERDMKINCSGKIVIARYGKVFRGNKVKNAQLAGAKGVILYSDPADYFAPGVKSYPDGWNLPGGGVQRGNILNLNGAGDPLTPGYPANEYAYRRGIAEAVGLPSIPVHPIGYYDAQKLLEKMGGSAPPDSSWRGSLKVPYNVGPGFTGNFSTQKVKMHIHSTNEVTRIYNVIGTLRGAVEPDRYVILGGHRDSWVFGGIDPQSGAAVVHEIVRSFGTLKKEGWRPRRTILFASWDAEEFGLLGSTEWAEENSRLLQERGVAYINADSSIEGNYTLRVDCTPLMYSLVHNLTKELKSPDEGFEGKSLYESWTKKSPSPEFSGMPRISKLGSGNDFEVFFQRLGIASGRARYTKNWETNKFSGYPLYHSVYETYELVEKFYDPMFKYHLTVAQVRGGMVFELANSIVLPFDCRDYAVVLRKYADKIYSISMKHPQEMKTYSVSFDSLFSAVKNFTEIASKFSERLQDFDKSNPIVLRMMNDQLMFLERAFIDPLGLPDRPFYRHVIYAPSSHNKYAGESFPGIYDALFDIESKVDPSKAWGEVKRQIYVAAFTVQAAAETLSEVA

SEQ ID NO: 420 - protein, 1306 aa, Artificial Sequence
  NP_002829
MTMYLWLKLLAFGFAFLDTEVFVTGQSPTPSPTGLTTAKMPSVPLSSDPLPTHTTAFSPASTFERENDFSETTTSLSPDNTSTQVSPDSLDNASAFNTTGVSSVQTPHLPTHADSQTPSAGTDTQTFSGSAANAKLNPTPGSNAISDVPGERSTASTFPTDPVSPLTTTLSLAHHSSAALPARTSNTTITANTSDAYLNASETTTLSPSGSAVISTTTIATTPSKPTCDEKYANITVDYLYNKETKLFTAKLNVNENVECGNNTCTNNEVHNLTECKNASVSISHNSCTAPDKTLILDVPPGVEKFQLHDCTQVEKADTTICLKWKNIETFTCDTQNITYRFQCGNMIFDNKEIKLENLEPEHEYKCDSEILYNNHKFTNASKIIKTDFGSPGEPQIIFCRSEAAHQGVITWNPPQRSFHNFTLCYIKETEKDCLNLDKNLIKYDLQNLKPYTKYVLSLHAYIIAKVQRNGSAAMCHFTTKSAPPSQVWNMTVSMTSDNSMHVKCRPPRDRNGPHERYHLEVEAGNTLVRNESHKNCDFRVKDLQYSTDYTFKAYFHNGDYPGEPFILHHSTSYNSKALIAFLAFLIIVTSIALLVVLYKIYDLHKKRSCNLDEQQELVERDDEKQLMNVEPIHADILLETYKRKIADEGRLFLAEFQSIPRVFSKFPIKEARKPFNQNKNRYVDILPYDYNRVELSEINGDAGSNYINASYIDGFKEPRKYIAAQGPRDETVDDFWRMIWEQKATVIVMVTRCEEGNRNKCAEYWPSMEEGTRAFGDVVVKINQHKRCPDYIIQKLNIVNKKEKATGREVTHIQFTSWPDHGVPEDPHLLLKLRRRVNAFSNFFSGPIVVHCSAGVGRTGTYIGIDAMLEGLEAENKVDVYGYVVKLRRQRCLMVQVEAQYILIHQALVEYNQFGETEVNLSELHPYLHNMKKRDPPSEPSPLEAEFQRLPSYRSWRTQHIGNQEENKSKNRNSNVIPYDYNRVPLKHELEMSKESEHDSDESSDDDSDSEEPSKYINASFIMSYWKPEVMIAAQGPLKETIGDFWQMIFQRKVKVIVMLTELKHGDQEICAQYWGEGKQTYGDIEVDLKDTDKSSTYTLRVFELRHSKRKDSRTVYQYQYTNWSVEQLPAEPKELISMIQVVKQKLPQKNSSEGNKHHKSTPLLIHCRDGSQQTGIFCALLNLLESAETEEVVDIFQVVKALRKARPGMVSTFEQYQFLYDVIASTYPAQNGQVKKNNHQEDKIEFDNEVDKVKQDANCVNPLGAPEKLPEAKEQAEGSEPTSGTEGPEHSVNGPASPALNQGS

SEQ ID NO: 421 - protein, 207 aa, Artificial Sequence
  P61006
MAKTYDYLFKLLLIGDSGVGKTCVLFRFSEDAFNSTFISTIGIDFKIRTIELDGKRIKLQIWDTAGQERFRTITTAYYRGAMGIMLVYDITNEKSFDNIRNWIRNIEEHASADVEKMILGNKCDVNDKRQVSKERGEKLALDYGIKFMETSAKANINVENAFFTLARDIKAKMDKKLEGNSPQGSNQGVKITPDQQKRSSFFRCVLL

SEQ ID NO: 422 - protein, 419 aa, Artificial Sequence
  Q9UQ07
MKNYKAIGKIGEGTFSEVMKMQSLRDGNYYACKQMKQRFESIEQVNNLREIQALRRLNPHPNILMLHEVVFDRKSGSLALICELMDMNIYELIRGRRYPLSEKKIMHYMYQLCKSLDHIHRNGIFHRDVKPENILIKQDVLKLGDFGSCRSVYSKQPYTEYISTRWYRAPECLLTDGFYTYKMDLWSAGCVFYEIASLQPLFPGVNELDQISKIHDVIGTPAQKILTKFKQSRAMNFDFPFKKGSGIPLLTTNLSPQCLSLLHAMVAYDPDERIAAHQALQHPYFQEQRKTEKRALGSHRKAGFPEHPVAPEPLSNSCQISKEGRKQKQSLKQEEDRPKRRGPAYVMELPKLKLSGVVRLSSYSSPTLQSVLGSGTNGRVPVLRPLKCIPASKKTDPQKDLKPAPQQCRLPTIVRKGGR

SEQ ID NO: 423 - protein, 462 aa, Artificial Sequence
  P10276
MASNSSSCPTPGGGHLNGYPVPPYAFFFPPMLGGLSPPGALTTLQHQLPVSGYSTPSPATIETQSSSSEEIVPSPPSPPPLPRIYKPCFVCQDKSSGYHYGVSACEGCKGFFRRSIQKNMVYTCHRDKNCIINKVTRNRCQYCRLQKCFEVGMSKESVRNDRNKKKKEVPKPECSESYTLTPEVGELIEKVRKAHQETFPALCQLGKYTTNNSSEQRVSLDIDLWDKFSELSTKCIIKTVEFAKQLPGFTTLTIADQITLLKAACLDILILRICTRYTPEQDTMTFSDGLTLNRTQMHNAGFGPLTDLVFAFANQLLPLEMDDAETGLLSAICLICGDRQDLEQPDRVDMLQEPLLEALKVYVRKRRPSRPHMFPKMLMKITDLRSISAKGAERVITLKMEIPGSMPPLIQEMLENSEGLDTLSGQPGGGGRDGGGLAPPPGSCSPSLSPSSNRSSPATHSP

SEQ ID NO: 424 - protein, 189 aa, Artificial Sequence
  P01112
MTEYKLVVVGAGGVGKSALTIQLIQNHFVDEYDPTIEDSYRKQVVIDGETCLLDILDTAGQEEYSAMRDQYMRTGEGFLCVFAINNTKSFEDIHQYREQIKRVKDSDDVPMVLVGNKCDLAARTVESRQAQDLARSYGIPYIETSAKTRQGVEDAFYTLVREIRQHKLRKLNPPDESGPGCMSCKCVLS

SEQ ID NO: 425 - protein, 189 aa, Artificial Sequence [sequence omitted]

SEQ ID NO: 426 - protein, 189 aa, Artificial Sequence
  P01111
MTEYKLVVVGAGGVGKSALTIQLIQNHFVDEYDPTIEDSYRKQVVIDGETCLLDILDTAGQEEYSAMRDQYMRTGEGFLCVFAINNSKSFADINLYREQIKRVKDSDDVPMVLVGNKCDLPTRTVDTKQAHELAKSYGIPFIETSAKTRQGVEDAFYTLVREIRQYRMKKLNSSDDGTQGCMGLPCVVM

SEQ ID NO: 427 - protein, 181 aa, Artificial Sequence
  O15539
MCKGLAALPHSCLERAKEIKIKLGILLQKPDSVGDLVIPYNEKPEKPAKTQKTSLDEALQWRDSLDKLLQNNYGLASFKSFLKSEFSEENLEFWIACEDYKKIKSPAKMAEKAKQIYEEFIQTEAPKEVNIDHFTKDITMKNLVEPSLSSFDMAQKRIHALMEKDSLPRFVRSEFYQELIK

SEQ ID NO: 428 - protein, 724 aa, Artificial Sequence
  O75330
MSFPKAPLKRFNDPSGCAPSPGAYDVKTLEVLKGPVSFQKSQRFKQQKESKQNLNVDKDTTLPASARKVKSSESKESQKNDKDLKILEKEIRVLLQERGAQDRRIQDLETELEKMEARLNAALREKTSLSANNATLEKQLIELTRTNELLKSKFSENGNQKNLRILSLELMKLRNKRETKMRGMMAKQEGMEMKLQVTQRSLEESQGKIAQLEGKLVSIEKEKIDEKSETEKLLEYIEEISCASDQVEKYKLDIAQLEENLKEKNDEILSLKQSLEENIVILSKQVEDLNVKCQLLEKEKEDHVNRNREHNENLNAEMQNLKQKFILEQQEREKLQQKELQIDSLLQQEKELSSSLHQKLCSFQEEMVKEKNLFEEELKQTLDELDKLQQKEEQAERLVKQLEEEAKSRAEELKLLEEKLKGKEAELEKSSAAHTQATLLLQEKYDSMVQSLEDVTAQFESYKALTASEIEDLKLENSSLQEKAAKAGKNAEDVQHQILATESSNQEYVRMLLDLQTKSALKETEIKEITVSFLQKITDLQNQLKQQEEDFRKQLEDEEGRKAEKENTTAELTEEINKWRLLYEELYNKTKPFQLQLDAFEVEKQALLNEHGAAQEQLNKIRDSYAKLLGHQNLKQKIKHVVKLKDENSQLKSEVSKLRCQLAKKKQSETKLQEELNKVLGIKHFDPSKAFHHESKENFALKTPLKEGNTNCYRAPMECQESWK

SEQ ID NO: 429 - protein, 193 aa, Artificial Sequence
  P08134
MAAIRKKLVIVGDGACGKTCLLIVFSKDQFPEVYVPTVFENYIADIEVDGKQVELALWDTAGQEDYDRLRPLSYPDTDVILMCFSIDSPDSLENIPEKWTPEVKHFCPNVPIILVGNKKDLRQDEHTRRELAKMKQEPVRSEEGRDMANRISAFGYLECSAKTKEGVREVFEMATRAGLQVRKNKRRRGCPIL

SEQ ID NO: 430 - protein, 295 aa, Artificial Sequence [sequence omitted]

SEQ ID NO: 431 - protein, 866 aa, Artificial Sequence
  Q9UHJ3
MNGEQQLDADAGSGMEEVELSWEDYLEETGSTAVPYGSFKHVDTRLQNGFAPGMKLEVAVRTDPETYWVATVITTCEQLLLLRYDGYGEDRRADFWCDIRKADLYPIGWCEQNKKTLEAPEGIRDKVSDWDEFLRQTLIGACSPPVPLLEGLRNGRNPLDLIAPGSRLECQAFQDSLSTWIVTVVENIGGRLKLRYEGLESSDNYEHWLYYLDPFLHHVGWAAQQGYELQPPSAIRHLKNEAEWQEILAKVKEEEEEPLPSYLFKDKQVIGIHTFSVNMKLEAVDPWSPFGISPATVVKVFDEKYFLVEMDDLRPENHARRSFVCHADSPGIFPVQWSLKNGLHISPPPGYPSQDFDWADYLKQCGAEAAPQRCFPPLISEHEFKENMKLEAVNPILPEEVCVATITAVRGSYLWLQLEGSKKPIPECIVSVESMDIFPLGWCETNGHPLSTPRRARVYKQRKIAVVQPEKQVPSSRTVHEGLRNQELNSTESVMINGKYCCPKIYFNHRCFSGPYLNKGRIAELPQCVGPGNCVLVLREVLTLLINAAYKPSRVLRELQLDKDSVWHGCGEVLKAKYKGKSYRATVEIVKTADRVTEFCRQTCIKLECCPNLFGPRMVLDKCSENCSVLTKTKYTHYYGKKKNKRIGRPPGGHSNLACALKKASKRRKRRKNVFVHKKKRSSASVDNTPAGSPQGSGGEDEDDPDEGDDDSLSEGSTSEQQDELQEESEMSEKKSCSSSPTQSEISTSLPPDRQRRKRELRTFSFSDDENKPPSPKEIRIEVAERLHLDSNPLKWSVADVVRFIRSTDCAPLARIFLDQEIDGQALLLLTLPTVQECMDLKLGPAIKLCHHIERIKFAFYEQFAN

SEQ ID NO: 432 - protein, 476 aa, Artificial Sequence
  Q9UHG0
MSGSSARSSHLSQPVVKSVLVYRNGDPFYAGRRVVIHEKKVSSFEVFLKEVTGGVQAPFGAVRNIYTPRTGHRIRKLDQIQSGGNYVAGGQEAFKKLNYLDIGEIKKRPMEVVNTEVKPVIHSRINVSARFRKPLQEPCTIFLIANGDLINPASRLLIPRKTLNQWDHVLQMVTEKITLRSGAVHRLYTLEGKLVESGAELENGQFYVAVGRDKFKKLPYSELLFDKSTMRRPFGQKASSLPPIVGSRKSKGSGNDRHSKSTVGSSDNSSPQPLKRKGKKEDVNSEKLTKLKQNVKLKNSQETIPNSDEGIFKAGAERSETRGAAEVQEDEDTQVEVPVDQRPAEIVDEEEDGEKANKDAEQKEDFSGMNGDLEEEGGREATDAPEQVEEILDHSEQQARPARVNGGTDEENGEELQQVNNELQLVLDKERKSQGAGSGQDEADVDPQRPPRPEVKITSPEENENNQQNKDYAAVA

SEQ ID NO: 433 - protein, 453 aa, Artificial Sequence
  Q01196
MRIPVDASTSRRFTPPSTALSPGKMSEALPLGAPDAGAALAGKLRSGDRSMVEVLADHPGELVRTDSPNFLCSVLPTHWRCNKTLPIAFKVVALGDVPDGTLVTVMAGNDENYSAELRNATAAMKNQVARFNDLRFVGRSGRGKSFTLTITVFTNPPQVATYHRAIKITVDGPREPRRHRQKLDDQTKPGSLSFSERLSELEQLRRTAMRVSPHHPAPTPNPRASLNHSTAFNPQPQSQMQDTRQIQPSPPWSYDQSYQYLGSIASPSVHPATPISPGRASGMTTLSAELSSRLSTAPDLTAFSDPRQFPALPSISDPRMHYPGAFTYSPTPVTSGIGIGMSAMGSATRYHTYLPPPYPGSSQAQGGPFQASSPSYHLYYGASAGSYQFSMVGGERSPPRILPPCTNASTGSALLNPSLPNQSDVVEAEGSHSNSPTNMAPSARLEEAVWRPY

SEQ ID NO: 434 - protein, 359 aa, Artificial Sequence [sequence omitted]

SEQ ID NO: 435 - protein, 904 aa, Artificial Sequence
  Q9NXZ1
MQASPLQTSQPTPPEELHAAAYVFTNDGQQMRSDEVNLVATGHQSKKKHSRKSKRHSSSKRRKSMSSWLDKQEDAAVTHSICEERINNGQPVADNVLSTAPPWPDATIAHNIREERMENGQSRTDKVLSTAPPQLVHMAAAGIPSMSTRDLHSTVTHNIREERMENGQPQPDNVLSTGPTGLINMAATPIPAMSARDLYATVTHNVCEQKMENVQPAPDNVLLTLRPRRINMTDTGISPMSTRDPYATITYNVPEEKMEKGQPQPDNILSTASTGLINVAGAGTPAISTNGLYSTVPHNVCEEKMENDQPQPNNVLSTVQPVIIYLTATGIPGMNTRDQYATITHNVCEERVVNNQPLPSNALSTVLPGLAYLATADMPAMSTRDQHATIIHNLREEKKDNSQPTPDNVLSAVTPELINLAGAGIPPMSTRDQYATVNHHVHEARMENGQRKQDNVLSNVLSGLINMAGASIPAMSSRDLYATITHSVREEKMESGKPQTDKVISNDAPQLGHMAAGGIPSMSTKDLYATVTQNVHEERMENNQPQPSYDLSTVLPGLTYLTVAGIPAMSTRDQYATVTHNVHEEKIKNGQAASDNVFSTVPPAFINMAATGVSSMSTRDQYAAVTHNIREEKINNSQPAPGNILSTAPPWLRHMAAAGISSTITRDLYVTATHSVHEEKMTNGQQAPDNSLSTVPPGCINLSGAGISCRSTRDLYATVIHDIQEEEMENDQTPPDGFLSNSDSPELINMTGHCMPPNALDSFSHDFTSLSKDELLYKPDSNEFAVGTKNYSVSAGDPPVTVMSLVETVPNTPQISPAMAKKINDDIKYQLMKEVRRFGQNYERIFILLEEVQGSMKVKRQFVEFTIKEAARFKKVVLIQQLEKALKEIDSHCHLRKVKHMRKR

SEQ ID NO: 436 - protein, 800 aa, Artificial Sequence
  O43290
MGSSKKHRGEKEAAGTTAAAGTGGATEQPPRHREHKKHKHRSGGSGGSGGERRKRSRERGGERGSGRRGAEAEARSSTHGRERSQAEPSERRVKREKRDDGYEAAASSKTSSGDASSLSIEETNKLRAKLGLKPLEVNAIKKEAGTKEEPVTADVINPMALRQREELREKLAAAKEKRLLNQKLGKIKTLGEDDPWLDDTAAWIERSRQLQKEKDLAEKRAKLLEEMDQEFGVSTLVEEEFGQRRQDLYSARDLQGLTVEHAIDSFREGETMILTLKDKGVLQEEEDVLVNVNLVDKERAEKNVELRKKKPDYLPYAEDESVDDLAQQKPRSILSKYDEELEGERPHSFRLEQGGTADGLRERELEEIRAKLRLQAQSLSTVGPRLASEYLTPEEMVTFKKTKRRVKKIRKKEKEVVVRADDLLPLGDQTQDGDFGSRLRGRGRRRVSEVEEEKEPVPQPLPSDDTRVENMDISDEEEGGAPPPGSPQVLEEDEAELELQKQLEKGRRLRQLQQLQQLRDSGEKVVEIVKKLESRQRGWEEDEDPERKGAIVFNATSEFCRTLGEIPTYGLAGNREEQEELMDFERDEERSANGGSESDGEENIGWSTVNLDEEKQQQDFSASSTTILDEEPIVNRGLAAALLLCQNKGLLETTVQKVARVKAPNKSLPSAVYCIEDKMAIDDKYSRREEYRGFTQDFKEKDGYKPDVKIEYVDETGRKLTPKEAFRQLSHRFHGKGSGKMKTERRMKKLDEEALLKKMSSSDTPLGTVALLQEKQKAQKTPYIVLSGSGKSMNANTITK

SEQ ID NO: 437 - protein, 958 aa, Artificial Sequence [sequence omitted]

SEQ ID NO: 438 - protein, 963 aa, Artificial Sequence
  Q15020
MATAAETSASEPEAESKAGPKADGEEDEVKAARTRRKVLSRAVAAATYKTMGPAWDQQEEGVSESDGDEYAMASSAESSPGEYEWEYDEEEEKNQLEIERLEEQLSINVYDYNCHVDLIRLLRLEGELTKVRMARQKMSEIFPLTEELWLEWLHDEISMAQDGLDREHVYDLFEKAVKDYICPNIWLEYGQYSVGGIGQKGGLEKVRSVFERALSSVGLHMTKGLALWEAYREFESAIVEAARLEKVHSLFRRQLAIPLYDMEATFAEYEEWSEDPIPESVIQNYNKALQQLEKYKPYEEALLQAEAPRLAEYQAYIDFEMKIGDPARIQLIFERALVENCLVPDLWIRYSQYLDRQLKVKDLVLSVHNRAIRNCPWTVALWSRYLLAMERHGVDHQVISVTFEKALNAGFIQATDYVEIWQAYLDYLRRRVDFKQDSSKELEELRAAFTRALEYLKQEVEERFNESGDPSCVIMQNWARIEARLCNNMQKARELWDSIMTRGNAKYANMWLEYYNLERAHGDTQHCRKALHRAVQCTSDYPEHVCEVLLTMERTEGSLEDWDIAVQKTETRLARVNEQRMKAAEKEAALVQQEEEKAEQRKRARAEKKALKKKKKIRGPEKRGADEDDEKEWGDDEEEQPSKRRRVENSIPAAGETQNVEVAAGPAGKCAAVDVEPPSKQKEKAASLKRDMPKVLHDSSKDSITVFVSNLPYSMQEPDTKLRPLFEACGEVVQIRPIFSNRGDFRGYCYVEFKEEKSALQALEMDRKSVEGRPMFVSPCVDKSKNPDFKVFRYSTSLEKHKLFISGLPFSCTKEELEEICKAHGTVKDLRLVTNRAGKPKGLAYVEYENESQASQAVMKMDGMTIKENIIKVAISNPPQRKVPEKPETRKAPGGPMLLPQTYGARGKGRTQLSLLPRALQRPSAAAPQAENGPAAAPAVAAPAATEAPKMSNADFAKLFLRK

SEQ ID NO: 439 - protein, 760 aa, Artificial Sequence
  Q12884
MKTWVKIVFGVATSAVLALLVMCIVLRPSRVHNSEENTMRALTLKDILNGTFSYKTFFPNWISGQEYLHQSADNNIVLYNIETGQSYTILSNRTMKSVNASNYGLSPDRQFVYLESDYSKLWRYSYTATYYIYDLSNGEFVRGNELPRPIQYLCWSPVGSKLAYVYQNNIYLKQRPGDPPFQITFNGRENKIFNGIPDWVYEEEMLATKYALWWSPNGKFLAYAEFNDTDIPVIAYSYYGDEQYPRTINIPYPKAGAKNPVVRIFIIDTTYPAYVGPQEVPVPAMIASSDYYFSWLTWVTDERVCLQWLKRVQNVSVLSICDFREDWQTWDCPKTQEHIEESRTGWAGGFFVSTPVFSYDAISYYKIFSDKDGYKHIHYIKDTVENAIQITSGKWEAINIFRVTQDSLFYSSNEFEEYPGRRNIYRISIGSYPPSKKCVTCHLRKERCQYYTASFSDYAKYYALVCYGPGIPISTLHDGRTDQEIKILEENKELENALKNIQLPKEEIKKLEVDEITLWYKMILPPQFDRSKKYPLLIQVYGGPCSQSVRSVFAVNWISYLASKEGMVIALVDGRGTAFQGDKLLYAVYRKLGVYEVEDQITAVRKFIEMGFIDEKRIAIWGWSYGGYVSSLALASGTGLFKCGIAVAPVSSWEYYASVYTERFMGLPTKDDNLEHYKNSTVMARAEYFRNVDYLLIHGTADDNVHFQNSAQIAKALVNAQVDFQAMWYSDQNHGLSGLSTNHLYTHMTHFLKQCFSLSD

SEQ ID NO: 440 - protein, 375 aa, Artificial Sequence
  P36952
MDALQLANSAFAVDLFKQLCEKEPLGNVLFSPICLSTSLSLAQVGAKGDTANEIGQVLHFENVKDVPFGFQTVTSDVNKLSSFYSLKLIKRLYVDKSLNLSTEFISSTKRPYAKELETVDFKDKLEETKGQINNSIKDLTDGHFENILADNSVNDQTKILVVNAAYFVGKWMKKFSESETKECPFRVNKTDTKPVQMMNMEATFCMGNIDSINCKIIELPFQNKHLSMFILLPKDVEDESTGLEKIEKQLNSESLSQWTNPSTMANAKVKLSIPKFKVEKMIDPKACLENLGLKHIFSEDTSDFSGMSETKGVALSNVIHKVCLEITEDGGDSIEVPGARILQHKDELNADHPFIYIIRHNKTRNIIFFGKFCSP

SEQ ID NO: 441 - protein, 333 aa, Artificial Sequence
  Q969X2
MACSRPPSQCEPTSLPPGPPAGRRHLPLSRRRREMSSNKEQRSAVFVILFALITILILYSSNSANEVFHYGSLRGRSRRPVNLKKWSITDGYVPILGNKTLPSRCHQCVIVSSSSHLLGTKLGPEIERAECTIRMNDAPTTGYSADVGNKTTYRVVAHSSVFRVLRRPQEFVNRTPETVFIFWGPPSKMQKPQGSLVRVIQRAGLVFPNMEAYAVSPGRMRQFDDLFRGETGKDREKSHSWLSTGWFTMVIAVELCDHVHVYGMVPPNYCSQRPRLQRMPYHYYEPKGPDECVTYIQNEHSRKGNHHRFITEKRVFSSWAQLYGITFSHPSWT

SEQ ID NO: 442 - protein, 356 aa, Artificial Sequence
  Q92185
MSPCGRARRQTSRGAMAVLAWKFPRTRLPMGASALCVVVLCWLYIFPVYRLPNEKEIVQGVLQQGTAWRRNQTAARAFRKQMEDCCDPAHLFAMTKMNSPMGKSMWYDGEFLYSFTIDNSTYSLFPQATPFQLPLKKCAVVGNGGILKKSGCGRQIDEANFVMRCNLPPLSSEYTKDVGSKSQLVTANPSIIRQRFQNLLWSRKTFVDNMKIYNHSYIYMPAFSMKTGTEPSLRVYYTLSDVGANQTVLFANPNFLRSIGKFWKSRGIHAKRLSTGLFLVSAALGLCEEVAIYGFWPFSVNMHEQPISHHYYDNVLPFSGFHAMPEEFLQLWYLHKIGALRMQLDPCEDTSLQPTS

SEQ ID NO: 443 - protein, 418 aa, Artificial Sequence
  Q9UNP4
MRTKAAGCAERRPLQPRTEAAAAPAGRAMPSEYTYVKLRSDCSRPSLQWYTRAQSKMRRPSLLLKDILKCTLLVFGVWILYILKLNYTTEECDMKKMHYVDPDHVKRAQKYAQQVLQKECRPKFAKTSMALLFEHRYSVDLLPFVQKAPKDSEAESKYDPPFGFRKFSSKVQTLLELLPEHDLPEHLKAKTCRRCVVIGSGGILHGLELGHTLNQFDVVIRLNSAPVEGYSEHVGNKTTIRMTYPEGAPLSDLEYYSNDLFVAVLFKSVDFNWLQAMVKKETLPFWVRLFFWKQVAEKIPLQPKHFRILNPVIIKETAFDILQYSEPQSRFWGRDKNVPTIGVIAVVLATHLCDEVSLAGFGYDLNQPRTPLHYFDSQCMAAMNFQTMHNVTTETKFLLKLVKEGVVKDLSGGIDREF

SEQ ID NO: 444 - protein, 352 aa, Artificial Sequence
  A0A024R0G8
MDFLRNLFSQTLSLGSQKERLLDELTLEGVARYMQSERCRRVICLVGAGISTSAGIPDFRSPSTGLYDNLEKYHLPYPEAIFEISYFKKHPEPFFALAKELYPGQFKPTICHYFMRLLKDKGLLLRCYTQNIDTLERIAGLEQEDLVEAHGTFYTSHCVSASCRHEYPLSWMKEKIFSEVTPKCEDCQSLVKPDIVFFGESLPARFFSCMQSDFLKVDLLLVMGTSLQVQPFASLISKAPLSTPRLLINKEKAGQSDPFLGMIMGLGGGMDFDSKKAYRDVAWLGECDQGCLALAELLGWKKELEDLVRREHASIDAQSGAGVPNPSTSASPKKSPPPAKDEARTTEREKPQ

SEQ ID NO: 445 - protein, 389 aa, Artificial Sequence
  Q8IXJ6
MAEPDPSHPLETQAGKVQEAQDSDSDSEGGAAGGEADMDFLRNLFSQTLSLGSQKERLLDELTLEGVARYMQSERCRRVICLVGAGISTSAGIPDFRSPSTGLYDNLEKYHLPYPEAIFEISYFKKHPEPFFALAKELYPGQFKPTICHYFMRLLKDKGLLLRCYTQNIDTLERIAGLEQEDLVEAHGTFYTSHCVSASCRHEYPLSWMKEKIFSEVTPKCEDCQSLVKPDIVFFGESLPARFFSCMQSDFLKVDLLLVMGTSLQVQPFASLISKAPLSTPRLLINKEKAGQSDPFLGMIMGLGGGMDFDSKKAYRDVAWLGECDQGCLALAELLGWKKELEDLVRREHASIDAQSGAGVPNPSTSASPKKSPPPAKDEARTTEREKPQ

SEQ ID NO: 446 - protein, 466 aa, Artificial Sequence
  P56693
MAEEQDLSEVELSPVGSEEPRCLSPGSAPSLGPDGGGGGSGLRASPGPGELGKVKKEQQDGEADDDKFPVCIREAVSQVLSGYDWTLVPMPVRVNGASKSKPHVKRPMNAFMVWAQAARRKLADQYPHLHNAELSKTLGKLWRLLNESDKRPFIEEAERLRMQHKKDHPDYKYQPRRRKNGKAAQGEAECPGGEAEQGGTAAIQAHYKSAHLDHRHPGEGSPMSDGNPEHPSGQSHGPPTPPTTPKTELQSGKADPKRDGRSMGEGGKPHIDFGNVDIGEISHEVMSNMETFDVAELDQYLPPNGHPGHVSSYSAAGYGLGSALAVASGHSAWISKPPGVALPTVSPPGVDAKAQVKTETAGPQGPPHYTDQPSTSQIAYTSLSLPHYGSAFPSISRPQFDYSDHQPSGPYYGHSGQASGLYSAFSYMGPSQRPLYTAISDPSPSGPQSHSPTHWEQPVYTTLSRP

SEQ ID NO: 447 - protein, 151 aa, Artificial Sequence
  Q15506
MSIPFSNTHYRIPQGFGNLLEGLTREILREQPDNIPAFAAAYFESLLEKREKTNFDPAEWGSKVEDRFYNNHAFEEQEPPEKSDPKQEESQISGKEEETSVTILDSSEEDKEKEEVAAVKIQAAFRGHIAREEAKKMKTNSLQNEEKEENK

SEQ ID NO: 448 - protein, 97 aa, Artificial Sequence
  Q9NS26
MDKQSSAGGVKRSVPCDSNEANEMMPETPTGDSDPQPAPKKMKTSESSTILVVRYRRNFKRTSPEELLNDHARENRINPLQMEEEEFMEIMVEIPAK

SEQ ID NO: 449 - protein, 141 aa, Artificial Sequence
  Q5MJ09
MEQPTSSTNGEKTKSPCESNNKKNDEMQEVPNRVLAPEQSLKKTKTSEYPIIFVYYLRKGKKINSNQLENEQSQENSINPIQKEEDEGVDLSEGSSNEDEDLGPCEGPSKEDKDLDSSEGSSQEDEDLGLSEGSSQDSGED

SEQ ID NO: 450 - protein, 188 aa, Artificial Sequence
  Q16384
MNGDDTFAKRPRDDAKASEKRSKAFDDIATYFSKKEWKKMKYSEKISYVYMKRNYKAMTKLGFKVTLPPFMCNKQATDFQGNDFDNDHNRRIQVEHPQMTFGRLHRIIPKIMPKKPAEDENDSKGVSEASGPQNDGKQLHPPGKANISEKINKRSGPKRGKHAWTHRLRERKQLVIYEEISDPEEDDE

SEQ ID NO: 451 - protein, 188 aa, Artificial Sequence
  Q16385
MNGDDAFARRPTVGAQIPEKIQKAFDDIAKYFSKEEWEKMKASEKIFYVYMKRKYEAMTKLGFKATLPPFMCNKRAEDFQGNDLDNDPNRGNQVERPQMTFGRLQGISPKIMPKKPAEEGNDSEEVPEASGPQNDGKELCPPGKPTTSEKIHERSGPKRGEHAWTHRLRERKQLVIYEEISDPEEDDE

SEQ ID NO: 452 - protein, 188 aa, Artificial Sequence
  Q99909
MNGDDTFARRPTVGAQIPEKIQKAFDDIAKYFSKEEWEKMKVSEKIVYVYMKRKYEAMTKLGFKAILPSFMRNKRVTDFQGNDFDNDPNRGNQVQRPQMTFGRLQGIFPKIMPKKPAEEGNVSKEVPEASGPQNDGKQLCPPGKPTTSEKINMISGPKRGEHAWTHRLRERKQLVIYEEISDPEEDDE

SEQ ID NO: 453 - protein, 188 aa, Artificial Sequence
  O60224
MNGDDAFARRPRDDAQISEKLRKAFDDIAKYFSKKEWEKMKSSEKIVYVYMKLNYEVMTKLGFKVTLPPFMRSKRAADFHGNDFGNDRNHRNQVERPQMTFGSLQRIFPKIMPKKPAEEENGLKEVPEASGPQNDGKQLCPPGNPSTLEKINKTSGPKRGKHAWTHRLRERKQLVVYEEISDPEEDDE

SEQ ID NO: 454 - protein, 295 aa, Artificial Sequence
  P50225
MELIQDTSRPPLEYVKGVPLIKYFAEALGPLQSFQARPDDLLISTYPKSGTTWVSQILDMIYQGGDLEKCHRAPIFMRVPFLEFKAPGIPSGMETLKDTPAPRLLKTHLPLALLPQTLLDQKVKVVYVARNAKDVAVSYYHFYHMAKVHPEPGTWDSFLEKFMVGEVSYGSWYQHVQEWWELSRTHPVLYLFYEDMKENPKREIQKILEFVGRSLPEETVDFVVQHTSFKEMKKNPMTNYTTVPQEFMDHSISPFMRKGMAGDWKTTFTVAQNERFDADYAEKMAGCSLSFRSEL

SEQ ID NO: 455 - protein, 1268 aa, Artificial Sequence
  Q8N3U4-2
MIAAPEIPTDFNLLQESETHFSSDTDFEDIEGKNQKQGKGKTCKKGKKGPAEKGKGGNGGGKPPSGPNRMNGHHQQNGVENMMLFEVVKMGKSAMQSVVDDWIESYKHDRDIALLDLINFFIQCSGCKGVVTAEMFRHMQNSEIIRKMTEEFDEDSGDYPLTMAGPQWKKFKSSFCEFIGVLVRQCQYSIIYDEYMMDTVISLLTGLSDSQVRAFRHTSTLAAMKLMTALVNVALNLSINMDNTQRQYEAERNKMIGKRANERLELLLQKRKELQENQDEIENMMNAIFKGVFVHRYRDAIAEIRAICIEEIGIWMKMYSDAFLNDSYLKYVGWTMHDKQGEVRLKCLTALQGLYYNKELNSKLELFTSRFKDRIVSMTLDKEYDVAVQAIKLLTLVLQSSEEVLTAEDCENVYHLVYSAHRPVAVAAGEFLYKKLFSRRDPEEDGMMKRRGRQGPNANLVKTLVFFFLESELHEHAAYLVDSMWDCATELLKDWECMNSLLLEEPLSGEEALTDRQESALIEIMLCTIRQAAECHPPVGRGTGKRVLTAKEKKTQLDDRTKITELFAVALPQLLAKYSVDAEKVTNLLQLPQYFDLEIYTTGRLEKHLDALLRQIRNIVEKHTDTDVLEACSKTYHALCNEEFTIFNRVDISRSQLIDELADKFNRLLEDFLQEGEEPDEDDAYQVLSTLKRITAFHNAHDLSKWDLFACNYKLLKTGIENGDMPEQIVIHALQCTHYVILWQLAKITESSSTKEDLLRLKKQMRVFCQICQHYLTNVNTTVKEQAFTILCDILMIFSHQIMSGGRDMLEPLVYTPDSSLQSELLSFILDHVFIEQDDDNNSADGQQEDEASKIEALHKRRNLLAAFCKLIVYTVVEMNTAADIFKQYMKYYNDYGDIIKETMSKTRQIDKIQCAKTLILSLQQLFNEMIQENGYNFDRSSSTFSGIKELARRFALTFGLDQLKTREAIAMLHKDGIEFAFKEPNPQGESHPPLNLAFLDILSEFSSKLLRQDKRTVYVYLEKFMTFQMSLRREDVWLPLMSYRNSLLAGGDDDTMSVISGISSRGSTVRSKKSKPSTGKRKVVEGMQLSLTEESSSSDSMWLSREQTLHTPVMMQTPQLTSTIMREPKRLRPEDSFMSVYPMQTEHHQTPLDYNTQVTWMLAQRQQEEARQQQERAAMSYVKLRTNLQHAIRRGTSLMEDDEEPIVEDVMMSSEGRIEDLNEGMDFDTMDIDLPPSKNRRERTELKPDFFDPASIMDESVLGVSMF

SEQ ID NO: 456 - protein, 490 aa, Artificial Sequence
  Q8NFT2
MESISMMGSPKSLSETFLPNGINGIKDARKVTVGVIGSGDFAKSLTIRLIRCGYHVVIGSRNPKFASEFFPHVVDVTHHEDALTKTNIIFVAIHREHYTSLWDLRHLLVGKILIDVSNNMRINQYPESNAEYLASLFPDSLIVKGFNVVSAWALQLGPKDASRQVYICSNNIQARQQVIELARQLNFIPIDLGSLSSAREIENLPLRLFTLWRGPVVVAISLATFFFLYSFVRDVIHPYARNQQSDFYKIPIEIVNKTLPIVAITLLSLVYLAGLLAAAYQLYYGTKYRRFPPWLETWLQCRKQLGLLSFFFAMVHVAYSLCLPMRRSERYLFLNMAYQQVHANIENSWNEEEVWRIEMYISFGIMSLGLLSLLAVTSIPSVSNALNWREFSFIQSTLGYVALLISTFHVLIYGWKRAFEEEYYRFYTPPNFVLALVLPSIVILGKIILFLPCISRKLKRIKKGWEKSQFLEEGMGGTIPHVSPERVTVM

SEQ ID NO: 457 - protein, 258 aa, Artificial Sequence [sequence omitted]

SEQ ID NO: 458 - protein, 339 aa, Artificial Sequence
  Q9UHE8
MESRKDITNQEELWKMKPRRNLEEDDYLHKDTGETSMLKRPVLLHLHQTAHADEFDCPSELQHTQELFPQWHLPIKIAAIIASLTFLYTLLREVIHPLATSHQQYFYKIPILVINKVLPMVSITLLALVYLPGVIAAIVQLHNGTKYKKFPHWLDKWMLTRKQFGLLSFFFAVLHAIYSLSYPMRRSYRYKLLNWAYQQVQQNKEDAWIEHDVWRMEIYVSLGIVGLAILALLAVTSIPSVSDSLTWREFHYIQSKLGIVSLLLGTIHALIFAWNKWIDIKQFVWYTPPTFMIAVFLPIVVLIFKSILFLPCLRKKILKIRHGWEDVTKINKTEICSQL

SEQ ID NO: 459 - protein, 165 aa, Artificial Sequence
  O15392-2
MGAPTLPPAWQPFLKDHRISTFKNWPFLEGCACTPERMAEAGFIHCPTENEPDLAQCFFCFKELEGWEPDDDPIGPGTVAYACNTSTLGGRGGRITREEHKKHSSGCAFLSVKKQFEELTLGEFLKLDRERAKNKIAKETNNKKKEFEETAEKVRRAIEQLAAMD

SEQ ID NO: 460 - protein, 142 aa, Artificial Sequence
  O15392
MGAPTLPPAWQPFLKDHRISTFKNWPFLEGCACTPERMAEAGFIHCPTENEPDLAQCFFCFKELEGWEPDDDPIEEHKKHSSGCAFLSVKKQFEELTLGEFLKLDRERAKNKIAKETNNKKKEFEETAKKVRRAIEQLAAMD

SEQ ID NO: 461 - protein, 976 aa, Artificial Sequence
  A0A024R0I2
MEKQKPFALFVPPRSSSSQVSAVKPQTLGGDSTFFKSFNKCTEDDFEFPFAKTNLSKNGENIDSDPALQKVNFLPVLEQVGNSDCHYQEGLKDSDLENSEGLSRVYSKLYKEAEKIKKWKVSTEAELRQKESKLQENRKIIEAQRKAIQELQFGNEKVSLKLEEGIQENKDLIKENNATRHLCNLLKETCARSAEKTKKYEYEREETRQVYMDLNNNIEKMITAFEELRVQAENSRLEMHFKLKEDYEKIQHLEQEYKKEINDKEKQVSLLLIQITEKENKMKDLTFLLEESRDKVNQLEEKTKLQSENLKQSIEKQHHLTKELEDIKVSLQRSVSTQKALEEDLQIATKTICQLTEEKETQMEESNKARAAHSFVVTEFETTVCSLEELLRTEQQRLEKNEDQLKILTMELQKKSSELEEMTKLTNNKEVELEELKKVLGEKETLLYENKQFEKIAEELKGTEQELIGLLQAREKEVHDLEIQLTAITTSEQYYSKEVKDLKTELENEKLKNTELTSHCNKLSLENKELTQETSDMTLELKNQQEDINNNKKQEERMLKQIENLQETETQLRNELEYVREELKQKRDEVKCKLDKSEENCNNLRKQVENKNKYIEELQQENKALKKKGTAESKQLNVYEIKVNKLELELESAKQKFGEITDTYQKEIEDKKISEENLLEEVEKAKVIADEAVKLQKEIDKRCQHKIAEMVALMEKHKHQYDKIIEERDSELGLYKSKEQEQSSLRASLEIELSNLKAELLSVKKQLEIEREEKEKLKREAKENTATLKEKKDKKTQTFLLETPEIYWKLDSKAVPSQTVSRNFTSVDHGISKDKRDYLWTSAKNTLSTPLPKAYTVKTPTKPKLQQRENLNIPIEESKKKRKMAFEFDINSDSSETTDLLSMVSEEETLKTLYRNNNPPASHLCVKTPKKAPSSLTTPGSTLKFGAIRKMREDRWAVIAKMDRKKKLKEAEKLFV

SEQ ID NO: 462 - protein, 976 aa, Artificial Sequence [sequence omitted]

SEQ ID NO: 463 - protein, 976 aa, Artificial Sequence; identical to SEQ ID NO: 461
  Q15431

SEQ ID NO: 464 - protein, 109 aa, Artificial Sequence [sequence omitted]

SEQ ID NO: 465 - protein, 488 aa, Artificial Sequence
  A4PIV7
MSVAFAAPRQRGKGEITPAAIQKMLDDNNHLIQCIMDSQNKGKTSECSQYQQMLHTNLVYLATIADSNQNMQSLLPAPPTQNMPMGPGGMNQSGPPPPPRSHNMPSDGMVGGGPPAPHMQNQMNGQMPGPNHMPMQGPGPNQLNMTNSSMNMPSSSHGSMGGYNHSVPSSQSMPVQNQMTMSQGQPMGNYGPRPNMSMQPNQGPMMHQQPPSQQYNMPQGGGQHYQGQQPPMGMMGQVNQGNHMMGQRQIPPYRPPQQGPPQQYSGQEDYYGDQYSHGGQGPPEGMNQQYYPDGHNDYGYQQPSYPEQGYDRPYEDSSQHYYEGGNSQYGQQQDAYQGPPPQQGYPPQQQQYPGQQGYPGQQQGYGPSQGGPGPQYPNYPQGQGQQYGGYRPTQPGPPQPPQQRPYGYDQIMPKKPAEDENDSKGVSEASGPQNDGKQLHPPGKANISEKINKRSGPKRGKHAWTHRLRERKQLVIYEEISDPEEDDE

SEQ ID NO: 466 - protein, 457 aa, Artificial Sequence
  A4PIV8
MSVAFAAPRQRGKGEITPAAIQKMLDDNNHLIQCIMDSQNKGKTSECSQYQQMLHTNLVYLATIADSNQNMQSLLPAPPTQNMPMGPGGMNQSGPPPPPRSHNMPSDGMVGGGPPAPHMQNQMNGQMPGPNHMPMQGPGPNQLNMTNSSMNMPSSSHGSMGGYNHSVPSSQSMPVQNQMTMSQGQPMGNYGPRPNMSMQPNQGPMMHQQPPSQQYNMPQGGGQHYQGQQPPMGMMGQVNQGNHMMGQRQIPPYRPPQQGPPQQYSGQEDYYGDQYSHGGQGPPEGMNQQYYPDGNSQYGQQQDAYQGPPPQQGYPPQQQQYPGQQGYPGQQQGYGPSQGGPGPQYPNYPQGQGQQYGGYRPTQPGPPQPPQQRPYGYDQIMPKKPAEDENDSKGVSEASGPQNDGKQLHPPGKANISEKINKRSGPKRGKHAWTHRLRERKQLVIYEEISDPEEDDE

SEQ ID NO: 467 - protein, 488 aa, Artificial Sequence
  A4PIV9
MSVAFAAPRQRGKGEITPAAIQKMLDDNNHLIQCIMDSQNKGKTSECSQYQQMLHTNLVYLATIADSNQNMQSLLPAPPTQNMPMGPGGMNQSGPPPPPRSHNMPSDGMVGGGPPAPHMQNQMNGQMPGPNHMPMQGPGPNQLNMTNSSMNMPSSSHGSMGGYNHSVPSSQSMPVQNQMTMSQGQPMGNYGPRPNMSMQPNQGPMMHQQPPSQQYNMPQGGGQHYQGQQPPMGMMGQVNQGNHMMGQRQIPPYRPPQQGPPQQYSGQEDYYGDQYSHGGQGPPEGMNQQYYPDGHNDYGYQQPSYPEQGYDRPYEDSSQHYYEGGNSQYGQQQDAYQGPPPQQGYPPQQQQYPGQQGYPGQQQGYGPSQGGPGPQYPNYPQGQGQQYGGYRPTQPGPPQPPQQRPYGYDQIMPKKPAEEGNDSEEVPEASGPQNDGKELCPPGKPTTSEKIHERSGPKRGEHAWTHRLRERKQLVIYEEISDPEEDDE

SEQ ID NO: 468 - protein, 457 aa, Artificial Sequence
  A4PIW0
MSVAFAAPRQRGKGEITPAAIQKMLDDNNHLIQCIMDSQNKGKTSECSQYQQMLHTNLVYLATIADSNQNMQSLLPAPPTQNMPMGPGGMNQSGPPPPPRSHNMPSDGMVGGGPPAPHMQNQMNGQMPGPNHMPMQGPGPNQLNMTNSSMNMPSSSHGSMGGYNHSVPSSQSMPVQNQMTMSQGQPMGNYGPRPNMSMQPNQGPMMHQQPPSQQYNMPQGGGQHYQGQQPPMGMMGQVNQGNHMMGQRQIPPYRPPQQGPPQQYSGQEDYYGDQYSHGGQGPPEGMNQQYYPDGNSQYGQQQDAYQGPPPQQGYPPQQQQYPGQQGYPGQQQGYGPSQGGPGPQYPNYPQGQGQQYGGYRPTQPGPPQPPQQRPYGYDQIMPKKPAEEGNDSEEVPEASGPQNDGKELCPPGKPTTSEKIHERSGPKRGEHAWTHRLRERKQLVIYEEISDPEEDDE

SEQ ID NO: 469 - protein, 111 aa, Artificial Sequence
  Q0VGM3
MKTNDTYMKFSWLTVPEKSLDKEHRCIVRHENNKNGVDQEIIFPPIKTDVITMDPKDNCSKDANDTLLLQLTNTSAYYMYLLLLLKSVVYFAIITCCLLRRTAFCCNGEKS

SEQ ID NO: 470 - protein, 58 aa, Artificial Sequence
  A2JGV3
MQMFPPSPLFFFLQLLKQSSRRLEHTFVFLRNFSLMLLRYIGKKRRATRFWDPRRGTP

SEQ ID NO: 471 - protein, 376 aa, Artificial Sequence
  P52655
MANSANTNTVPKLYRSVIEDVINDVRDIFLDDGVDEQVLMELKTLWENKLMQSRAVDGFHSEEQQLLLQVQQQHQPQQQQHHHHHHHQQAQPQQTVPQQAQTQQVLIPASQQATAPQVIVPDSKLIQHMNASNMSAAATAATLALPAGVTPVQQILTNSGQLLQVVRAANGAQYIFQPQQSVVLQQQVIPQMQPGGVQAPVIQQVLAPLPGGISPQTGVIIQPQQILFTGNKTQVIPTTVAAPTPAQAQITATGQQQPQAQPAQTQAPLVLQVDGTGDTSSEEDEDEEEDYDDDEEEDKEKDGAEDGQVEEEPLNSEDDVSDEEGQELFDTENVVVCQYDKIHRSKNKWKFHLKDGIMNLNGRDYIFSKAIGDAEW

SEQ ID NO: 472 - protein, 390 aa, Artificial Sequence
  P01137
MPPSGLRLLLLLLPLLWLLVLTPGRPAAGLSTCKTIDMELVKRKRIEAIRGQILSKLRLASPPSQGEVPPGPLPEAVLALYNSTRDRVAGESAEPEPEPEADYYAKEVTRVLMVETHNEIYDKFKQSTHSIYMFFNTSELREAVPEPVLLSRAELRLLRLKLKVEQHVELYQKYSNNSWRYLSNRLLAPSDSPEWLSFDVTGVVRQWLSRGGEIEGFRLSAHCSCDSRDNTLQVDINGFTTGRRGDLATIHGMNRPFLLLMATPLERAQHLQSSRHRRALDTNYCFSSTEKNCCVRQLYIDFRKDLGWKWIHEPKGYHANFCLGPCPYIWSLDTQYSKVLALYNQHNPGASAAPCCVPQALEPLPIVYYVGRKPKVEQLSNMIVRSCKCS

SEQ ID NO: 473 - protein, 567 aa, Artificial Sequence
  P37173
MGRGLLRGLWPLHIVLWTRIASTIPPHVQKSVNNDMIVTDNNGAVKFPQLCKFCDVRFSTCDNQKSCMSNCSITSICEKPQEVCVAVWRKNDENITLETVCHDPKLPYHDFILEDAASPKCIMKEKKKPGETFFMCSCSSDECNDNIIFSEEYNTSNPDLLLVIFQVTGISLLPPLGVAISVIIIFYCYRVNRQQKLSSTWETGKTRKLMEFSEHCAIILEDDRSDISSTCANNINHNTELLPIELDTLVGKGRFAEVYKAKLKQNTSEQFETVAVKIFPYEEYASWKTEKDIFSDINLKHENILQFLTAEERKTELGKQYWLITAFHAKGNLQEYLTRHVISWEDLRKLGSSLARGIAHLHSDHTPCGRPKMPIVHRDLKSSNILVKNDLTCCLCDFGLSLRLDPTLSVDDLANSGQVGTARYMAPEVLESRMNLENVESFKQTDVYSMALVLWEMTSRCNAVGEVKDYEPPFGSKVREHPCVESMKDNVLRDRGRPEIPSFWLNHQGIQMVCETLTECWDHDPEARLTAQCVAERFSELEHLDRLSGRSCSEEKIPEDGSLNTTK

SEQ ID NO: 474 - protein, 684 aa, Artificial Sequence [sequence omitted]

SEQ ID NO: 475 - protein, 1124 aa, Artificial Sequence
  Q02763
MDSLASLVLCGVSLLLSGTVEGAMDLILINSLPLVSDAETSLTCIASGWRPHEPITIGRDFEALMNQHQDPLEVTQDVTREWAKKVVWKREKASKINGAYFCEGRVRGEAIRIRTMKMRQQASFLPATLTMTVDKGDNVNISFKKVLIKEEDAVIYKNGSFIHSVPRHEVPDILEVHLPHAQPQDAGVYSARYIGGNLFTSAFTRLIVRRCEAQKWGPECNHLCTACMNNGVCHEDTGECICPPGFMGRTCEKACELHTFGRTCKERCSGQEGCKSYVFCLPDPYGCSCATGWKGLQCNEACHPGFYGPDCKLRCSCNNGEMCDRFQGCLCSPGWQGLQCEREGIQRMTPKIVDLPDHIEVNSGKFNPICKASGWPLPTNEEMTLVKPDGTVLHPKDFNHTDHFSVAIFTIHRILPPDSGVWVCSVNTVAGMVEKPFNISVKVLPKPLNAPNVIDTGHNFAVINISSEPYFGDGPIKSKKLLYKPVNHYEAWQHIQVTNEIVTLNYLEPRTEYELCVQLVRRGEGGEGHPGPVRRFTTASIGLPPPRGLNLLPKSQTTLNLTWQPIFPSSEDDFYVEVERRSVQKSDQQNIKVPGNLTSVLLNNLHPREQYVVRARVNTKAQGEWSEDLTAWTLSDILPPQPENIKISNITHSSAVISWTILDGYSISSITIRYKVQGKNEDQHVDVKIKNATITQYQLKGLEPETAYQVDIFAENNIGSSNPAFSHELVTLPESQAPADLGGGKMLLIAILGSAGMTCLTVLLAFLIILQLKRANVQRRMAQAFQNVREEPAVQFNSGTLALNRKVKNNPDPTIYPVLDWNDIKFQDVIGEGNFGQVLKARIKKDGLRMDAAIKRMKEYASKDDHRDFAGELEVLCKLGHHPNIINLLGACEHRGYLYLAIEYAPHGNLLDFLRKSRVLETDPAFAIANSTASTLSSQQLLHFAADVARGMDYLSQKQFIHRDLAARNILVGENYVAKIADFGLSRGQEVYVKKTMGRLPVRWMAIESLNYSVYTTNSDVWSYGVLLWEIVSLGGTPYCGMTCAELYEKLPQGYRLEKPLNCDDEVYDLMRQCWREKPYERPSFAQILVSLNRMLEERKTYVNTTLYEKFTYAGIDCSAEEAA

SEQ ID NO: 476 - protein, 596 aa, Artificial Sequence
  P51854
MADAEARAEFPEEARPDRGTLQVLQDMASRLRIHSIRATCSTSSGHPTSCSSSSEIMSVLFFYIMRYKQSDPENPDNDRFVLAKRLSFVDVATGWLGQGLGVACGMAYTGKYFDRASYRVFCLMSDGESSEGSVWEAMAFASYYSLDNLVAIFDVNRLGHSGALPAEHCINIYQRRCEAFGWNTYVVDGRDVEALCQVFWQASQVKHKPTAVVAKTFKGRGTPSIEDAESWHAKPMPRERADAIIKLIESQIQTSRNLDPQPPIEDSPEVNITDVRMTSPPDYRVGDKIATRKACGLALAKLGYANNRVVVLDGDTRYSTFSEIFNKEYPERFIECFMAEQNMVSVALGCASRGRTIAFASTFAAFLTRAFDHIRIGGLAESNINIIGSHCGVSVGDDGASQMALEDIAMFRTIPKCTIFYPTDAVSTEHAVALAANAKGMCFIRTTRPETMVIYTPQERFEIGQAKVLRHCVSDKVTVIGAGITVYEALAAADELSKQDIFIRVIDLFTIKPLDVATIVSSAKATEGRIITVEDHYPQGGIGEAVCAAVSMDPDIQVHSLAVSGVPQSGKSEELLDMYGISARHIIVAVKCMLLN

SEQ ID NO: 477 - protein, 286 aa, Artificial Sequence
  P60174
MAEDGEEAEFHFAALYISGQWPRLRADTDLQRLGSSAMAPSRKFFVGGNWKMNGRKQSLGELIGTLNAAKVPADTEVVCAPPTAYIDFARQKLDPKIAVAAQNCYKVTNGAFTGEISPGMIKDCGATWVVLGHSERRHVFGESDELIGQKVAHALAEGLGVIACIGEKLDEREAGITEKVVFEQTKVIADNVKDWSKVVLAYEPVWAIGTGKTATPQQAQEVHEKLRGWLKSNVSDAVAQSTRIIYGGSVTGATCKELASQPDVDGFLVGGASLKPEFVDIINAKQ

SEQ ID NO: 478 - protein, 119 aa, Artificial Sequence
  Q99601
MPLVVAVIFFSLWVFALGQLEQPEISISRPANKSAHISWKASIQGFSSKIIHWYWQKPNKGLEYLLHVFLTISAQDCSGGKTKKLEVSKNAHTSTSTLKIKFLEKEDEVVYHCACWIRH

SEQ ID NO: 479 - protein, 137 aa, Artificial Sequence
  A4D1X2
MLSLLHTSTLAVLGALCVYGAGHLEQPQISSTKTLSKTARLECVVSGITISATSVYWYRERPGEVIQFLVSISYDGTVRKESGIPSGKFEVDRIPETSTSTLTIHNVEKQDIATYYCALWEVHSSRQFEPSHSINVY

SEQ ID NO: 480 - protein, 122 aa, Artificial Sequence
  Q99603
MLSLLHTSTLAVLGALCVYGAGHLEQPQISSTKTLSKTARLECVVSGITISATSVYWYRERPGEVIQFLVSISYDGTVRKESGIPSGKFEVDRIPETSTSTLTIHNVEKQDIATYYCALWEV

SEQ ID NO: 481 - protein, 122 aa, Artificial Sequence
  Q99604
MLSLLHTSTLAVLGALCVYGAGHLEQPQISSTKTLSKTARLECVVSGIKISATSVYWYRERPGEVIQFLVSISYDGTVRKESGIPSGKFEVDRIPETSTSTLTIHNVEKQDIATYYCALWEV

SEQ ID NO: 482 - protein, 793 aa, Artificial Sequence
  P48995
MMAALYPSTDLSGASSSSLPSSPSSSSPNEVMALKDVREVKEENTLNEKLFLLACDKGDYYMVKKILEENSSGDLNINCVDVLGRNAVTITIENENLDILQLLLDYGCQSADALLVAIDSEVVGAVDILLNHRPKRSSRPTIVKLMERIQNPEYSTTMDVAPVILAAHRNNYEILTMLLKQDVSLPKPHAVGCECTLCSAKNKKDSLRHSRFRLDIYRCLASPALIMLTEEDPILRAFELSADLKELSLVEVEFRNDYEELARQCKMFAKDLLAQARNSRELEVILNHTSSDEPLDKRGLLEERMNLSRLKLAIKYNQKEFVSQSNCQQFLNTVWFGQMSGYRRKPTCKKIMTVLTVGIFWPVLSLCYLIAPKSQFGRIIHTPFMKFIIHGASYFTFLLLLNLYSLVYNEDKKNTMGPALERIDYLLILWIIGMIWSDIKRLWYEGLEDFLEESRNQLSFVMNSLYLATFALKVVAHNKFHDFADRKDWDAFHPTLVAEGLFAFANVLSYLRLFFMYTTSSILGPLQISMGQMLQDFGKFLGMFLLVLFSFTIGLTQLYDKGYTSKEQKDCVGIFCEQQSNDTFHSFIGTCFALFWYIFSLAHVAIFVTRFSYGEELQSFVGAVIVGTYNVVVVIVLTKLLVAMLHKSFQLIANHEDKEWKFARAKLWLSYFDDKCTLPPPFNIIPSPKTICYMISSLSKWICSHTSKGKVKRQNSLKEWRNLKQKRDENYQKVMCCLVHRYLTSMRQKMQSTDQATVENLNELRQDLSKFRNEIRDLLGFRTSKYAMFYPRN

SEQ ID NO: 483 - protein, 1104 aa, Artificial Sequence
  Q7Z2W7
MSFRAARLSMRNRRNDTLDSTRTLYSSASRSTDLSYSESDLVNFIQANFKKRECVFFTKDSKATENVCKCGYAQSQHMEGTQINQSEKWNYKKHTKEFPTDAFGDIQFETLGKKGKYIRLSCDTDAEILYELLTQHWHLKTPNLVISVTGGAKNFALKPRMRKIFSRLIYIAQSKGAWILTGGTHYGLMKYIGEVVRDNTISRSSEENIVAIGIAAWGMVSNRDTLIRNCDAEGYFLAQYLMDDFTRDPLYILDNNHTHLLLVDNGCHGHPTVEAKLRNQLEKYISERTIQDSNYGGKIPIVCFAQGGGKETLKAINTSIKNKIPCVVVEGSGQIADVIASLVEVEDALTSSAVKEKLVRFLPRTVSRLPEEETESWIKWLKEILECSHLLTVIKMEEAGDEIVSNAISYALYKAFSTSEQDKDNWNGQLKLLLEWNQLDLANDEIFTNDRRWESADLQEVMFTALIKDRPKFVRLFLENGLNLRKFLTHDVLTELFSNHFSTLVYRNLQIAKNSYNDALLTFVWKLVANFRRGFRKEDRNGRDEMDIELHDVSPITRHPLQALFIWAILQNKKELSKVIWEQTRGCTLAALGASKLLKTLAKVKNDINAAGESEELANEYETRAVELFTECYSSDEDLAEQLLVYSCEAWGGSNCLELAVEATDQHFIAQPGVQNFLSKQWYGEISRDTKNWKIILCLFIIPLVGCGFVSFRKKPVDKHKKLLWYYVAFFTSPFVVFSWNVVFYIAFLLLFAYVLLMDFHSVPHPPELVLYSLVFVLFCDEVRQWYVNGVNYFTDLWNVMDTLGLFYFIAGIVFRLHSSNKSSLYSGRVIFCLDYIIFTLRLIHIFTVSRNLGPKIIMLQRMLIDVFFFLFLFAVWMVAFGVARQGILRQNEQRWRWIFRSVIYEPYLAMFGQVPSDVDGTTYDFAHCTFTGNESKPLCVELDEHNLPRFPEWITIPLVCIYMLSTNILLVNLLVAMFGYTVGTVQENNDQVWKFQRYFLVQEYCSRLNIPFPFIVFAYFYMVVKKCFKCCCKEKNMESSVCCFKNEDNETLAWEGVMKENYLVKINTKANDTSEEMRHRFRQLDTKLNDLKGLLKEIANKIK

SEQ ID NO: 484 - protein, 698 aa, Artificial Sequence
  Q9BZW7
MMRSRSKSPRRPSPTARGANCDVELLKTTTRDREELKCMLEKYERHLAEIQGNVKVLKSERDKIFLLYEQAQEEITRLRREMMKSCKSPKSTTAHAILRRVETERDVAFTDLRRMTTERDSLRERLKIAQETAFNEKAHLEQRIEELECTVHNLDDERMEQMSNMTLMKETISTVEKEMKSLARKAMDTESELGRQKAENNSLRLLYENTEKDLSDTQRHLAKKKYELQLTQEKIMCLDEKIDNFTRQNIAQREEISILGGTLNDLAKEKECLQACLDKKSENIASLGESLAMKEKTISGMKNIIAEMEQASRQCTEALIVCEQDVSRMRRQLDETNDELAQIARERDILAHDNDNLQEQFAKAKQENQALSKKLNDTHNELNDIKQKVQDTNLEVNKLKNILKSEESENRQMMEQLRKANEDAENWENKARQSEADNNTLKLELITAEAEGNRLKEKVDSLNREVEQHLNAERSYKSQISTLHKSVVKMEEELQKVQFEKVSALADLSSTRELCIKLDSSKELLNRQLVAKDQEIEMRENELDSAHSEIELLRSQMANERISMQNLEALLVANRDKEYQSQIALQEKESEIQLLKEHLCLAENKMAIQSRDVAQFRNVVTQLEADLDITKRQLGTERFERERAVQELRRQNYSSNAYHMSSTMKPNTKCHSPERAHHRSPDRGLDRSLEENLCYRDF

SEQ ID NO: 485 - protein, 308 aa, Artificial Sequence
  Q01534
MRPEGSLTYRVPERLRQGFCGVGRAAQALVCASAKEGTAFRMEAVQEGAAGVESEQAALGEEAVLLLDDIMAEVEVVAEEEGLVERREEAQRAQQAVPGPGPMTPESAPEELLAVQVELEPVNAQARKAFSRQREKMERRRKPHLDRRGAVIQSVPGFWANVIANHPQMSALITDEDEDMLSYMVSLEVGEEKHPVHLCKIMLFFRSNPYFQNKVITKEYLVNITEYRASHSTPIEWYPDYEVEAYRRRHHNSSLNFFNWFSDHNFAGSNKIAEILCKDLWRNPLQYYKRMKPPEEGTETSGDSQLLS

SEQ ID NO: 486 - protein, 122 aa, Artificial Sequence
  M13231.1
MRWALLVLLAFLSPASQKSSNLEGRTKSVTRQTGSSAEITCDLTVTNTFYIHWYLHQEGKAPQRLLYYDVSTARDVLESGLSPGKYYTHTPRRWSWILRLQNLIENDSGVYYCATWDRQKLL

SEQ ID NO: 487 - protein, 267 aa, Artificial Sequence
  Q9BY14-2
MGARQIQTSSSQTSPEEAMGTPRIQHLLILLVLGASLLTSGLELYCQKGLSMTVEADPANMFNWTTEEVETCDKGALCQETILIIKAGTETAILATKGCIPEGEEAITIVQHSSPPGLIVTSYSNYCEDSFCNDKDSLSQFWEFSETTASTVSTTLHCPTCVALGTCFSAPSLPCPNGTTRCYQGKLEITGGGIESSVEVKGCTAMIGCRLMSGILAVGPMFVREACPHQLLTQPRKTENGATCLPIPVWGLQLLLPLLLPSFIHFS

SEQ ID NO: 488 - protein, 529 aa, Artificial Sequence [sequence omitted]

SEQ ID NO: 489 - protein, 529 aa, Artificial Sequence [sequence omitted]

SEQ ID NO: 490 - protein, 529 aa, Artificial Sequence [sequence omitted]

SEQ ID NO: 491 - protein, 529 aa, Artificial Sequence [sequence omitted]

SEQ ID NO: 492 - protein, 237 aa, Artificial Sequence [sequence omitted]

SEQ ID NO: 493 - protein, 529 aa, Artificial Sequence [sequence omitted]

SEQ ID NO: 494 - protein, 529 aa, Artificial Sequence [sequence omitted]

SEQ ID NO: 495 - protein, 529 aa, Artificial Sequence [sequence omitted]

SEQ ID NO: 496 - protein, 529 aa, Artificial Sequence [sequence omitted]

SEQ ID NO: 497 - protein, 537 aa, Artificial Sequence
  P17643
MSAPKLLSLGCIFFPLLLFQQARAQFPRQCATVEALRSGMCCPDLSPVSGPGTDRCGSSSGRGRCEAVTADSRPHSPQYPHDGRDDREVWPLRFFNRTCHCNGNFSGHNCGTCRPGWRGAACDQRVLIVRRNLLDLSKEEKNHFVRALDMAKRTTHPLFVIATRRSEEILGPDGNTPQFENISIYNYFVWTHYYSVKKTFLGVGQESFGEVDFSHEGPAFLTWHRYHLLRLEKDMQEMLQEPSFSLPYWNFATGKNVCDICTDDLMGSRSNFDSTLISPNSVFSQWRVVCDSLEDYDTLGTLCNSTEDGPIRRNPAGNVARPMVQRLPEPQDVAQCLEVGLFDTPPFYSNSTNSFRNTVEGYSDPTGKYDPAVRSLHNLAHLFLNGTGGQTHLSPNDPIFVLLHTFTDAVFDEWLRRYNADISTFPLENAPIGHNRQYNMVPFWPPVTNTEMFVTAPDNLGYTYEIQWPSREFSVPEIIAIAVVGALLLVALIFGTASYLIRARRSMDEANQPLLTDQYQCYAEEYEKLQNPNQSVV

SEQ ID NO: 498 - protein, 519 aa, Artificial Sequence
  P40126
MSPLWWGFLLSCLGCKILPGAQGQFPRVCMTVDSLVNKECCPRLGAESANVCGSQQGRGQCTEVRADTRPWSGPYILRNQDDRELWPRKFFHRTCKCTGNFAGYNCGDCKFGWTGPNCERKKPPVIRQNIHSLSPQEREQFLGALDLAKKRVHPDYVITTQHWLGLLGPNGTQPQFANCSVYDFFVWLHYYSVRDTLLGPGRPYRAIDFSHQGPAFVTWHRYHLLCLERDLQRLIGNESFALPYWNFATGRNECDVCTDQLFGAARPDDPTLISRNSRFSSWETVCDSLDDYNHLVTLCNGTYEGLLRRNQMGRNSMKLPTLKDIRDCLSLQKFDNPPFFQNSTFSFRNALEGFDKADGTLDSQVMSLHNLVHSFLNGTNALPHSAANDPIFVVLHSFTDAIFDEWMKRFNPPADAWPQELAPIGHNRMYNMVPFFPPVTNEELFLTSDQLGYSYAIDLPVSVEETPGWPTTLLVVMGTLVALVGLFVLLAFLQYRRLRKGYTPLMETHLSSKRYTEEA

SEQ ID NO: 499 - protein, 151 aa, Artificial Sequence
  Q96NZ9
MRRLLLVTSLVVVLLWEAGAVPAPKVPIKMQVKHWPSEQDPEKAWGARVVEPPEKDDQLVVLFPVQKPKLLTTEEKPRGQGRGPILPGTKAWMETEDTLGHVLSPEPDHDSLYHPPPEEDQGEERPRLWVMPNHQVLLGPEEDQDHIYHPQ

SEQ ID NO: 500 - protein, 174 aa, Artificial Sequence [sequence omitted]

SEQ ID NO: 501 - protein, 249 aa, Artificial Sequence
  A0A0H5AUY0
MGSDVRDLNALLPAVPSLGGGGGCALPVSGAAQWAPVLDFAPPGASAYGSLGGPAPPPAPPPPPPPPPHSFIKQEPSWGGAEPHEEQCLSAFTVHFSGQFTGTAGACRYGPFGPPPPSQASSGQARMFPNAPYLPSCLESQPAIRNQGYSTVTFDGTPSYGHTPSHHAAQFPNHSFKHEDPMGQQGSLGEQQYSVPPPVYGCHTPTDSCTGSQALLLRTPYSSDNLYQMTSQLECMTWNQMNLGATLKG

SEQ ID NO: 502 - protein, 449 aa, Artificial Sequence
  P19544
MGSDVRDLNALLPAVPSLGGGGGCALPVSGAAQWAPVLDFAPPGASAYGSLGGPAPPPAPPPPPPPPPHSFIKQEPSWGGAEPHEEQCLSAFTVHFSGQFTGTAGACRYGPFGPPPPSQASSGQARMFPNAPYLPSCLESQPAIRNQGYSTVTFDGTPSYGHTPSHHAAQFPNHSFKHEDPMGQQGSLGEQQYSVPPPVYGCHTPTDSCTGSQALLLRTPYSSDNLYQMTSQLECMTWNQMNLGATLKGVAAGSSSSVKWTEGQSNHSTGYESDNHTTPILCGAQYRIHTHGVFRGIQDVRRVPGVAPTLVRSASETSEKRPFMCAYPGCNKRYFKLSHLQMHSRKHTGEKPYQCDFKDCERRFSRSDQLKRHQRRHTGVKPFQCKTCQRKFSRSDHLKTHTRTHTGKTSEKPFSCRWPSCQKKFARSDELVRHHNMHQRNMTKLQLAL

SEQ ID NO: 503 - protein, 92 aa, Artificial Sequence
  Q06250
MQRRGQPLENHVALIHWQSAGIPASKVHNYCNMKKSRLGRSRAVRISQPLLSPRRCPLHLTERGAGLLQPQPQGPVRTPGPPSGSHPAAADN

SEQ ID NO: 504 - protein, 81 aa, Artificial Sequence
  Q9HD64
MESPKKKNQQLKVGILHLGSRQKKIRIQLRSQCATWKVICKSCISQTPGINLDLGSGVKVKIIPKEEHCKMPEAGEEQPQV

SEQ ID NO: 505 - RNA, 1098 nt, Artificial Sequence
  AAA59652
auggccgucauggcgccccgaacccuccuccugcuacucucgggggcccuggcccugacccagaccugggcgggcucccacuccaugagguauuucuucacauccgugucccggcccggccgcggggagccccgcuucaucgccgugggcuacguggacgacacgcaguucgugcgguucgacagcgacgccgcgagccagaagauggagccgcgggcgccguggauagagcaggaggggccggaguauugggaccaggagacacggaauaugaaggcccacucacagacugaccgagcgaaccuggggacccugcgcggcuacuacaaccagagcgaggacgguucucacaccauccagauaauguauggcugcgacguggggccggacgggcgcuuccuccgcggguaccggcaggacgccuacgacggcaaggauuacaucgcccugaacgaggaccugcgcucuuggaccgcggcggacauggcagcucagaucaccaagcgcaagugggaggcgguccaugcggcggagcagcggagagucuaccuggagggccggugcguggacgggcuccgcagauaccuggagaacgggaaggagacgcugcagcgcacggacccccccaagacacauaugacccaccaccccaucucugaccaugaggccacccugaggugcugggcccugggcuucuacccugcggagaucacacugaccuggcagcgggauggggaggaccagacccaggacacggagcucguggagaccaggccugcaggggauggaaccuuccagaagugggcggcugugguggugccuucuggagaggagcagagauacaccugccaugugcagcaugagggucugcccaagccccucacccugagaugggagcugucuucccagcccaccauccccaucgugggcaucauugcuggccugguucuccuuggagcugugaucacuggagcuguggucgcugccgugauguggaggaggaagagcucagauagaaaaggagggaguuacacucaggcugcaagcagugacagugcccagggcucugaugugucucucacagcuuguaaaguguga

SEQ ID NO: 506 - RNA, 1098 nt, Artificial Sequence
  AAA59606
auggccgucauggcgccccgaacccucguccugcuacucucgggggcucuggcccugacccagaccugggcgggcucucacuccaugagguauuucuucacauccgugucccggcccggccgcggggagccccgcuucaucgcagugggcuacguggacgacacgcaguucgugcgguucgacagcgacgccgcgagccagaggauggagccgcgggcgccguggauagagcaggaggguccggaguauugggacggggagacacggaaagugaaggcccacucacagacucaccgaguggaccuggggacccugcgcggcuacuacaaccagagcgaggccgguucucacaccguccagaggauguauggcugcgacguggggucggacuggcgcuuccuccgcggguaccaccaguacgccuacgacggcaaggauuacaucgcccugaaagaggaccugcgcucuuggaccgcggcggacauggcagcucagaccaccaagcacaagugggaggcggcccauguggcggagcaguugagagccuaccuggagggcacgugcguggaguggcuccgcagauaccuggagaacgggaaggagacgcugcagcgcacggacgcccccaaaacgcauaugacucaccacgcugucucugaccaugaagccacccugaggugcugggcccugagcuucuacccugcggagaucacacugaccuggcagcgggauggggaggaccagacccaggacacggagcucguggagaccaggccugcaggggauggaaccuuccagaagugggcggcugugguggugccuucuggacaggagcagagauacaccugccaugugcagcaugaggguuugcccaagccccucacccugagaugggagccgucuucccagcccaccauccccaucgugggcaucauugcuggccugguucucuuuggagcugugaucacuggagcuguggucgcugcugugauguggaggaggaagagcucagauagaaaaggagggagcuacucucaggcugcaagcagugacagugcccagggcucugaugugucucucacagcuuguaaaguguga

SEQ ID NO: 507 - RNA, 1263 nt, Artificial Sequence
  AAH37161
augccuggggggugcucccggggccccgccgccggggacgggcgucugcggcuggcgcgacuagcgcugguacuccugggcugggucuccucgucuucucccaccuccucggcauccuccuucuccuccucggcgccguuccuggcuuccgccguguccgcccagcccccgcugccggaccagugccccgcgcugugcgagugcuccgaggcagcgcgcacagucaagugcguuaaccgcaaucugaccgaggugcccacggaccugcccgccuacgugcgcaaccucuuccuuaccggcaaccagcuggccgugcucccugccggcgccuucgcccgccggccgccgcuggcggagcuggccgcgcucaaccucagcggcagccgccuggacgaggugcgcgcgggcgccuucgagcaucugcccagccugcgccagcucgaccucagccacaacccacuggccgaccucagucccuucgcuuucucgggcagcaaugccagcgucucggcccccaguccccuuguggaacugauccugaaccacaucgugcccccugaagaugagcggcagaaccggagcuucgagggcauggugguggcggcccugcuggcgggccgugcacugcaggggcuccgccgcuuggagcuggccagcaaccacuuccuuuaccugccgcgggaugugcuggcccaacugcccagccucaggcaccuggacuuaaguaauaauucgcuggugagccugaccuacguguccuuccgcaaccugacacaucuagaaagccuccaccuggaggacaaugcccucaagguccuucacaauggcacccuggcugaguugcaaggucuaccccacauuaggguuuuccuggacaacaaucccugggucugcgacugccacauggcagacauggugaccuggcucaaggaaacagagguagugcagggcaaagaccggcucaccugugcauauccggaaaaaaugaggaaucggguccucuuggaacucaacagugcugaccuggacugugacccgauucuucccccaucccugcaaaccucuuaugucuuccuggguauuguuuuagcccugauaggcgcuauuuuccuccugguuuuguauuugaaccgcaaggggauaaaaaaguggaugcauaacaucagagaugccugcagggaucacauggaaggguaucauuacagauaugaaaucaaugcggaccccagauuaacgaaccucaguucuaacucggaugucuga

SEQ ID NO: 508 - RNA, 1632 nt, Artificial Sequence
  AAH33010
augaggaagccagccgcuggcuuccuucccucacuccugaaggugcugcuccugccucuggcaccugccgcagcccaggauucgacucaggccuccacuccaggcagcccucucucuccuaccgaauacgaacgcuucuucgcacugcugacuccaaccuggaaggcagagacuaccugccgucuccgugcaacccacggcugccggaaucccacacucguccagcuggaccaauaugaaaaccacggcuuagugcccgauggugcugucugcuccaaccucccuuaugccuccugguuugagucuuucugccaguucacucacuaccguugcuccaaccacgucuacuaugccaagagaguccuguguucccagccagucucuauucucucaccuaacacucucaaggagauagaagcuucagcugaagucucacccaccacgaugaccucccccaucucaccccacuucacagugacagaacgccagaccuuccagcccuggccugagaggcucagcaacaacguggaagagcuccuacaauccuccuugucccugggaggccaggagcaagcgccagagcacaagcaggagcaaggaguggagcacaggcaggagccgacacaagaacacaagcaggaagaggggcagaaacaggaagagcaagaagaggaacaggaagaggagggaaagcaggaagaaggacaggggacuaaggagggacgggaggcugugucucagcugcagacagacucagagcccaaguuucacucugaaucucuaucuucuaacccuuccucuuuugcuccccggguacgagaaguagagucuacuccuaugauaauggagaacauccaggagcucauucgaucagcccaggaaauagaugaaaugaaugaaauauaugaugagaacuccuacuggagaaaccaaaacccuggcagccuccugcagcugccccacacagaggccuugcuggugcugugcuauucgaucguggagaauaccugcaucauaacccccacagccaaggccuggaaguacauggaggaggagauccuugguuucgggaagucggucugugacagccuugggcggcgacacaugucuaccugugcccucugugacuucugcuccuugaagcuggagcagugccacucagaggccagccugcagcggcaacaaugcgacaccucccacaagacucccuuugucagccccuugcuugccucccagagccuguccaucggcaaccagguaggguccccagaaucaggccgcuuuuacgggcuggauuuguacggugggcuccacauggacuucuggugugcccggcuugccacgaaaggcugugaagauguccgagucucuggguggcuccagacugaguuccuuagcuuccaggauggggauuucccuaccaagauuugugacacagacuauauccaguacccaaacuacuguuccuucaaaagccagcagugucugaugagaaaccgcaaucggaaggugucccgcaugagaugucugcagaaugagacuuacagugcgcugagcccuggcaaaagugaggacguugugcuucgauggagccaggaguucagcaccuugacucuaggccaguucggauga

SEQ ID NO: 509 - RNA, 1830 nt, Artificial Sequence
  AAB58754
augaaguggguggaaucaauuuuuuuaauuuuccuacuaaauuuuacugaauccagaacacugcauagaaaugaauauggaauagcuuccauauuggauucuuaccaauguacugcagagauaaguuuagcugaccuggcuaccauauuuuuugcccaguuuguucaagaagccacuuacaaggaaguaagcaaaauggugaaagaugcauugacugcaauugagaaacccacuggagaugaacagucuucaggguguuuagaaaaccagcuaccugccuuucuggaagaacuuugccaugagaaagaaauuuuggagaaguacggacauucagacugcugcagccaaagugaagagggaagacauaacuguuuucuugcacacaaaaagcccacuccagcaucgaucccacuuuuccaaguuccagaaccugucacaagcugugaagcauaugaagaagacagggagacauucaugaacaaauucauuuaugagauagcaagaaggcaucccuuccuguaugcaccuacaauucuucuuugggcugcucgcuaugacaaaauaauuccaucuugcugcaaagcugaaaaugcaguugaaugcuuccaaacaaaggcagcaacaguuacaaaagaauuaagagaaagcagcuuguuaaaucaacaugcaugugcaguaaugaaaaauuuugggacccgaacuuuccaagccauaacuguuacuaaacugagucagaaguuuaccaaaguuaauuuuacugaaauccagaaacuaguccuggauguggcccauguacaugagcacuguugcagaggagaugugcuggauugucugcaggauggggaaaaaaucauguccuacauauguucucaacaagacacucugucaaacaaaauaacagaaugcugcaaacugaccacgcuggaacguggucaauguauaauucaugcagaaaaugaugaaaaaccugaaggucuaucuccaaaucuaaacagguuuuuaggagauagagauuuuaaccaauuuucuucaggggaaaaaaauaucuucuuggcaaguuuuguucaugaauauucaagaagacauccucagcuugcugucucaguaauucuaagaguugcuaaaggauaccaggaguuauuggagaaguguuuccagacugaaaacccucuugaaugccaagauaaaggagaagaagaauuacagaaauacauccaggagagccaagcauuggcaaagcgaagcugcggccucuuccagaaacuaggagaauauuacuuacaaaaugcguuucucguugcuuacacaaagaaagccccccagcugaccucgucggagcugauggccaucaccagaaaaauggcagccacagcagccacuuguugccaacucagugaggacaaacuauuggccuguggcgagggagcggcugacauuauuaucggacacuuauguaucagacaugaaaugacuccaguaaacccugguguuggccagugcugcacuucuucauaugccaacaggaggccaugcuucagcagcuuggugguggaugaaacauaugucccuccugcauucucugaugacaaguucauuuuccauaaggaucugugccaagcucaggguguagcgcugcaaacgaugaagcaagaguuucucauuaaccuugugaagcaaaagccacaaauaacagaggaacaacuugaggcugucauugcagauuucucaggccuguuggagaaaugcugccaaggccaggaacaggaagucugcuuugcugaagagggacaaaaacugauuucaaaaacucgugcugcuuugggaguuuaa

SEQ ID NO: 510 - RNA, 2565 nt, Artificial Sequence
  AAI26251
augauggcguacucugauacuacaaugaugucugaugauauugacugguuacgcagccacaggggugugugcaagguagaucucuacaacccagaaggacagcaagaucaggaccggaaagugauaugcuuugucgauguguccacccugaauguagaagauaaagauuacaaggaugcugcuaguuccagcucagaaggcaacuuaaaccugggaagucuggaagaaaaagagauuaucgugaucaaggacacugagaagaaagaccagucuaagacagagggaucuguaugccuuuucaaacaagcucccucugauccuguaaguguccucaacuggcuucucagugaucuccagaaguaugccuuggguuuccaacaugcacugagccccucaaccucuaccuguaaacauaaaguaggagacacagagggcgaauaucacagagcauccucugagaacugcuacagugucuaugccgaucaagugaacauagauuauuugaugaacagaccucaaaaccuacgucuagaaaugacagcagcuaaaaacaccaacaauaaucaaaguccuucagcuccuccagccaaaccuccuagcacucagagagcagucauuuccccugauggagaauguucuauagaugaccuuuccuucuacgucaaccgacuaucuucucugguaauccagauggcccauaaggaaaucaaggagaaguuggaagguaaaagcaaaugccuucaucauucaaucuguccauccccugggaacaaagagagaaucaguccccgaacuccugcgagcaagauugcuucugaaauggccuaugaagcuguggaacugacagcugcagaaaugcguggcacuggagaggaguccagggaagguggccagaaaagcuuucuauauagcgaauuauccaacaagagcaaaaguggagacaaacagaugucccagagagagagcaaagaauuugcagauuccaucagcaaggggcucaugguuuaugcaaaucagguggcaucugacaugauggucucucucaugaagaccuugaaagugcacagcucugggaagccaauuccagcaucugugguccugaagaggguguugcuaaggcacaccaaggagauuguguccgauuugauugauucuugcaugaagaaccugcauaauauuacugggguccugaugacugacucagacuuugucucagcugucaagagaaaucuguucaaccaguggaaacaaaaugcuacagacaucauggaggccaugcugaagcgcuuggucagugcccuuauaggugaggagaaggagacuaagucucagagucugucauaugcaucuuuaaaagcugggucccaugaucccaaaugcaggaaucagagucuugaauucuccaccaugaaagcugaaaugaaagagagggacaaaggcaaaaugaaaucagacccaugcaagucacugacuagugcugagaaagucggugaacacauucucaaagagggccuaaccaucuggaaccaaaagcaaggaaacucaugcaagguggcuaccaaagcaugcagcaauaaagaugagaaaggagaaaagaucaaugcuuccacagauucacuggccaaggaccugauugucucugcccuuaagcugauccaguaccaucugacccagcagacuaagggcaaagauacaugugaagaagacuguccugguuccaccaugggcuauauggcucagaguacucaauaugaaaaguguggagguggccaaagugccaaagcacuuucagugaaacaacuagaaucucacagagccccuggaccauccaccugucaaaaggagaaccaacaccuggacucccagaaaauggauaugucaaacaucguucuaaugcugauucagaaacugcuuaaugagaaccccuucaaaugugaggauccaugcgaaggugagaacaaguguucugagcccagggcaagcaaagcagcuuccauguccaacagaucugacaaagcggaagaacaaugccaggagcaucaagaacuugacuguaccagugggaugaagcaagcgaacgggcaauuuauagauaaacuaguagaaucugugaugaagcucugccuuaucauggcuaaguauagcaacgauggggcagcccuugcugaguuggaagaacaagcagccucggcaaauaagcccaauuucaggggcaccagaugcauucacaguggugcaaugccacagaacuaucaagacucucuuggacaugaaguaauugucaauaaucagugcucuacaaauagcuugcagaagcagcuccaggcuguccugcaguggauugcagccucccaguuuaacgugcccaugcucuacuucaugggagauaaggauggacaacuggaaaagcuuccucagguuucagcuaaagcagcagagaagggguacaguguaggaggucuucuucaagaggucaugaaguuugccaaggaacggcaaccagaugaagcugugggaaagguggccaggaaacaguugcuggacuggcugcucgcuaaccuguga

SEQ ID NO: 511 - RNA, 1251 nt, Artificial Sequence
  BAG61782
augguggacuaccacgcggcgaaccagucguaccaguacggccccagcagcgcgggcaauggcgcuggcggcgggggcagcaugggcgacuacauggcccaggaggacgacugggaccgggaccugcugcuggacccggccugggagaagcagcagcgcaagaccuucacggcauggugcaacucccaccugcggaaggcaggcacacagaucgagaacauugaugaggacuuccgagacgggcucaagcucaugcugcuccuggaggucauaucaggggagcgguuaccuaagccggagcgggggaagaugagagugcacaaaaucaacaaugugaacaaagcgcuggacuuuauugccagcaaaggcgucaagcuggucuccaucggggcagaagagauuguggacggcaacgcaaagaugacccugggaaugaucuggaccaucauccuuagguucgccauccaggacaucuccguggaagagaccucggccaaggaagggcuccuucucuggugccagagaaagacagccccguauaagaacgucaaugugcagaacuuccacaucagcuggaaggauggucuugccuucaaugcccugauccaccggcacagaccagagcugauugaguaugacaagcugaggaaggacgacccugucaccaaccugaacaaugccuucgaaguggcugagaaauaccucgacauccccaagaugcuggaugcagaggacaucgugaacacggcccggcccgacgagaaggccauaaugaccuauguguccagcuucuaccaugccuuuucaggagcgcagaaggcugaaacugccgccaaccggaucuguaaggugcuggcugucaaccaagagaacgagcaccugauggaggacuacgagaagcuggccagcgaccuccuggaguggauccggcgcaccauccccuggcuggaggaccgugugccccaaaagacuauccaggagaugcagcagaagcuggaggacuuccgcgacuaccggcgugugcacaagccgcccaaggugcaggagaagugccagcuggagaucaacuucaacacgcugcagaccaagcugcgccucagcaaccggcccgccuucaugcccuccuggaggagcagagcaagcagcaguccaacgagcaccugcgccgccaguucgccagccaggccaauguuguggggcccuggauccagaccaagauggaggagaucgggcgcaucuccauugagauga

SEQ ID NO: 512 - RNA, 1689 nt, Artificial Sequence
  BAG65349
augguggacuaccacgcggcgaaccagucguaccaguacggccccagcagcgcgggcaauggcgcuggcggcgggggcagcaugggcgacuacauggcccaggaggacgacugggaccgggaccugcugcuggacccggccugggagaagcagcagcgcaagaccuucacggcauggugcaacucccaccugcggaaggcaggcacacagaucgagaacauugaugaggacuuccgagacgggcucaagcucaugcugcuccuggaggucauaucaggggagcgguuaccuaagccggagcgggggaagaugagagugcacaaaaucaacaaugugaacaaagcgcuggacuuuauugccagcaaaggcgucaagcuggucuccaucggggcagaagagauuguggacggcaacgcaaagaugacccugggaaugaucuggaccaucauccuuagguucgccauccaggacaucuccguggaagagaccucggccaaggaagggcuccuucucuggugccagagaaagacagccccauauaagaacgucaaugugcagaacuuccacaucagcuggaaggauggucuugccuucaaugcccugauccaccggcacagaccagagcugauugaguaugacaagcugaggaaggacgacccugucaccaaccugaacaaugccuucgaaguggcugagaaauaccucgacauccccaagaugcuggaugcagaggacaucgugaacacggcccggcccgacgagaaggccauaaugaccuauguguccagcuucuaccaugccuuuucaggagcgcagaaggcugaaacugccgccaaccggaucuguaaggugcuggcugucaaccaagagaacgagcaccugauggaggacuacgagaagcuggccagcgaccuccuggaguggauccagcgcaccauccccuggcuggaggaccgugugccccaaaaggcuauccaggagaugcagcagaagcuggaggacuuccgcgacuaccggcgugugcacaagccgcccaaggugcaggagaagugccagcuggagaucaacuucaacacgcugcagaccaagcugcgccucagcaaccggcccgccuucaugcccuccgagggcaagauggucucggacaucaacaauggcuggcagcacuuggagcaggcugagaagggcuacgaggaguggcugcugaaugagauccgcaggcuggagcggcucgaccaccuggcagagaaguuccggcagaaggccuccauccacgaggccuggacugacgggaaggaagccaugcugaagcaccgggacuacgagacggccacacuaucggacaucaaagcccucauucgcaagcacgaggccuucgagagcgaccuggcugcgcaccaggaccgcguggagcagaucgccgccauugcccaggagcucaacgagcuggauuacuacgacucccacaaugucaacacccccgacggccuccaggaggggccugggcagccccacagucccauuccuccacucuguaucuaugcaaagcacucucugcaguccuccggggugggugggugggcagggaggggcuggggcaggcucucuccucucucucuuuguggguuggccaggagguucccccgaccagguuggggagacuuggggccagcgcuucuggucugguaa

SEQ ID NO: 513 - RNA, 2736 nt, Artificial Sequence
  AAH05033
augguggacuaccacgcggcgaaccagucguaccaguacggccccagcagcgcgggcaauggcgcuggcggcgggggcagcaugggcgacuacauggcccaggaggacgacugggaccgggaccugcugcuggacccggccugggagaagcagcagcgcaagaccuucacggcauggugcaacucccaccugcggaaggcaggcacacagaucgagaacauugaugaggacuuccgagacgggcucaagcucaugcugcuccuggaggucauaucaggggagcgguuaccuaagccggagcgggggaagaugagagugcacaaaaucaacaaugugaacaaagcgcuggacuuuauugccagcaaaggcgucaagcuggucuccaucggggcagaagagauuguggacggcaacgcaaagaugacccugggaaugaucuggaccaucauccuuagguucgccauccaggacaucuccguggaagagaccucggccaaggaagggcuccuucucuggugccagagaaagacagccccguauaagaacgucaaugugcagaacuuccacaucagcuggaaggauggucuugccuucaaugcccugauccaccggcacagaccagagcugauugaguaugacaagcugaggaaggacgacccugucaccaaccugaacaaugccuucgaaguggcugagaaauaccucgacauccccaagaugcuggaugcagaggacaucgugaacacggcccggcccgacgagaaggccauaaugaccuauguguccagcuucuaccaugccuuuucaggagcgcagaaggcugaaacugccgccaaccggaucuguaaggugcuggcugucaaccaagagaacgagcaccugauggaggacuacgagaagcuggccagcgaccuccuggaguggauccggcgcaccauccccuggcuggaggaccgugugccccaaaagacuauccaggagaugcagcagaagcuggaggacuuccgcgacuaccggcgugugcacaagccgcccaaggugcaggagaagugccagcuggagaucaacuucaacacgcugcagaccaagcugcgccucagcaaccggcccgccuucaugcccuccgagggcaagauggucucggacaucaacaauggcuggcagcacuuggagcaggcugagaagggcuacgaggaguggcugcugaaugagauccgcaggcuggagcggcucgaccaccuggcagagaaguuccggcagaaggccuccauccacgaggccuggacugacgggaaggaagccaugcugaagcaccgggacuacgagacggccacacuaucggacaucaaagcccucauucgcaagcacgaggccuucgagagcgaccuggcugcgcaccaggaccgcguggagcagaucgccgccauugcccaggagcucaacgagcuggauuacuacgacucccacaaugucaacacccggugccagaagaucugugaccagugggacgcccucggcucucugacacauagucgcagggaagcccuggagaaaacagagaagcagcuggaggccaucgaccagcugcaccuggaauacgccaagcgcgcggcccccuucaacaacuggauggagagcgccauggaggaccuccaggacauguucaucguccauaccaucgaggagauugagggccugaucucagcccaugaccaguucaaguccacccugccggacgccgauagggagcgcgaggccauccuggccauccacaaggaggcccagaggaucgcugagagcaaccacaucaagcugucgggcagcaaccccuacaccaccgucaccccgcaaaucaucaacuccaagugggagaaggugcagcagcuggugccaaaacgggaccaugcccuccuggaggagcagagcaagcagcaguccaacgagcaccugcgccgccaguucgccagccaggccaauguuguggggcccuggauccagaccaagauggaggagaucgggcgcaucuccauugagaugaacgggacccuggaggaccagcugagccaccugaagcaguaugaacgcagcaucguggacuacaagcccaaccuggaccugcuggagcagcagcaccagcucauccaggaggcccucaucuucgacaacaagcacaccaacuauaccauggagcacauccgcgugggcugggagcagcugcucaccaccauugcccgcaccaucaacgagguggagaaccagauccucacccgcgacgccaagggcaucagccaggagcagaugcaggaguuccgggcguccuucaaccacuucgacaaggaucauggcggggcgcuggggcccgaggaguucaaggccugccucaucagccugggcuacgacguggagaacgaccggcagggugaggccgaguucaaccgcaucaugagccuggucgaccccaaccauagcggccuugugaccuuccaagccuucaucgacuucaugucgcgggagaccaccgacacggacacggcugaccaggucaucgcuuccuucaaggucuuagcaggggacaagaacuucaucacagcugaggagcugcggagagagcugccccccgaccaggccgaguacugcaucgcccgcauggcgccauaccagggcccugacgccgugcccggugcccucgacuacaaguccuucuccacggccuuguauggcgagagcgaccuguga

SEQ ID NO: 514 - RNA, 597 nt, Artificial Sequence
  EAX10817
auggcacugcagggcaucucggucauggagcuguccggccuggccccgggcccguucugugcuaugguccuggcugacuucggggcgcgugugguacgcguggaccggcccggcucccgcuacgacgugagccgcuugggccggggcaagcgcucgcuagugcuggaccugaagcagccgcggggagccgccgugcugcggcgucugugcaagcggucggaugugcugcuggagcccuuccgccgcggugucauggagaaacuccagcugggcccagagauucugcagcgggaaaauccaaggcuuauuuaugccaggcugaguggauuuggccagucaggaagcuucugccgguuagcuggccacgauaucaacuauuuggcuuugucagguggaaggaacagcauauuuaaguucuuuucuguggaaaacucagaaaucgagucugugggaagcaccucgaggacagaacauguuggaugguggagcaccuuucuauacgacuuacaggacagcagauggggaauucauggcuguuggagcaauagaaccccaguucuacgagcugcugaucaaaggacuuggacuaaagucuga

SEQ ID NO: 515 - RNA, 597 nt, Artificial Sequence
  BAF85677
auggcacugcagggcaucucggucguggagcuguccggccuggccccgggcccguucugugcuaugguccuggcugacuucggggcgcgugugguacgcguggaccggcccggcucccgcuacgacgugagccgcuugggccggggcaagcgcucgcuagugcuggaccugaagcagccgcggggagccgccgugcugcggcgucugugcaagcggucggaugugcugcuggagcccuuccgccgcggugucauggagaaacuccagcugggcccagagauucugcagcgggaaaauccaaggcuuauuuaugccaggcugaguggauuuggccagucaggaagcuucugccgguuagcuggccacgauaucaacuauuuggcuuugucagguggaaggaacagcauauuuaaguucuuuucuguggaaaacucagaaaucgagucugugggaagcaccucgaggacagaacauguuggaugguggagcaccuuucuauacgacuuacaggacagcagauggggaauucauggcuguuggagcaauagaaccccauuucuacgagcugcugaucaaaggacuuggacuaaagucuga

SEQ ID NO: 516 - RNA, 2763 nt, Artificial Sequence
  EAX05380
auggaagugcaguuagggcugggaagggucuacccucggccgccguccaagaccuaccgaggagcuuuccagaaucuguuccagagcgugcgcgaagugauccagaacccgggccccaggcacccagaggccgcgagcgcagcaccucccggcgccaguuugcugcugcugcagcagcagcagcagcagcagcagcagcagcagcagcagcagcagcagcagcagcagcagcagcagcaagagacuagccccaggcagcagcagcagcagcagggugaggaugguucuccccaagcccaucguagaggccccacaggcuaccugguccuggaugaggaacagcaaccuucacagccgcagucggcccuggagugccaccccgagagagguugcgucccagagccuggagccgccguggccgccagcaaggggcugccgcagcagcugccagcaccuccggacgaggaugacucagcugccccauccacguugucccugcugggccccacuuuccccggcuuaagcagcugcuccgcugaccuuaaagacauccugagcgaggccagcaccaugcaacuccuucagcaacagcagcaggaagcaguauccgaaggcagcagcagcgggagagcgagggaggccucgggggcucccacuuccuccaaggacaauuacuuagggggcacuucgaccauuucugacaacgccaaggaguuguguaaggcagugucgguguccaugggccuggguguggaggcguuggagcaucugaguccaggggaacagcuucggggggauugcauguacgccccacuuuugggaguuccacccgcugugcgucccacuccuugugccccauuggccgaaugcaaagguucucugcuagacgacagcgcaggcaagagcacugaagauacugcugaguauuccccuuucaagggagguuacaccaaagggcuagaaggcgagagccuaggcugcucuggcagcgcugcagcagggagcuccgggacacuugaacugccgucuacccugucucucuacaaguccggagcacuggacgaggcagcugcguaccagagucgcgacuacuacaacuuuccacuggcucuggccggaccgccgcccccuccgccgccuccccauccccacgcucgcaucaagcuggagaacccgcuggacuacggcagcgccugggcggcugcggcggcgcagugccgcuauggggaccuggcgagccugcauggcgcgggugcagcgggacccgguucugggucacccucagccgccgcuuccucauccuggcacacucucuucacagccgaagaaggccaguuguauggaccguguggugguggugggggugguggcggcggcggcggcggcggcggcggcggcggcggcggcggcggcggcggcgaggcgggagcuguagcccccuacggcuacacucggcccccucaggggcuggcgggccaggaaagcgacuucaccgcaccugaugugugguacccuggcggcauggugagcagagugcccuaucccagucccacuugugucaaaagcgaaaugggccccuggauggauagcuacuccggaccuuacggggacaugcguuuggagacugccagggaccauguuuugcccauugacuauuacuuuccaccccagaagaccugccugaucuguggagaugaagcuucugggugucacuauggagcucucacauguggaagcugcaaggucuucuucaaaagagccgcugaagggaaacagaaguaccugugcgccagcagaaaugauugcacuauugauaaauuccgaaggaaaaauuguccaucuugucgucuucggaaauguuaugaagcagggaugacucugggagcccggaagcugaagaaacuugguaaucugaaacuacaggaggaaggagaggcuuccagcaccaccagccccacugaggagacaacccagaagcugacagugucacacauugaaggcuaugaaugucagcccaucuuucugaauguccuggaagccauugagccagguguagugugugcuggacacgacaacaaccagcccgacuccuuugcagccuugcucucuagccucaaugaacugggagagagacagcuuguacacguggucaagugggccaaggccuugccuggcuuccgcaacuuacacguggacgaccagauggcugucauucaguacuccuggauggggcucaugguguuugccaugggcuggcgauccuucaccaaugucaacuccaggaugcucuacuucgccccugaucugguuuucaaugaguaccgcaugcacaagucccggauguacagccaguguguccgaaugaggcaccucucucaagaguuuggauggcuccaaaucaccccccaggaauuccugugcaugaaagcacugcuacucuucagcauuauuccaguggaugggcugaaaaaucaaaaauucuuugaugaacuucgaaugaacuacaucaaggaacucgaucguaucauugcaugcaaaagaaaaaaucccacauccugcucaagacgcuucuaccagcucaccaagcuccuggacuccgugcagccuauugcgagagagcugcaucaguucacuuuugaccugcuaaucaagucacacauggugagcguggacuuuccggaaaugauggcagagaucaucucugugcaagugcccaagauccuuucugggaaagucaagcccaucuauuuccacacccaguga

SEQ ID NO: 517 - RNA, 1239 nt, Artificial Sequence
  AAH64630
auggcuccaguggagcacguuguggcggaugcuggggcuuuccugcggcaugcggcucugcaggacaucgggaagaacauuuacaccauccgggagguggucacugagauucgggacaaggccacacgcaggcggcucgcuguccugcccuacgagcugcgguucaaggagcccuuaccggaauacgugcggcuggugacugaguuuucaaagaaaacaggagacuaccccagccucucugccacggacauccaagugcuugcacucacauaccaguuggaagcagaguuuguuggggugucucaccuaaaacaagaaccacagaagguuaaggugagcucaucgauucagcacccagaaacaccucugcacauuucugguuuccaucugcccuacaagccuaaacccccacaagaaacagaaaaaggacacucagcuugugagccugagaaccuggaauuuaguuccuucauguucuggagaaacccuuugcccaacaucgaucaugaacugcaggagcugcugauugacagaggugaggacguuccaagugaggaggaggaggaggaagaaaacggguuugaagacagaaaagaugacagcgaugacgacggggguggcuggauaacccccaguaacaucaagcagauccagcaggagcuggagcagugugacguccccgaggacgugcggguuggcugccugaccacagacuucgccaugcagaauguucugcugcagauggggcugcacgugcuggcggugaacggcaugcugauucgugaggcccggagcuacaucuugcgcugccauggcuguuucaagacaacgucugacaugagccgaguguucugcucacacugugggaacaagacccugaagaaaguguccgugaccgucagcgacgacggcacccugcacaugcacuucucccgcaaccccaaggugcugaacccccgcggccuccgguacucgcuucccacucccaaagggggcaaauacgccaucaacccccaucucaccgaggaucagcgcuucccucagcugcgacucucccaaaaggccaggcagaaaaccaacguguucgccccugacuacaucgccggggugucacccuuugucgagaaugacaucuccagccgcucagcuacccugcagguccgggacagcaccuugggagcugggcggagacgcuuaaaucccaacgcuuccagaaagaaguuugugaagaaaagguga

SEQ ID NO: 518 - RNA, 984 nt, Artificial Sequence
  AAH69102
augcagaugccugcuaugaugucucugcuucuugugucugugggccucauggaagcacuucaggcccagagccaccccaucacacgacgagaccucuucucucaagagauucagcuggacauggcccuggccuccuuugaugaccaguacgcuggcugugcugcugccaugacagcugcucucccggaucucaaccacacggaguuccaggccaaccagguguaugcagacagcuggacacuggcaagcagccaauggcaggagcgucaggccagguggccagaguggagucucagccccacccguccauccccgccaccccugggcuuccgcgaugagcaugggguggcccuccuggccuacacagccaacagcccccugcacaaggaguucaaugcagccgugcgugaggcgggccgcucccgggcccacuaccuccaccacuucuccuucaagacacuccauuuccugcugacugaggcccugcagcuccugggcagcggccagcguccaccccggugccaccagguguuccgaggugugcacggccugcgcuuccggccagcagggccccgggccaccgugaggcuggggggcuuugcuucugccucccugaagcauguugcagcccagcaguuuggugaggacaccuucuucggcaucuggaccugccuuggggccccuaucaagggcuacuccuucuucccuggagaggaagaggugcugaucccccccuuugagaccuuccaagugaucaaugccagcagacuggcccagggccccgcccgcaucuaccuccgagcccugggcaagcacagcaccuacaacugcgaguacaucaaagacaagaagugcaagucugggccuugccaucuggauaauucagccaugggucagagcccccucucugcagucuggucuuugcugcugcugcucugguuccucguggugagggccuuuccagaugguccaggccuccuuuga

SEQ ID NO: 519 - RNA, 1035 nt, Artificial Sequence
  AAH09751
auggcccagaaggagaacuccuaccccuggcccuacggccgacagacggcuccaucuggccugagcacccugccccagcgaguccuccggaaagagccugucaccccaucugcacuuguccucaugagccgcuccaauguccagcccacagcugccccuggccagaaggugauggagaauagcagugggacacccgacaucuuaacgcggcacuucacaauugaugacuuugagauugggcguccucugggcaaaggcaaguuuggaaacguguacuuggcucgggagaagaaaagccauuucaucguggcgcucaagguccucuucaagucccagauagagaaggagggcguggagcaucagcugcgcagagagaucgaaauccaggcccaccugcaccaucccaacauccugcgucucuacaacuauuuuuaugaccggaggaggaucuacuugauucuagaguaugccccccgcggggagcucuacaaggagcugcagaagagcugcacauuugacgagcagcgaacagccacgaucauggaggaguuggcagaugcucuaauguacugccaugggaagaaggugauucacagagacauaaagccagaaaaucugcucuuagggcucaagggagagcugaagauugcugacuucggcuggucugugcaugcgcccucccugaggaggaagacaauguguggcacccuggacuaccugcccccagagaugauugaggggcgcaugcacaaugagaagguggaucuguggugcauuggagugcuuugcuaugagcugcugguggggaacccacccuuugagagugcaucacacaacgagaccuaucgccgcaucgucaagguggaccuaaaguuccccgcuuccgugcccaugggagcccaggaccucaucuccaaacugcucaggcauaaccccucggaacggcugccccuggcccaggucucagcccacccuuggguccgggccaacucucggagggugcugccucccucugcccuucaaucugucgccuga

SEQ ID NO: 520 - RNA, 360 nt, Artificial Sequence
  AAD48083
augucucgcuccguggccuuagcugugcucgcgcuacucucucuuucuggccuggaggcuauccagcguacuccaaagauucagguuuacucacgucauccagcagagaauggaaagucaaauuuccugaauugcuaugugucuggguuucauccauccgacauugaaguugacuuacugaagaauggagagagaauugaaaaaguggagcauucagacuugucuuucagcaaggacuggucuuucuaucucuuguacuacacugaauucacccccacugaaaaagaugaguaugccugccgugugaaccaugugacuuugucacagcccaagauaguuaagugggaucgagacauguaa

SEQ ID NO: 521 - RNA, 1137 nt, Artificial Sequence
  AAH28058
augagaauguugguuaguggcagaagagucaaaaaauggcaguuaauuauucaguuauuugcuacuuguuuuuuagcgagccucauguuuuuuugggaaccaaucgauaaucacauugugagccauaugaagucauauucuuacagauaccucauaaauagcuaugacuuugugaaugauacccugucucuuaagcacaccucagcggggccucgcuaccaauacuugauuaaccacaaggaaaagugucaagcucaagacguccuccuuuuacuguuuguaaaaacugcuccugaaaacuaugaucgacguuccggaauuagaaggacguggggcaaugaaaauuauguucggucucagcugaaugccaacaucaaaacucuguuugccuuaggaacuccuaauccacuggagggagaagaacuacaaagaaaacuggcuugggaagaucaaagguacaaugauauaauucagcaagacuuuguugauucuuucuacaaucuuacucugaaauuacuuaugcaguucaguugggcaaauaccuauuguccacaugccaaauuucuuaugacugcugaugaugacauauuuauucacaugccaaaucugauugaguaccuucaaaguuuagaacaaauugguguucaagacuuuuggauuggucguguucaucguggugccccucccauuagagauaaaagcagcaaauacuacguguccuaugaaauguaccaguggccagcuuacccugacuacacagccggagcugccuauguaaucuccggugauguagcugccaaagucuaugaggcaucacagacacuaaauucaagucuuuacauagacgauguguucaugggccucugugccaauaaaauagggauaguaccgcaggaccauguguuuuuuucuggagaggguaaaacuccuuaucaucccugcaucuaugaaaaaaugaugacaucucauggacacuuagaagaucuccaggaccuuuggaagaaugcuacagauccuaaaguaaaaaccauuuccaaagguuuuuuuggucaaauauacugcagauuaaugaagauaauucuccuuuguaaaauuagcuauguggacacauacccuuguagggcugcguuuaucuaa

SEQ ID NO: 522 - RNA, 1602 nt, Artificial Sequence
  AAA35516
auguggcugggccgccgggcccugugcgcucugguccuucugcucgccugcgccucgcuggggcuccuguacgcgagcacccgggacgcgcccggccuccggcuaccucuugcgccgugggcgcccccgcaaagcccccgcaggcccgagcugccagaucuugcuccugagccccgcuacgcacacaucccggucaggaucaaggagcaaguaguggggcugcuggcuuggaacaacugcaguugugaguccaguggggggggccucccccuccccuuccagaaacaaguccgagcuauugaccucaccaaggccuuugacccugcagagcugagggcugccucugccacaagagagcaggaguuccaggccuuucugucgaggagccaguccccagcugaccagcugcucauagccccugccaacuccccgcuccaguacccccuacaggguguggaaguucagccccucaggagcaucuuggugccagggcugagccuucaggcagcuucuggucaggagguauaccaggugaaccugacugccucccuaggcaccugggacguggcaggggaagugacuggaguuacucucacuggagagggucaggcagaucucacccuugucagcccagggcuggaccaacucaacaggcaacuacaacuggucacuuacagcagccgaagcuaccagaccaacacagcagacacaguccgguucuccaccgagggacaugaggcugcuuucacuauccgcauaagacacccgcccaacccucggcuguacccaccugggucucuaccccagggagcccaguacaacaucagcgcucuagucacgauugccaccaagaccuuccuccguuaugaucggcuacgggcucucaucaccaguauccgccgcuucuacccaacgguuaccguggucaucgcugacgacagcgacaagccagagcgcguuaguggccccuacguggaacacuaucucaugcccuucggcaagggcugguucgcaggccggaaccuggccgugucucaaguaaccaccaaguacgugcuguggguggacgacgacuucgucuucacggcgcggacgcggcuggagaggcuuguggacgugcuggagcggacgccgcuggaccugguggggggcgcggugcgcgagaucuccggcuuugccaccacuuaucggcagcugcugagcguggagcccggcgccccaggccucgggaacugccuccggcaaaggcgcggcuuccaccacgagcucgucggcuucccaggcugcguggucaccgacggcgugguuaacuucuuccuggcgcggacugacaaggugcgcgaggucgguuucgacccccgccucagccgcguggcucaucuggaauucuucuuggaugggcuugguucccuucggguuggcuccugcuccgacgucgugguggaucaugcauccaaacugaagcugccuuggacaucaagggaugccggagcagagacuuacgcccgguaccguuacccaggaucacuggacgagagccagauggccaaacaccggcugcucuucuucaaacaccggcugcagugcaugaccucccaguga

SEQ ID NO: 523 - RNA, 849 nt, Artificial Sequence
  AAH74729
auggcuucccuggggcagauccucuucuggagcauaauuagcaucaucauuauucuggcuggagcaauugcacucaucauuggcuuugguauuucagggagacacuccaucacagucacuacugucgccucagcugggaacauuggggaggauggaauccugagcugcacuuuugaaccugacaucaaacuuucugauaucgugauacaauggcugaaggaagguguuuuaggcuugguccaugaguucaaagaaggcaaagaugagcugucggagcaggaugaaauguucagaggccggacagcaguguuugcugaucaagugauaguuggcaaugccucuuugcggcugaaaaacgugcaacucacagaugcuggcaccuacaaauguuauaucaucacuucuaaaggcaaggggaaugcuaaccuugaguauaaaacuggagccuucagcaugccggaagugaauguggacuauaaugccagcucagagaccuugcggugugaggcuccccgaugguucccccagcccacaguggucugggcaucccaaguugaccagggagccaacuucucggaagucuccaauaccagcuuugagcugaacucugagaaugugaccaugaagguugugucugugcucuacaauguuacgaucaacaacacauacuccuguaugauugaaaaugacauugccaaagcaacaggggauaucaaagugacagaaucggagaucaaaaggcggagucaccuacagcugcuaaacucaaaggcuucucugugugucucuucuuucuuugccaucagcugggcacuucugccucucagcccuuaccugaugcuaaaauaa

SEQ ID NO: 524 - RNA, 132 nt, Artificial Sequence
  AAC50123
auggcggccagagcgguuuuucuggcauugucugcccagcugcuccaagccaggcugaugaaggaggaguccccuguggugagcuggagguuggagccugaagacggcacagcucugugcuucaucuucuga

SEQ ID NO: 525 - RNA, 1158 nt, Artificial Sequence
  AAN40694
auggcggcugcgcuguucgugcugcugggauucgcgcugcugggcacccacggagccuccggggcugccggcuucguccaggcgccgcugucccagcagagguggguggggggcaguguggagcugcacugcgaggccgugggcagcccggugcccgagauccaguggugguuugaagggcagggucccaacgacaccugcucccagcucugggacggcgcccggcuggaccgcguccacauccacgccaccuaccaccagcacgcggccagcaccaucuccaucgacacgcucguggaggaggacacgggcacuuacgagugccgggccagcaacgacccggaucgcaaccaccugacccgggcgcccagggucaaguggguccgcgcccaggcagucgugcuaguccuggaacccggcacagucuucacuaccguagaagaccuuggcuccaagauacuccucaccugcuccuugaaugacagcgccacagaggucacagggcaccgcuggcugaaggggggcguggugcugaaggaggacgcgcugcccggccagaaaacggaguucaagguggacuccgacgaccaguggggagaguacuccugcgucuuccuccccgagcccaugggcacggccaacauccagcuccacgggccucccagagugaaggccgugaagucgucagaacacaucaacgagggggagacggccaugcuggucugcaagucagaguccgugccaccugucacugacugggccugguacaagaucacugacucugaggacaaggcccucaugaacggcuccgagagcagguucuucgugaguuccucgcagggccggucagagcuacacauugagaaccugaacauggaggccgaccccggccaguaccggugcaacggcaccagcuccaagggcuccgaccaggccaucaucacgcuccgcgugcgcagccaccuggccgcccucuggcccuuccugggcaucguggcugaggugcuggugcuggucaccaucaucuucaucuacgagaagcgccggaagcccgaggacguccuggaugaugacgacgccggcucugcaccccugaagagcagcgggcagcaccagaaugacaaaggcaagaacguccgccagaggaacucuuccuga

SEQ ID NO: 526 - RNA, 720 nt, Artificial Sequence
  ABX60202
auggcgcacgcugggagaacgggguacgauaaccgggagauagugaugaaguacauccauuauaagcugucgcagaggggcuacgagugggaugcgggagaugugggcgccgcgcccccgggggccgcccccgcaccgggcaucuucuccucccagcccgggcacacgccccauccagccgcaucccgggacccggucgccaggaccucgccgcugcagaccccggcugcccccggcgccgccgcggggccugcgcucagcccggugccaccugugguccaccugacccuccgccaggccggcgacgacuucucccgccgcuaccgccgcgacuucgccgagauguccagccagcugcaccugacgcccuucaccgcgcggggacgcuuugccacggugguggaggagcucuucagggacggggugaacugggggaggauuguggccuucuuugaguucgguggggucauguguguggagagcgucaaccgggagaugucgccccugguggacaacaucgcccuguggaugacugaguaccugaaccggcaccugcacaccuggauccaggauaacggaggcugggaugccuuuguggaacuguacggccccagcaugcggccucuguuugauuucuccuggcugucucugaagacucugcucaguuuggcccuggugggagcuugcaucacccugggugccuaucugagccacaaguga

SEQ ID NO: 527 - RNA, 1290 nt, Artificial Sequence
  ABX82700
augguggacccggugggcuucgcggaggcguggaaggcgcaguucccggacucagagcccccgcgcauggagcugcgcucagugggcgacaucgagcaggagcuggagcgcugcaaggccuccauucggcgccuggagcaggaggugaaccaggagcgcuuccgcaugaucuaccugcagacguugcuggccaaggaaaagaagagcuaugaccggcagcgauggggcuuccggcgcgcggcgcaggcccccgacggcgccuccgagccccgagcguccgcgucgcgcccgcagccagcgcccgccgacggagccgacccgccgcccgccgaggagcccgaggcccggcccgacggcgaggguucuccggguaaggccaggcccgggaccgcccgcaggcccggggcagccgcgucgggggaacgggacgaccggggaccccccgccagcguggcggcgcucagguccaacuucgagcggauccgcaagggccauggccagcccggggcggacgccgagaagcccuucuacgugaacgucgaguuucaccacgagcgcggccuggugaaggucaacgacaaagaggugucggaccgcaucagcucccugggcagccaggccaugcagauggagcgcaaaaagucccagcacggcgcgggcucgagcgugggggaugcauccaggcccccuuaccggggacgcuccucggagagcagcugcggcgucgacggcgacuacgaggacgccgaguugaacccccgcuuccugaaggacaaccugaucgacgccaauggcgguagcaggcccccuuggccgccccuggaguaccagcccuaccagagcaucuacgucgggggcaugauggaaggggagggcaagggcccgcuccugcgcagccagagcaccucugagcaggagaagcgccuuaccuggccccgcagguccuacuccccccggaguuuugaggauugcggaggcggcuauaccccggacugcagcuccaaugagaaccucaccuccagcgaggaggacuucuccucuggccaguccagccgcguguccccaagccccaccaccuaccgcauguuccgggacaaaagccgcucucccucgcagaacucgcaacaguccuucgacagcagcaguccccccacgccgcagugccauaagcggcaccggcacugcccgguugucguguccgaggccaccaucgugggcguccgcaagaccgggcagaucuggcccaacgauggcgagggcgccuuccauggagacgcagaugguggauga

SEQ ID NO: 528 - RNA, 1665 nt, Artificial Sequence
  ABX82703
augguggacccggugggcuucgcggaggcguggaaggcgcaguucccggacucagagcccccgcgcauggagcugcgcucagugggcgacaucgagcaggagcuggagcgcugcaaggccuccauucggcgccuggagcaggaggugaaccaggagcgcuuccgcaugaucuaccugcagacguugcuggccaaggaaaagaagagcuaugaccggcagcgauggggcuuccggcgcgcggcgcaggcccccgacggcgccuccgagccccgagcguccgcgucgcgcccgcagccagcgcccgccgacggagccgacccgccgcccgccgaggagcccgaggcccggcccgacggcgaggguucuccggguaaggccaggcccgggaccgcccgcaggcccggggcagccgcgucgggggaacgggacgaccggggaccccccgccagcguggcggcgcucagguccaacuucgagcggauccgcaagggccauggccagcccggggcggacgccgagaagcccuucuacgugaacgucgaguuucaccacgagcgcggccuggugaaggucaacgacaaagaggugucggaccgcaucagcucccugggcagccaggccaugcagauggagcgcaaaaagucccagcacggcgcgggcucgagcgugggggaugcauccaggcccccuuaccggggacgcuccucggagagcagcugcggcgucgacggcgacuacgaggacgccgaguugaacccccgcuuccugaaggacaaccugaucgacgccaauggcgguagcaggcccccuuggccgccccuggaguaccagcccuaccagagcaucuacgucgggggcaugauggaaggggagggcaagggcccgcuccugcgcagccagagcaccucugagcaggagaagcgccuuaccuggccccgcagguccuacuccccccggaguuuugaggauugcggaggcggcuauaccccggacugcagcuccaaugagaaccucaccuccagcgaggaggacuucuccucuggccaguccagccgcguguccccaagccccaccaccuaccgcauguuccgggacaaaagccgcucucccucgcagaacucgcaacaguccuucgacagcagcaguccccccacgccgcagugccauaagcggcaccggcacugcccgguugucguguccgaggccaccaucgugggcguccgcaagaccgggcagaucuggcccaacgauggcgagggcgccuuccauggagacgcagauggcucguucggaacaccaccuggauacggcugcgcugcagaccgggcagaggagcagcgccggcaccaagaugggcugcccuacauugaugacucgcccuccucaucgccccaccucagcagcaagggcaggggcagccgggaugcgcuggucucgggagcccuggaguccacuaaagcgagugagcuggacuuggaaaagggcuuggagaugagaaaauggguccugucgggaauccuggcuagcgaggagacuuaccugagccaccuggaggcacugcugcugcccaugaagccuuugaaagccgcugccaccaccucucagccggugcugacgagucagcagaucgagaccaucuucuucaaagugccugaucuccucuga

SEQ ID NO: 529 - RNA, 1545 nt, Artificial Sequence
  ABX82704
augguggacccggugggcuucgcggaggcguggaaggcgcaguucccggacucagagcccccgcgcauggagcugcgcucagugggcgacaucgagcaggagcuggagcgcugcaaggccuccauucggcgccuggagcaggaggugaaccaggagcgcuuccgcaugaucuaccugcagacguugcuggccaaggaaaagaagagcuaugaccggcagcgauggggcuuccggcgcgcggcgcaggcccccgacggcgccuccgagccccgagcguccgcgucgcgcccgcagccagcgcccgccgacggagccgacccgccgcccgccgaggagcccgaggcccggcccgacggcgaggguucuccggguaaggccaggcccgggaccgcccgcaggcccggggcagccgcgucgggggaacgggacgaccggggaccccccgccagcguggcggcgcucagguccaacuucgagcggauccgcaagggccauggccagcccggggcggacgccgagaagcccuucuacgugaacgucgaguuucaccacgagcgcggccuggugaaggucaacgacaaagaggugucggaccgcaucagcucccugggcagccaggccaugcagauggagcgcaaaaagucccagcacggcgcgggcucgagcgugggggaugcauccaggcccccuuaccggggacgcuccucggagagcagcugcggcgucgacggcgacuacgaggacgccgaguugaacccccgcuuccugaaggacaaccugaucgacgccaauggcgguagcaggcccccuuggccgccccuggaguaccagcccuaccagagcaucuacgucgggggcaugauggaaggggagggcaagggcccgcuccugcgcagccagagcaccucugagcaggagaagcgccuuaccuggccccgcagguccuacuccccccggaguuuugaggauugcggaggcggcuauaccccggacugcagcuccaaugagaaccucaccuccagcgaggaggacuucuccucuggccaguccagccgcguguccccaagccccaccaccuaccgcauguuccgggacaaaagccgcucucccucgcagaacucgcaacaguccuucgacagcagcaguccccccacgccgcagugccauaagcggcaccggcacugcccgguugucguguccgaggccaccaucgugggcguccgcaagaccgggcagaucuggcccaacgauggcgagggcgccuuccauggagacgcagauggcucguucggaacaccaccuggauacggcugcgcugcagaccgggcagaggagcagcgccggcaccaagaugggcugcccuacauugaugacucgcccuccucaucgccccaccucagcagcaagggcaggggcagccgggaugcgcuggucucgggagcccuggaguccacuaaagcgagugagcuggacuuggaaaagggcuuggagaugagaaaauggguccugucgggaauccuggcuagcgaggagauaacacucuaa

SEQ ID NO: 530 - RNA, 1326 nt, Artificial Sequence
  ABX82705
augguggacccggugggcuucgcggaggcguggaaggcgcaguucccggacucagagcccccgcgcauggagcugcgcucagugggcgacaucgagcaggagcuggagcgcugcaaggccuccauucggcgccuggagcaggaggugaaccaggagcgcuuccgcaugaucuaccugcagacguugcuggccaaggaaaagaagagcuaugaccggcagcgauggggcuuccggcgcgcggcgcaggcccccgacggcgccuccgagccccgagcguccgcgucgcgcccgcagccagcgcccgccgacggagccgacccgccgcccgccgaggagcccgaggcccggcccgacggcgaggguucuccggguaaggccaggcccgggaccgcccgcaggcccggggcagccgcgucgggggaacgggacgaccggggaccccccgccagcguggcggcgcucagguccaacuucgagcggauccgcaagggccauggccagcccggggcggacgccgagaagcccuucuacgugaacgucgaguuucaccacgagcgcggccuggugaaggucaacgacaaagaggugucggaccgcaucagcucccugggcagccaggccaugcagauggagcgcaaaaagucccagcacggcgcgggcucgagcgugggggaugcauccaggcccccuuaccggggacgcuccucggagagcagcugcggcgucgacggcgacuacgaggacgccgaguugaacccccgcuuccugaaggacaaccugaucgacgccaauggcgguagcaggcccccuuggccgccccuggaguaccagcccuaccagagcaucuacgucgggggcaugauggaaggggagggcaagggcccgcuccugcgcagccagagcaccucugagcaggagaagcgccuuaccuggccccgcagguccuacuccccccggaguuuugaggauugcggaggcggcuauaccccggacugcagcuccaaugagaaccucaccuccagcgaggaggacuucuccucuggccaguccagccgcguguccccaagccccaccaccuaccgcauguuccgggacaaaagccgcucucccucgcagaacucgcaacaguccuucgacagcagcaguccccccacgccgcagugccauaagcggcaccggcacugcccgguugucguguccgaggccaccaucgugggcguccgcaagaccgggcagaucuggcccaacgauggcgagggcgccuuccauggagacgcagauggcucguuggaacuccaaggaaaaccuucucgcuggacccaguga

SEQ ID NO: 531 - RNA, 1575 nt, Artificial Sequence
  ABX82706
augguggacccggugggcuucgcggaggcguggaaggcgcaguucccggacucagagcccccgcgcauggagcugcgcucagugggcgacaucgagcaggagcuggagcgcugcaaggccuccauucggcgccuggagcaggaggugaaccaggagcgcuuccgcaugaucuaccugcagacguugcuggccaaggaaaagaagagcuaugaccggcagcgauggggcuuccggcgcgcggcgcaggcccccgacggcgccuccgagccccgagcguccgcgucgcgcccgcagccagcgcccgccgacggagccgacccgccgcccgccgaggagcccgaggcccggcccgacggcgaggguucuccggguaaggccaggcccgggaccgcccgcaggcccggggcagccgcgucgggggaacgggacgaccggggaccccccgccagcguggcggcgcucagguccaacuucgagcggauccgcaagggccauggccagcccggggcggacgccgagaagcccuucuacgugaacgucgaguuucaccacgagcgcggccuggugaaggucaacgacaaagaggugucggaccgcaucagcucccugggcagccaggccaugcagauggagcgcaaaaagucccagcacggcgcgggcucgagcgugggggaugcauccaggcccccuuaccggggacgcuccucggagagcagcugcggcgucgacggcgacuacgaggacgccgaguugaacccccgcuuccugaaggacaaccugaucgacgccaauggcgguagcaggcccccuuggccgccccuggaguaccagcccuaccagagcaucuacgucgggggcaugauggaaggggagggcaagggcccgcuccugcgcagccagagcaccucugagcaggagaagcgccuuaccuggccccgcagguccuacuccccccggaguuuugaggauugcggaggcggcuauaccccggacugcagcuccaaugagaaccucaccuccagcgaggaggacuucuccucuggccaguccagccgcguguccccaagccccaccaccuaccgcauguuccgggacaaaagccgcucucccucgcagaacucgcaacaguccuucgacagcagcaguccccccacgccgcagugccauaagcggcaccggcacugcccgguugucguguccgaggccaccaucgugggcguccgcaagaccgggcagaucuggcccaacgauggcgagggcgccuuccauggagacgcagauggcucguucggaacaccaccuggauacggcugcgcugcagaccgggcagaggagcagcgccggcaccaagaugggcugcccuacauugaugacucgcccuccucaucgccccaccucagcagcaagggcaggggcagccgggaugcgcuggucucgggagcccuggaguccacuaaagcgagugagcuggacuuggaaaagggcuuggagaugagaaaaugggacccagugaaaaugaccccaaccuuuucguugcacuguaugauuuuguggccaguggagauaacacucuaa

SEQ ID NO: 532 - RNA, 1398 nt, Artificial Sequence
  ABX82707
augguggacccggugggcuucgcggaggcguggaaggcgcaguucccggacucagagcccccgcgcauggagcugcgcucagugggcgacaucgagcaggagcuggagcgcugcaaggccuccauucggcgccuggagcaggaggugaaccaggagcgcuuccgcaugaucuaccugcagacguugcuggccaaggaaaagaagagcuaugaccggcagcgauggggcuuccggcgcgcggcgcaggcccccgacggcgccuccgagccccgagcguccgcgucgcgcccgcagccagcgcccgccgacggagccgacccgccgcccgccgaggagcccgaggcccggcccgacggcgaggguucuccggguaaggccaggcccgggaccgcccgcaggcccggggcagccgcgucgggggaacgggacgaccggggaccccccgccagcguggcggcgcucagguccaacuucgagcggauccgcaagggccauggccagcccggggcggacgccgagaagcccuucuacgugaacgucgaguuucaccacgagcgcggccuggugaaggucaacgacaaagaggugucggaccgcaucagcucccugggcagccaggccaugcagauggagcgcaaaaagucccagcacggcgcgggcucgagcgugggggaugcauccaggcccccuuaccggggacgcuccucggagagcagcugcggcgucgacggcgacuacgaggacgccgaguugaacccccgcuuccugaaggacaaccugaucgacgccaauggcgguagcaggcccccuuggccgccccuggaguaccagcccuaccagagcaucuacgucgggggcaugauggaaggggagggcaagggcccgcuccugcgcagccagagcaccucugagcaggagaagcgccuuaccuggccccgcagguccuacuccccccggaguuuugaggauugcggaggcggcuauaccccggacugcagcuccaaugagaaccucaccuccagcgaggaggacuucuccucuggccaguccagccgcguguccccaagccccaccaccuaccgcauguuccgggacaaaagccgcucucccucgcagaacucgcaacaguccuucgacagcagcaguccccccacgccgcagugccauaagcggcaccggcacugcccgguugucguguccgaggccaccaucgugggcguccgcaagaccgggcagaucuggcccaacgauggcgagggcgccuuccauggagaacauccgggagcagcagaagaaguguuucagaagcuucucccugacauccguggagcugcagaugcugaccaacucgugugugaaacuccagacuguccacagcauuccgcugaccaucaauaa

SEQ ID NO: 533 - RNA, 1377 nt, Artificial Sequence
  ABX82709
augguggacccggugggcuucgcggaggcguggaaggcgcaguucccggacucagagcccccgcgcauggagcugcgcucagugggcgacaucgagcaggagcuggagcgcugcaaggccuccauucggcgccuggagcaggaggugaaccaggagcgcuuccgcaugaucuaccugcagacguugcuggccaaggaaaagaagagcuaugaccggcagcgauggggcuuccggcgcgcggcgcaggcccccgacggcgccuccgagccccgagcguccgcgucgcgcccgcagccagcgcccgccgacggagccgacccgccgcccgccgaggagcccgaggcccggcccgacggcgaggguucuccggguaaggccaggcccgggaccgcccgcaggcccggggcagccgcgucgggggaacgggacgaccggggaccccccgccagcguggcggcgcucagguccaacuucgagcggauccgcaagggccauggccagcccggggcggacgccgagaagcccuucuacgugaacgucgaguuucaccacgagcgcggccuggugaaggucaacgacaaagaggugucggaccgcaucagcucccugggcagccaggccaugcagauggagcgcaaaaagucccagcacggcgcgggcucgagcgugggggaugcauccaggcccccuuaccggggacgcuccucggagagcagcugcggcgucgacggcgacuacgaggacgccgaguugaacccccgcuuccugaaggacaaccugaucgacgccaauggcgguagcaggcccccuuggccgccccuggaguaccagcccuaccagagcaucuacgucgggggcaugauggaaggggagggcaagggcccgcuccugcgcagccagagcaccucugagcaggagaagcgccuuaccuggccccgcagguccuacuccccccggaguuuugaggauugcggaggcggcuauaccccggacugcagcuccaaugagaaccucaccuccagcgaggaggacuucuccucuggccaguccagccgcguguccccaagccccaccaccuaccgcauguuccgggacaaaagccgcucucccucgcagaacucgcaacaguccuucgacagcagcaguccccccacgccgcagugccauaagcggcaccggcacugcccgguugucguguccgaggccaccaucgugggcguccgcaagaccgggcagaucuggcccaacgauggcgagggcgccuuccauggagacgcagauggcucguucggaacaccaccuggauacugcugcuuaugucucccagcauggccuucagggugcacagccgcaacggcaagaguuacacguuccuga

SEQ ID NO: 534 - RNA, 1365 nt, Artificial Sequence
  ABX82710
augguggacccggugggcuucgcggaggcguggaaggcgcaguucccggacucagagcccccgcgcauggagcugcgcucagugggcgacaucgagcaggagcuggagcgcugcaaggccuccauucggcgccuggagcaggaggugaaccaggagcgcuuccgcaugaucuaccugcagacguugcuggccaaggaaaagaagagcuaugaccggcagcgauggggcuuccggcgcgcggcgcaggcccccgacggcgccuccgagccccgagcguccgcgucgcgcccgcagccagcgcccgccgacggagccgacccgccgcccgccgaggagcccgaggcccggcccgacggcgaggguucuccggguaaggccaggcccgggaccgcccgcaggcccggggcagccgcgucgggggaacgggacgaccggggaccccccgccagcguggcggcgcucagguccaacuucgagcggauccgcaagggccauggccagcccggggcggacgccgagaagcccuucuacgugaacgucgaguuucaccacgagcgcggccuggugaaggucaacgacaaagaggugucggaccgcaucagcucccugggcagccaggccaugcagauggagcgcaaaaagucccagcacggcgcgggcucgagcgugggggaugcauccaggcccccuuaccggggacgcuccucggagagcagcugcggcgucgacggcgacuacgaggacgccgaguugaacccccgcuuccugaaggacaaccugaucgacgccaauggcgguagcaggcccccuuggccgccccuggaguaccagcccuaccagagcaucuacgucgggggcaugauggaaggggagggcaagggcccgcuccugcgcagccagagcaccucugagcaggagaagcgccuuaccuggccccgcagguccuacuccccccggaguuuugaggauugcggaggcggcuauaccccggacugcagcuccaaugagaaccucaccuccagcgaggaggacuucuccucuggccaguccagccgcguguccccaagccccaccaccuaccgcauguuccgggacaaaagccgcucucccucgcagaacucgcaacaguccuucgacagcagcaguccccccacgccgcagugccauaagcggcaccggcacugcccgguugucguguccgaggccaccaucgugggcguccgcaagaccgggcagaucuggcccaacgauggcgagggcgccuuccauggagacgcagauggcucguucggaacaccaccuggauacggcugcgcugcaggacgcccuccgcaucucacagaacuuccuguccagcaucaauga

SEQ ID NO: 535 - RNA, 1404 nt, Artificial Sequence
  ABX82711
augguggacccggugggcuucgcggaggcguggaaggcgcaguucccggacucagagcccccgcgcauggagcugcgcucagugggcgacaucgagcaggagcuggagcgcugcaaggccuccauucggcgccuggagcaggaggugaaccaggagcgcuuccgcaugaucuaccugcagacguugcuggccaaggaaaagaagagcuaugaccggcagcgauggggcuuccggcgcgcggcgcaggcccccgacggcgccuccgagccccgagcguccgcgucgcgcccgcagccagcgcccgccgacggagccgacccgccgcccgccgaggagcccgaggcccggcccgacggcgaggguucuccggguaaggccaggcccgggaccgcccgcaggcccggggcagccgcgucgggggaacgggacgaccggggaccccccgccagcguggcggcgcucagguccaacuucgagcggauccgcaagggccauggccagcccggggcggacgccgagaagcccuucuacgugaacgucgaguuucaccacgagcgcggccuggugaaggucaacgacaaagaggugucggaccgcaucagcucccugggcagccaggccaugcagauggagcgcaaaaagucccagcacggcgcgggcucgagcgugggggaugcauccaggcccccuuaccggggacgcuccucggagagcagcugcggcgucgacggcgacuacgaggacgccgaguugaacccccgcuuccugaaggacaaccugaucgacgccaauggcgguagcaggcccccuuggccgccccuggaguaccagcccuaccagagcaucuacgucgggggcaugauggaaggggagggcaagggcccgcuccugcgcagccagagcaccucugagcaggagaagcgccuuaccuggccccgcagguccuacuccccccggaguuuugaggauugcggaggcggcuauaccccggacugcagcuccaaugagaaccucaccuccagcgaggaggacuucuccucuggccaguccagccgcguguccccaagccccaccaccuaccgcauguuccgggacaaaagccgcucucccucgcagaacucgcaacaguccuucgacagcagcaguccccccacgccgcagugccauaagcggcaccggcacugcccgguugucguguccgaggccaccaucgugggcguccgcaagaccgggcagaucuggcccaacgauggcgagggcgccuuccauggagacgcaguucugaagacugaagucccacaucaagguguccgcagggccaggcugucucuggaggcucuaggggaggauccuuccuuucuguucccagcaucugauggcccacggcauuccucgaccugguga

SEQ ID NO: 536 - RNA, 1542 nt, Artificial Sequence
  ABX82712
augguggacccggugggcuucgcggaggcguggaaggcgcaguucccggacucagagcccccgcgcauggagcugcgcucagugggcgacaucgagcaggagcuggagcgcugcaaggccuccauucggcgccuggagcaggaggugaaccaggagcgcuuccgcaugaucuaccugcagacguugcuggccaaggaaaagaagagcuaugaccggcagcgauggggcuuccggcgcgcggcgcaggcccccgacggcgccuccgagccccgagcguccgcgucgcgcccgcagccagcgcccgccgacggagccgacccgccgcccgccgaggagcccgaggcccggcccgacggcgaggguucuccggguaaggccaggcccgggaccgcccgcaggcccggggcagccgcgucgggggaacgggacgaccggggaccccccgccagcguggcggcgcucagguccaacuucgagcggauccgcaagggccauggccagcccggggcggacgccgagaagcccuucuacgugaacgucgaguuucaccacgagcgcggccuggugaaggucaacgacaaagaggugucggaccgcaucagcucccugggcagccaggccaugcagauggagcgcaaaaagucccagcacggcgcgggcucgagcgugggggaugcauccaggcccccuuaccggggacgcuccucggagagcagcugcggcgucgacggcgacuacgaggacgccgaguugaacccccgcuuccugaaggacaaccugaucgacgccaauggcgguagcaggcccccuuggccgccccuggaguaccagcccuaccagagcaucuacgucgggggcaugauggaaggggagggcaagggcccgcuccugcgcagccagagcaccucugagcaggagaagcgccuuaccuggccccgcagguccuacuccccccggaguuuugaggauugcggaggcggcuauaccccggacugcagcuccaaugagaaccucaccuccagcgaggaggacuucuccucuggccaguccagccgcguguccccaagccccaccaccuaccgcauguuccgggacaaaagccgcucucccucgcagaacucgcaacaguccuucgacagcagcaguccccccacgccgcagugccauaagcggcaccggcacugcccgguugucguguccgaggccaccaucgugggcguccgcaagaccgggcagaucuggcccaacgauggcgagggcgccuuccauggagacgcagauggcucguucggaacaccaccuggauacggcugcgcugcagaccgggcagaggagcagcgccggcaccaagaugggcugcccuacauugaugacucgcccuccucaucgccccaccucagcagcaagggcaggggcagccgggaugcgcuggucucgggagcccuggaguccacuaaagcgagugagcuggacccagugaaaaugaccccaaccuuuucguugcacuguaugauuuuguggccaguggagauaacacucuaa

SEQ ID NO: 537 - RNA, 1221 nt, Artificial Sequence
  ABX82714
augguggacccggugggcuucgcggaggcguggaaggcgcaguucccggacucagagcccccgcgcauggagcugcgcucagugggcgacaucgagcaggagcuggagcgcugcaaggccuccauucggcgccuggagcaggaggugaaccaggagcgcuuccgcaugaucuaccugcagacguugcuggccaaggaaaagaagagcuaugaccggcagcgauggggcuuccggcgcgcggcgcaggcccccgacggcgccuccgagccccgagcguccgcgucgcgcccgcagccagcgcccgccgacggagccgacccgccgcccgccgaggagcccgaggcccggcccgacggcgaggguucuccggguaaggccaggcccgggaccgcccgcaggcccggggcagccgcgucgggggaacgggacgaccggggaccccccgccagcguggcggcgcucagguccaacuucgagcggauccgcaagggccauggccagcccggggcggacgccgagaagcccuucuacgugaacgucgaguuucaccacgagcgcggccuggugaaggucaacgacaaagaggugucggaccgcaucagcucccugggcagccaggccaugcagauggagcgcaaaaagucccagcacggcgcgggcucgagcgugggggaugcauccaggcccccuuaccggggacgcuccucggagagcagcugcggcgucgacggcgacuacgaggacgccgaguugaacccccgcuuccugaaggacaaccugaucgacgccaauggcgguagcaggcccccuuggccgccccuggaguaccagcccuaccagagcaucuacgucgggggcaugauggaaggggagggcaagggcccgcuccugcgcagccagagcaccucugagcaggagaagcgccuuaccuggccccgcagguccuacuccccccggaguuuugaggauugcggaggcggcuauaccccggacugcagcuccaaugagaaccucaccuccagcgaggaggacuucuccucuggccaguccagccgcguguccccaagccccaccaccuaccgcauguuccgggacaaaagccgcucucccucgcagaacucgcaacaguccuucgacagcagcaguccccccacgccgcagugccauaagcggcaccggcacugcccgguugucguguccgaggccaccagcggccaguag

SEQ ID NO: 538 - RNA, 2346 nt, Artificial Sequence
  AAH58926
auggcuacucaagcugauuugauggaguuggacauggccauggaaccagacagaaaagcggcuguuagucacuggcagcaacagucuuaccuggacucuggaauccauucuggugccacuaccacagcuccuucucugagugguaaaggcaauccugaggaagaggauguggauaccucccaaguccuguaugagugggaacagggauuuucucaguccuucacucaagaacaaguagcugauauugauggacaguaugcaaugacucgagcucagaggguacgagcugcuauguucccugagacauuagaugagggcaugcagaucccaucuacacaguuugaugcugcucaucccacuaauguccagcguuuggcugaaccaucacagaugcugaaacaugcaguuguaaacuugauuaacuaucaagaugaugcagaacuugccacacgugcaaucccugaacugacaaaacugcuaaaugacgaggaccagguggugguuaauaaggcugcaguuaugguccaucagcuuucuaaaaaggaagcuuccagacacgcuaucaugcguucuccucagauggugucugcuauuguacguaccaugcagaauacaaaugauguagaaacagcucguuguaccgcugggaccuugcauaaccuuucccaucaucgugagggcuuacuggccaucuuuaagucuggaggcauuccugcccuggugaaaaugcuugguucaccaguggauucuguguuguuuuaugccauuacaacucuccacaaccuuuuauuacaucaagaaggagcuaaaauggcagugcguuuagcuggugggcugcagaaaaugguugccuugcucaacaaaacaaauguuaaauucuuggcuauuacgacagacugccuucaaauuuuagcuuauggcaaccaagaaagcaagcucaucauacuggcuagugguggaccccaagcuuuaguaaauauaaugaggaccuauacuuacgaaaaacuacuguggaccacaagcagagugcugaaggugcuaucugucugcucuaguaauaagccggcuauuguagaagcugguggaaugcaagcuuuaggacuucaccugacagauccaagucaacgucuuguucagaacugucuuuggacucucaggaaucuuucagaugcugcaacuaaacaggaagggauggaaggucuccuugggacucuuguucagcuucuggguucagaugauauaaauguggucaccugugcagcuggaauucuuucuaaccucacuugcaauaauuauaagaacaagaugauggucugccaagugggugguauagaggcucuugugcguacuguccuucgggcuggugacagggaagacaucacugagccugccaucugugcucuucgucaucugaccagccgacaccaagaagcagagauggcccagaaugcaguucgccuucacuauggacuaccaguugugguuaagcucuuacacccaccaucccacuggccucugauaaaggcuacuguuggauugauucgaaaucuugcccuuugucccgcaaaucaugcaccuuugcgugagcagggugccauuccacgacuaguucaguugcuuguucgugcacaucaggauacccagcgccguacguccaugggugggacacagcagcaauuuguggaggggguccgcauggaagaaauaguugaagguuguaccggagcccuucacauccuagcucgggauguucacaaccgaauuguuaucagaggacuaaauaccauuccauuguuugugcagcugcuuuauucucccauugaaaacauccaaagaguagcugcagggguccucugugaacuugcucaggacaaggaagcugcagaagcuauugaagcugagggagccacagcuccucugacagaguuacuucacucuaggaaugaagguguggcgacauaugcagcugcuguuuuguuccgaaugucugaggacaagccacaagauuacaagaaacggcuuucaguugagcugaccagcucucucuucagaacagagccaauggcuuggaaugagacugcugaucuuggacuugauauuggugcccagggagaaccccuuggauaucgccaggaugauccuagcuaucguucuuuucacucugguggauauggccaggaugccuuggguauggaccccaugauggaacaugagauggguggccaccacccuggugcugacuauccaguugaugggcugccagaucuggggcaugcccaggaccucauggaugggcugccuccaggugacagcaaucagcuggccugguuugauacugaccuguaa

SEQ ID NO: 539 - RNA, 1692 nt, Artificial Sequence
  AAI21007
auggacgugggcgaacuucugagcuaccagcccaauaggggcacaaaacguccccgggaugaugaagaggaggagcagaagaugcgucggaaacaaacugguacucgagaacgcggccgcuaucgggaagaagaaaugacugugguggaggaagcggaugaugacaaaaaaaggcugcugcagauuauugacagagauggggaagaggaagaggaagaggaggagccauuggaugaaagcucagugaagaaaaugauccucacauuugaaaagagaucauauaaaaaccaagaauugcggauuaaguuuccagacaauccagagaaguucauggaauccgagcuggaccuaaaugacaucauucaggagaugcacgugguggccaccaugccagaccuguaccaccuucugguggagcugaaugcuguacagucgcuucucggcuugcucggacacgauaauacagauguguccauagcuguggucgauuugcuucaggaauuaacagauauagacacccuccaugagagugaagagggagcagaagugcucaucgaugcucugguggaugggcaggugguagcacugcugguacagaaucuggagcgccuggaugagucugugaaagaggaggcagauggcguccacaacacucuggcuauuguggaaaacauggcugaguuccggccugagauguguacagagggugcccagcagggucuucuacaguggcuguugaagaggcugaaggcaaagaugccuuuugaugccaacaaacuguauugcagugaagugcuggccauauugcuccaggacaaugaugaaaacagggaauugcuuggggagcuggauggaaucgaugugcuucuucagcaguuauccguguuuaaaagacacaaucccagcacggcugaggagcaggagaugauggagaaucuguuugauucccucugcuccugucuaaugcuuaguuccaaucgugagcgcuuccugaagggcgagggucuucagcugaugaaucucaugcucagggaaaagaagaucucccggagcagugcccugaaagugcuggaccaugccaugauuggccccgaaggcacagacaacugccauaaguuuguugacauucuuggcuuacgaaccaucuuuccccucuuuaugaaaucucccaggaagaucaagaaagugggaaccacugagaaggaacaugaagagcaugucuguucgauccuggcuucccuccugcggaaccugagagggcagcagcggacccggcuucugaauaaauucacugaaaaugacagugagaagguugacagacuaauggaguugcauuuuaaauaucugggugcaaugcagguggcggacaagaagauugaaggggaaaaacacgacaugguccggcgaggagagaucaucgacaaugacaccgaggaggaguucuaccuccggcgccuggaugcggggcucuuuguucuccagcacaucugcuacaucauggccgagaucugcaaugccaaugucccccagauucgccagaggguucaccagauccuaaacaugcgaggaagcuccaucaaaauugucaggcauaucaucaaggaguaugcagagaacaucggggacggccggagcccggaguuccgggagaacgagcaaaagcgcauccugggcuugcuggagaacuucuag

SEQ ID NO: 540 - RNA, 1833 nt, Artificial Sequence
  CCDS4772.1
auggagacagcccccaagccgggcaaggaugucccgcccaagaaagacaaacuucagaccaagagaaagaaaccgcggcgauacugggaggaagagaccguuccgaccacagccggagccucuccagggccuccucguaacaagaagaaucgggagcuccguccucagagaccaaaaaaugcuuacaucuuaaagaagucucggaucucuaagaagccucaggucccgaagaaaccccgagaauggaagaacccggagucccagcgcggcuuguccgggacccaagauccauucccaggccccgcccccgucccuguggaagugguccagaaguucugucgcauugacaaaucccgaaagcuaccacauucuaaagccaaaacucgaagccgacuugagguggcugaagcugaggaagaggaaacaaguaucaaagcugcucguucugagcugcugcuugcugaagaaccuggguuucuggaaggggaggauggggaagacacagcaaagauaugccaggcugacauuguggaggcuguggacauugcaagugcagccaagcacuuugacuugaaucugcggcaguuuggacccuacagacuaaacuacucucgaacuggaagacaccuggcuuuuggagggcgccgaggucauguggcugcccuugauuggguaacaaagaagcuuaugugcgagaucaacgucauggaggcggugcgggacauccgguuucuccauucugaggcacugcuugcuguugcucagaaccgcuggcuccacaucuaugacaaucagggcauugagcuccacuguauccgccgcugugaccgaguaacacggcuugaguuccugcccuuccacuuccuccuggcuacagcuucagaaacaggguuucuaaccuaccuggaugugucaguggggaagauuguggcagcucugaaugcucgagcugggcggcucgauguuaugagucagaacccuuacaaugccgucauccaucucggacacagcaaugguacugugucuuuauggaguccagcuaugaaggagccacuggcaaagauucucugucaucguggugggguccgggcuguggcaguagauucuacaggcacguacauggccaccucuggccuagaccaccagcugaagaucuuugacuugcgagggacguaccagccucugagcacucggacccugccccauggagcagggcaccuggccuucucccagaggggacugcugguggcgggaaugggugacguugucaacaucugggcagggcagggcaaggccagcccacccucccuugaacagcccuaccucacccaccggcucucaggcccugugcauggccuucaguucugccccuuugaagaugugcuggggguggggcacacugggggcaucaccagcaugcuggucccuggggccggugagcccaacuucgauggccuggagaguaauccauacagaagccggaagcagcgccaggagugggaggugaaggcccugcuagagaagguaccugcagagcuuauuugucuggacccacgagcccuggccgagguggaugucaucucccuggagcagggaaagaaggagcagauagagaggcugggcuaugacccgcaggcuaaggcucccuuccagccaaagccaaagcagaagggccgcagcuccacggcaagccuggugaagaggaagaggaaggucauggaugaggaacacagggacaagguccggcagagccuucagcagcagcaucauaaggaggcgaaggccaagcccacgggggcccggccaucugcccuggacagauuugugcgcuga

SEQ ID NO: 541 - RNA, 897 nt, Artificial Sequence
  AAG37878
augggaccuaaagacagugccaagugccugcaccguggaccacagccgagccacugggcagccggugauggucccacgcaggagcgcuguggaccccgcucucugggcagcccuguccuaggccuggacaccugcagagccugggaccacguggaugggcagauccugggccagcugcggccccugacagaggaggaagaggaggagggcgccggggccaccuuguccagggggccugccuuccccggcaugggcucugaggaguugcgucuggccuccuucuaugacuggccgcugacugcugaggugccacccgagcugcuggcugcugccggcuucuuccacacaggccaucaggacaaggugaggugcuucuucugcuaugggggccugcagagcuggaagcgcggggacgaccccuggacggagcaugccaagugguuccccagcugucaguuccugcuccggucaaaaggaagagacuuuguccacagugugcaggagacucacucccagcugcugggcucuugggacccgugggaagaaccggaagacgcagccccuguggcccccuccgucccugccucuggguacccugagcugcccacacccaggagagagguccagucugaaagugcccaggagccaggaggggucaguccagccgaggcccagagggcgugguggguucuugagcccccaggagccagggauguggaggcgcagcugcggcggcugcaggaggagaggacgugcaaggugugccuggaccgcgccguguccaucgucuuugugccgugcggccaccuggucugugcugagugugcccccggccugcagcugugccccaucugcagagcccccguccgcagccgcgugcgcaccuuccuguccuag

SEQ ID NO: 542 - RNA, 2280 nt, Artificial Sequence
  EAW60925
auggauuuaucugcucuucgcguugaagaaguacaaaaugucauuaaugcuaugcagaaaaucuuagagugucccaucugucuggaguugaucaaggaaccugucuccacaaagugugaccacauauuuugcaaauuuugcaugcugaaacuucucaaccagaagaaagggccuucacaguguccuuuauguaagaaugauauaaccaaaaggagccuacaagaaaguacgagauuuagucaacuuguugaagagcuauugaaaaucauuugugcuuuucagcuugacacagguuuggaguaugcaaacagcuauaauuuugcaaaaaaggaaaauaacucuccugaacaucuaaaagaugaaguuucuaucauccaaaguaugggcuacagaaaccgugccaaaagacuucuacagagugaacccgaaaauccuuccuugcaggaaaccagucucaguguccaacucucuaaccuuggaacugugagaacucugaggacaaagcagcggauacaaccucaaaagacgucugucuacauugaauugggaucugauucuucugaagauaccguuaauaaggcaacuuauugcagugugggagaucaagaauuguuacaaaucaccccucaaggaaccagggaugaaaucaguuuggauucugcaaaaaaggcugcuugugaauuuucugagacggauguaacaaauacugaacaucaucaacccaguaauaaugauuugaacaccacugagaagcgugcagcugagaggcauccagaaaaguaucagggugaagcagcaucugggugugagagugaaacaagcgucucugaagacugcucagggcuauccucucagagugacauuuuaaccacucagcagagggauaccaugcaacauaaccugauaaagcuccagcaggaaauggcugaacuagaagcuguguuagaacagcaugggagccagccuucuaacagcuacccuuccaucauaagugacucuucugcccuugaggaccugcgaaauccagaacaaagcacaucagaaaaaguauuaacuucacagaaaaguagugaauacccuauaagccagaauccagaaggccuuucugcugacaaguuugaggugucugcagauaguucuaccaguaaaaauaaagaaccaggaguggaaaggucauccccuucuaaaugcccaucauuagaugauaggugguacaugcacaguugcucugggagucuucagaauagaaacuacccaucucaagaggagcucauuaagguuguugauguggaggagcaacagcuggaagagucugggccacacgauuugacggaaacaucuuacuugccaaggcaagaucuagagggaaccccuuaccuggaaucuggaaucagccucuucucugaugacccugaaucugauccuucugaagacagagccccagagucagcucguguuggcaacauaccaucuucaaccucugcauugaaaguuccccaauugaaaguugcagaaucugcccagaguccagcugcugcucauacuacugauacugcuggguauaaugcaauggaagaaagugugagcagggagaagccagaauugacagcuucaacagaaagggucaacaaaagaauguccaugguggugucuggccugaccccagaagaauuuaugcucguguacaaguuugccagaaaacaccacaucacuuuaacuaaucuaauuacugaagagacuacucauguuguuaugaaaacagaugcugaguuugugugugaacggacacugaaauauuuucuaggaauugcgggaggaaaauggguaguuagcuauuucugggugacccagucuauuaaagaaagaaaaaugcugaaugagcaugauuuugaagucagaggagauguggucaauggaagaaaccaccaagguccaaagcgagcaagagaaucccaggacagaaagaucuucagggggcuagaaaucuguugcuaugggcccuucaccaacaugcccacagaucaacuggaauggaugguacagcuguguggugcuucuguggugaaggagcuuucaucauucacccuuggcacagguguccacccaauugugguugugcagccagaugccuggacagaggacaauggcuuccaugcaauugggcagaugugugaggcaccuguggugacccgagaguggguguuggacaguguagcacucuaccagugccaggagcuggacaccuaccugauaccccagaucccccacagccacuacuga

SEQ ID NO: 543 - RNA, 2160 nt, Artificial Sequence
  EAW60922
auggauuuaucugcucuucgcguugaagaaguacaaaaugucauuaaugcuaugcagaaaaucuuagagugucccaucugucuggaguugaucaaggaaccugucuccacaaagugugaccacauauuuugcaaauuuugcaugcugaaacuucucaaccagaagaaagggccuucacaguguccuuuauguaagaaugauauaaccaaaaggagccuacaagaaaguacgagauuuagucaacuuguugaagagcuauugaaaaucauuugugcuuuucagcuugacacagguuuggaguaugcaaacagcuauaauuuugcaaaaaaggaaaauaacucuccugaacaucuaaaagaugaaguuucuaucauccaaaguaugggcuacagaaaccgugccaaaagacuucuacagagugaacccgaaaauccuuccuugcaggaaaccagucucaguguccaacucucuaaccuuggaacugugagaacucugaggacaaagcagcggauacaaccucaaaagacgucugucuacauugaauuggcugcuugugaauuuucugagacggauguaacaaauacugaacaucaucaacccaguaauaaugauuugaacaccacugagaagcgugcagcugagaggcauccagaaaaguaucagggugaagcagcaucugggugugagagugaaacaagcgucucugaagacugcucagggcuauccucucagagugacauuuuaaccacucagcagagggauaccaugcaacauaaccugauaaagcuccagcaggaaauggcugaacuagaagcuguguuagaacagcaugggagccagccuucuaacagcuacccuuccaucauaagugacucuucugcccuugaggaccugcgaaauccagaacaaagcacaucagaaaaagcaguauuaacuucacagaaaaguagugaauacccuauaagccagaauccagaaggccuuucugcugacaaguuugaggugucugcagauaguucuaccaguaaaaauaaagaaccaggaguggaaaggucauccccuucuaaaugcccaucauuagaugauaggugguacaugcacaguugcucugggagucuucagaauagaaacuacccaucucaagaggagcucauuaagguuguugauguggaggagcaacagcuggaagagucugggccacacgauuugacggaaacaucuuacuugccaaggcaagaucuagagggaaccccuuaccuggaaucuggaaucagccucuucucugaugacccugaaucugauccuucugaagacagagccccagagucagcucguguuggcaacauaccaucuucaaccucugcauugaaaguuccccaauugaaaguugcagaaucugcccagaguccagcugcugcucauacuacugauacugcuggguauaaugcaauggaagaaagugugagcagggagaagccagaauugacagcuucaacagaaagggucaacaaaagaauguccaugguggugucuggccugaccccagaagaauuuaugcucguguacaaguuugccagaaaacaccacaucacuuuaacuaaucuaauuacugaagagacuacucauguuguuaugaaaacagaugcugaguuugugugugaacggacacugaaauauuuucuaggaauugcgggaggaaaauggguaguuagcuauuucugggugacccagucuauuaaagaaagaaaaaugcugaaugagcaugauuuugaagucagaggagauguggucaauggaagaaaccaccaagguccaaagcgagcaagagaaucccaggacagaaagaucuucagggggcuagaaaucuguugcuaugggcccuucaccaacaugcccacagaucaacuggaauggaugguacagcuguguggugcuucuguggugaaggagcuuucaucauucacccuuggcacagguguccacccaauugugguugugcagccagaugccuggacagaggacaauggcuuccaugcaauugggcagaugugugaggcaccuguggugacccgagaguggguguuggacaguguagcacucuaccagugccaggagcuggacaccuaccugauaccccagaucccccacagccacuacuga

SEQ ID NO: 544 - RNA, 2166 nt, Artificial Sequence
  EAW60923
auggauuuaucugcucuucgcguugaagaaguacaaaaugucauuaaugcuaugcagaaaaucuuagagugucccaucugucuggaguugaucaaggaaccugucuccacaaagugugaccacauauuuugcaaauuuugcaugcugaaacuucucaaccagaagaaagggccuucacaguguccuuuauguaagaaugauauaaccaaaaggagccuacaagaaaguacgagauuuagucaacuuguugaagagcuauugaaaaucauuugugcuuuucagcuugacacagguuuggaguaugcaaacagcuauaauuuugcaaaaaaggaaaauaacucuccugaacaucuaaaagaugaaguuucuaucauccaaaguaugggcuacagaaaccgugccaaaagacuucuacagagugaacccgaaaauccuuccuugcaggaaaccagucucaguguccaacucucuaaccuuggaacugugagaacucugaggacaaagcagcggauacaaccucaaaagacgucugucuacauugaauugggaucugauucuucugaagauaccguuaauaaggcaacuuauugcagugugggagaucaagaauuguuacaaaucaccccucaaggaaccagggaugaaaucaguuuggauucugcaaaaaagggugaagcagcaucugggugugagagugaaacaagcgucucugaagacugcucagggcuauccucucagagugacauuuuaaccacucagcagagggauaccaugcaacauaaccugauaaagcuccagcaggaaauggcugaacuagaagcuguguuagaacagcaugggagccagccuucuaacagcuacccuuccaucauaagugacucuucugcccuugaggaccugcgaaauccagaacaaagcacaucagaaaaagcaguauuaacuucacagaaaaguagugaauacccuauaagccagaauccagaaggccuuucugcugacaaguuugaggugucugcagauaguucuaccaguaaaaauaaagaaccaggaguggaaaggucauccccuucuaaaugcccaucauuagaugauaggugguacaugcacaguugcucugggagucuucagaauagaaacuacccaucucaagaggagcucauuaagguuguugauguggaggagcaacagcuggaagagucugggccacacgauuugacggaaacaucuuacuugccaaggcaagaucuagagggaaccccuuaccuggaaucuggaaucagccucuucucugaugacccugaaucugauccuucugaagacagagccccagagucagcucguguuggcaacauaccaucuucaaccucugcauugaaaguuccccaauugaaaguugcagaaucugcccagaguccagcugcugcucauacuacugauacugcuggguauaaugcaauggaagaaagugugagcagggagaagccagaauugacagcuucaacagaaagggucaacaaaagaauguccaugguggugucuggccugaccccagaagaauuuaugcucguguacaaguuugccagaaaacaccacaucacuuuaacuaaucuaauuacugaagagacuacucauguuguuaugaaaacagaugcugaguuugugugugaacggacacugaaauauuuucuaggaauugcgggaggaaaauggguaguuagcuauuucugggugacccagucuauuaaagaaagaaaaaugcugaaugagcaugauuuugaagucagaggagauguggucaauggaagaaaccaccaagguccaaagcgagcaagagaaucccaggacagaaagaucuucagggggcuagaaaucuguugcuaugggcccuucaccaacaugcccacagaucaacuggaauggaugguacagcuguguggugcuucuguggugaaggagcuuucaucauucacccuuggcacagguguccacccaauugugguugugcagccagaugccuggacagaggacaauggcuuccaugcaauugggcagaugugugaggcaccuguggugacccgagaguggguguuggacaguguagcacucuaccagugccaggagcuggacaccuaccugauaccccagaucccccacagccacuacuga

SEQ ID NO: 545 - RNA, 36 nt, Artificial Sequence
  AIC83575
auggauuuaucugcucuucgcguugaagaaguauaa

SEQ ID NO: 546 - RNA, 522 nt, Artificial Sequence
  ABC59810
auggaugcugaguuugugugugaacggacacugaaauauuuucuaggaauugcgggaggaaaauggguaguuagcuauuucugggugacccagucuauuaaagaaagaaaaaugcugaaugagcaugauuuugaagucagaggagauguggucaauggaagaaaccaccaagguccaaagcgagcaagagaaucccaggacagaaagaucuucagggggcuagaaaucuguugcuaugggcccuucaccaacaugcccacagaucaacuggaauggaugguacagcuguguggugcuucuguggugaaggagcuuucaucauucacccuuggcacagguguccacccaauugugguugugcagccagaugccuggacagaggacaauggcuuccaugcaauugggcagaugugugaggcaccuguggugacccgagaguggguguuggacaguguagcacucuaccagugccaggagcuggacaccuaccugauaccccagaucccccacagccacuacuga

SEQ ID NO: 547 - RNA, 1065 nt, Artificial Sequence
  ABC88652
augcacaguugcucugggagucuucagaauagaaacuacccaucucaagaggagcucauuaagguuguugauguggaggagcaacagcuggaagagucugggccacacgauuugacggaaacaucuuacuugccaaggcaagaucuagagggaaccccuuaccuggaaucuggaaucagccucuucucugaugacccugaaucugauccuucugaagacagagccccagagucagcucguguuggcaacauaccaucuucaaccucugcauugaagguuccccaauugaaaguugcagaaucugcccaggguccagcugcugcucacacuacugauacugcuggguauaaugcaauggaagaaagugugagcagggagaagccagaauugacagcuucaacagaaagggucaacaaaagaauguccaugguggugucuggccugaccccagaagaauuuaugcucguguacaaguuugccagaaaacaccacaucacuuuaacuaaucuaauuacugaagagacuacucauguuguuaugaaaacagaugcugaguuugugugugaacggacacugaaauauuuucuaggaauugcgggaggaaaauggguaguuagcuauuucugggugacccagucuauuaaagaaagaaaaaugcugaaugagcaugauuuugaagucagaggagauguggucaauggaagaaaccaccaagguccaaagcgagcaagagaaucccaggacagaaagaucuucagggggcuagaaaucuguugcuaugggcccuucaccaacaugcccacagaucaacuggaauggaugguacagcuguguggugcuucuguggugaaggagcuuucaucauucacccuuggcacagguguccacccaauugugguugugcagccagaugccuggacagaggacaauggcuuccaugcaauugggcagaugugugagacaccuguggugacccgagaguggguguuggacaguguagcacucuaccagugccaggagcuggacaccuaccugauaccccagaucccccacagucacuacuga

SEQ ID NO: 548 - RNA, 2043 nt, Artificial Sequence
  EAW60939
auggauuuaucugcucuucgcguugaagaaguacaaaaugucauuaaugcuaugcagaaaaucuuagagugucccaucugucuggaguugaucaaggaaccugucuccacaaagugugaccacauauuuugcaaauuuugcaugcugaaacuucucaaccagaagaaagggccuucacaguguccuuuauguaagaaugauauaaccaaaaggagccuacaagaaaguacgagauuuagucaacuuguugaagagcuauugaaaaucauuugugcuuuucagcuugacacagguuuggaguaugcaaacagcuauaauuuugcaaaaaaggaaaauaacucuccugaacaucuaaaagaugaaguuucuaucauccaaaguaugggcuacagaaaccgugccaaaagacuucuacagagugaacccgaaaauccuuccuugcaggaaaccagucucaguguccaacucucuaaccuuggaacugugagaacucugaggacaaagcagcggauacaaccucaaaagacgucugucuacauugaauugggugaagcagcaucugggugugagagugaaacaagcgucucugaagacugcucagggcuauccucucagagugacauuuuaaccacucagcagagggauaccaugcaacauaaccugauaaagcuccagcaggaaauggcugaacuagaagcuguguuagaacagcaugggagccagccuucuaacagcuacccuuccaucauaagugacucuucugcccuugaggaccugcgaaauccagaacaaagcacaucagaaaaagcaguauuaacuucacagaaaaguagugaauacccuauaagccagaauccagaaggccuuucugcugacaaguuugaggugucugcagauaguucuaccaguaaaaauaaagaaccaggaguggaaaggucauccccuucuaaaugcccaucauuagaugauaggugguacaugcacaguugcucugggagucuucagaauagaaacuacccaucucaagaggagcucauuaagguuguugauguggaggagcaacagcuggaagagucugggccacacgauuugacggaaacaucuuacuugccaaggcaagaucuagagggaaccccuuaccuggaaucuggaaucagccucuucucugaugacccugaaucugauccuucugaagacagagccccagagucagcucguguuggcaacauaccaucuucaaccucugcauugaaaguuccccaauugaaaguugcagaaucugcccagaguccagcugcugcucauacuacugauacugcuggguauaaugcaauggaagaaagugugagcagggagaagccagaauugacagcuucaacagaaagggucaacaaaagaauguccaugguggugucuggccugaccccagaagaauuuaugcucguguacaaguuugccagaaaacaccacaucacuuuaacuaaucuaauuacugaagagacuacucauguuguuaugaaaacagaugcugaguuugugugugaacggacacugaaauauuuucuaggaauugcgggaggaaaauggguaguuagcuauuucugggugacccagucuauuaaagaaagaaaaaugcugaaugagcaugauuuugaagucagaggagauguggucaauggaagaaaccaccaagguccaaagcgagcaagagaaucccaggacagaaagaucuucagggggcuagaaaucuguugcuaugggcccuucaccaacaugcccacagaucaacuggaauggaugguacagcuguguggugcuucuguggugaaggagcuuucaucauucacccuuggcacagguguccacccaauugugguugugcagccagaugccuggacagaggacaauggcuuccaugcaauugggcagaugugugaggcaccuguggugacccgagaguggguguuggacaguguagcacucuaccagugccaggagcuggacaccuaccugauaccccagaucccccacagccacuacuga

SEQ ID NO: 549 - RNA, 546 nt, Artificial Sequence
  AAC72302
augcuguuggaacccggcagaggcugcugugcccuggccauccugcuggcaauuguggacauccagucugguggaugcauuaacaucaccagcucagcuucccaggaaggaacgcgacuaaacuuaaucuguacuguauggcauaagaaagaagaggcugagggguuuguaguguuuuugugcaaggacaggucuggagacuguucuccugagaccaguuuaaaacagcugagacuuaaaagggauccugggauagaugguguuggugaaauaucaucucaguugauguucaccauaagccaagucacaccguugcacagugggaccuaccaguguugugccagaagccagaagucagguauccgccuucagggccauuuuuucuccauucuauucacagagacagggaacuacacagugacgggauugaaacaaagacaacaccuugaguucagccauaaugaaggcacucucaguucaggcuuccuacaagaaaaggucuggguaaugcuggucaccagccuuguggcccuucaagcuuuguaa

SEQ ID NO: 550 - RNA, 639 nt, Artificial Sequence
  BAG58223
augcugcuauccgucuacuucaaggagcaguuucuggacggagacggguggacuucccgcuggaucgaauccaaacacaagucagauuuuggcaaauucguucucaguuccggcaaguucuacggugacgaggagaaagauaaagguuugcagacaagccaggaugcacgcuuuuaugcucugucggccaguuucgagccuuucagcaacaaaggccagacgcugguggugcaguucacggugaaacaugagcagaacaucgacugugggggcggcuaugugaagcuguuuccuaauaguuuggaccagacagacaugcacggagacucagaauacaacaucauguuuggucccgacaucuguggcccuggcaccaagaagguucaugucaucuucaacuacaagggcaagaacgugcugaucaacaaggacauccguugcaaggaugaugaguuuacacaccuguacacacugauugugcggccagacaacaccuaugaggugaagauugacaacagccagguggaguccggcuccuuggaagacgauugggacuuccugccacccaagaagauaaaggauccugaugcuucaaaaccggaagacugggaugagcgggccaagaucgaugaucccuga

SEQ ID NO: 551 - RNA, 891 nt, Artificial Sequence
  BAG65301
augcacggagacucagaauacaacaucauguuuggucccgacaucuguggcccuggcaccaagaagguucaugucaucuucaacuacaagggcaagaacgugcugaucaacaaggacauccguugcaaggaugaugaguuuacacaccuguacacacugauugugcggccagacaacaccuaugaggugaagauugacaacagccagguggaguccggcuccuuggaagacgauugggacuuccugccacccaagaagauaaaggauccugaugcuucaaaaccggaagacugggaugagcgggccaagaucgaugaucccacagacuccaagccugaggacugggacaagcccgagcauaucccugacccugaugcuaagaagcccgaggacugggaugaagagauggacggagagugggaacccccagugauucagaacccugaguacaagggugaguggaagccccggcagaucgacaacccagauuacaagggcacuuggauccacccagaaauugacaaccccgaguauucucccgaucccaguaucuaugccuaugauaacuuuggcgugcugggccuggaccucuggcaggucaagucuggcaccaucuuugacaacuuccucaucaccaacgaugaggcauacgcugaggaguuuggcaacgagacguggggcguaacaaaggcagcagagaaacaaaugaaggacaaacaggacgaggagcagaggcuuaaggaggaggaagaagacaagaaacgcaaagaggaggaggaggcagaggacaaggaggaugaugaggacaaagaugaggaugaggaggaugaggaggacaaggaggaagaugaggaggaagauguccccggccaggccaaggacgagcuguag

SEQ ID NO: 552 - RNA, 1254 nt, Artificial Sequence
  AAA36582
augcugcuauccgugccgcugcugcucggccuccucggccuggccgucgccgagcccgccgucuacuucaaggagcaguuucuggacggagacggguggacuucccgcuggaucgaauccaaacacaagucagauuuuggcaaauucguucucaguuccggcaaguucuacggugacgaggagaaagauaaagguuugcagacaagccaggaugcacgcuuuuaugcucugucggccaguuucgagccuuucagcaacaaaggccagacgcugguggugcaguucacggugaaacaugagcagaacaucgacugugggggcggcuaugugaagcuguuuccuaauaguuuggaccagacagacaugcacggagacucagaauacaacaucauguuuggucccgacaucuguggcccuggcaccaagaagguucaugucaucuucaacuacaagggcaagaacgugcugaucaacaaggacauccguugcaaggaugaugaguuuacacaccuguacacacugauugugcggccagacaacaccuaugaggugaagauugacaacagccagguggaguccggcuccuuggaagacgauugggacuuccugccacccaagaagauaaaggauccugaugcuucaaaaccggaagacugggaugagcgggccaagaucgaugaucccacagacuccaagccugaggacugggacaagcccgagcauaucccugacccugaugcuaagaagcccgaggacugggaugaagagauggacggagagugggaacccccagugauucagaacccugaguacaagggugaguggaagccccggcagaucgacaacccagauuacaagggcacuuggauccacccagaaauugacaaccccgaguauucucccgaucccaguaucuaugccuaugauaacuuuggcgugcugggccuggaccucuggcaggucaagucuggcaccaucuuugacaacuuccucaucaccaacgaugaggcauacgcugaggaguuuggcaacgagacguggggcguaacaaaggcagcagagaaacaaaugaaggacaaacaggacgaggagcagaggcuuaaggaggaggaagaagacaagaaacgcaaagaggaggaggaggcagaggacaaggaggaugaugaggacaaagaugaggaugaggaggaugaggaggacaaggaggaagaugaggaggaagauguccccggccaggccaaggacgagcuguag

SEQ ID NO: 553 - RNA, 1155 nt, Artificial Sequence
  BAB71655
auggcccgggcuuugguccagcucugggccauaugcaugcugcgaguggcgcuggcuaccgucuauuuccaagaggaauuucuagacggagagcauuggagaaaccgaugguugcaguccaccaaugacucccgauuugggcauuuuagacuuucgucgggcaaguuuuauggucauaaagagaaagauaaaggucugcaaaccacucagaauggccgauucuaugccaucucugcacgcuucaaaccguucagcaauaaagggaaaacucugguuauucaguacacaguaaaacaugagcagaagauggacuguggagggggcuacauuaaggucuuuccugcagacauugaccagaagaaccugaauggaaaaucgcaauacuauauuauguuuggacccgauauuuguggauuugauaucaagaaaguucauguuauuuuacauuucaagaauaaguaucacgaaaacaagaaacugaucagguguaagguugauggcuucacacaccuguacacucuaauuuuaagaccagaucuuucuuaugaugugaaaauugauggucagucaauugaauccggcagcauagaguacgacuggaacuuaacaucacucaagaaggaaacguccccggcagaaucgaaggauugggaacagacuaaagacaacaaagcccaggacugggagaagcauuuucuggacgccagcaccagcaagcagagcgacuggaacggugaccuggauggggacuggccagcgccgaugcuccagaagcccccguaccaggauggccugaaaccagaagguauucauaaagacgucuggcuccaccguaagaugaagaauaccgacuauuugacgcaguaugaccucucagaauuugagaacauuggugccauuggccuggagcuuuggcaggugagaucuggaaccauuuuugauaacuuucugaucacagaugaugaagaguaugcagauaauuuuggcaaggccaccuggggcgaaaccaaggguccagaaagggagauggaugccauacaggccaaggaggaaaugaagaaggcccgcgaggaagaggaggaagagcugcugucgggaaaaauuaacaggcacgaacauuacuucaaucaauuucacagaaggaaugaacuuuag

SEQ ID NO: 554 - RNA, 330 nt, Artificial Sequence
  CAA10193
augcugauggcccaggaggcccuggcauuccugauggcccagggggcaaugcuggcggcccaggagaggcgggugccacgggcggcagagguccccggggcgcaggggcagcaagggccucggggccgagaggaggcgccccgcgggguccgcauggcggugccgcuucugcgcaggauggaaggugccccugcggggccaggaggccggacagccgccugcuucaguugcacaucacgaugccuuucucgucgcccauggaagcggagcugguccgcaggauccugucccgggaugccgcaccucucccccgaccaggggcgguucuga

SEQ ID NO: 555 - RNA, 1440 nt, Artificial Sequence
  CAA66853
auggacuucagcagaaaucuuuaugauauuggggaacaacuggacagugaagaucuggccucccucaaguuccugagccuggacuacauuccgcaaaggaagcaagaacccaucaaggaugccuugauguuauuccagagacuccaggaaaagagaauguuggaggaaagcaaucuguccuuccugaaggagcugcucuuccgaauuaauagacuggauuugcugauuaccuaccuaaacacuagaaaggaggagauggaaagggaacuucagacaccaggcagggcucaaauuucugccuacagggucaugcucuaucagauuucagaagaagugagcagaucagaauugaggucuuuuaaguuucuuuugcaagaggaaaucuccaaaugcaaacuggaugaugacaugaaccugcuggauauuuucauagagauggagaagagggucauccugggagaaggaaaguuggacauccugaaaagagucugugcccaaaucaacaagagccugcugaagauaaucaacgacuaugaagaauucagcaaagagagaagcagcagccuugaaggaaguccugaugaauuuucaaauggggaggaguugugugggguaaugacaaucucggacucuccaagagaacaggauagugaaucacagacuuuggacaaaguuuaccaaaugaaaagcaaaccucggggauacugucugaucaucaacaaucacaauuuugcaaaagcacgggagaaagugcccaaacuucacagcauuagggacaggaauggaacacacuuggaugcaggggcuuugaccacgaccuuugaagagcuucauuuugagaucaagccccacgaugacugcacaguagagcaaaucuaugagauuuugaaaaucuaccaacucauggaccacaguaacauggacugcuucaucugcuguauccucucccauggagacaaaggcaucaucuauggcacugauggacaggaggcccccaucuaugagcugacaucucaguucacugguuugaagugcccuucccuugcuggaaaacccaaaguguuuuuuauucaggcuugucagggggauaacuaccagaaagguauaccuguugagacugauucagaggagcaacccuauuuagaaauggauuuaucaucaccucaaacgagauauaucccggaugaggcugacuuucugcuggggauggccacugugaauaacuguguuuccuaccgaaacccugcagagggaaccugguacauccagucacuuugccagagccugagagagcgauguccucgaggcgaugauauucucaccauccugacugaagugaacuaugaaguaagcaacaaggaugacaagaaaaacauggggaaacagaugccucagccuacuuucacacuaagaaaaaaacuugucuucccuucugauuga

SEQ ID NO: 556 - RNA, 1569 nt, Artificial Sequence
  CCDS2340.1
augaaaucucaaggucaacauugguauuccaguucagauaaaaacuguaaagugagcuuucgugagaagcuucugauuauugauucaaaccuggggguccaagauguggagaaccucaaguuucucugcauaggauugguccccaacaagaagcuggagaaguccagcucagccucagauguuuuugaacaucucuuggcagaggaucugcugagugaggaagacccuuucuuccuggcagaacuccucuauaucauacggcagaagaagcugcugcagcaccucaacuguaccaaagaggaaguggagcgacugcugcccacccgacaaaggguuucucuguuuagaaaccugcucuacgaacugucagaaggcauugacucagagaacuuaaaggacaugaucuuccuucugaaagacucgcuucccaaaacugaaaugaccucccuaaguuuccuggcauuucuagagaaacaagguaaaauagaugaagauaaucugacaugccuggaggaccucugcaaaacaguuguaccuaaacuuuugagaaacauagagaaauacaaaagagagaaagcuauccagauagugacaccuccuguagacaaggaagccgagucguaucaaggagaggaagaacuaguuucccaaacagauguuaagacauucuuggaagccuuaccgcaggaguccuggcaaaauaagcaugcagguaguaaugguaacagagccacaaauggugcaccaagccuggucuccagggggaugcaaggagcaucugcuaacacucuaaacucugaaaccagcacaaagagggcagcuguguacaggaugaaucggaaccacagaggccucugugucauugucaacaaccacagcuuuaccucccugaaggacagacaaggaacccauaaagaugcugagauccugagucauguguuccaguggcuuggguucacagugcauauacacaauaaugugacgaaaguggaaauggagaugguccugcagaagcagaagugcaauccagcccaugccgacggggacugcuucguguucuguauucugacccaugggagauuuggagcugucuacucuucggaugaggcccucauucccauucgggagaucaugucucacuucacagcccugcagugcccuagacuggcugaaaaaccuaaacucuuuuucauccaggccugccaaggugaagagauacagccuuccguauccaucgaagcagaugcucugaacccugagcaggcacccacuucccugcaggacaguauuccugccgaggcugacuuccuacuuggucuggccacugucccaggcuauguauccuuucggcauguggaggaaggcagcugguauauucagucucuguguaaucaucugaagaaauuggucccaagacaugaagacaucuuauccauccucacugcugucaacgaugaugugagucgaagaguggacaaacagggaacaaagaaacagaugccccagccugcuuucacacuaaggaaaaaacuaguauucccugugccccuggaugcacuuucauuauag

SEQ ID NO: 557 - RNA, 1020 nt, Artificial Sequence
  EAW65632
auguggcagcucugggccucccucugcugccugcugguguuggccaaugcccggagcaggcccucuuuccauccccugucggaugagcuggucaacuaugucaacaaacggaauaccacguggcaggccgggcacaacuucuacaacguggacaugagcuacuugaagaggcuaugugguaccuuccugggugggcccaagccaccccagagaguuauguuuaccgaggaccugaagcugccugcaagcuucgaugcacgggaacaauggccacagugucccaccaucaaagagaucagagaccagggcuccuguggcuccugcugggccuucggggcuguggaagccaucucugaccggaucugcauccacaccaaugcgcacgucagcguggaggugucggcggaggaccugcucaccugcuguggcagcauguguggggacggcuguaaugguggcuauccugcugaagcuuggaacuucuggacaagaaaaggccugguuucugguggccucuaugaaucccauguagggugcagaccguacuccaucccucccugugagcaccacgucaacggcucccggcccccaugcacgggggagggagauacccccaaguguagcaagaucugugagccuggcuacagcccgaccuacaaacaggacaagcacuacggauacaauuccuacagcgucuccaauagcgagaaggacaucauggccgagaucuacaaaaacggccccguggagggagcuuucucuguguauucggacuuccugcucuacaagucaggaguguaccaacacgucaccggagagaugauggguggccaugccauccgcauccugggcuggggaguggagaauggcacacccuacuggcugguugccaacuccuggaacacugacuggggugacaauggcuucuuuaaaauacucagaggacaggaucacuguggaaucgaaucagaagugguggcuggaauuccacgcaccgaucaguacugggaaaagaucuaa

SEQ ID NO: 558 - RNA, 1020 nt, Artificial Sequence
  AAC37547
auguggcagcucugggccucccucugcugccugcugguguuggccaaugcccggagcaggcccucuuuccauccccugucggaugagcuggucaacuaugucaacaaacggaauaccacguggcaggccgggcacaacuucuacaacguggacaugagcuacuugaagaggcuaugugguaccuuccugggugggcccaagccaccccagagaguuauguuuaccgaggaccugaagcugccugcaagcuucgaugcacgggaacaauggccacagugucccaccaucaaagagaucagagaccagggcuccuguggcuccugcugggccuucggggcuguggaagccaucucugaccggaucugcauccacaccaaugcgcacgucagcguggaggugucggcggaggaccugcucacaugcuguggcagcauguguggggacggcuguaaugguggcuauccugcugaagcuuggaacuucuggacaagaaaaggccugguuucugguggccucuaugaaucccauguagggugcagaccguacuccaucccucccugugagcaccacgucaacggcucccggcccccaugcacgggggagggagauacccccaaguguagcaagaucugugagccuggcuacagcccgaccuacaaacaggacaagcacuacggauacaauuccuacagcgucuccaauagcgagaaggacaucauggccgagaucuacaaaaacggccccguggagggagcuuucucuguguauucggacuuccugcucuacaagucaggaguguaccaacacgucaccggagagaugauggguggccaugccauccgcauccugggcuggggaguggagaauggcacacccuacuggcugguugccaacuccuggaacacugacuggggugacaauggcuucuuuaaaauacucagaggacaggaucacuguggaaucgaaucagaagugguggcuggaauuccacgcaccgaucaguacugggaaaagaucuaa

SEQ ID NO: 559 - RNA, 1002 nt, Artificial Sequence
  EAW62731
augaauccuacacucauccuugcugccuuuugccugggaauugccucagcuacucuaacauuugaucacaguuuagaggcacaguggaccaaguggaaggcgaugcacaacagauuauacggcaugaaugaagaaggauggaggagagcagugugggagaagaacaugaagaugauugaacugcacaaucaggaauacagggaagggaaacacagcuucacaauggccaugaacgccuuuggagacaugaccagugaagaauucaggcaggugaugaauggcuuucaaaaccguaagcccaggaaggggaaaguguuccaggaaccucuguuuuaugaggcccccagaucuguggauuggagagagaaaggcuacgugacuccugugaagaaucagggucagugugguucuuguugggcuuuuagugcuacuggugcucuugaaggacagauguuccggaaaacugggaggcuuaucucacugagugagcagaaucugguagacugcucugggccucaaggcaaugaaggcugcaaugguggccuaauggauuaugcuuuccaguauguucaggauaauggaggccuggacucugaggaauccuauccauaugaggcaacagaagaauccuguaaguacaaucccaaguauucuguugcuaaugacaccggcuuuguggacaucccuaagcaggagaaggcccugaugaaggcaguugcaacuguggggcccauuucuguugcuauugaugcaggucaugaguccuuccuguucuauaaagaaggcauuuauuuugagccagacuguagcagugaagacauggaucauggugugcuggugguuggcuacggauuugaaagcacagaaucagauaacaauaaauauuggcuggugaagaacagcuggggugaagaauggggcauggguggcuacguaaagauggccaaagaccggagaaaccauuguggaauugccucagcagccagcuaccccacuguguga

SEQ ID NO: 560 - RNA, 1002 nt, Artificial Sequence; identical to SEQ ID NO: 559
  AAA66974

SEQ ID NO: 561 - RNA, 456 nt, Artificial Sequence
  AAG17239
auggauuaugcuuuccaguauguucaggauaauggaggccuggacucugaggaauccuauccauaugaggcaacagaagaauccuguaaguacaaucccaaguauucuguugcuaaugacaccggcuuuguggacaucccuaagcaggagaaggcccugaugaaggcaguugcaacuguggggcccauuucuguugcuauugaugcaggucaugaguccuuccuguucuauaaagaaggcauuuauuuugagccagacuguagcagugaagacauggaucauggugugcuggugguuggcuacggauuugaaagcacagaaucagauaacaauaaauauuggcuggugaagaacagcuggggugaagaauggggcauggguggcuacguaaagauggccaaagaccggagaaaccauuguggaauugccucagcagccagcuaccccacuguguga

SEQ ID NO: 562 - RNA, 984 nt, Artificial Sequence
  AAA51932
augcuguuuuugcuacuuccauuguuagcuguucucccaggugauggcaaugcagacgggcucaaggagccucucuccuuccaugucaccuggaucgcauccuuuuacaaccauuccuggaaacaaaaucuggucucagguuggcugagugauuugcagacucauaccugggacagcaauuccagcaccaucguuuuccugugccccugguccaggggaaacuucagcaaugaggaguggaaggaacuggaaacauuauuccguauacgcaccauucggucauuugagggaauucguagauacgcccaugaauugcaguuugaauauccuuuugagauacaggugacaggaggcugugagcugcacucuggaaaggucucaggaagcuucuugcaguuagcuuaucaaggaucagacuuugugagcuuccagaacaauucaugguugccauauccaguggcugggaauauggccaagcauuucugcaaagugcucaaucagaaucagcaugaaaaugacauaacacacaaucuucucagugacaccugcccacguuucaucuugggucuucuugaugcaggaaaggcacaucuccagcggcaagugaagcccgaggccuggcugucccauggccccaguccuggcccuggccaucugcagcuugugugccaugucucaggauucuacccaaagcccgugugggugauguggaugcggggugagcaggagcagcagggcacucagcgaggggacaucuugcccagugcugaugggacaugguaucuccgcgcaacccuggagguggccgcuggggaggcagcugaccuguccugucgggugaagcacagcagucuagagggccaggacaucguccucuacugggagcaucacaguuccgugggcuucaucaucuuggcggugauagugccuuuacuucuucugauaggucuugcgcuuugguucaggaaacgcuguuucuguuaa

SEQ ID NO: 563 - RNA, 1002 nt, Artificial Sequence
  AAA51939
augcugcugcugccauuucaacuguuagcuguucucuuuccuggugguaacagugaacaugccuuccaggggccgaccuccuuucauguuauccagaccucguccuuuaccaauaguaccugggcacaaacucaaggcucaggcugguuggaugauuugcagauucauggcugggauagcgacucaggcacugccauauuccugaagccuuggucuaaagguaacuuuagugauaaggagguugcugaguuagaggagauauuccgagucuacaucuuuggauucgcucgagaaguacaagacuuugccggugauuuccagaugaaauaccccuuugagauccagggcauagcaggcugugagcuacauucuggaggugccauaguaagcuuccugaggggagcucuaggaggauuggauuuccugagugucaagaaugcuucaugugugccuuccccagaagguggcagcagggcacagaaauucugugcacuaaucauacaauaucaagguaucauggaaacugugagaauucuccucuaugaaaccugcccccgauaucucuugggcguccucaaugcaggaaaagcagaucugcaaagacaagugaagccugaggccuggcuguccaguggccccaguccuggaccuggccgucugcagcuugugugccaugucucaggauucuacccaaagcccgugugggugauguggaugcggggugagcaggagcagcagggcacucagcuaggggacauccugcccaaugcuaacuggacaugguaucuccgagcaacccuggauguggcagauggggaggcggcuggccuguccugucgggugaagcacagcaguuuagagggccaggacaucauccucuacuggagaaaccccaccuccauuggcucaauuguuuuggcaauaauagugccuuccuugcuccuuuugcuaugccuugcauuaugguauaugaggcgccggucauaucagaauaucccauga

SEQ ID NO: 564 - RNA, 1002 nt, Artificial Sequence
  AAI26466
augcuguuucugcaguuucugcugcuagcucuucuucucccagguggugacaaugcagacgcaucccaggaacacgucuccuuccaugucauccagaucuucucauuugucaaccaauccugggcacgaggucagggcucaggauggcuggacgaguugcagacucauggcugggacagugaaucaggcacaauaauuuuccugcauaacugguccaagggcaacuucagcaaugaagaguugucagaccuagaguuguuauuucguuucuaccucuuuggauuaacucgggagauucaagaccaugcaagucaagauuacucgaaauaucccuuugaaguacaggugaaagcgggcugugagcugcauucuggaaagagcccagaaggcuucuuucagguagcuuucaacggauuagauuuacugaguuuccagaauacaacaugggugccaucuccaggcuguggaaguuuggcccaaagugucugucaucuacucaaucaucaguaugaaggcgucacagaaacaguguauaaucucauaagaagcacuugcccccgauuucucuugggucuccuggaugcagggaagauguauguacacaggcaagugaggccagaagccuggcuguccagucgccccagccuugggucuggccagcuguugcugguuugucaugccuccggcuucuacccaaagccuguuugggugacauggaugcggaaugaacaggagcaacugggcacuaaacauggugauauucuuccuaaugcugaugggacaugguaucuucaggugauccuggagguggcaucugaggagccugcuggccugucuugucgagugagacacagcagucuaggaggccaggacaucauccucuacuggggacaccacuuuuccaugaauuggauugccuugguagugauagugcccuuggugauucuaauaguccuuguguuaugguuuaagaagcacugcucauaucaggacauccuguga

SEQ ID NO: 565 - RNA, 1008 nt, Artificial Sequence
  AAA59672
auggggugccugcuguuucugcugcucugggcgcuccuccaggcuuggggaagcgcugaagucccgcaaaggcuuuucccccuccgcugccuccagaucucguccuucgccaauagcagcuggacgcgcaccgacggcuuggcguggcugggggagcugcagacgcacagcuggagcaacgacucggacaccguccgcucucugaagccuuggucccagggcacguucagcgaccagcagugggagacgcugcagcauauauuucggguuuaucgaagcagcuucaccagggacgugaaggaauucgccaaaaugcuacgcuuauccuaucccuuggagcuccagguguccgcuggcugugaggugcacccugggaacgccucaaauaacuucuuccauguagcauuucaaggaaaagauauccugaguuuccaaggaacuucuugggagccaacccaagaggccccacuuuggguaaacuuggccauucaagugcucaaccaggacaaguggacgagggaaacagugcaguggcuccuuaauggcaccugcccccaauuugucaguggccuccuugagucagggaagucggaacugaagaagcaagugaagcccaaggccuggcugucccguggccccaguccuggcccuggccgucugcugcuggugugccaugucucaggauucuacccaaagccuguaugggugaaguggaugcggggugagcaggagcagcagggcacucagccaggggacauccugcccaaugcugacgagacaugguaucuccgagcaacccuggaugugguggcuggggaggcagcuggccuguccugucgggugaagcacagcagucuagagggccaggacaucguccucuacuggggugggagcuacaccuccaugggcuugauugccuuggcaguccuggcgugcuugcuguuccuccucauugugggcuuuaccucccgguuuaagaggcaaacuuccuaucagggcguccuguga

SEQ ID NO: 566 - RNA, 1167 nt, Artificial Sequence
  EAW52830
augcugcuccuguuccuccucuucgagggucucugcuguccuggggaaaauacagcagcuccccaggcucuacaauccuaucaucuagcagcagaggagcagcuguccuuccgcaugcuccaaacuuccuccuuugccaaccacagcugggcacacagugagggcucaggauggcugggugaccugcagacucauggcugggacacugucuugggcaccauccgcuuucugaagcccuggucccauggaaacuucagcaagcaggagcugaaaaacuuacagucacuguuccaguuauacuuccauaguuuuauccagauagugcaagcuucugcuggucaauuucagcuugaauaccccuucgagauccagauauuagcuggcuguagaaugaaugccccacaaaucuucuuaaauauggcauaucaagggucagauuuccugaguuuccaaggaauuuccugggagccaucuccaggagcagggauccgggcccagaacaucuguaaagugcucaaucgcuaccuagauauuaaggaaauacugcaaagccuucuuggucacaccugcccucgauuucuagcggggcucauggaagcaggggagucagaacugaaacggaaagugaagccagaggccuggcuguccuguggccccaguccuggcccuggccgucugcagcuugugugccaugucucaggauucuacccaaagcccgugugggugauguggaugcggggugagcaggagcagcggggcacucagcgaggggacguccugccuaaugcugacgagacaugguaucuccgagcaacccuggauguggcggcuggggaggcagcuggccuguccugucgggugaaacacagcagucuagggggccaugaucuaaucauccauugggguggauauuccaucuuucucauccugaucuguuugacugugauaguuacccuggucauauugguuguaguugacucacgguuaaaaaaacagaguucaaauaagaacauucuuucuccccacacacccagcccugucuuucucaugggagccaacacucaggacaccaagaauucaagacaucaguucugcuuggcacaaguaucguggaucaaaaacagaguauugaagaaguggaagacacgccuaaaccaacucugguga

SEQ ID NO: 567 - RNA, 894 nt, Artificial Sequence
  AAA35581
augacaacacccagaaauucaguaaaugggacuuucccggcagagccaaugaaaggcccuauugcuaugcaaucugguccaaaaccacucuucaggaggaugucuucacuggugggccccacgcaaagcuucuucaugagggaaucuaagacuuugggggcuguccagauuaugaaugggcucuuccacauugcccuggggggucuucugaugaucccagcagggaucuaugcacccaucugugugacugugugguacccucucuggggaggcauuauguauauuauuuccggaucacucuuggcagcaacggagaaaaacucuaggaaguguuuggucaaaggaaaaaugauaaugaauucauugagccucuuugcugccauuucuggaaugauucuuucaaucauggacauacuuaauauuaaaauuucccauuuuuuaaaaauggagagucugaauuuuauuagagcucacacaccauauauuaacauauacaacugugaaccagcuaaucccucugagaaaaacuccccaucuacccaauacuguuacagcauacaaucucuguucuugggcauuuugucagugaugcugaucuuugccuucuuccaggaacuuguaauagcuggcaucguugagaaugaauggaaaagaacgugcuccagacccaaaucuaacauaguucuccugucagcagaagaaaaaaaagaacagacuauugaaauaaaagaagaagugguugggcuaacugaaacaucuucccaaccaaagaaugaagaagacauugaaauuauuccaauccaagaagaggaagaagaagaaacagagacgaacuuuccagaaccuccccaagaucaggaauccucaccaauagaaaaugacagcucuccuuaa

SEQ ID NO: 568 - RNA, 1989 nt, Artificial Sequence
  AAC18956
auggaguccaagacugagaaauggauggaacgaauacaccucaaugucucugaaaggccuuuuccaccucauauccagcucccuccagaaauucaagagucccaggaagucacucugaccugcuugcugaauuucuccugcuauggguauccgauccaauugcaguggcuccuagaggggguuccaaugaggcaggcugcugucaccucgaccuccuugaccaucaagucugucuucacccggagcgagcucaaguucuccccacaguggagucaccaugggaagauugugaccugccagcuucaggaugcagaugggaaguuccucuccaaugacacggugcagcugaacgugaagcacaccccgaaguuggagaucaaggucacucccagugaugccauagugagggagggggacucugugaccaugaccugcgaggucagcagcacgaacccggaguacacgacgguauccuggcucaaggaugggaccucgcugaagaagcagaauacauucacgcuaaaccugcgcgaagugaccaaggaccagagugggaaguacugcugucaggucuccaaugacgugggcccgggaaggucggaagaaguguuccugcaagugcaguaugccccggaaccuuccacgguucagauccuccacucaccggcuguggagggaagucaagucgaguuucuuugcaugucacuggccaauccucuuccaacaaauuacacgugguaccacaaugggaaagaaaugcagggaaggacagaggagaaaguccacaucccaaagauccuccccuggcacgcugggacuuauuccuguguggcagaaaacauucuugguacuggacagaggggcccgggagcugagcuggauguccaguauccucccaagaaggugaccacagugauucaaaaccccaugccgauucgagaaggagacacagugacccuuuccuguaacuacaauuccaguaaccccaguguuacccgguaugaauggaaaccccauggcgccugggaggagccaucgcuuggggugcugaagauccaaaagguuggcugggacaacacaaccaucgccugcgcacguuguaauaguuggugcucgugggccuccccugucgcccugaauguccaguaugccccccgagacgugaggguccggaaaaucaagccccuuuccgagauucacucuggaaacucggucagccuccaaugugacuucucaagcagccaccccaaagaaguccaguucuucugggagaaaaauggcaggcuucuggggaaagaaagccagcugaauuuugacuccaucuccccagaagaugcugggaguuacagcugcugggugaacaacuccauaggacagacagcguccaaggccuggacacuugaagugcuguaugcacccaggaggcugcguguguccaugagcccgggggaccaagugauggaggggaagagugcaacccugaggugugagagcgacgccaacccucccgucucccacuacaccugguuugacuggaauaaccaaagccuccccuaccacagccagaagcugagauuggagccggugaagguccagcacucgggugccuacuggugccaggggaccaacagugugggcaagggccguucgccucucagcacccucaccgucuacuauagcccggagaccaucggcaggcgaguggcugugggacucggguccugccucgccauccucauccuggcaaucugugggcucaagcuccagcgacgagaugcagaguccucagagaugcagagaccuccccggaccugcgaugacacggucacuuauucagcauugcacaagcgccaagugggcgacuaugagaacgucauuccagauuuuccagaagaugaggggauucauuacucagagcugauccaguuuggggucggggagcggccucaggcacaagaaaauguggacuaugugauccucaaacauuga

SEQ ID NO: 569 - RNA, 2544 nt, Artificial Sequence
  AAB06448
augcaucuccucggccccuggcuccugcuccugguucuagaauacuuggcuuucucugacucaaguaaauggguuuuugagcacccugaaacccucuacgccugggagggggccugcgucuggauccccugcaccuacagagcccuagauggugaccuggaaagcuucauccuguuccacaauccugaguauaacaagaacaccucgaaguuugaugggacaagacucuaugaaagcacaaaggaugggaagguuccuucugagcagaaaagggugcaauuccugggagacaagaauaagaacugcacacugaguauccacccggugcaccucaaugacaguggucagcuggggcugaggauggaguccaagacugagaaauggauggaacgaauacaccucaaugucucugaaaggccuuuuccaccucauauccagcucccuccagaaauucaagagucccaggaagucacucugaccugcuugcugaauuucuccugcuauggguauccgauccaauugcaguggcuccuagaggggguuccaaugaggcaggcugcugucaccucgaccuccuugaccaucaagucugucuucacccggagcgagcucaaguucuccccacaguggagucaccaugggaagauugugaccugccagcuucaggaugcagaugggaaguuccucuccaaugacacggugcagcugaacgugaagcacaccccgaaguuggagaucaaggucacucccagugaugccauagugagggagggggacucugugaccaugaccugcgaggucagcagcagcaacccggaguacacgacgguauccuggcucaaggaugggaccucgcugaagaagcagaauacauucacgcuaaaccugcgcgaagugaccaaggaccagagugggaaguacugcugucaggucuccaaugacgugggcccgggaaggucggaagaaguguuccugcaagugcaguaugccccggaaccuuccacgguucagauccuccacucaccggcuguggagggaagucaagucgaguuucuuugcaugucacuggccaauccucuuccaacaaauuacacgugguaccacaaugggaaagaaaugcagggaaggacagaggagaaaguccacaucccaaagauccuccccuggcacgcugggacuuauuccuguguggcagaaaacauucuugguacuggacagaggggcccgggagcugagcuggauguccaguauccucccaagaaggugaccacagugauucaaaaccccaugccgauucgagaaggagacacagugacccuuuccuguaacuacaauuccaguaaccccaguguuacccgguaugaauggaaaccccauggcgccugggaggagccaucgcuuggggugcugaagauccaaaacguuggcugggacaacacaaccaucgccugcgcagcuuguaauaguuggugcucgugggccuccccugucgcccugaauguccaguaugccccccgagacgugaggguccggaaaaucaagccccuuuccgagauucacucuggaaacucggucagccuccaaugugacuucucaagcagccaccccaaagaaguccaguucuucugggagaaaaauggcaggcuucuggggaaagaaagccagcugaauuuugacuccaucuccccagaagaugcugggaguuacagcugcugggugaacaacuccauaggacagacagcguccaaggccuggacacuugaagugcuguaugcacccaggaggcugcguguguccaugagcccgggggaccaagugauggaggggaagagugcaacccugaccugugagagcgacgccaacccucccgucucccacuacaccugguuugacuggaauaaccaaagccuccccuaccacagccagaagcugagauuggagccggugaagguccagcacucgggugccuacuggugccaggggaccaacagugugggcaagggccguucgccucucagcacccucaccgucuacuauagcccggagaccaucggcaggcgaguggcugugggacucggguccugccucgccauccucauccuggcaaucugugggcucaagcuccagcgacguuggaagaggacacagagccagcaggggcuucaggagaauuccagcggccagagcuucuuugugaggaauaaaaagguuagaagggccccccucucugaaggcccccacucccugggaugcuacaauccaaugauggaagauggcauuagcuacaccacccugcgcuuucccgagaugaacauaccacgaacuggagaugcagaguccucagagaugcagagaccucccccggacugcgaugacacggucacuuauucagcauugcacaagcgccaagugggcgacuaugagaacgucauuccagauuuuccagaagaugaggggauucauuacucagagcugauccaguuuggggucggggagcggccucaggcacaagaaaauguggacuaugugauccucaaacauuga

SEQ ID NO: 570 - RNA, 2544 nt, Artificial Sequence; identical to SEQ ID NO: 569
  ABK41939

SEQ ID NO: 571 - RNA, 1605 nt, Artificial Sequence
  CAE47548
augcugcgucggcggggcagcccuggcaugggugugcaugugggugcagcccugggagcacugugguucugccucacaggagcccuggagguccaggucccugaagacccagugguggcacuggugggcaccgaugccacccugugcugcuccuucucccccgagccuggcuucagccuggcacagcucaaccucaucuggcagcugacagauaccaaacagcuggugcacagcuuugcugagggccaggaccagggcagcgccuaugccaaccgcacggcccucuucccggaccugcuggcacagggcaacgcaucccugaggcugcagcgcgugcguguggcggacgagggcagcuucaccugcuucgugagcauccgggauuucggcagcgcugccgucagccugcagguggccgcucccuacucgaagcccagcaugacccuggagcccaacaaggaccugcggccaggggacacggugaccaucacgugcuccagcuaccagggcuacccugaggcugagguguucuggcaggaugggcagggugugccccugacuggcaacgugaccacgucgcagauggccaacgagcagggcuuguuugaugugcacagcauccugcggguggugcugggugcaaauggcaccuacagcugccuggugcgcaaccccgugcugcagcaggaugcgcacagcucugucaccaucacaccccagagaagccccacaggagccguggagguccaggucccugaggacccggugguggcccuagugggcaccgaugccacccugcgcugcuccuucucccccgagccuggcuucagccuggcacagcucaaccucaucuggcagcugacagacaccaaacagcuggugcacaguuucaccgaaggccgggaccagggcagcgccuaugccaaccgcacggcccucuucccggaccugcuggcacaaggcaaugcaucccugaggcugcagcgcgugcguguggcggacgagggcagcuucaccugcuucgugagcauccgggauuucggcagcgcugccgucagccugcagguggccgcucccuacucgaagcccagcaugacccuggagcccaacaaggaccugcggccaggggacacggugaccaucacgugcuccagcuaccggggcuacccugaggcugagguguucuggcaggaugggcagggugugccccugacuggcaacgugaccacgucgcagauggccaacgagcagggcuuguuugaugugcacagcguccugcggguggugcugggugcgaauggcaccuacagcugccuggugcgcaaccccgugcugcagcaggaugcgcacggcucugucaccaucacagggcagccuaugacauuccccccagaggcccugugggugaccguggggcugucugucugucucauugcacugcugguggcccuggcuuucgugugcuggagaaagaucaaacagagcugugaggaggagaaugcaggagcugaggaccaggauggggagggagaaggcuccaagacagcccugcagccucugaaacacucugacagcaaagaagaugauggacaagaaauagccuga

SEQ ID NO: 572 - RNA, 639 nt, Artificial Sequence
  BAG57312
augccgcugcugcuacugcugccccugcugugggcagacuugacccacaggcccaaaauccucaucccuggcacucuagaacccggccacuccaaaaaccugaccugcucuguguccugggccugugagcagggaacacccccgaucuucuccugguugucagcugcccccaccucccugggccccaggacuacucacuccucggugcucauaaucaccccacggccccaggaccacggcaccaaccugaccugucaggugaaguucgcuggagcuggugugacuacggagagaaccauccagcucaacgucaccuauguuccacagaacccaacaacugguaucuuuccaggagauggcucagggaaacaagagaccagagcaggagugguucauggggccauuggaggagcugguguuacagcccugcucgcucuuugucucugccucaucuucuucauagugaagacccacaggaggaaagcagccaggacagcagugggcaggaaugacacccacccuaccacagggucagccuccccggugagugauggggcauccuggcauccagucuguccugcagacaccuccucccaauguggcccaccgucaugccccauucagcauuuccagaacuga

SEQ ID NO: 573 - RNA, 1095 nt, Artificial Sequence
  AAK83654
augccgcugcugcuacugcugccccugcugugggcaggggcccuggcuauggauccaaauuucuggcugcaagugcaggagucagugacgguacaggaggguuugugcguccucgugcccugcacuuucuuccaucccauacccuacuacgacaagaacuccccaguucaugguuacugguuccgggaaggagccauuauauccagggacucuccaguggccacaaacaagcuagaucaagaaguacaggaggagacucagggcagauuccgccuccuuggggaucccaguaggaacaacugcucccugagcaucguagacgccaggaggagggauaaugguucauacuucuuucggauggagagaggaaguaccaaauacaguuacaaaucuccccagcucucugugcaugugacagacuugacccacaggcccaaaauccucaucccuggcacucuagaacccggccacuccaaaaaccugaccugcucuguguccugggccugugagcagggaacacccccgaucuucuccugguugucagcugcccccaccucccugggccccaggacuacucacuccucggugcucauaaucaccccacggccccaggaccacggcaccaaccugaccugucaggugaaguucgcuggagcuggugugacuacggagagaaccauccagcucaacgucaccuauguuccacagaacccaacaacugguaucuuuccaggagauggcucagggaaacaagagaccagagcaggagugguucauggggccauuggaggagcugguguuacagcccugcucgcucuuugucucugccucaucuucuucauagugaagacccacaggaggaaagcagccaggacagcagugggcaggaaugacacccacccuaccacagggucagccuccccgaaacaccagaagaaguccaaguuacauggccccacugaaaccucaagcuguucaggugccgccccuacuguggagauggaugaggagcugcauuaugcuucccucaacuuucaugggaugaauccuuccaaggacaccuccaccgaauacucagaggucaggacccaguga

SEQ ID NO: 574 - RNA, 1095 nt, Artificial Sequence; identical to SEQ ID NO: 573
  CAD36509

SEQ ID NO: 575 - RNA, 624 nt, Artificial Sequence
  AAA52295
augcagucgggcacucacuggagaguucugggccucugccucuuaucaguugguguuugggggcaagaugguaaugaagaaaugggugguauuacacagacaccauauaaagucuccaucucuggaaccacaguaauauugacaugcccucaguauccuggaucugaaauacuauggcaacacaaugauaaaaacauaggcggugaugaggaugauaaaaacauaggcagugaugaggaucaccugucacugaaggaauuuucagaauuggagcaaagugguuauuaugucugcuaccccagaggaagcaaaccagaagaugcgaacuuuuaucucuaccugagggcaagagugugugagaacugcauggagauggaugugaugucgguggccacaauugucauaguggacaucugcaucacugggggcuugcugcugcugguuuacuacuggagcaagaauagaaaggccaaggccaagccugugacacgaggagcgggugcuggcggcaggcaaaggggacaaaacaaggagaggccaccaccuguucccaacccagacuaugagcccauccggaaaggccagcgggaccuguauucuggccugaaucagagacgcaucuga

SEQ ID NO: 576 - RNA, 495 nt, Artificial Sequence
  AAH25703
augaaguggaaggcgcuuuucaccgcggccauccugcaggcacaguugccgauuacagaggcacagagcuuuggccugcuggaucccaaacucugcuaccugcuggauggaauccucuucaucuauggugucauucucacugccuuguuccugagagugaaguucagcaggagcgcagacgcccccgcguaccagcagggccagaaccagcucuauaacgagcucaaucuaggacgaagagaggaguacgauguuuuggacaagagacguggccgggacccugagauggggggaaagccgcagagaaggaagaacccucaggaaggccuguacaaugaacugcagaaagauaagauggcggaggccuacagugagauugggaugaaaggcgagcgccggaggggcaaggggcacgauggccuuuaccagggucucaguacagccaccaaggacaccuacgacgcccuucacaugcaggcccugcccccucgcuaa

SEQ ID NO: 577 - RNA, 2229 nt, Artificial Sequence
  CCDS7897.1
auggacaaguuuugguggcacgcagccuggggacucugccucgugccgcugagccuggcgcagaucgauuugaauauaaccugccgcuuugcagguguauuccacguggagaaaaauggucgcuacagcaucucucggacggaggccgcugaccucugcaaggcuuucaauagcaccuugcccacaauggcccagauggagaaagcucugagcaucggauuugagaccugcagguauggguucauagaagggcacguggugauuccccggauccaccccaacuccaucugugcagcaaacaacacagggguguacauccucacauccaacaccucccaguaugacacauauugcuucaaugcuucagcuccaccugaagaagauuguacaucagucacagaccugcccaaugccuuugauggaccaauuaccauaacuauuguuaaccgugauggcacccgcuauguccagaaaggagaauacagaacgaauccugaagacaucuaccccagcaacccuacugaugaugacgugagcagcggcuccuccagugaaaggagcagcacuucaggagguuacaucuuuuacaccuuuucuacuguacaccccaucccagacgaagacagucccuggaucaccgacagcacagacagaaucccugcuaccacuuugaugagcacuagugcuacagcaacugagacagcaaccaagaggcaagaaaccugggauugguuuucaugguuguuucuaccaucagagucaaagaaucaucuucacacaacaacacaaauggcugguacgucuucaaauaccaucucagcaggcugggagccaaaugaagaaaaugaagaugaaagagacagacaccucaguuuuucuggaucaggcauugaugaugaugaagauuuuaucuccagcaccauuucaaccacaccacgggcuuuugaccacacaaaacagaaccaggacuggacccaguggaacccaagccauucaaauccggaagugcuacuucagacaaccacaaggaugacugauguagacagaaauggcaccacugcuuaugaaggaaacuggaacccagaagcacacccuccccucauucaccaugagcaucaugaggaagaagagaccccacauucuacaagcacaauccaggcaacuccuaguaguacaacggaagaaacagcuacccagaaggaacagugguuuggcaacagauggcaugagggauaucgccaaacacccaaagaagacucccauucgacaacagggacagcugcagccucagcucauaccagccauccaaugcaaggaaggacaacaccaagcccagaggacaguuccuggacugauuucuucaacccaaucucacaccccaugggacgaggucaucaagcaggaagaaggauggauauggacuccagucauaguauaacgcuucagccuacugcaaauccaaacacagguuugguggaagauuuggacaggacaggaccucuuucaaugacaacgcagcagaguaauucucagagcuucucuacaucacaugaaggcuuggaagaagauaaagaccauccaacaacuucuacucugacaucaagcaauaggaaugaugucacagguggaagaagagacccaaaucauucugaaggcucaacuacuuuacuggaagguuauaccucucauuacccacacacgaaggaaagcaggaccuucaucccagugaccucagcuaagacuggguccuuuggaguuacugcaguuacuguuggagauuccaacucuaaugucaaucguuccuuaucaggagaccaagacacauuccaccccaguggggggucccauaccacucauggaucugaaucagauggacacucacaugggagucaagaagguggagcaaacacaaccucugguccuauaaggacaccccaaauuccagaauggcugaucaucuuggcaucccucuuggccuuggcuuugauucuugcaguuugcauugcagucaacagucgaagaaggugugggcagaagaaaaagcuagugaucaacaguggcaauggagcuguggaggacagaaagccaaguggacucaacggagaggccagcaagucucaggaaauggugcauuuggugaacaaggagucgucagaaacuccagaccaguuuaugacagcugaugagacaaggaaccugcagaauguggacaugaagauugggguguaa

SEQ ID NO: 578 - RNA, 2100 nt, Artificial Sequence
  XM_006718388.1
auggacaaguuuugguggcacgcagccuggggacucugccucgugccgcugagccuggcgcagaucgauuugaauauaaccugccgcuuugcagguguauuccacguggagaaaaauggucgcuacagcaucucucggacggaggccgcugaccucugcaaggcuuucaauagcaccuugcccacaauggcccagauggagaaagcucugagcaucggauuugagaccugcagguauggguucauagaagggcacguggugauuccccggauccaccccaacuccaucugugcagcaaacaacacagggguguacauccucacauccaacaccucccaguaugacacauauugcuucaaugcuucagcuccaccugaagaagauuguacaucagucacagaccugcccaaugccuuugauggaccaauuaccauaacuauuguuaaccgugauggcacccgcuauguccagaaaggagaauacagaacgaauccugaagacaucuaccccagcaacccuacugaugaugacgugagcagcggcuccuccagugaaaggagcagcacuucaggagguuacaucuuuuacaccuuuucuacuguacaccccaucccagacgaagacagucccuggaucaccgacagcacagacagaaucccugcuaccacuuugaugagcacuagugcuacagcaacugagacagcaaccaagaggcaagaaaccugggauugguuuucaugguuguuucuaccaucagagucaaagaaucaucuucacacaacaacacaaauggcugguacgucuucaaauaccaucucagcaggcugggagccaaaugaagaaaaugaagaugaaagagacagacaccucaguuuuucuggaucaggcauugaugaugaugaagauuuuaucuccagcaccauuucaaccacaccacgggcuuuugaccacacaaaacagaaccaggacuggacccaguggaacccaagccauucaaauccggaagugcuacuucagacaaccacaaggaugacugauguagacagaaauggcaccacugcuuaugaaggaaacuggaacccagaagcacacccuccccucauucaccaugagcaucaugaggaagaagagaccccacauucuacaagcacaacagcuucagcucauaccagccauccaaugcaaggaaggacaacaccaagcccagaggacaguuccuggacugauuucuucaacccaaucucacaccccaugggacgaggucaucaagcaggaagaaggauggauauggacuccagucauaguauaacgcuucagccuacugcaaauccaaacacagguuugguggaagauuuggacaggacaggaccucuuucaaugacaacgcagcagaguaauucucagagcuucucuacaucacaugaaggcuuggaagaagauaaagaccauccaacaacuucuacucugacaucaagcaauaggaaugaugucacagguggaagaagagacccaaaucauucugaaggcucaacuacuuuacuggaagguuauaccucucauuacccacacacgaaggaaagcaggaccuucaucccagugaccucagcuaagacuggguccuuuggaguuacugcaguuacuguuggagauuccaacucuaaugucaaucguuccuuaucaggagaccaagacacauuccaccccaguggggggucccauaccacucauggaucugaaucagauggacacucacaugggagucaagaagguggagcaaacacaaccucugguccuauaaggacaccccaaauuccagaauggcugaucaucuuggcaucccucuuggccuuggcuuugauucuugcaguuugcauugcagucaacagucgaagaaggugugggcagaagaaaaagcuagugaucaacaguggcaauggagcuguggaggacagaaagccaaguggacucaacggagaggccagcaagucucaggaaauggugcauuuggugaacaaggagucgucagaaacuccagaccaguuuaugacagcugaugagacaaggaaccugcagaauguggacaugaagauugggguguaa

SEQ ID NO: 579 - RNA, 1377 nt, Artificial Sequence
  AAA35572
augaaccggggagucccuuuuaggcacuugcuucuggugcugcaacuggcgcuccucccagcagccacucagggaaagaaaguggugcugggcaaaaaaggggauacaguggaacugaccuguacagcuucccagaagaagagcauacaauuccacuggaaaaacuccaaccagauaaagauucugggaaaucagggcuccuucuuaacuaaagguccauccaagcugaaugaucgcgcugacucaagaagaagccuuugggaccaaggaaacuucccccugaucaucaagaaucuuaagauagaagacucagauacuuacaucugugaaguggaggaccagaaggaggaggugcaauugcuaguguucggauugacugccaacucugacacccaccugcuucaggggcagagccugacccugaccuuggagagccccccugguaguagccccucagugcaauguaggaguccaagggguaaaaacauacagggggggaagacccucuccgugucucagcuggagcuccaggauaguggcaccuggacaugcacugucuugcagaaccagaagaagguggaguucaaaauagacaucguggugcuagcuuuccagaaggccuccagcauagucuauaagaaagagggggaacagguggaguucuccuucccacucgccuuuacaguugaaaagcugacgggcaguggcgagcugugguggcaggcggagagggcuuccuccuccaagucuuggaucaccuuugaccugaagaacaaggaagugucuguaaaacggguuacccaggacccuaagcuccagaugggcaagaagcucccgcuccaccucacccugccccaggccuugccucaguaugcuggcucuggaaaccucacccuggcccuugaagcgaaaacaggaaaguugcaucaggaagugaaccugguggugaugagagccacucagcuccagaaaaauuugaccugugagguguggggacccaccuccccuaagcugaugcugagcuugaaacuggagaacaaggaggcaaaggucucgaagcgggagaaggcggugugggugcugaacccugaggcggggauguggcagugucugcugagugacucgggacagguccugcuggaauccaacaucaagguucugcccacaugguccaccccggugcagccaauggcccugauugugcuggggggcgucgccggccuccugcuuuucauugggcuaggcaucuucuucugugucaggugccggcaccgaaggcgccaagcagagcggaugucucagaucaagagacuccucagugagaagaagaccugccagugcccucaccgguuucagaagacauguagccccauuuga

SEQ ID NO: 580 - RNA, 186 nt, Artificial Sequence
  CAA44323
augaagcgcuuccucuuccuccuacucaccaucagccuccugguuaugguacagauacaaacuggacucucaggacaaaacgacaccagccaaaccagcagccccucagcauccagcaacauaagcggaggcauuuuccuuuucuucguggccaaugccauaauccaccucuucugcuucaguuga

SEQ ID NO: 581 - RNA, 186 nt, Artificial Sequence
  AAP35780
augaagcgcuuccucuuccuccuacucaccaucagccuccugguuaugguacagauacaaacuggacucucaggacaaaacgacaccagccaaaccagcagccccucagcauccagcagcaugagcggaggcauuuuccuuuucuucguggccaaugccauaauccaccucuucugcuucaguuag

SEQ ID NO: 582 - RNA, 186 nt, Artificial Sequence; identical to SEQ ID NO: 580
  ACS44650

SEQ ID NO: 583 - RNA, 954 nt, Artificial Sequence
  EAW93489
augaccgucgcgcggccgagcgugcccgcggcgcugccccuccucggggagcugccccggcugcugcugcuggugcuguugugccugccggccguguggggugacuguggccuucccccagauguaccuaaugcccagccagcuuuggaaggccguacaaguuuucccgaggauacuguaauaacguacaaaugugaagaaagcuuugugaaaauuccuggcgagaaggacucagugaucugccuuaagggcagucaauggucagauauugaagaguucugcaaucagaaaucaugcccuaauccgggagaaauacgaaauggucagauugauguaccagguggcauauuauuuggugcaaccaucuccuucucauguaacacaggguacaaauuauuuggcucgacuucuaguuuuugucuuauuucaggcagcucuguccaguggagugacccguugccagagugcagagaaauuuauuguccagcaccaccacaaauugacaauggaauaauucaaggggaacgugaccauuauggauauagacagucuguaacguaugcauguaauaaaggauucaccaugauuggagagcacucuauuuauuguacugugaauaaugaugaaggagaguggaguggcccaccaccugaaugcagaggaaaaucucuaacuuccaaggucccaccaacaguucagaaaccuaccacaguaaauguuccaacuacagaagucucaccaacuucucagaaaaccaccacaaaaaccaccacaccaaaugcucaagcaacacggaguacaccuguuuccaggacaaccaagcauuuucaugaaacaaccccaaauaaaggaaguggaaccacuucagguacuacccgucuucuaucugggcacacguguuucacguugacagguuugcuugggacgcuaguaaccaugggcuugcugacuuag

SEQ ID NO: 584 - RNA, 882 nt, Artificial Sequence
  EAW93497
augauuggagagcacucuauuuauuguacugugaauaaugaugaaggagaguggaguggcccaccaccugaaugcagaggaaaaucucuaacuuccaaggucccaccaacaguucagaaaccuaccacaguaaauguuccaacuacagaagucucaccaacuucucagaaaaccaccacaaaaaccaccacaccaaaugcucaagguacagagacuccaucaguucuucaaaaacacaccacagaaaauguuucagcuacaagaaccccaccaacuccucagaaacccaccacaguaaaugucccagcuacaauagucacaccaacaccucagaaacccaccacaauaaauguuccagcuacaggagucucaucaacaccucaaagacacaccauaguaaauguuucagcuacaggaacccuaccaacucuucagaaacccaccagagcaaaugauucagccaccaaauccccagcagcagcucagacaucuuucauaucaaaaacccuaucuacaaagaccccuucugcagcucagaaucccaugaugacaaaugcuucugcuacacaggccacacuaacagcccaaaaauucaccacagcaaaaguugcauuuacgcagaguccuucagcagcacguaaguccacuaauguacauuccccagugacuaauggucucaagaguacacaaagauucccuucugcucauauuacagcaacacggaguacaccuguuuccaggacaaccaagcauuuucaugaaacaaccccaaauaaaggaaguggaaccacuucagguacuacccgucuucuaucugggcacacguguuucacguugacagguuugcuugggacgcuaguaaccaugggcuugcugacuuag

SEQ ID NO: 585 - RNA, 804 nt, Artificial Sequence
  EAW93493
augauuggagagcacucuauuuauuguacugugaauaaugaugaaggagaguggaguggcccaccaccugaaugcagaggaaaaucucuaacuuccaaggucccaccaacaguucagaaaccuaccacaguaaauguuccaacuacagaagucucaccaacuucucagaaaaccaccacaaaaaccaccacaccaaaugcucaagguacagagacuccaucaguucuucaaaaacacaccacagaaaauguuucagcuacaagaaccccaccaacuccucagaaacccaccacaguaaaugucccagcuacaauagucacaccaacaccucagaaacccaccacaauaaauguuccagcuacaggagucucaucaacaccucaaagacacaccauaguaaauguuucagcuacaggaacccuaccaacucuucagaaacccaccagagcaaaugauucagccaccaaauccccagcagcagcucagacaucuuucauaucaaaaacccuaucuacaaagaccccuucugcagcucagaaucccaugaugacaaaugcuucugcuacacaggccacacuaacagcccaaaaauucaccacagcaaaaguugcauuuacgcagaguccuucagcagcaccaacacggaguacaccuguuuccaggacaaccaagcauuuucaugaaacaaccccaaauaaaggaaguggaaccacuucagguacuacccgucuucuaucugggcacacguguuucacguugacagguuugcuugggacgcuaguaaccaugggcuugcugacuuag

SEQ ID NO: 586 - RNA, 1146 nt, Artificial Sequence
  AAA52168
augaccgucgcgcggccgagcgugcccgcggcgcugccccuccucggggagcugccccggcugcugcugcuggugcuguugugccugccggccguguggggugacuguggccuucccccagauguaccuaaugcccagccagcuuuggaaggccguacaaguuuucccgaggauacuguaauaacguacaaaugugaagaaagcuuugugaaaauuccuggcgagaaggacucagugaucugccuuaagggcagucaauggucagauauugaagaguucugcaaucguagcugcgaggugccaacaaggcuaaauucugcaucccucaaacagccuuauaucacucagaauuauuuuccagucgguacuguuguggaauaugagugccguccagguuacagaagagaaccuucucuaucaccaaaacuaacuugccuucagaauuuaaaaugguccacagcagucgaauuuuguaaaaagaaaucaugcccuaauccgggagaaauacgaaauggucagauugauguaccagguggcauauuauuuggugcaaccaucuccuucucauguaacacaggguacaaauuauuuggcucgacuucuaguuuuugucuuauuucaggcagcucuguccaguggagugacccguugccagagugcagagaaauuuauuguccagcaccaccacaaauugacaauggaauaauucaaggggaacgugaccauuauggauauagacagucuguaacguaugcauguaauaaaggauucaccaugauuggagagcacucuauuuauuguacugugaauaaugaugaaggagaguggaguggcccaccaccugaaugcagaggaaaaucucuaacuuccaaggucccaccaacaguucagaaaccuaccacaguaaauguuccaacuacagaagucucaccaacuucucagaaaaccaccacaaaaaccaccacaccaaaugcucaagcaacacggaguacaccuguuuccaggacaaccaagcauuuucaugaaacaaccccaaauaaaggaaguggaaccacuucagguacuacccgucuucuaucugggcacacguguuucacguugacagguuugcuugggacgcuaguaaccaugggcuugcugacuuag

SEQ ID NO: 587 - RNA, 2577 nt, Artificial Sequence
  CCDS73385.1
augcugcaaacuaaggaucucaucuggacuuuguuuuuccugggaacugcaguuucucugcagguggauauuguucccagccagggggagaucagcguuggagaguccaaauucuucuuaugccaaguggcaggagaugccaaagauaaagacaucuccugguucucccccaauggagaaaagcucaccccaaaccagcagcggaucucagugguguggaaugaugauuccuccuccacccucaccaucuauaacgccaacaucgacgacgccggcauuuacaagugugugguuacaggcgaggauggcagugagucagaggccaccgucaacgugaagaucuuucagaagcucauguucaagaaugcgccaaccccacaggaguuccgggagggggaagaugccgugauugugugugauguggucagcucccucccaccaaccaucaucuggaaacacaaaggccgagaugucauccugaaaaaagauguccgauucauaguccuguccaacaacuaccugcagauccggggcaucaagaaaacagaugagggcacuuaucgcugugagggcagaauccuggcacggggggagaucaacuucaaggacauucaggucauugugaaugugccaccuaccauccaggccaggcagaauauugugaaugccaccgccaaccucggccaguccgucacccuggugugcgaugccgaaggcuucccagagcccaccaugagcuggacaaaggauggggaacagauagagcaagaggaagacgaugagaaguacaucuucagcgacgauaguucccagcugaccaucaaaaagguggauaagaacgacgaggcugaguacaucugcauugcugagaacaaggcuggcgagcaggaugcgaccauccaccucaaagucuuugcaaaacccaaaaucacauauguagagaaccagacugccauggaauuagaggagcaggucacucuuaccugugaagccuccggagaccccauucccuccaucaccuggaggacuucuacccggaacaucagcagcgaagaaaaggcuucguggacucgaccagagaagcaagagacucuggaugggcacaugguggugcguagccaugcccgugugucgucgcugacccugaagagcauccaguacacugaugccggagaguacaucugcaccgccagcaacaccaucggccaggacucccaguccauguaccuugaagugcaauaugccccaaagcuacagggcccuguggcuguguacacuugggaggggaaccaggugaacaucaccugcgagguauuugccuaucccagugccacgaucucaugguuucgggauggccagcugcugccaagcuccaauuacagcaauaucaagaucuacaacacccccucugccagcuaucuggaggugaccccagacucugagaaugauuuugggaacuacaacuguacugcagugaaccgcauugggcaggaguccuuggaauucauccuuguucaagcagacacccccucuucaccauccaucgaccagguggagccauacuccagcacagcccaggugcaguuugaugaaccagaggccacagguggggugcccauccucaaauacaaagcugaguggagagcaguuggugaagaaguauggcauuccaagugguaugaugccaaggaagccagcauggagggcaucgucaccaucgugggccugaagcccgaaacaacguacgccguaaggcuggcggcgcucaauggcaaagggcugggugagaucagcgcggccuccgaguucaagacgcagccaguccaaggggaacccagugcaccuaagcucgaagggcagaugggagaggauggaaacucuauuaaagugaaccugaucaagcaggaugacggcggcucccccaucagacacuaucuggucagguaccgagcgcucuccuccgaguggaaaccagagaucaggcucccgucuggcagugaccacgucaugcugaagucccuggacuggaaugcugaguaugaggucuacgugguggcugagaaccagcaaggaaaauccaaggcggcucauuuuguguucaggaccucggcccagcccacagccaucccagccaacggcagccccaccucaggccugagcaccggggccaucgugggcauccucaucgucaucuucguccugcuccuggugguuguggacaucaccugcuacuuccugaacaaguguggccuguucaugugcauugcggucaaccuguguggaaaagccgggcccggggccaagggcaaggacauggaggagggcaaggccgccuucucgaaagaugaguccaaggagcccaucguggagguucgaacggaggaggagaggaccccaaaccaugauggagggaaacacacagagcccaacgagaccacgccacugacggagcccgagaagggccccguagaagcaaagccagagugccaggagacagaaacgaagccagcgccagccgaagucaagacgguccccaaugacgccacacagacaaaggagaacgagagcaaagcauga

SEQ ID NO: 588 - RNA, 867 nt, Artificial Sequence
  ABK41933
augggccacacacggaggcagggaacaucaccauccaaguguccauaccucaauuucuuucagcucuuggugcuggcuggucuuucucacuucuguucagguguuauccacgugaccaaggaagugaaagaaguggcaacgcuguccuguggucacaauguuucuguugaagagcuggcacaaacucgcaucuacuggcaaaaggagaagaaaauggugcugacuaugaugucuggggacaugaauauauggcccgaguacaagaaccggaccaucuuugauaucacuaauaaccucuccauugugauccuggcucugcgcccaucugacgagggcacauacgaguguguuguucugaaguaugaaaaagacgcuuucaagcgggaacaccuggcugaagugacguuaucagucaaagcugacuucccuacaccuaguauaucugacuuugaaauuccaacuucuaauauuagaaggauaauuugcucaaccucuggagguuuuccagagccucaccucuccugguuggaaaauggagaagaauuaaaugccaucaacacaacaguuucccaagauccugaaacugagcucuaugcuguuagcagcaaacuggauuucaauaugacaaccaaccacagcuucaugugucucaucaaguauggacauuuaagagugaaucagaccuucaacuggaauacaaccaagcaagagcauuuuccugauaaccugcucccauccugggccauuaccuuaaucucaguaaauggaauuuuugugauaugcugccugaccuacugcuuugccccaagaugcagagagagaaggaggaaugagagauugagaagggaaaguguacgcccuguauaa

SEQ ID NO: 589 - RNA, 867 nt, Artificial Sequence; identical to SEQ ID NO: 588
  AAA36045

SEQ ID NO: 590 - RNA, 990 nt, Artificial Sequence
  CCDS3009.1
auggauccccagugcacuaugggacugaguaacauucucuuugugauggccuuccugcucucuggugcugcuccucugaagauucaagcuuauuucaaugagacugcagaccugccaugccaauuugcaaacucucaaaaccaaagccugagugagcuaguaguauuuuggcaggaccaggaaaacuugguucugaaugagguauacuuaggcaaagagaaauuugacaguguucauuccaaguauaugggccgcacaaguuuugauucggacaguuggacccugagacuucacaaucuucagaucaaggacaagggcuuguaucaauguaucauccaucacaaaaagcccacaggaaugauucgcauccaccagaugaauucugaacugucagugcuugcuaacuucagucaaccugaaauaguaccaauuucuaauauaacagaaaauguguacauaaauuugaccugcucaucuauacacgguuacccagaaccuaagaagaugaguguuuugcuaagaaccaagaauucaacuaucgaguaugaugguguuaugcagaaaucucaagauaaugucacagaacuguacgacguuuccaucagcuugucuguuucauucccugauguuacgagcaauaugaccaucuucuguauucuggaaacugacaagacgcggcuuuuaucuucaccuuucucuauagagcuugaggacccucagccucccccagaccacauuccuuggauuacagcuguacuuccaacaguuauuauaugugugaugguuuucugucuaauucuauggaaauggaagaagaagaagcggccucgcaacucuuauaaauguggaaccaacacaauggagagggaagagagugaacagaccaagaaaagagaaaaaauccauauaccugaaagaucugaugaagcccagcguguuuuuaaaaguucgaagacaucuucaugcgacaaaagugauacauguuuuuaa

SEQ ID NO: 591 - RNA, 708 nt, Artificial Sequence
  AAA59674
auggccuuaccagugaccgccuugcuccugccgcuggccuugcugcuccacgccgccaggccgagccaguuccgggugucgccgcuggaucggaccuggaaccugggcgagacaguggagcugaagugccaggugcugcuguccaacccgacgucgggcugcucguggcucuuccagccgcgcggcgccgccgccagucccaccuuccuccuauaccucucccaaaacaagcccaaggcggccgaggggcuggacacccagcgguucucgggcaagagguugggggacaccuucguccucacccugagcgacuuccgccgagagaacgagggcuacuauuucugcucggcccugagcaacuccaucauguacuucagccacuucgugccggucuuccugccagcgaagcccaccacgacgccagcgccgcgaccaccaacaccggcgcccaccaucgcgucgcagccccugucccugcgcccagaggcgugccggccagcggcggggggcgcagugcacacgagggggcuggacuucgccugugauaucuacaucugggcgccccuggccgggacuugugggguccuucuccugucacugguuaucacccuuuacugcaaccacaggaaccgaagacguguuugcaaauguccccggccuguggucaaaucgggagacaagcccagccuuucggcgagauacgucuaa

SEQ ID NO: 592 - RNA, 2472 nt, Artificial Sequence
  EAW57688
augacggugcugcaggaacccguccaggcugcuauauggcaagcacuaaaccacuaugcuuaccgagaugcgguuuuccucgcagaacgccuuuaugcagaaguacacucagaagaagccuuguuuuuacuggcaaccuguuauuaccgcucaggaaaggcauauaaagcauauagacucuugaaaggacacaguuguacuacaccgcaaugcaaauaccugcuugcaaaauguuguguugaucucagcaagcuugcagaaggggaacaaaucuuaucugguggaguguuuaauaagcagaaaagccaugaugauauuguuacugaguuuggugauucagcuugcuuuacucuuucauuguugggacauguauauugcaagacagaucggcuugccaaaggaucagaauguuaccaaaagagccuuaguuuaaauccuuuccucuggucucccuuugaaucauuaugugaaauaggugaaaagccagauccugaccaaacauuuaaauucacaucuuuacagaacuuuagcaacugucugcccaacucuugcacaacacaaguaccuaaucauaguuuaucucacagacagccugagacaguucuuacggaaacaccccaggacacaauugaauuaaacagauugaauuuagaaucuuccaauucaaaguacuccuugaauacagauuccucagugucuuauauugauucagcuguaauuucaccugauacugucccacugggaacaggaacuuccauauuaucuaaacagguucaaaauaaaccaaaaacuggucgaaguuuauuaggaggaccagcagcucuuaguccauuaaccccaaguuuugggauuuugccauuagaaaccccaaguccuggagauggauccuauuuacaaaacuacacuaauacaccuccuguaauugaugugccauccaccggagccccuucaaaaaagucuguugccagaaucggccaaacuggaacaaagucugucuucucacagaguggaaauagccgagagguaacuccaauucuugcacaaacacaaaguucugguccacaaacaaguacaacaccucagguauugagccccacuauuacaucucccccaaacgcacugccucgaagaaguucacgacucuuuacuagugacagcuccacaaccaaggagaauagcaaaaaauuaaaaaugaaguuuccaccuaaaaucccaaacagaaaaacaaaaaguaaaacuaauaaaggaggaauaacucaaccuaacauaaaugauagccuggaaauuacaaaauuggacucuuccaucauuucagaagggaaaauauccacaaucacaccucagauucaggccuuuaaucuacaaaaagcagcagcagguuugaugagccuucuucgugaaauggggaaagguuauuuagcuuuguguucauacaacugcaaagaagcuauaaauauuuugagccaucuaccuucucaccacuacaauacugguuggguacugugccaaauuggaagggccuauuuugaacuuucagaguacaugcaagcugaaagaauauucucagagguuagaaggauugagaauuauagaguugaaggcauggagaucuacucuacaacacuuuggcaucuucaaaaagauguugcucuuucaguucugucaaaagacuuaacagacauggauaaaaauucgccagaggccuggugugcugcagggaacuguuucagucugcaacgggaacaugauauugcaauuaaauucuuccagagagcuauccaaguugauccaaauuacgcuuaugccuauacucuauuagggcaugaguuugucuuaacugaagaauuggacaaagcauuagcuuguuuucgaaaugcuaucagagucaauccuagacauuauaaugcaugguaugguuuaggaaugauuuauuacaagcaagaaaaauucagccuugcagaaaugcauuuccaaaaagcgcuugauaucaacccucaaaguucaguuuuacuuugccacauuggaguaguucaacaugcacugaaaaaaucagagaaggcuuuggauacccuaaacaaagccauugucauugaucccaagaacccucuaugcaaauuucacagagccucaguuuuauuugcaaaugaaaaauauaagucugcuuuacaagaacuugaagaauugaaacaaauuguucccaaagaaucccucguuuacuucuuaauaggaaagguuuacaagaaguuaggucaaacgcaccucgcccugaugaauuucucuugggcuauggauuuagauccuaaaggagccaauaaccagauuaaagaggcaauugauaagcguuaucuuccagaugaugaggagccaauaacccaagaagaacagaucaugggaacagaugaaucccaggagagcagcaugacagaugcggaugacacacaacuucaugcagcugaaagugaugaauuuuaa

SEQ ID NO: 593 - RNA, 2475 nt, Artificial Sequence
  AAB34378
augacggugcugcaggaacccguccaggcugcuauauggcaagcacuaaaccacuaugcuuaccgagaugcgguuuuccucgcagaacgccuuuaugcagaaguacacucagaagaagccuuguuuuuacuggcaaccuguuauuaccgcucaggaaaggcauauaaagcauauagacucuugaaaggacacaguuguacuacaccgcaaugcaaauaccugcuugcaaaauguuguguugaucucagcaagcuugcagaaggggaacaaaucuuaucugguggaguguuuaauaagcagaaaagccaugaugauauuguuacugaguuuggugauucagcuugcuuuacucuuucauuguugggacauguauauugcaagacagaucggcuugccaaaggaucagaauguuaccaaaagagccuuaguuuaaauccuuuccucuggucucccuuugaaucauuaugugaaauaggugaaaagccagauccugaccaaacauuuaaauucacaucuuuacagaacuuuagcaacugucugcccaacucuugcacaacacaaguaccuaaucauaguuuaucucacagacagccugagacaguucuuacggaaacaccccaggacacaauugaauuaaacagauugaauuuagaaucuuccaauucaaaguacuccuugaauacagauuccucagugucuuauauugauucagcuguaauuucaccugauacugucccacugggaacaggaacuuccauauuaucuaaacagguucaaaauaaaccaaaaacuggucgaaguuuauuaggaggaccagcagcucuuaguccauuaaccccaaguuuugggauuuugccauuagaaaccccaaguccuggagauggauccuauuuacaaaacuacacuaauacaccuccuguaauugaugugccauccaccggagccccuucaaaaaagucuguugccagaaucggccaaacuggaacaaagucugucuucucacagaguggaaauagccgagagguaacuccaauucuugcacaaacacaaaguucugguccacaaacaaguacaacaccucagguauugagccccacuauuacaucucccccaaacgcacugccucgaagaaguucacgacucuuuacuagugacagcuccacaaccaaggagaauagcaaaaaauuaaaaaugaaguuuccaccuaaaaucccaaacagaaaaacaaaaaguaaaacuaauaaaggaggaauaacucaaccuaacauaaaugauagccuggaaauuacaaaauuggacucuuccaucauuucagaagggaaaauauccacaaucacaccucagauucaggccuuuaaucuacaaaaagcagcagcagaagguuugaugagccuucuucgugaaauggggaaagguuauuuagcuuuguguucauacaacugcaaagaagcuauaaauauuuugagccaucuaccuucucaccacuacaauacugguuggguacugugccaaauuggaagggccuauuuugaacuuucagaguacaugcaagcugaaagaauauucucagagguuagaaggauugagaauuauagaguugaaggcauggagaucuacucuacaacacuuuggcaucuucaaaaagauguugcucuuucaguucugucaaaagacuuaacagacauggauaaaaauucgccagaggccuggugugcugcagggaacuguuucagucugcaacgggaacaugauauugcaauuaaauucuuccagagagcuauccaaguugauccaaauuacgcuuaugccuauacucuauuagggcaugaguuugucuuaacugaagaauuggacaaagcauuagcuuguuuucgaaaugcuaucagagucaauccuagacauuauaaugcaugguaugguuuaggaaugauuuauuacaagcaagaaaaauucagccuugcagaaaugcauuuccaaaaagcgcuugauaucaacccucaaaguucaguuuuacuuugccacauuggaguaguucaacaugcacugaaaaaaucagagaaggcuuuggauacccuaaacaaagccauugucauugaucccaagaacccucuaugcaaauuucacagagccucaguuuuauuugcaaaugaaaaauauaagucugcuuuacaagaacuugaagaauugaaacaaauuguucccaaagaaucccucguuuacuucuuaauaggaaagguuuacaagaaguuaggucaaacgcaccucgcccugaugaauuucucuugggcuauggauuuagauccuaaaggagccaauaaccagauuaaagaggcaauugauaagcguuaucuuccagaugaugaggagccaauaacccaagaagaacagaucaugggaacagaugaaucccaggagagcagcaugacagaugcggaugacacacaacuucaugcagcugaaagugaugaauuuuaa

SEQ ID NO: 594 - RNA, 1788 nt, Artificial Sequence
  AAA51947
augcgcguccuccucgccgcgcugggacugcuguuccugggggcgcuacgagccuucccacaggaucgacccuucgaggacaccugucauggaaaccccagccacuacuaugacaaggcugucaggaggugcuguuaccgcugccccauggggcuguucccgacacagcagugcccacagaggccuacugacugcaggaagcagugugagccugacuacuaccuggaugaggccgaccgcuguacagccugcgugacuuguucucgagaugaccucguggagaagacgccgugugcauggaacuccucccgugucugcgaaugucgacccggcauguucuguuccacgucugccgucaacuccugugcccgcugcuucuuccauucugucuguccggcagggaugauugucaaguucccaggcacggcgcagaagaacacggucugugagccggcuuccccaggggucagcccugccugugccagcccagagaacugcaaggaacccuccaguggcaccaucccccaggccaagcccaccccgguguccccagcaaccuccagugccagcaccaugccuguaagagggggcacccgccucgcccaggaagcugcuucuaaacugacgagggcucccgacucucccuccucugugggaaggccuaguucagauccaggucuguccccaacacagccaugcccagaggggucuggugauugcagaaagcagugugagcccgacuacuaccuggacgaggccggccgcugcacagccugcgugagcuguucucgagaugaccuuguggagaagacgccaugugcauggaacuccucccgcaccugcgaaugucgaccuggcaugaucugugccacaucagccaccaacuccugugcccgcuguguccccuacccaaucugugcagcagagacggucaccaagccccaggauauggcugagaaggacaccaccuuugaggcgccaccccuggggacccagccggacugcaaccccaccccagagaauggcgaggcgccugccagcaccagccccacucagagcuugcugguggacucccaggccaguaagacgcugcccaucccaaccagcgcucccgucgcucucuccuccacggggaagcccguucuggaugcagggccagugcucuucugggugauccugguguugguugugguggucggcuccagcgccuuccuccugugccaccggagggccugcaggaagcgaauucggcagaagcuccaccugugcuacccgguccagaccucccagcccaagcuagagcuuguggauuccagacccaggaggagcucaacgcagcugaggaguggugcgucggugacagaacccgucgcggaagagcgaggguuaaugagccagccacugauggagaccugccacagcgugggggcagccuaccuggagagccugccgcugcaggaugccagcccggccgggggccccucgucccccagggaccuuccugagccccggguguccacggagcacaccaauaacaagauugagaaaaucuacaucaugaaggcugacaccgugaucguggggaccgugaaggcugagcugccggagggccggggccuggcggggccagcagagcccgaguuggaggaggagcuggaggcggaccauaccccccacuaccccgagcaggagacagaaccgccucugggcagcugcagcgaugucaugcucucaguggaagaggaagggaaagaagaccccuugcccacagcugccucuggaaaguga

SEQ ID NO: 595 - RNA, 912 nt, Artificial Sequence
  EAW97060
auggcuaccucucgauaugagccaguggcugaaauuggugucggugccuaugggacaguguacaaggcccgugauccccacaguggccacuuuguggcccucaagagugugagaguccccaauggaggaggagguggaggaggccuucccaucagcacaguucgugagguggcuuuacugaggcgacuggaggcuuuugagcaucccaauguuguccggcugauggacgucugugccacaucccgaacugaccgggagaucaagguaacccugguguuugagcauguagaccaggaccuaaggacauaucuggacaaggcacccccaccaggcuugccagccgaaacgaucaaggaucugaugcgccaguuucuaagaggccuagauuuccuucaugccaauugcaucguucaccgagaucugaagccagagaacauucuggugacaagugguggaacagucaagcuggcugacuuuggccuggccagaaucuacagcuaccagauggcacuuacacccgugguuguuacacucugguaccgagcucccgaaguucuucugcaguccacauaugcaacaccuguggacauguggaguguuggcuguaucuuugcagagauguuucgucgaaagccucucuucuguggaaacucugaagccgaccaguugggcaaaaucuuugaccugauugggcugccuccagaggaugacuggccucgagauguaucccugccccguggagccuuuccccccagagggccccgcccagugcagucggugguaccugagauggaggagucgggagcacagcugcugcuggaaaugcugacuuuuaacccacacaagcgaaucucugccuuucgagcucugcagcacucuuaucuacauaaggaugaagguaauccggaguga

SEQ ID NO: 596 - RNA, 912 nt, Artificial Sequence; identical to SEQ ID NO: 595
  AAA35673

SEQ ID NO: 597 - RNA, 690 nt, Artificial Sequence
  AAB50213
auggacgucugugccacaucccgaacugaccgggagaucaagguaacccugguguuugagcauguagaccaggaccuaaggacauaucuggacaaggcacccccaccaggcuugccagccgaaacgaucaaggaucugaugcgccaguuucuaagaggccuagauuuccuucaugccaauugcaucguucaccgagaucugaagccagagaacauucuggugacaagugguggaacagucaagcuggcugacuuuggccuggccagaaucuacagcuaccagauggcacuuacacccgugguuguuacacucugguaccgagcucccgaaguucuucugcaguccacauaugcaacaccuguggacauguggaguguuggcuguaucuuugcagagauguuucgucgaaagccucucuucuguggaaacucugaagccgaccaguugggcaaaaucuuugaccugauugggcugccuccagaggaugacuggccucgagauguaucccugccccguggagccuuuccccccagagggccccgcccagugcagucggugguaccugagauggaggagucgggagcacagcugcugcuggaaaugcugacuuuuaacccacacaagcgaaucucugccuuucgagcucugcagcacucuuaucuacauaaggaugaagguaauccggaguga

SEQ ID NO: 598 - RNA, 336 nt, Artificial Sequence
  AAH15669
auggcuaccucucgauaugagccaguggcugaaauuggugucggugccuaugggacaguguacaaggcccgugauccccacaguggccacuuuguggcccucaagagugugagaguccccaauggaggaggagguggaggaggccuucccaucagcacaguucgugagguggcuuuacugaggcgacuggaggcuuuugagcaucccaauguuguccggcugauggacgucugugccacaucccgaacugaccgggagaucaagagauguuucgucgaaagccucucuucuguggaaacucugaagccgaccaguugggcaaaaucuuugaccuga

SEQ ID NO: 599 - RNA, 429 nt, Artificial Sequence
  ACY78326
auggagccggcggcggggagcagcauggagccuucggcugacuggcuggccacggccgcggcccggggucggguagaggaggugcgggcgcugcuggaggcgggggcgcugcccaacgcaccgaauaguuacggucggaggccgauccaggucaugaugaugggcagcgcccgaguggcggagcugcugcugcuccacggcgcggagcccaacugcgccgaccccgccacucucacccgacccgugcacgacgcugcccgggagggcuuccuggacacgcugguggugcugcaccgggccggggcgccgugcgcgaugccuggggccgucugcccguggaccuggcugaggagcugggccaucgcgaugucgcacgguaccugcgcgcggcugcggggggcaccagaggcaguaaccaugcccgcauag

SEQ ID NO: 600 - RNA, 351 nt, Artificial Sequence
  EAW58598
auggagccggcggcggggagcagcauggagccuucggcugacuggcuggccacggccgcggcccggggucggguagaggaggugcgggcgcugcuggaggcgggggcgcugcccaacgcaccgaauaguuacggucggaggccgauccagguggguagagggucugcagcgggagcaggggauggcgggcgacucuggaggacgaaguuugcaggggaauuggaaucagguagcgcuucgauucuccggaaaaaggggaggcuuccuggggaguuuucagaagggguuuguaaucacagaccuccuccuggcgacgcccugggggcuugggaagccaaggaagaggaauga

SEQ ID NO: 601 - RNA, 471 nt, Artificial Sequence
  AFN61598
auggagccggcggcggggagcagcauggagccuucggcugacuggcuggccacggccgcggcccggggucggguagaggaggugcgggcgcugcuggaggcgggggcgcugcccaacgcaccgaauaguuacggucggaggccgauccaggucaugaugaugggcagcgcccgaguggcggagcugcugcugcuccacggcgcggagcccaacugcgccgaccccgccacucucacccgacccgugcacgacgcugcccgggagggcuuccuggacacgcugguggugcugcaccgggccggggcgcggcuggacgugcgcgaugccuggggccgucugcccguggaccuggcugaggagcugggccaucgcgaugucgcacgguaccugcgcgcggcugcggggggcaccagaggcaguaaccaugcccgcauagaugccgcggaaggucccucagacauccccgauuga

SEQ ID NO: 602 - RNA, 327 nt, Artificial Sequence
  CCQ43815
auggaagucaugaugaugggcagcgcccgaguggcggagcugcugcugcuccacggcgcggagcccaacugcgccgaccccgccacucucacccgacccgugcacgacgcugcccgggagggcuuccuggacacgcugguggugcugcaccgggccggggcgcggcuggacgugcgcgaugccuggggccgucugcccguggaccuggcugaggagcugggccaucgcgaugucgcacgguaccugcgcgcggcugcggggggcaccagaggcaguaaccaugcccgcauagaugccgcggaaggucccucagacauccccgauuga

SEQ ID NO: 603 - RNA, 399 nt, Artificial Sequence
  AAA82236
auggugcgcagguucuuggugacccuccggauucggcgcgcgugcggcccgccgcgagugaggguuuucgugguucacaucccgcggcucacgggggagugggcagcgccaggggcgcccgccgcuguggcccucgugcugaugcuacugaggagccagcgucuagggcagcagccgcuuccuagaagaccaggucaugaugaugggcagcgcccgaguggcggagcugcugcugcuccacggcgcggagcccaacugcgccgaccccgccacucucacccgacccgugcacgacgcugcccgggagggcuuccuggacacgcugguggugcugcaccgggccggggcgcggcuggacgugcgcgaugccuggggccgucugcccguggaccuggcuga

SEQ ID NO: 604 - RNA, 2109 nt, Artificial Sequence
  CCDS12584.1
auggagucucccucggccccuccccacagauggugcauccccuggcagaggcuccugcucacagccucacuucuaaccuucuggaacccgcccaccacugccaagcucacuauugaauccacgccguucaaugucgcagaggggaaggaggugcuucuacuuguccacaaucugccccagcaucuuuuuggcuacagcugguacaaaggugaaagaguggauggcaaccgucaaauuauaggauauguaauaggaacucaacaagcuaccccagggcccgcauacaguggucgagagauaauauaccccaaugcaucccugcugauccagaacaucauccagaaugacacaggauucuacacccuacacgucauaaagucagaucuugugaaugaagaagcaacuggccaguuccggguauacccggagcugcccaagcccuccaucuccagcaacaacuccaaacccguggaggacaaggaugcuguggccuucaccugugaaccugagacucaggacgcaaccuaccugugguggguaaacaaucagagccucccggucagucccaggcugcagcuguccaauggcaacaggacccucacucuauucaaugucacaagaaaugacacagcaagcuacaaaugugaaacccagaacccagugagugccaggcgcagugauucagucauccugaauguccucuauggcccggaugcccccaccauuuccccucuaaacacaucuuacagaucaggggaaaaucugaaccucuccugccacgcagccucuaacccaccugcacaguacucuugguuugucaaugggacuuuccagcaauccacccaagagcucuuuauccccaacaucacugugaauaauaguggauccuauacgugccaagcccauaacucagacacuggccucaauaggaccacagucacgacgaucacagucuaugcagagccacccaaacccuucaucaccagcaacaacuccaaccccguggaggaugaggaugcuguagccuuaaccugugaaccugagauucagaacacaaccuaccugugguggguaaauaaucagagccucccggucagucccaggcugcagcuguccaaugacaacaggacccucacucuacucagugucacaaggaaugauguaggacccuaugaguguggaauccagaacgaauuaaguguugaccacagcgacccagucauccugaauguccucuauggcccagacgaccccaccauuucccccucauacaccuauuaccguccaggggugaaccucagccucuccugccaugcagccucuaacccaccugcacaguauucuuggcugauugaugggaacauccagcaacacacacaagagcucuuuaucuccaacaucacugagaagaacagcggacucuauaccugccaggccaauaacucagccaguggccacagcaggacuacagucaagacaaucacagucucugcggagcugcccaagcccuccaucuccagcaacaacuccaaacccguggaggacaaggaugcuguggccuucaccugugaaccugaggcucagaacacaaccuaccugugguggguaaauggucagagccucccagucagucccaggcugcagcuguccaauggcaacaggacccucacucuauucaaugucacaagaaaugacgcaagagccuauguauguggaauccagaacucagugagugcaaaccgcagugacccagucacccuggauguccucuaugggccggacacccccaucauuucccccccagacucgucuuaccuuucgggagcgaaccucaaccucuccugccacucggccucuaacccauccccgcaguauucuuggcguaucaaugggauaccgcagcaacacacacaaguucucuuuaucgccaaaaucacgccaaauaauaacgggaccuaugccuguuuugucucuaacuuggcuacuggccgcaauaauuccauagucaagagcaucacagucucugcaucuggaacuucuccuggucucucagcuggggccacugucggcaucaugauuggagugcugguugggguugcucugauauag

SEQ ID NO: 605 - RNA, 1035 nt, Artificial Sequence
  AAA51739
augggaccccccucagccccucccugcagauugcauguccccuggaaggagguccugcucacagccucacuucuaaccuucuggaacccacccaccacugccaagcucacuauugaauccacgccauucaaugucgcagaggggaaggagguucuucuacucgcccacaaccugccccagaaucguauugguuacagcugguacaaaggcgaaagaguggauggcaacagucuaauuguaggauauguaauaggaacucaacaagcuaccccagggcccgcauacaguggucgagagacaauauaccccaaugcaucccugcugauccagaacgucacccagaaugacacaggauucuauacccuacaagucauaaagucagaucuugugaaugaagaagcaaccggacaguuccauguauacccggagcugcccaagcccuccaucuccagcaacaacuccaaccccguggaggacaaggaugcuguggccuucaccugugaaccugagguucagaacacaaccuaccugugguggguaaauggucagagccucccggucagucccaggcugcagcuguccaauggcaacaugacccucacucuacucagcgucaaaaggaacgaugcaggauccuaugaaugugaaauacagaacccagcgagugccaaccgcagugacccagucacccugaauguccucuauggcccagauggccccaccauuucccccucaaaggccaauuaccguccaggggaaaaucugaaccucuccugccacgcagccucuaacccaccugcacaguacucuugguuuaucaaugggacguuccagcaauccacacaagagcucuuuauccccaacaucacugugaauaauagcggauccuauaugugccaagcccauaacucagccacuggccucaauaggaccacagucacgaugaucacagucucuggaagugcuccuguccucucagcuguggccaccgucggcaucacgauuggagugcuggccagggucgcucugauauag

SEQ ID NO: 606 - RNA, 1173 nt, Artificial Sequence
  AAB04533
augggagcaaccaccauggaccagaagucucucugggcagguguaguggucuugcugcuucuccagggaggaucugccuacaaacugguuugcuacuuuaccaacuggucccaggaccggcaggaaccaggaaaauucaccccugagaauauugaccccuuccuaugcucucaucucaucuauucauucgccagcaucgaaaacaacaagguuaucaucaaggacaagagugaagugaugcucuaccagaccaucaacagucucaaaaccaagaaucccaaacugaaaauucucuuguccauuggaggguaccuguuugguuccaaaggguuccacccuaugguggauucuucuacaucacgcuuggaauucauuaacuccauaauccuguuucugaggaaccauaacuuugauggacuggauguaagcuggaucuacccagaucagaaagaaaacacucauuucacugugcugauucaugaguuagcagaagccuuucagaaggacuucacaaaauccaccaaggaaaggcuucucuugacugcgggcguaucugcagggaggcaaaugauugauaacagcuaucaaguugagaaacuggcaaaagaucuggauuucaucaaccuccuguccuuugacuuccaugggucuugggaaaagccccuuaucacuggccacaacagcccucugagcaagggguggcaggacagagggccaagcuccuacuacaauguggaauaugcugugggguacuggauacauaagggaaugccaucagagaagguggucaugggcauccccacauaugggcacuccuucacacuggccucugcagaaaccaccgugggggccccugccucuggcccuggagcugcuggacccaucacagagucuucaggcuuccuggccuauuaugagaucugccaguuccugaaaggagccaagaucacgcggcuccaggaucagcagguucccuacgcagucaaggggaaccagugggugggcuaugaugaugugaagaguauggagaccaagguucaguucuuaaagaauuuaaaccugggaggagccaugaucuggucuauugacauggaugacuucacuggcaaauccugcaaccagggcccuuacccucuuguccaagcagucaagagaagccuuggcucccuguga

SEQ ID NO: 607 - RNA, 2832 nt, Artificial Sequence
  AAD40367
augacccaaaggagcauugcagguccuauuugcaaccugaaguuugugacucuccugguugccuuaaguucagaacucccauuccugggagcuggaguacagcuucaagacaauggguauaauggauugcucauugcaauuaauccucagguaccugagaaucagaaccucaucucaaacauuaaggaaaugauaacugaagcuucauuuuaccuauuuaaugcuaccaagagaagaguauuuuucagaaauauaaagauuuuaauaccugccacauggaaagcuaauaauaacagcaaaauaaaacaagaaucauaugaaaaggcaaaugucauagugacugacugguauggggcacauggagaugauccauacacccuacaauacagaggguguggaaaagagggaaaauacauucauuucacaccuaauuuccuacugaaugauaacuuaacagcuggcuacggaucacgaggccgaguguuuguccaugaaugggcccaccuccguugggguguguucgaugaguauaacaaugacaaaccuuucuacauaaaugggcaaaaucaaauuaaagugacaagguguucaucugacaucacaggcauuuuugugugugaaaaagguccuugcccccaagaaaacuguauuauuaguaagcuuuuuaaagaaggaugcaccuuuaucuacaauagcacccaaaaugcaacugcaucaauaauguucaugcaaaguuuaucuucugugguugaauuuuguaaugcaaguacccacaaccaagaagcaccaaaccuacagaaccagaugugcagccucagaagugcaugggauguaaucacagacucugcugacuuucaccacagcuuucccaugaaugggacugagcuuccaccuccucccacauucucgcuuguacaggcuggugacaaaguggucuguuuagugcuggauguguccagcaagauggcagaggcugacagacuccuucaacuacaacaagccgcagaauuuuauuugaugcagauuguugaaauucauaccuucgugggcauugccaguuucgacagcaaaggagagaucagagcccagcuacaccaaauuaacagcaaugaugaucgaaaguugcugguuucauaucugcccaccacuguaucagcuaaaacagacaucagcauuuguucagggcuuaagaaaggauuugaggugguugaaaaacugaauggaaaagcuuauggcucugugaugauauuagugaccagcggagaugauaagcuucuuggcaauugcuuacccacugugcucagcagugguucaacaauucacuccauugcccuggguucaucugcagccccaaaucuggaggaauuaucacgucuuacaggagguuuaaaguucuuuguuccagauauaucaaacuccaauagcaugauugaugcuuucaguagaauuuccucuggaacuggagacauuuuccagcaacauauucagcuugaaaguacaggugaaaaugucaaaccucaccaucaauugaaaaacacagugacuguggauaauacugugggcaacgacacuauguuucuaguuacguggcaggccagugguccuccugagauuauauuauuugauccugauggacgaaaauacuacacaaauaauuuuaucaccaaucuaacuuuucggacagcuagucuuuggauuccaggaacagcuaagccugggcacuggacuuacacccugaacaauacccaucauucucugcaagcccugaaagugacagugaccucucgcgccuccaacucagcugugcccccagccacuguggaagccuuuguggaaagagacagccuccauuuuccucauccugugaugauuuaugccaaugugaaacagggauuuuaucccauucuuaaugccacugucacugccacaguugagccagagacuggagauccuguuacgcugagacuccuugaugauggagcaggugcugauguuauaaaaaaugauggaauuuacucgagguauuuuuucuccuuugcugcaaaugguagauauagcuugaaagugcaugucaaucacucucccagcauaagcaccccagcccacucuauuccagggagucaugcuauguauguaccagguuacacagcaaacgguaauauucagaugaaugcuccaaggaaaucaguaggcagaaaugaggaggagcgaaaguggggcuuuagccgagucagcucaggaggcuccuuuucagugcugggaguuccagcuggcccccacccugauguguuuccaccaugcaaaauuauugaccuggaagcuguaaaaguagaagaggaauugacccuaucuuggacagcaccuggagaagacuuugaucagggccaggcuacaagcuaugaaauaagaaugaguaaaagucuacagaauauccaagaugacuuuaacaaugcuauuuuaguaaauacaucaaagcgaaauccucagcaagcuggcaucagggagauauuuacguucucaccccagauuuccacgaauggaccugaacaucagccaaauggagaaacacaugaaagccacagaauuuauguugcaauacgagcaauggauaggaacuccuuacagucugcuguaucuaacauugcccaggcgccucuguuuauuccccccaauucugauccuguaccugccagagauuaucuuauauugaaaggaguuuuaacagcaauggguuugauaggaaucauuugccuuauuauaguugugacacaucauacuuuaagcaggaaaaagagagcagacaagaaagagaauggaacaaaauuauuauaa

SEQ ID NO: 608 - RNA, 708 nt, Artificial Sequence
  AAF82135
auggaggaggagacgcauacugacgccaaaauccgugcugaaaauggaacaggguccagcccucgggguccuggcugcagccuccggcacuuugccugcgaacagaaccugcugucgcggccagauggcucugcuuccuuccugcaaggugacaccucuguccuggcggguguguacgggccggccgaggugaaggucagcaaagagauuuucaacaaggccacacucgaagugauccugaggccgaagauugggcugccugguguugcagagaagagccgggagcggcugaucaggaacacgugcgaggcgguggugcugggcacguugcacccccgcaccuccaucaccguggugcugcagguugucagcgaugccggcucucuccuggccuguugucugaaugccgccugcauggcauugguggaugcaggugugcccaugcgggcucucuucuguggggucgccugcgcccuggacucugaugggacccucgugcuggauccuacauccaagcaagaaaaggaggcccgggcaguccugaccuuugcccuggacagcguggaacggaagcugcugauguccagcaccaaggggcucuacucagacacugagcuccagcagugccuggcugcggcccaggccgcuucgcaacacgucuuccguuucuaccgggaaucgcugcagaggcguuacuccaagagcuga

SEQ ID NO: 609 - RNA, 1752 nt, Artificial Sequence
  CCDS6312.1
auggagguggcggcuaauugcucccuacgggugaagagaccucuguuggauccccgcuucgaggguuacaagcucucucuugagccgcugccuuguuaccagcuggagcuugacgcagcuguggcagagguaaaacuucgagaugaucaauauacacuggaacacaugcaugcuuuuggaauguauaauuaccugcacugugauucaugguaucaagacagugucuacuauauugauacccuuggaagaauuaugaauuuaacaguaaugcuggacacugccuuaggaaaaccacgagagguguuucgacuuccuacagauuugacagcaugugacaaccgucuuugugcaucuauccauuucucaucuucuaccuggguuaccuugucagauggaacuggaagauuguaugucauuggaacaggugaacguggaaauagcgcuucugaaaaaugggagauuauguuuaaugaagaacuuggggauccuuuuauuauaauucacaguaucucacugcuaaaugcugaagaacauucuauagcuacccuacuucuucgaauagagaaagaggaauuggauaugaaaggaagugguuucuauguuucucuggagugggucacuaucaguaagaaaaaucaagauaauaaaaaauaugaaauuauuaagcgugauauucuccguggaaagucagugccacauuaugcugcuauugagccugauggaaauggucuaaugauuguauccuacaagucuuuaacauuuguucaggcuggucaagaucuugaagaaaauauggaugaagacauaucagagaaaaucaaagaaccucuguauuacuggcaacagacugaagaugauuugacaguaaccauacggcuuccagaagacaguacuaaggaggacauucaaauacaguuuuugccugaucacaucaacauuguacugaaggaucaccaguuuuuagaaggaaaacucuauucaucuauugaucaugaaagcaguacauggauaauuaaagagaguaauagcuuggagauuuccuugauuaagaagaaugaaggacugaccuggccagagcuaguaauuggagauaaacaaggggaacuuauaagagauucagcccagugugcugcaauagcugaacguuugaugcauuugaccucugaagaacugaauccaaauccagauaaagaaaaaccaccuugcaaugcucaagaguuagaagaaugugauauuuucuuugaagagagcuccaguuuaugcagauuugauggcaauacauuaaaaacuacucauguggugaaucuuggaagcaaccaguaccuuuucucugucauaguggauccuaaagaaaugcccugcuucuguuugcgccaugauguugaugcccuacucuggcaaccacacuccagcaaacaagaugauaugugggagcacaucgcaacuuucaaugcuuuaggcuauguccaagcaucaaagagagacaaaaaauuuuuugccugugcuccaaauuacucguaugcagcccuuugugagugccuucgucgaguauucaucuaucgucagccugcucccauguccacuguacuuuacaacagaaaggaaggcaggcaaguaggacagguugcuaagcagcaaguagcaagccuagaaaccaaugauccuauuuuaggauuucaggcaacaaaugagagauuauuuguucuuacuaccaaaaaccucuuuuuaauaaaaguaaauacagagaauuaa

SEQ ID NO: 610 - RNA, 1563 nt, Artificial Sequence
  CCDS41288.1
augagcucaccuuuggccucccuuagcaagacccgaaaagugccccugcccucggagccuaugaauccugggaggcgaggaauccgcaucuauggagaugaagaugagguggacauguugagugauggguguggcucagaagaaaagaucucagucccuuccugcuauggcggcauaggugccccugugagucggcaagucccugcaucccaugacucggagcugauggccuucaugacgaggaaguugugggaccuggagcagcaggugaaggcccagacugaugagauacuguccaaggaucagaagauagcggcccuagaggaccuggugcagacccuccggccacacccagccgaggcaacccugcagcggcaggaggaacuggagacgaugugugugcagcugcagcggcaggucagggagauggagcgguuccucagugacuauggccugcagugggugggcgagcccauggaccaggaggacucagagagcaagacagucucagagcauggcgagagggacuggaugacagccaagaaguucuggaagccaggggacucauuggcgcccccugagguggacuuugacaggcugcuggccagccugcaggaucuuagugagcuggugguagagggugacacccaagugacaccagugcccggcggggcacggcugcguacccucgagcccaucccgcugaagcucuaccggaauggcaucaugauguucgacgggcccuuccagcccuucuacgaucccuccacacagcgcugccuccgagacauauuggauggcuucuuucccucagagcuccagcgacuguaccccaaugggguccccuuuaaggugagugacuugcgcaaucaggucuaccuggaggauggacuggaccccuucccaggcgagggccguguggugggcaggcagcugaugcacaaggccuuggacaggguggaggagcacccaggcuccaggaugacugcugagaaauuucugaacaggcuccccaaguuugugauccggcaaggcgaggugauugacauccggggccccaucagggacaccuugcagaacugcugcccauugccugcccggauccaggagauugugguggagacgcccaccuuggccgcugagcgagagaggagccaggagucacccaacacgccggcacccccgcucuccaugcugcgcaucaagucugagaauggggaacaggccuuccuacugaugaugcagccugacaacaccauuggggacgugcgagcucugcuagcgcaggccagggucauggaugccucugccuuugagaucuucagcacauucccgcccacccucuaccaggacgauacacucacgcugcaggcugcaggccuugugcccaaagcagcacugcugcugcgggcacgccgagccccgaaguccagccugaaauucaguccuggucccugucccggucccggucccggccccagucccggucccggucccggccccagucccggucccggucccggccccagucccuguccuggacccagucccagcccccaauaa

SEQ ID NO: 611 - RNA, 429 nt, Artificial Sequence
  AAA88022
auggccaccaagaucgacaaagaggcuugccgggcggcguacaaccuggugcgcgacgacggcucggccgucaucugggugacuuuuaaauaugacggcuccaccaucguccccggcgagcagggagcggaguaccagcacuucauccagcagugcacagaugacguccgguuguuugccuucgugcgcuucaccaccggggaugccaugagcaagagguccaaguuugcccucaucacguggaucggugagaacgucagcgggcugcagcgcgccaaaaccgggacggacaagacccuggugaaggaggucguacagaauuucgcuaaggaguuugugaucagugaucggaaggagcuggaggaagauuucaucaagagcgagcugaagaaggcggggggagccaauuacgacgcccagacggaguaa

SEQ ID NO: 612 - RNA, 495 nt, Artificial Sequence
  CCQ43891
auggcuacccgggaccccuggguuuggauggcaagcccggacuuccaggcccgaaaggggaaaagggugcaccaggagacuuuggcccccggggagaccaaggacaagauggagcugcugggccuccggggcccccuggaccuccuggggcccggggcccuccuggcgacacugggaaagauggccccaggggagcacaaggcccagcgggccccaaaggagagcccggacaagacggcgagaugggcccaaagggacccccagggcccaagggugagccuggaguaccuggaaagaagggcgacgaugggacaccaagccagccuggaccaccagggcccaagggcgagccagggagcauggggccucggggagagaacgguguggacggugccccaggaccgaagggggagccuggccaccgaggcacggauggagcugcagggccccggggugccccaggccucaagggcgagcagggagacacagugguga

SEQ ID NO: 613 - RNA, 1623 nt, Artificial Sequence
  AAO18361
augggcccaggcgagcgcgccgguggcggcggcgacgcggggaagggcaaugcggcgggcggcggcggcggagggcgcucggcgacgacggccgggucccgggcggugagcgcgcugugccugcugcucuccgugggcucggcggcugccugccugcugcuggguguccaggcggccgcgcugcagggccggguggcggcgcucgaggaggagcgggagcugcugcggcgcgcggggccgccaggcgcccuggacgccugggccgagccgcaccuggagcgccugcugcgggagaaguuggacggacuagcgaagauccggacugcucgggaagcuccauccgaaugugucugccccccagggcccccuggacggcgcggcaagccugggagaagaggcgacccugguccuccagggcaaucaggacgagauggcuacccgggaccccuggguuuggauggcaagcccggacuuccaggcccgaaaggggaaaagggugcaccaggagacuuuggcccccggggagaccaaggacaagauggagcugcugggccuccggggcccccuggaccuccuggggcccggggcccuccuggcgacacugggaaagauggccccaggggagcacaaggcccagcgggccccaaaggagagcccggacaagacggcgagaugggcccaaagggacccccagggcccaagggugagccuggaguaccuggaaagaagggcgacgaugggacaccaagccagccuggaccaccagggcccaagggcgagccagggagcauggggccucggggagagaacgguguggacggugccccaggaccgaagggggagccuggccaccgaggcacggauggagcugcagggccccggggugccccaggccucaagggcgagcagggagacacaguggugaucgacuaugauggcaggaucuuggaugcccucaaggggccucccggaccacaggggcccccagggccaccagggaucccuggagccaagggcgagcuuggauugcccggugccccaggaaucgauggagagaagggccccaaaggacagaaaggagacccaggagagccugggccagcaggacucaaaggggaagcaggcgagaugggcuuguccggccucccgggcgcugacggccucaagggggagaagggggagucggcgucugacagccuacaggagagccuggcucagcucauaguggagccagggcccccuggccccccuggccccccaggcccgaugggccuccagggaauccagggucccaagggcuuggauggagcaaagggagagaagggugcgucgggugagagaggccccagcggccugccugggccaguuggcccaccgggccuuauugggcugccaggaaccaaaggagagaagggcagacccggggagccaggacuagaugguuucccuggaccccgaggagagaaaggugaucggagcgagcguggagagaagggagaacgagggguccccggccggaaaggagugaagggccagaagggcgagccgggaccaccaggccuggaccagccgugucccgugggccccgacgggcugccugugccuggcugcuggcauaaguga

SEQ ID NO: 614 - RNA, 492 nt, Artificial Sequence
  CAG25548
augcucgcccgcgcccugcugcugugcgcgguccuggcgcucagccauacagcaaauccuugcuguucccacccaugucaaaaccgagguguauguaugagugugggauuugaccaguauaagugcgauuguacccggacaggauucuauggagaaaacugcucaacaccggaauuuuugacaagaauaaaauuauuucugaaacccacuccaaacacagugcacuacauacuuacccacuucaagggauuuuggaacguugugaauaacauucccuuccuucgaaaugcaauuaugaguuauguguugacauccagaucacauuugauugacaguccaccaacuuacaaugcugacuauggcuacaaaagcugggaagccuucucuaaccucuccuauuauacuagagcccuuccuccugugccugaugauugcccgacucccuugggugucaaagcacuucacgcaucaguuuuucaagacagaucauaa

SEQ ID NO: 615 - RNA, 1632 nt, Artificial Sequence
  AAC50809
augggcaccagccucagcccgaacgacccuuggccgcuaaacccgcuguccauccagcagaccacgcuccugcuacuccugucggugcuggccacugugcaugugggccagcggcugcugaggcaacggaggcggcagcuccgguccgcgcccccgggcccguuugcguggccacugaucggaaacgcggcggcggugggccaggcggcucaccucucguucgcucgccuggcgcggcgcuacggcgacguuuuccagauccgccugggcagcugccccauaguggugcugaauggcgagcgcgccauccaccaggcccuggugcagcagggcucggccuucgccgaccggccggccuucgccuccuuccgugugguguccggcggccgcagcauggcuuucggccacuacucggagcacuggaaggugcagcggcgcgcagcccacagcaugaugcgcaacuucuucacgcgccagccgcgcagccgccaaguccucgagggccacgugcugagcgaggcgcgcgagcugguggcgcugcuggugcgcggcagcgcggacggcgccuuccucgacccgaggccgcugaccgucguggccguggccaacgucaugagugccguguguuucggcugccgcuacagccacgacgaccccgaguuccgugagcugcucagccacaacgaagaguucgggcgcacggugggcgcgggcagccugguggacgugaugcccuggcugcaguacuuccccaacccggugcgcaccguuuuccgcgaauucgagcagcucaaccgcaacuucagcaacuucauccuggacaaguucuugaggcacugcgaaagccuucggcccggggccgccccccgcgacaugauggacgccuuuauccucucugcggaaaagaaggcggccggggacucgcacggugguggcgcgcggcuggauuuggagaacguaccggccacuaucacugacaucuucggcgccagccaggacacccuguccaccgcgcugcaguggcugcuccuccucuucaccagguauccugaugugcagacucgagugcaggcagaauuggaucaggucguggggagggaccgucugccuuguaugggugaccagcccaaccugcccuauguccuggccuuccuuuaugaagccaugcgcuucuccagcuuugugccugucacuauuccucaugccaccacugccaacaccucugucuugggcuaccacauucccaaggacacugugguuuuugucaaccaguggucugugaaucaugacccacugaaguggccuaacccggagaacuuugauccagcucgauucuuggacaaggacggccucaucaacaaggaccugaccagcagagugaugauuuuuucagugggcaaaaggcggugcauuggcgaagaacuuucuaagaugcagcuuuuucucuucaucuccauccuggcucaccagugcgauuucagggccaacccaaaugagccugcgaaaaugaauuucaguuauggucuaaccauuaaacccaagucauuuaaagucaaugucacucucagagaguccauggagcuccuugauagugcuguccaaaauuuacaagccaaggaaacuugccaauaa

SEQ ID NO: 616 - RNA, 333 nt, Artificial Sequence
  NM_001129828
auguggaugggccucauccaauuaguugaagguguuaagagaaaagaccaagguuuccuggaaaaggaauucuaccacaagacuaacauaaaaaugcgcugugaguuucuagccugcuggccugccuucacuguccugggggaggcuuggagagaccagguggacuggaguagacuguugagagacgcuggucuggugaagauguccaggaaaccacgagccuccagcccauuguccaacaaccacccaccaacaccaaagagguucccaagacaacccggaagggaaaagggacccaucaaggaaguuccaggaacaaaaggcucucccuaa

SEQ ID NO: 617 - RNA, 384 nt, Artificial Sequence
  NM_001129826
auguggaugggccucauccaauuaguugaagguguuaagagaaaagaccaagguuuccuggaaaaggaauucuaccacaagacuaacauaaaaaugcgcugugaguuucuagccugcuggccugccuucacuguccugggggaggcuuggagagaccagguggacuggaguagacuguugagagacgcuggucuggugaagauguccaggaaaccacgagccuccagcccauuguccaacaaccacccaccaacaccaaagaggcgaggaaguggaaggcauccucucaacccuggcccagaagcccuaucaaaguucccaagacaacccggaagggaaaagggacccaucaaggaaguuccaggaacaaaaggcucucccuaa

SEQ ID NO: 618 - RNA, 570 nt, Artificial Sequence
  AAI40914
augaccgauaaaacagagaagguggcuguagauccugaaacuguguuuaaacgucccagggaaugugacaguccuucguaucagaaaaggcagaggauggcccuguuggcaaggaaacaaggagcaggagacagccuuauugcaggcucugccauguccaaagcaaagaagcuuaugacaggacaugcuauuccacccagccaauuggauucucagauugaugacuucacugguuucagcaaagauaggaugaugcagaaaccugguagcaaugcaccugugggaggaaacguuaccagcaguuucucuggagaugaccuagaaugcagagaaacagccuccucucccaaaagccaacgagaaauuaaugcugauauaaaacguaaauuagugaaggaacuccgaugcguuggacaaaaauaugaaaaaaucuucgaaaugcuugaaggagugcaaggaccuacugcagucaggaagcgauuuuuugaauccaucaucaaggaagcagcaagauguaugagacgagacuuuguuaagcaccuuaagaagaaacugaaacguaugauuuga

SEQ ID NO: 619 - RNA, 795 nt, Artificial Sequence
  AAH20662
augcucaggcuucugagacuugcuuuggccuucuacgggaggacggccgacccugcagagcgacagggcccacagcagcagggccucccacaaggugacacccaguugacaacugugcagggaguugucacaaguuucuguggugauuauggcaugauugaugagucgaucuacuucaguagugauguugugacuggcaacgugccucuaaaaguuggacaaaaaguuaaugugguuguggaagaagauaaaccacauuauggauugagagcaaucaagguggauguugugccucgccaucuuuauggugcuggacccucagacucaggaaccagaguuuuaauuggauguguuacuucuauaaaugaagauaauauuuauauuaguaacagcauuuauuuuuccauagccauuguuucugaagauuuugugccuuauaagggugacuuguuagaaguugaauauuccacugagccaggcaucucaaacaucaaggcaacuucugugaagcccauccguuguauucauacggaagaggucugcauuacuagcguacauggaagaaauggggugauagauuauacuauuuuuuucaccuuggauucugugaaacuuccugauggauacguaccucaaguagaugauaucgucaauguggucaugguggagagcauucaguucugcuuuauuuggagagcgauuucuaucaccccagugcauaaauccagcagcggauuccaggaugacggaggccugggacggcccaaaagggaacgucggagccaaagcauuuaa

SEQ ID NO: 620 - RNA, 2844 nt, Artificial Sequence
  CCDS735.1
augucucugccaagucgacaaacagcuauuauuguuaacccuccuccaccagaauauauaaauacuaagaaaaaugggcgauugacaaaucaacuucaguaucuacaaaaaguuguccuaaaggauuuauggaagcauaguuuuucauggcccuuucaacguccuguggaugcugugaaacuacaguugccugauuauuauaccauuauaaaaaacccaauggauuuaaauacaauuaagaagcgcuuggagaauaaauauuaugcgaaggcuucagaauguauagaagacuucaauacaauguucucaaauuguuauuuauauaacaagccuggagaugacauuguucuuauggcacaagcucuagagaagcuguuuaugcagaaauuaucucagaugccacaagaagagcaaguuguggguguuaaggaaagaaucaagaaaggcacucaacagaauauagcuguuucuucugcuaaagaaaaaucaucacccagcgcaacagaaaaaguauuuaagcagcaagaaauuccuucuguauuuccuaagacaucuauuucucccuugaacgugguacagggagcuucagucaacuccaguucacaaacugcggcccaaguuacaaaaggugugaagaggaaagcagauacaacaacuccugcaacuucagcaguuaaagcaaguagugaauuuucuccaacauucacagaaaaaucaguggcacugccaccuauaaaagaaaauaugccaaagaauguuuugccagauucucagcaacaauauaauguugugaagacuguuaaaguaacugaacaauuaaggcacuguagugagauucuuaaagaaaugcuugcaaagaaacauuuuucauaugcauggcccuuuuauaauccuguugacguuaaugcuuugggacuccauaacuacuaugacguugucaaaaauccgauggaucuuggaacuauuaaggagaaaauggauaaccaagaauauaaggaugcauacaaauuugcggcagauguuagauuaauguucaugaauugcuacaaguacaauccuccagaucacgaaguugugacaauggcaagaaugcuucaggauguuuucgaaacgcauuuuucaaagaucccgauugaaccuguugagaguaugccuuuauguuacaucaaaacagauaucacagaaaccacugguagagagaacacuaaugaagccuccucugaagggaacucuucugaugauucugaagaugagcgaguuaagcgucuugcaaagcuucaggagcagcuuaaagcuguacaucaacagcuccagguuuugucccaaguaccuuuccguaagcuaaauaaaaagaaagagaagucuaaaaaggaaaagaaaaaagaaaagguuaauaacagcaaugaaaauccaagaaaaaugugugagcaaaugaggcuaaaggaaaaguccaagagaaaucagccaaagaaaaggaaacaacaguucauuggucuaaaaucugaagaugaagauaaugcuaaaccuaugaacuaugaugagaaaaggcaguuaagucugaauauaaacaaacucccuggagauaaacuugggcgaguaguucacauaauacaaucaagagagccuucucugagcaauuccaauccugaugagauagagauagacuuugaaacacugaaagcaucaacacuaagagaauuagaaaaauauguuucggcaugucuaagaaagagaccauuaaaaccuccugcuaagaaaauaaugauguccaaagaagaacuucacucacagaaaaaacaggaauuggaaaagcgguuacuggauguuaauaaucaguuaaauucuagaaaacgucaaacaaaaucugauaaaacgcaaccauccaaagcuguugaaaauguuucccgacugagugagagcagcagcagcagcagcagcucaucagagucugaaaguagcagcagugacuuaagcucuucagacagcagugauucugaaucagaaauguucccuaaguuuacagaaguaaaaccaaaugauucuccuucuaaagagaauguaaagaaaaugaagaaugaaugcauaccgccugaaggaagaacaggcgucacacagauaggauauugugugcaagacacaaccucugccaauacuacccuuguucaucagaccacaccuucacauguaaugccaccaaaucaccaccaauuagcauuuaauuaucaagaauuagaacauuuacagacugugaaaaacauuucaccuuuacaaauucugccucccucaggugauucugaacagcucucaaauggcauaacugugaugcauccaucuggugauagugacacaacgauguuagaaucugaaugucaagcuccuguacagaaggauauaaagauuaagaaugcagauucauggaaaaguuuaggcaaaccagugaaaccaucagguguaaugaaauccucagaugagcucuucaaccaauuuagaaaagcagccauagaaaaggaaguaaaagcucggacacaggaacucauacggaagcauuuggaacaaaauacaaaggaacuaaaagcaucucaagaaaaucagagggaucuugggaauggauugacuguagaaucuuuuucaaauaaaauacaaaacaagugcucuggagaagagcagaaagaacaucagcagucaucagaagcucaagauaaauccaaacucuggcuucucaaagaccgugauuuagcaaggcagaaagaacaagagaggaggaggagagaagcaaugguggguaccauugauaugacccuucaaagugacauuaugacaauguuugaaaacaacuuugauuaa

SEQ ID NO: 621 - RNA, 543 nt, Artificial Sequence
  CCDS35455.1
augcaggccgaaggccggggcacaggggguucgacgggcgaugcugauggcccaggaggcccuggcauuccugauggcccagggggcaaugcuggcggcccaggagaggcgggugccacgggcggcagagguccccggggcgcaggggcagcaagggccucggggccgagaggaggcgccccgcgggguccgcauggcggugccgcuucugcgcaggauggaaggugccccugcggggccaggaggccggacagccgccugcuugaguugcacaucacgaugccuuucucgucgcccauggaagcggagcugguccgcaggauccugucccgggaugccgcaccgcucccccgaccaggggcgguucugaaggacuucaccguguccggcaaccuacuguuuauccgacugacugcugcagaccaccgccaacugcagcucuccaucagcuccugucuccagcagcuuucccuguugauguggaucacgcagugcuuucugcccguguuuuuggcucaggcucccucagggcagaggcgcuaa

SEQ ID NO: 622 - RNA, 633 nt, Artificial Sequence
  CAA10196
augcaggccgaaggccagggcacaggggguucgacgggcgaugcugauggcccaggaggcccuggcauuccugauggcccagggggcaaugcuggcggcccaggagaggcgggugccacgggcggcagagguccccggggcgcaggggcagcaagggccucggggccgagaggaggcgccccgcgggguccgcauggcggugccgcuucugcgcaggauggaaggugccccugcggggccaggaggccggacagccgccugcuucaguugcacaucacgaugccuuucucgucgcccauggaagcggagcugguccgcaggauccugucccgggaugccgcaccucucccccgaccaggggcgguucugaaggacuucaccguguccggcaaccuacuguuuaugucaguucgggaccaggacagggaaggcgcugggcggaugagggugguggguugggggcugggauccgccuccccggaggggcagaaagcuagagaucucagaacacccaaacacaaggucucagaacagagaccugguacaccaggcccgccgccacccgagggagcccagggagaugggugcagaggugucgccuuuaaugugauguucucugccccucacauuuag

SEQ ID NO: 623 - RNA, 1992 nt, Artificial Sequence
  CCDS13459.1
auggcagccacugagaucucuguccuuucugagcaauucaccaagaucaaagaacucgaguugaugccggaaaaaggccugaaggaggaggaaaaagacggagugugcagagagaaagaccaucggagcccuagugaguuggaggccgagcguaccucuggggccuuccaggacagcguccuggaggaagaaguggagcuggugcuggcccccucggaggagagcgagaaguacauccugacccugcagacggugcacuucacuucugaagcuguggaguugcaggauaugagcuugcugagcauacagcagcaagaaggggugcaggugguggugcaacagccuggcccuggguugcuguggcuugaggaagggccccggcagagccugcagcaguguguggccauuaguauccagcaagagcuguacuccccgcaagagauggagguguugcaguuccacgcucuagaggagaaugugaugguggccagugaagacaguaaguuagcggugagccuggcugaaacuacuggacugaucaagcucgaggaagagcaggagaagaaccaguuauuggcugaaagaacaaaggagcagcucuuuuuuguggaaacaaugucaggagaugaaagaagugacgaaauuguucucacaguuucaaauucaaauguggaagaacaagaggaucaaccuacagcuggucaagcagaugcugaaaaggccaaaucuacaaaaaaucaaagaaagacaaagggagcaaaaggaaccuuccacugugaugucugcauguucaccucuucuagaaugucaaguuuuaaucgucauaugaaaacucacaccagugagaagccucaccugugucaccucugccugaaaaccuuccguacggucacucugcugcggaaccauguuaacacccacacaggaaccaggcccuacaaguguaacgacugcaacauggcauuugucaccaguggagaacucguccgacacaggcgcuauaaacauacucaugagaaacccuuuaaauguuccaugugcaaguaugccaguguggaggcaaguaaauugaagcgccauguccgaucccacacuggggagcgccccuuucaguguugccagugcagcuaugccagcagagauaccuacaagcugaaacgccacaugagaacgcacucaggugagaagccuuacgaaugccacaucugccacacccgcuucacccagagcgggaccaugaaaauacauauucugcagaaacacggcgaaaauguccccaaauaccaguguccccauugugccaccaucauugcacggaaaagcgaccuacgugugcauaugcgcaacuugcaugcuuacagcgcugcagagcugaaaugccgcuacuguucugcugucuuccaugaacgcuaugcccucauucagcaccagaaaacucauaagaaugagaagagguucaagugcaaacacugcaguuaugccugcaagcaggaacgucauaugaccgcucacauucguacccacacuggagagaaaccauucaccugccuuucuugcaauaaauguuuccgacagaagcaacuucuaaacgcucacuucaggaaauaccacgaugcaaauuucaucccgacuguuuacaaaugcuccaaguguggcaaaggcuuuucccgcuggauuaaccugcacagacauucggagaaguguggaucaggggaagcaaagucggcugcuucaggaaagggaagaagaacaagaaagaggaagcagaccauccugaaggaagccacaaagggucagaaggaagcugcgaagggauggaaggaagccgcgaacggagacgaagcugcugcugaggaggcuuccaccacgaagggagaacaguucccaggagagauguuuccugucgccugcagagaaaccacagccagagucaaagaggaaguggaugaaggcgugaccugugaaaugcuccucaacacgauggauaaguga

SEQ ID NO: 624 - RNA, 2148 nt, Artificial Sequence
  CCDS11368.1
augucccaggugauguccagcccacugcuggcaggaggccaugcugucagcuuggcgccuugugaugagcccaggaggacccugcacccagcacccagccccagccugccaccccaguguucuuacuacaccacggaaggcuggggagcccaggcccugauggcccccgugcccugcauggggcccccuggccgacuccagcaagccccacagguggaggccaaagccaccugcuuccugccguccccuggugagaaggccuuggggaccccagaggaccuugacuccuacauugacuucucacuggagagccucaaucagaugauccuggaacuggaccccaccuuccagcugcuucccccagggacugggggcucccaggcugagcuggcccagagcaccaugucaaugagaaagaaggaggaaucugaagccuuggacauaaaguacaucgaggugaccuccgccagaucaaggugccacgauggcccccagcacugcuccagccccucugucaccccgcccuucggcucccuucgcagugguggccuccuccuuuccagagacgucccccgagagacacgaagcagcagugagagccucaucuucucugggaaccagggcagggggcaccagcgcccucugccccccucagagggucucuccccucgacccccaaauucccccagcaucucaaucccuugcauggggagcaaggccucgagcccccaugguuugggcuccccgcugguggcuucuccaagacuggagaagcggcugggaggccuggccccacagcggggcagcaggaucucugugcugucagccagcccagugucugaugucagcuauauguuuggaagcagccagucccuccugcacuccagcaacuccagccaucagucaucuuccagauccuuggaaaguccagccaacucuuccuccagccuccacagccuuggcucagugucccuguguacaagacccagugacuuccaggcucccagaaaccccacccuaaccaugggccaacccagaacaccccacucuccaccacuggccaaagaacaugccagcagcugccccccauccaucaccaacuccaugguggacauacccauugugcugaucaacggcugcccagaaccagggucuucuccaccccagcggaccccaggacaccagaacuccguucaaccuggagcugcuucucccagcaaccccuguccagccaccaggagcaacagccagacccugucagaugcccccuuuaccacaugcccagagggucccgccagggacaugcagcccaccaugaaguucgugauggacacaucuaaauacugguuuaagccaaacaucacccgagagcaagcaaucgagcugcugaggaaggaggagccaggggcuuuugucauaagggacagcucuucauaccgaggcuccuucggccuggcccugaaggugcaggagguucccgcgucugcucagagucgaccaggugaggacagcaaugaccucauccgacacuuccucaucgagucgucugccaaaggagugcaucucaaaggagcagaugaggagcccuacuuugggagccucucugccuucgugugccagcauuccaucauggcccuggcccugcccugcaaacucaccaucccacagagagaacugggaggugcagauggggccucggacucuacagacagcccagccuccugccagaagaaaucugcgggcugccacacccuguaccugagcucagugagcguggagacccugacuggagcccuggccgugcagaaagccaucuccaccaccuuugagagggacauccuccccacgcccaccgugguccacuucaaagucacagagcagggcaucacucugacugauguccagaggaagguguuuuuccggcgccauuacccacucaccacccuccgcuucugugguauggacccugagcaacggaaguggcagaaguacugcaaacccuccuggaucuuuggguuuguggccaagagccagacagagccucaggagaacguaugccaccucuuugcggaguaugacaugguccagccagccucgcaggucaucggccuggugacugcucugcugcaggacgcagaaaggauguag

SEQ ID NO: 625 - RNA, 1302 nt, Artificial Sequence
  AAH06510
auggcgcuccgagucaccaggaacucgaaaauuaaugcugaaaauaaggcgaagaucaacauggcaggcgcaaagcgcguuccuacggccccugcugcaaccuccaagcccggacugaggccaagaacagcucuuggggacauugguaacaaagucagugaacaacugcaggccaaaaugccuaugaagaaggaagcaaaaccuucagcuacuggaaaagucauugauaaaaaacuaccaaaaccucuugaaaagguaccuaugcuggugccagugccagugucugagccagugccagagccagaaccugagccagaaccugagccuguuaaagaagaaaaacuuucgccugagccuauuuugguugauacugccucuccaagcccaauggaaacaucuggaugugccccugcagaagaagaccugugucaggcuuucucugauguaauucuugcaguaaaugauguggaugcagaagauggagcugauccaaaccuuuguagugaauaugugaaagauauuuaugcuuaucugagacaacuugaggaagagcaagcagucagaccaaaauaccuacugggucgggaagucacuggaaacaugagagccauccuaauugacuggcuaguacagguucaaaugaaauucagguuguugcaggagaccauguacaugacugucuccauuauugaucgguucaugcagaauaauugugugcccaagaagaugcugcagcugguuggugucacugccauguuuauugcaagcaaauaugaagaaauguacccuccagaaauuggugacuuugcuuuugugacugacaacacuuauacuaagcaccaaaucagacagauggaaaugaagauucuaagagcuuuaaacuuuggucugggucggccucuaccuuugcacuuccuucggagagcaucuaagauuggagagguugaugucgagcaacauacuuuggccaaauaccugauggaacuaacuauguuggacuaugacauggugcacuuuccuccuucucaaauugcagcaggagcuuuuugcuuagcacugaaaauucuggauaauggugaauggacaccaacucuacaacauuaccugucauauacugaagaaucucuucuuccaguuaugcagcaccuggcuaagaauguagucaugguaaaucaaggacuuacaaagcacaugacugucaagaacaaguaugccacaucgaagcaugcuaagaucagcacucuaccacagcugaauucugcacuaguucaagauuuagccaaggcuguggcaaagguguaa

SEQ ID NO: 626 - RNA, 888 nt, Artificial Sequence
  AAA58392
auggaacaccagcuccugugcugcgaaguggaaaccauccgccgcgcguaccccgaugccaaccuccucaacgaccgggugcugcgggccaugcugaaggcggaggagaccugcgcgcccucgguguccuacuucaaaugugugcagaaggagguccugccguccaugcggaagaucgucgccaccuggaugcuggaggucugcgaggaacagaagugcgaggaggaggucuucccgcuggccaugaacuaccuggaccgcuuccugucgcuggagcccgugaaaaagagccgccugcagcugcugggggccacuugcauguucguggccucuaagaugaaggagaccaucccccugacggccgagaagcugugcaucuacaccgacaacuccauccggcccgaggagcugcugcaaauggagcugcuccuggugaacaagcucaaguggaaccuggccgcaaugaccccgcacgauuucauugaacacuuccucuccaaaaugccagaggcggaggagaacaaacagaucauccgcaaacacgcgcagaccuucguugcccucugugccacagaugugaaguucauuuccaauccgcccuccaugguggcagcggggagcgugguggccgcagugcaaggccugaaccugaggagccccaacaacuuccuguccuacuaccgccucacacgcuuccucuccagagugaucaagugugacccggacugccuccgggccugccaggagcagaucgaagcccugcuggagucaagccugcgccaggcccagcagaacauggaccccaaggccgccgaggaggaggaagaggaggaggaggagguggaccuggcuugcacacccaccgacgugcgggacguggacaucuga

SEQ ID NO: 627 - RNA, 651 nt, Artificial Sequence
  AAA36601
augcugcgccucuccgaacgcaacaugaaggugcuccuugccgccgcccucaucgcgggguccgucuucuuccugcugcugccgggaccuucugcggccgaugagaagaagaaggggcccaaagucaccgucaagguguauuuugaccuacgaauuggagaugaagauguaggccgggugaucuuuggucucuucggaaagacuguuccaaaaacaguggauaauuuuguggccuuagcuacaggagagaaaggauuuggcuacaaaaacagcaaauuccaucguguaaucaaggacuucaugauccagggcggagacuucaccaggggagauggcacaggaggaaagagcaucuacggugagcgcuuccccgaugagaacuucaaacugaagcacuacgggccuggcugggugagcauggccaacgcaggcaaagacaccaacggcucccaguucuucaucacgacagucaagacagccuggcuagauggcaagcaugugguguuuggcaaaguucuagagggcauggagguggugcggaagguggagagcaccaagacagacagccgggauaaaccccugaaggaugugaucaucgcagacugcggcaagaucgagguggagaagcccuuugccaucgccaaggaguag

SEQ ID NO: 628 - RNA, 1044 nt, Artificial Sequence
  AAD10634
augccucggggucagaagaguaagcuccgugcucgugagaaacgccgcaaggcgcgagaggagacccagggucucaagguugcucacgccacugcagcagagaaagaggagugccccuccuccucuccuguuuuaggggauacucccacaagcuccccugcugcuggcauuccccagaagccucagggagcuccacccaccaccacugcugcugcagcugugucauguaccgaaucugacgaaggugccaaaugccaaggugaggaaaaugcaaguuucucccaggccacaacauccacugagagcucagucaaagauccuguagccugggaggcaggaaugcugaugcacuucauucuacguaaguauaaaaugagagagcccauuaugaaggcagauaugcugaagguuguugaugaaaaguacaaggaucacuucacugagauccucaauggagccucucgccgcuuggagcucgucuuuggccuugauuugaaggaagacaacccuaguggccacaccuacacccucgucaguaagcuaaaccucaccaaugauggaaaccugagcaaugauugggacuuucccaggaaugggcuucugaugccucuccugggugugaucuucuuaaagggcaacucugccaccgaggaagagaucuggaaauucaugaauguguugggagccuaugauggagaggagcacuuaaucuauggggaaccccguaaguucaucacccaagaucuggugcaggaaaaauaucugaaguacgagcaggugcccaacagugaucccccacgcuaucaauuccuaugggguccgagagccuaugcugaaaccaccaagaugaaaguccucgaguuuuuggccaagaugaauggugccacuccccgugacuucccaucccauuaugaagaggcuuugagagaugaggaagagagagcccaaguccgauccaguguuagagccaggcgucgcacuacugccacgacuuuuagagcgcguucuagagccccauucagcagguccucccaccccauguga

SEQ ID NO: 629 - RNA, 2436 nt, Artificial Sequence
  BAF91373
auggagagucagggugugccucccgggccuuaucgggccaccaagcuguggaaugaaguuaccacaucuuuucgagcaggaaugccucuaagaaaacacagacaacacuuuaaaaaauauggcaauuguuucacagcaggagaagcaguggauuggcuuuaugaccuauuaagaaauaauagcaauuuugguccugaaguuacaaggcaacagacuauccaacuguugaggaaauuucuuaagaaucauguaauugaagauaucaaagggagguggggaucagaaaauguugaugauaacaaccagcucuucagauuuccugcaacuucgccacuuaaaacucuaccacgaagguauccagaauugagaaaaaacaacauagagaacuuuuccaaagauaaagauagcauuuuuaaauuacgaaacuuaucucguagaacuccuaaaaggcauggauuacauuuaucucaggaaaauggcgagaaaauaaagcaugaaauaaucaaugaagaucaagaaaaugcaauugauaauagagaacuaagccaggaagauguugaagaaguuuggagauauguuauucugaucuaccugcaaaccauuuuaggugugccaucccuagaagaagucauaaauccaaaacaaguaauuccccaauauauaauguacaacauggccaauacaaguaaacguggaguaguuauacuacaaaacaaaucagaugaccucccucacuggguauuaucugccaugaagugccuagcaaauuggccaagaagcaaugauaugaauaauccaacuuauguuggauuugaacgagauguauucagaacaaucgcagauuauuuucuagaucucccugaaccucuacuuacuuuugaauauuacgaauuauuuguaaacauuuugguuguuuguggcuacaucacaguuucagauagauccagugggauacauaaaauucaagaugauccacagucuucaaaauuccuucacuuaaacaauuugaauuccuucaaaucaacugagugccuucuucucagucugcuucauagagaaaaaaacaaagaagaaucagauucuacugagagacuacagauaagcaauccaggauuucaagaaagaugugcuaagaaaaugcagcuaguuaauuuaagaaacagaagagugagugcuaaugacauaaugggaggaaguugucauaauuuaauaggguuaaguaauaugcaugaucuauccucuaacagcaaaccaaggugcuguucuuuggaaggaauuguagaugugccagggaauucaaguaaagaggcauccagugucuuucaucaaucuuuuccgaacauagaaggacaaaauaauaaacuguuuuuagagucuaagcccaaacaggaauuccuguugaaucuucauucagaggaaaauauucaaaagccauucagugcugguuuuaagagaaccucuacuuugacuguucaagaccaagaggaguuguguaaugggaaaugcaagucaaaacagcuuuguaggucucagaguuugcuuuuaagaaguaguacaagaaggaauaguuauaucaauacaccaguggcugaaauuaucaugaaaccaaauguuggacaaggcagcacaagugugcaaacagcuauggaaagugaacucggagagucuagugccacaaucaauaaaagacucugcaaaaguacaauagaacuuucagaaaauucuuuacuuccagcuucuucuauguugacuggcacacaaagcuugcugcaaccucauuuagagaggguugccaucgaugcucuacaguuauguuguuuguuacuucccccaccaaaucguagaaagcuucaacuuuuaaugcguaugauuucccgaaugagucaaaauguugauaugcccaaacuucaugaugcaauggguacgaggucacugaugauacauaccuuuucucgauguguguuaugcugugcugaagaaguggaucuugaugagcuucuugcuggaagauuaguuucuuucuuaauggaucaucaucaggaaauucuucaaguacccucuuacuuacagacugcaguggaaaaacaucuugacuacuuaaaaaagggacauauugaaaauccuggagauggacuauuugcuccuuugccaacuuacucauacuguaagcagauuagugcucaggaguuugaugagcaaaaaguuucuaccucucaagcugcaauugcagaacuuuuagaaaauauuauuaaaaacaggaguuuaccucuaaaggagaaaagaaaaaaacuaaaacaguuucagaaggaauauccuuugauauaucagaaaagauuuccaaccacggagagugaagcagcacuuuuuggugacaaaccuacaaucaagcaaccaaugcugauuuuaagaaaaccaaaguuccguagucuaagauaa

SEQ ID NO: 630 - RNA, 297 nt, Artificial Sequence
  AAA46940
augcauggagauacaccuacauugcaugaauauauguuagauuugcaaccagagacaacugaucucuacuguuaugagcaauuaaaugacagcucagaggaggaggaugaaauagaugguccagcuggacaagcagaaccggacagagcccauuacaauauuguaaccuuuuguugcaagugugacucuacgcuucgguugugcguacaaagcacacacguagacauucguacuuuggaagaccuguuaaugggcacacuaggaauugugugccccaucuguucucagaaaccauaa

SEQ ID NO: 631 - RNA, 318 nt, Artificial Sequence
  AAA46947
augcauggaccuaaggcaacauugcaagacauuguauugcauuuagagccccaaaaugaaauuccgguugaccuucuaugucacgagcaauuaagcgacucagaggaagaaaacgaugaaauagauggaguuaaucaucaacauuuaccagcccgacgagcugaaccacaacgucacacaauguuguguauguguuguaagugugaagccagaauuaagcuaguaguagaaagcucagcagacgaccuucgagcauuccagcagcuguuucugaacacccuguccuuuguguguccguggugugcaucccagcaguaa

SEQ ID NO: 632 - RNA, 297 nt, Artificial Sequence
  AAA46951
augcguggagaaacaccuacguugcaagacuauguguuagauuugcaaccugaggcaacugaccuccacuguuaugagcaauuacccgacagcucagaugaggaggaugucauagacaguccagcuggacaagcagaaccggacacauccaauuacaauaucguuaccuuuuguugucaguguaagucuacacuucguuuguguguacagagcacacaaguagauauucgcauauugcaagagcuguuaaugggcucauuuggaaucgugugccccaacuguucuacuagacuguaa

SEQ ID NO: 633 - RNA, 294 nt, Artificial Sequence
  AAA46959
augagaggacacaagccaacguuaaaggaauauguuuuagauuuauauccugaaccaacugaccuauacugcuaugagcaauuaagugacagcucagaugaggaugaaggcuuggaccggccagauggacaagcacaaccagccacagcugauuacuacauuguaaccuguugucacacuuguaacaccacaguucguuuaugugucaacaguacagcaagugaccuacgaaccauacagcaacuacuuaugggcacagugaauauugugugcccuaccugugcacaacaauaa

SEQ ID NO: 634 - RNA, 300 nt, Artificial Sequence
  AAA46967
augcauggagaaauaacuacauugcaagacuauguuuuagauuuggaacccgaggcaacugaccuauacuguuaugagcaauugugugacagcucagaggaggaggaagauacuauugacgguccagcuggacaagcaaaaccagacaccuccaauuauaauauuguaacguccuguuguaaaugugaggcgacacuacgucuguguguacagagcacacacauugacauacguaaauuggaagauuuauuaaugggcacauuuggaauagugugccccggcuguucacagagagcauaa

SEQ ID NO: 635 - RNA, 330 nt, Artificial Sequence
  AAA47051
augcguggaccaaagcccaccuugcaggaaauuguauuagauuuauguccuuacaaugaaauacagccgguugaccuuguaugucacgagcaauuaggagagucagaggaugaaauagaugaacccgaccaugcaguuaaucaccaacaucaacuacuagccagacgggaugaaccacagcgucacacaauacaguguucguguuguaaguguaacaacacacugcagcugguaguagaagccucacgggauacucugcgacaacuacagcagcuguuuauggacucacuaggauuuguguguccguggugugcaacugcaaaccaguaa

SEQ ID NO: 636 - RNA, 321 nt, Artificial Sequence
  CAA52574
augcauggaccccgggaaacacugcaagaaauuguauugcauuuggaaccucagaaugaauuagauccuguugaccuguuguguuacgagcaauuaagcgagucagaggaggaaaacgaugaagcagauggaguuagucaugcacaacuaccagcccgacgagccgaaccacagcgucacaaaauuuuguguguauguuguaagugugacggcagaauugagcuuacaguagagagcucggcagaggaccuuagaacacuacagcagcuguuuuugagcaccuuguccuuuguguguccguggugugcaacuaaccaauaa

SEQ ID NO: 637 - RNA, 306 nt, Artificial Sequence
  M62877.1
augcgugguaauguaccacaauuaaaagauguaguauugcauuuaacaccacagacugaaauugacuugcaaugcuacgagcaauuugacagcucagaggaggaggaugaaguagauaauaugcgugaccagcuaccagaaagacgggcuggacaggcuacguguuacagaauugaagcuccguguugcagguguucaaguguaguacaacuggcaguggaaagcaguggagacacccuucgcguuguacagcagauguuaaugggcgaacuaagccugguuugcccguguugugcgaacaacuag

SEQ ID NO: 638 - RNA, 300 nt, Artificial Sequence
  CAA52586
augcguggagacaaagcaacuauaaaagauuauauauuagaucugcaaccugaaacaacugaccuacacugcuaugagcaauuaggugacagcucagaugaggaggauacagaugguguggaccggccagauggacaagcagaacaagccacaagcaauuacuacauugugacauauugucacaguugugauagcacacuacggcuaugcauucauagcacugcgacggaccuucguacucuacagcaaaugcuguugggcacauuacaaguugugugccccggcugugcacggcuauaa

SEQ ID NO: 639 - RNA, 318 nt, Artificial Sequence
  CAA52597
augcaugguaaaguaccaacgcugcaagacguuguauuagaacuaacaccucaaacagaaauugaccuacagugcaaugagcaauuggacagcucagaggaugaggaugaggaugaaguagaccauuugcaggagcggccacagcaagcuagacaagcuaaacaacauacguguuaccuaauacacguaccuuguugugaguguaaguuuguggugcaguuggacauucagaguaccaaagaggaccugcguguuguacaacagcugcuuaugggugcguuaacaguaacgugcccacucugcgcaucaaguaacuaa

SEQ ID NO: 640 - RNA, 297 nt, Artificial Sequence
  AAF13691
augagaggaaacaacccaacgcuaagagaauauauuuuagauuuacauccugaaccaacugaccuauucugcuaugagcaauuaugugacagcucagacgaggaugaaauaggcuuggacaggccagauggacaagcacaaccggccacagcuaauuacuacauuguaacguguuguuacacuugugacaccacgguucguuuguguaucaacaguacaacaaccgacguacgaacccuacagcagcugcuuaugggcacauguaccauugugugcccuagcugugcacagcaauaa

SEQ ID NO: 641 - RNA, 324 nt, Artificial Sequence
  ACL12335
augcauggaccaaaagcaacacuuugugacauuguuuuagauuuggaaccacaaaauuaugaggaaguugaccuugugugcuacgagcaauuaccugacuccgacuccgagaaugaaaaagaugaaccagauggaguuaaucauccuuugcuacuagcuagacgagcugaaccacagcgucacaacauuguguguguguguuguaaguguaauaaucaacuucagcuaguaguagaaaccucgcaagacggauugcgagccuuacagcagcuguuuauggacacacuauccuuuguguguccuuugugugcagcaaaccaguaa

SEQ ID NO: 642 - RNA, 318 nt, Artificial Sequence
  AAA79500
augcaugguaaaguaccaacguugcaagagguuauauuagaacuugcaccgcaaacggaaauugaccuacaaugcaaugagcaauuggacagcucagaggaugaggaugaggaugaaauagaccauuugcuggagcggccacagcaagcuagacaagcugaacaacauaaguguuaccuaauucacguaccuuguuguaagugugaguugguggugcaguuggacauucagaguaccaaagaggagcuacgugugguacaacagcugcuuaugggugcguuaacaguaacgugcccacucugcgcaucaucuaaauaa

SEQ ID NO: 643 - RNA, 1392 nt, Artificial Sequence
  AAF80488
augggcaaggagaagacccacaucaacaucguggucaucggccacguggacuccggaaaguccaccaccacgggccaccucaucuacaaaugcggagguauugacaaaaggaccauugagaaguucgagaaggaggcggcugagauggggaagggauccuucaaguaugccugggugcuggacaagcugaaggcggagcgugagcgcggcaucaccaucgacaucucccucuggaaguucgagaccaccaaguacuacaucaccaucaucgaugcccccggccaccgcgacuucaucaagaacaugaucacggguacaucccaggcggacugcgcagugcugaucguggcggcgggcgugggcgaguucgaggcgggcaucuccaagaaugggcagacgcgggagcaugcccugcuggccuacacgcugggugugaagcagcucaucgugggcgugaacaaaauggacuccacagagccggccuacagcgagaagcgcuacgacgagaucgucaaggaagucagcgccuacaucaagaagaucggcuacaacccggccaccgugcccuuugugcccaucuccggcuggcacggcgacaacaugcuggagcccucccccaacaugccgugguucaagggcuggaagguggagcguaaggagggcaacgcaagcggcgugucccugcuggaggcccuggacaccauccugccccccacgcgccccacggacaagccccugcgccugccgcugcaggacguguacaagauuggcggcauuggcacggugcccgugggccggguggagaccggcauccugcggccgggcaugguggugaccuuugcgccagugaacaucaccacugaggugaagucaguggagaugcaccacgaggcucugagcgaagcucugcccggcgacaacgucggcuucaaugugaagaacgugucggugaaggacauccggcggggcaacguguguggggacagcaagucugacccgccgcaggaggcugcucaguucaccucccaggucaucauccugaaccacccggggcagauuagcgccggcuacuccccggucaucgacugccacacagcccacaucgccugcaaguuugcggagcugaaggagaagauugaccggcgcucuggcaagaagcuggaggacaaccccaagucccugaagucuggagacgcggccaucguggagauggugccgggaaagcccauguguguggagagcuucucccaguacccgccucucggccgcuucgccgugcgcgacaugaggcagacgguggccguaggcgucaucaagaacguggaaaagaagagcggcggcgccggcaaggucaccaagucggcgcagaaggcgcagaaggcgggcaaguga

SEQ ID NO: 644 - RNA, 2919 nt, Artificial Sequence
  EAW51573
auggauaccgacuuauaugaugaguuugggaauuauauuggaccagagcuugauucugaugaagaugaugaugaauuggguagagagaccaaagaucuugaugagauggaugaugaugacgacgacgaugacguaggagaucaugacgaugaccacccugggauggagguggugcugcaugaggacaagaaguacuacccaacagccgaggagguguaugguccugagguggagaccauaguucaagaggaagacacucagccucucacagaacccauuauuaagccagugaaaaccaagaaauucacucugauggagcagacauuaccuguuacgguguaugagauggauuucuuggcggaucugauggauaacucagagcucaucagaaaugugacccuuuguggacaucuccaccauggcaagacauguuuuguggauuguuuaauugaacagacucacccggaaaucagaaagcgcuaugaccaagaucugugcuauacugacauccucuucacagagcaagagagagguguaggcaucaaaagcacuccugugacaguggucuugccagacaccaaaggaaaaucuuaucucuucaauaucauggacacuccaggacaugugaauuucucugaugaggucacagcuggcuugcgcaucucagauggagugguccuuuucauugaugcugcugagggggugaugcugaacacagagcggcugaucaagcaugcggugcaggagaggcuggcagucacugugugcaucaacaagauugaccggcugauccuggagcugaagcugccuccaacugaugcuuauuacaagcugcgccacauuguggaugaggucaauggauuaauaagcauguauuccacugaugagaaccugauccuuuccccacuccuggguaacgucugcuucuccagcucccaguacagcaucugcuucacgcugggcuccuuugccaagaucuaugccgacaccuuuggugacauuaauuaccaagaauuugcuaaaagacucuggggugacaucuacuucaacccuaagacgcgaaaguucaccaaaaaggccccaacuagcagcucccagagaaguuucguggaguuuaucuuggagccucuuuauaagauccucgcccagguuguaggugacguggacaccagccucccacggacccuagacgagcuuggcauccaccugacgaaggaggagcugaagcugaacauccgccccuugcucaggcuggucugcaaaaaguucuuuggcgaguucacaggcuuuguggacaugugugugcagcauaucccuucuccaaaggugggcgccaagcccaagauugagcacaccuacaccggugguguggacuccgaccucggcgaggcuaugagugacugugacccugauggcccccugaugugccacacuacuaagauguacagcacagaugauggaguccaguuucacgccuuuggccgggugcugaguggcaccauucaugcugggcagccugugaagguacugggggagaacuacacccuggaggaugaggaagacucccagauaugcaccgugggccgccuuuggaucucuguggccagguaccacaucgaggugaaccguguuccugcuggcaacuggguucugauugaagguguugaucaaccaauugugaagacagcaaccauaaccgaaccccgaggcaaugaggaggcucagauuuuccgacccuugaaguucaauaccacaucuguuaucaagauugcuguggagccagucaaccccucagagcugcccaagaugcuugauggccugcgcaaggucaacaagagcuauccaucccucaccaccaagguggaggagucuggcgagcaugugauccugggcacuggggagcucuaccuggacugugugaugcaugauuugcggaagauguacucagagauagacaucaagguggcugacccaguugucacguuuugugagacggugguggaaacauccucccucaagugcuuugcugaaacgccuaauaagaagaacaagaucaccaugauugcugagccucuugagaagggccuggcagaggacauagagaaugaggugguccagauuacguggaacaggaagaagcugggagaguucuuccagaccaaguacgauugggaucugcuggcugcccguuccaucugggcuuuuggcccugaugcgacuggccccaacauucugguggaugauacucugcccucugagguggacaaggcucuucuugguucagugaaggacagcaucguucaagguuuccaguggggaaccagggagggcccccucugugaugaauugauucggaaugucaaguuuaagauccuggaugcggugguugcccaggagccccugcaccggggcgggggccagaucauccccacagccaggagagucgucuacucugccuuccucauggcuacuccucgucugauggagccuuacuacuuuguagagguccaggccccugcagauugcgucucugcaguuuauaccguccuggccaggcgcagggggcacgugacucaggaugcacccaucccaggcuccccucuguacaccaucaaagcuuuuaucccggccaucgacucuuuuggcuuugagacugaucuccggacucacacccagggacaagccuuuucucugucugucuuccaccacuggcagauugugccuggugauccccuggacaagagcauugucauccgccccuuggagccacagccagcuccucaccuggcccgggaauucaugaucaaaacccgccguaggaagggccucagugaagaugugagcaucagcaaauucuucgaugauccuauguugcuggaacuugccaaacaggauguugugcucaauuaccccauguga

SEQ ID NO: 645 - RNA, 1971 nt, Artificial Sequence
  EAW50963
augcgacccuccgggacggccggggcagcgcuccuggcgcugcuggcugcgcucugcccggcgagucgggcucuggaggaaaagaaaguuugccaaggcacgaguaacaagcucacgcaguugggcacuuuugaagaucauuuucucagccuccagaggauguucaauaacugugaggugguccuugggaauuuggaaauuaccuaugugcagaggaauuaugaucuuuccuucuuaaagaccauccaggagguggcugguuauguccucauugcccucaacacaguggagcgaauuccuuuggaaaaccugcagaucaucagaggaaauauguacuacgaaaauuccuaugccuuagcagucuuaucuaacuaugaugcaaauaaaaccggacugaaggagcugcccaugagaaauuuacaggaaauccugcauggcgccgugcgguucagcaacaacccugcccugugcaacguggagagcauccaguggcgggacauagucagcagugacuuucucagcaacaugucgauggacuuccagaaccaccugggcagcugccaaaagugugauccaagcugucccaaugggagcugcuggggugcaggagaggagaacugccagaaacugaccaaaaucaucugugcccagcagugcuccgggcgcugccguggcaagucccccagugacugcugccacaaccagugugcugcaggcugcacaggcccccgggagagcgacugccuggucugccgcaaauuccgagacgaagccacgugcaaggacaccugccccccacucaugcucuacaaccccaccacguaccagauggaugugaaccccgagggcaaauacagcuuuggugccaccugcgugaagaaguguccccguaauuauguggugacagaucacggcucgugcguccgagccuguggggccgacagcuaugagauggaggaagacggcguccgcaaguguaagaagugcgaagggccuugccgcaaaguguguaacggaauagguauuggugaauuuaaagacucacucuccauaaaugcuacgaauauuaaacacuucaaaaacugcaccuccaucaguggcgaucuccacauccugccgguggcauuuaggggugacuccuucacacauacuccuccucuggauccacaggaacuggauauucugaaaaccguaaaggaaaucacaggguuuuugcugauucaggcuuggccugaaaacaggacggaccuccaugccuuugagaaccuagaaaucauacgcggcaggaccaagcaacauggucaguuuucucuugcagucgucagccugaacauaacauccuugggauuacgcucccucaaggagauaagugauggagaugugauaauuucaggaaacaaaaauuugugcuaugcaaauacaauaaacuggaaaaaacuguuugggaccuccggucagaaaaccaaaauuauaagcaacagaggugaaaacagcugcaaggccacaggccaggucugccaugccuugugcucccccgagggcugcuggggcccggagcccagggacugcgucucuugccggaaugucagccgaggcagggaaugcguggacaagugcaaccuucuggagggugagccaagggaguuuguggagaacucugagugcauacagugccacccagagugccugccucaggccaugaacaucaccugcacaggacggggaccagacaacuguauccagugugcccacuacauugacggcccccacugcgucaagaccugcccggcaggagucaugggagaaaacaacacccuggucuggaaguacgcagacgccggccaugugugccaccugugccauccaaacugcaccuacggaugcacugggccaggucuugaaggcuguccaacgaauggaagcuacauagugucucacuuuccaagaucauucuacaagaugucagugcac

SEQ ID NO: 646 - RNA, 3411 nt, Artificial Sequence
  ADL28125
augcgacccuccgggacggccggggcagcgcuccuggcgcugcuggcugcgcucugcccggcgagucgggcucuggaggaaaagaaaguuugccaaggcacgaguaacaagcucacgcaguugggcacuuuugaagaucauuuucucagccuccagaggauguucaauaacugugaggugguccuugggaauuuggaaauuaccuaugugcagaggaauuaugaucuuuccuucuuaaagaccauccaggagguggcugguuauguccucauugcccucaacacaguggagcgaauuccuuuggaaaaccugcagaucaucagaggaaauauguacuacgaaaauuccuaugccuuagcagucuuaucuaacuaugaugcaaauaaaaccggacugaaggagcugcccaugagaaauuuacaggaaauccugcauggcgccgugcgguucagcaacaacccugcccugugcaacguggagagcauccaguggcgggacauagucagcagugacuuucucagcaacaugucgauggacuuccagaaccaccugggcagcugccaaaagugugauccaagcugucccaaugggagcugcuggggugcaggagaggagaacugccagaaacugaccaaaaucaucugugcccagcagugcuccgggcgcugccguggcaagucccccagugacugcugccacaaccagugugcugcaggcugcacaggcccccgggagagcgacugccuggucugccgcaaauuccgagacgaagccacgugcaaggacaccugccccccacucaugcucuacaaccccaccacguaccagauggaugugaaccccgagggcaaauacagcuuuggugccaccugcgugaagaaguguccccguaauuauguggugacagaucacggcucgugcguccgagccuguggggccgacagcuaugagauggaggaagacggcguccgcaaguguaagaagugcgaagggccuugccgcaaaguguguaacggaauagguauuggugaauuuaaagacucacucuccauaaaugcuacgaauauuaaacacuucaaaaacugcaccuccaucaguggcgaucuccacauccugccgguggcauuuaggggugacuccuucacacauacuccuccucuggauccacaggaacuggauauucugaaaaccguaaaggaaaucacaggguuuuugcugauucaggcuuggccugaaaacaggacggaccuccaugccuuugagaaccuagaaaucauacgcggcaggaccaagcaacauggucaguuuucucuugcagucgucagccugaacauaacauccuugggauuacgcucccucaaggagauaagugauggagaugugauaauuucaggaaacaaaaauuugugcuaugcaaauacaauaaacuggaaaaaacuguuugggaccuccggucagaaaaccaaaauuauaagcaacagaggugaaaacagcugcaaggccacaggccaggucugccaugccuugugcucccccgagggcugcuggggcccggagcccagggacugcgucucuugccggaaugucagccgaggcagggaaugcguggacaagugcaaccuucuggagggugagccaagggaguuuguggagaacucugagugcauacagugccacccagagugccugccucaggccaugaacaucaccugcacaggacggggaccagacaacuguauccagugugcccacuacauugacggcccccacugcgucaagaccugcccggcaggagucaugggagaaaacaacacccuggucuggaaguacgcagacgccggccaugugugccaccugugccauccaaacugcaccuacggaugcacugggccaggucuugaaggcuguccaacgaaugggccuaagaucccguccaucgccacugggauggugggggcccuccucuugcugcuggugguggcccuggggaucggccucuucaugcgaaggcgccacaucguucggaagcgcacgcugcggaggcugcugcaggagagggagcuuguggagccucuuacacccaguggagaagcucccaaccaagcucucuugaggaucuugaaggaaacugaauucaaaaagaucaaagugcugggcuccggugcguucggcacgguguauaagggacucuggaucccagaaggugagaaaguuaaaauucccgucgcuaucaaggaauuaagagaagcaacaucuccgaaagccaacaaggaaauccucgaugaagccuacgugauggccagcguggacaacccccacgugugccgccugcugggcaucugccucaccuccaccgugcagcucaucacgcagcucaugcccuucggcugccuccuggacuauguccgggaacacaaagacaauauuggcucccaguaccugcucaacuggugugugcagaucgcaaagggcaugaacuacuuggaggaccgucgcuuggugcaccgcgaccuggcagccaggaacguacuggugaaaacaccgcagcaugucaagaucacagauuuugggcuggccaaacugcugggugcggaagagaaagaauaccaugcagaaggaggcaaagugccuaucaaguggauggcauuggaaucaauuuuacacagaaucuauacccaccagagugaugucuggagcuacggggugaccguuugggaguugaugaccuuuggauccaagccauaugacggaaucccugccagcgagaucuccuccauccuggagaaaggagaacgccucccucagccacccauauguaccaucgaugucuacaugaucauggucaagugcuggaugauagacgcagauagucgcccaaaguuccgugaguugaucaucgaauucuccaaaauggcccgagacccccagcgcuaccuugucauucagggggaugaaagaaugcauuugccaaguccuacagacuccaacuucuaccgugcccugauggaugaagaagacauggacgacgugguggaugccgacgaguaccucaucccacagcagggcuucuucagcagccccuccacgucacggacuccccuccugagcucucugagugcaaccagcaacaauuccaccguggcuugcauugauagaaaugggcugcaaagcugucccaucaaggaagacagcuucuugcagcgauacagcucagaccccacaggcgccuugacugaggacagcauagacgacaccuuccucccagugccuggugaguggcuugucuggaaacaguccugcuccucaaccuccucgacccacucagcagcagccagucuccaguguccaagccaggugcucccuccagcaucuccagagggggaaacaguggcagauuugcagacacaguga

SEQ ID NO: 647 - RNA, 150 nt, Artificial Sequence
  CCO13722
augugugccaccugugccauccaaacugcaccuacggguccuaauaaaucuucacugucugacuuuagucucccacuaaaacugcauuuccuuucuacaauuucaauuucucccuuugcuucaaauaaaguccugacacuauucauuuga

SEQ ID NO: 648 - RNA, 1218 nt, Artificial Sequence
  CCDS47587.1
augcgacccuccgggacggccggggcagcgcuccuggcgcugcuggcugcgcucugcccggcgagucgggcucuggaggaaaagaaaguuugccaaggcacgaguaacaagcucacgcaguugggcacuuuugaagaucauuuucucagccuccagaggauguucaauaacugugaggugguccuugggaauuuggaaauuaccuaugugcagaggaauuaugaucuuuccuucuuaaagaccauccaggagguggcugguuauguccucauugcccucaacacaguggagcgaauuccuuuggaaaaccugcagaucaucagaggaaauauguacuacgaaaauuccuaugccuuagcagucuuaucuaacuaugaugcaaauaaaaccggacugaaggagcugcccaugagaaauuuacaggaaauccugcauggcgccgugcgguucagcaacaacccugcccugugcaacguggagagcauccaguggcgggacauagucagcagugacuuucucagcaacaugucgauggacuuccagaaccaccugggcagcugccaaaagugugauccaagcugucccaaugggagcugcuggggugcaggagaggagaacugccagaaacugaccaaaaucaucugugcccagcagugcuccgggcgcugccguggcaagucccccagugacugcugccacaaccagugugcugcaggcugcacaggcccccgggagagcgacugccuggucugccgcaaauuccgagacgaagccacgugcaaggacaccugccccccacucaugcucuacaaccccaccacguaccagauggaugugaaccccgagggcaaauacagcuuuggugccaccugcgugaagaaguguccccguaauuauguggugacagaucacggcucgugcguccgagccuguggggccgacagcuaugagauggaggaagacggcguccgcaaguguaagaagugcgaagggccuugccgcaaaguguguaacggaauagguauuggugaauuuaaagacucacucuccauaaaugcuacgaauauuaaacacuucaaaaacugcaccuccaucaguggcgaucuccacauccugccgguggcauuuaggggugacuccuucacacauacuccuccucuggauccacaggaacuggauauucugaaaaccguaaaggaaaucacagguuugagcuga

SEQ ID NO: 649 - RNA, 3633 nt, Artificial Sequence
  AAG35789
augcgacccuccgggacggccggggcagcgcuccuggcgcugcuggcugcgcucugcccggcgagucgggcucuggaggaaaagaaaguuugccaaggcacgaguaacaagcucacgcaguugggcacuuuugaagaucauuuucucagccuccagaggauguucaauaacugugaggugguccuugggaauuuggaaauuaccuaugugcagaggaauuaugaucuuuccuucuuaaagaccauccaggagguggcugguuauguccucauugcccucaacacaguggagcgaauuccuuuggaaaaccugcagaucaucagaggaaauauguacuacgaaaauuccuaugccuuagcagucuuaucuaacuaugaugcaaauaaaaccggacugaaggagcugcccaugagaaauuuacaggaaauccugcauggcgccgugcgguucagcaacaacccugcccugugcaacguggagagcauccaguggcgggacauagucagcagugacuuucucagcaacaugucgauggacuuccagaaccaccugggcagcugccaaaagugugauccaagcugucccaaugggagcugcuggggugcaggagaggagaacugccagaaacugaccaaaaucaucugugcccagcagugcuccgggcgcugccguggcaagucccccagugacugcugccacaaccagugugcugcaggcugcacaggcccccgggagagcgacugccuggucugccgcaaauuccgagacgaagccacgugcaaggacaccugccccccacucaugcucuacaaccccaccacguaccagauggaugugaaccccgagggcaaauacagcuuuggugccaccugcgugaagaaguguccccguaauuauguggugacagaucacggcucgugcguccgagccuguggggccgacagcuaugagauggaggaagacggcguccgcaaguguaagaagugcgaagggccuugccgcaaaguguguaacggaauagguauuggugaauuuaaagacucacucuccauaaaugcuacgaauauuaaacacuucaaaaacugcaccuccaucaguggcgaucuccacauccugccgguggcauuuaggggugacuccuucacacauacuccuccucuggauccacaggaacuggauauucugaaaaccguaaaggaaaucacaggguuuuugcugauucaggcuuggccugaaaacaggacggaccuccaugccuuugagaaccuagaaaucauacgcggcaggaccaagcaacauggucaguuuucucuugcagucgucagccugaacauaacauccuugggauuacgcucccucaaggagauaagugauggagaugugauaauuucaggaaacaaaaauuugugcuaugcaaauacaauaaacuggaaaaaacuguuugggaccuccggucagaaaaccaaaauuauaagcaacagaggugaaaacagcugcaaggccacaggccaggucugccaugccuugugcucccccgagggcugcuggggcccggagcccagggacugcgucucuugccggaaugucagccgaggcagggaaugcguggacaagugcaaccuucuggagggugagccaagggaguuuguggagaacucugagugcauacagugccacccagagugccugccucaggccaugaacaucaccugcacaggacggggaccagacaacuguauccagugugcccacuacauugacggcccccacugcgucaagaccugcccggcaggagucaugggagaaaacaacacccuggucuggaaguacgcagacgccggccaugugugccaccugugccauccaaacugcaccuacggaugcacugggccaggucuugaaggcuguccaacgaaugggccuaagaucccguccaucgccacugggauggugggggcccuccucuugcugcuggugguggcccuggggaucggccucuucaugcgaaggcgccacaucguucggaagcgcacgcugcggaggcugcugcaggagagggagcuuguggagccucuuacacccaguggagaagcucccaaccaagcucucuugaggaucuugaaggaaacugaauucaaaaagaucaaagugcugggcuccggugcguucggcacgguguauaagggacucuggaucccagaaggugagaaaguuaaaauucccgucgcuaucaaggaauuaagagaagcaacaucuccgaaagccaacaaggaaauccucgaugaagccuacgugauggccagcguggacaacccccacgugugccgccugcugggcaucugccucaccuccaccgugcagcucaucacgcagcucaugcccuucggcugccuccuggacuauguccgggaacacaaagacaauauuggcucccaguaccugcucaacuggugugugcagaucgcaaagggcaugaacuacuuggaggaccgucgcuuggugcaccgcgaccuggcagccaggaacguacuggugaaaacaccgcagcaugucaagaucacagauuuugggcuggccaaacugcugggugcggaagagaaagaauaccaugcagaaggaggcaaagugccuaucaaguggauggcauuggaaucaauuuuacacagaaucuauacccaccagagugaugucuggagcuacggggugaccguuugggaguugaugaccuuuggauccaagccauaugacggaaucccugccagcgagaucuccuccauccuggagaaaggagaacgccucccucagccacccauauguaccaucgaugucuacaugaucauggucaagugcuggaugauagacgcagauagucgcccaaaguuccgugaguugaucaucgaauucuccaaaauggcccgagacccccagcgcuaccuugucauucagggggaugaaagaaugcauuugccaaguccuacagacuccaacuucuaccgugcccugauggaugaagaagacauggacgacgugguggaugccgacgaguaccucaucccacagcagggcuucuucagcagccccuccacgucacggacuccccuccugagcucucugagugcaaccagcaacaauuccaccguggcuugcauugauagaaaugggcugcaaagcugucccaucaaggaagacagcuucuugcagcgauacagcucagaccccacaggcgccuugacugaggacagcauagacgacaccuuccucccagugccugaauacauaaaccaguccguucccaaaaggcccgcuggcucugugcagaauccugucuaucacaaucagccucugaaccccgcgcccagcagagacccacacuaccaggacccccacagcacugcagugggcaaccccgaguaucucaacacuguccagcccaccugugucaacagcacauucgacagcccugcccacugggcccagaaaggcagccaccaaauuagccuggacaacccugacuaccagcaggacuucuuucccaaggaagccaagccaaauggcaucuuuaagggcuccacagcugaaaaugcagaauaccuaagggucgcgccacaaagcagugaauuuauuggagcauga

SEQ ID NO: 650 - RNA, 1395 nt, Artificial Sequence
  AAI18666
auggcagcugaagacguuaucaucugugcccagcagugcuccgggcgcugccguggcaagucccccagugacugcugccacaaccagugugcugcaggcugcacaggcccccgggagagcgacugccuggucugccgcaaauuccgagacgaagccacgugcaaggacaccugccccccacucaugcucuacaaccccaccacguaccagauggaugugaaccccgagggcaaauacagcuuuggugccaccugcgugaagaaguguccccguaauuauguggugacagaucacggcucgugcguccgagccuguggggccgacagcuaugagauggaggaagacggcguccgcaaguguaagaagugcgaagggccuugccgcaaaguguguaacggaauagguauuggugaauuuaaagacucacucuccauaaaugcuacgaauauuaaacacuucaaaaacugcaccuccaucaguggcgaucuccacauccugccgguggcauuuaggggugacuccuucacacauacuccuccucuggauccacaggaacuggauauucugaaaaccguaaaggaaaucacaggguuuuugcugauucaggcuuggccugaaaacaggacggaccuccaugccuuugagaaccuagaaaucauacgcggcaggaccaagcaacauggucaguuuucucuugcagucgucagccugaacauaacauccuugggauuacgcucccucaaggagauaagugauggagaugugauaauuucaggaaacaaaaauuugugcuaugcaaauacaauaaacuggaaaaaacuguuugggaccuccggucagaaaaccaaaauuauaagcaacagaggugaaaacagcugcaaggccacaggccaggucugccaugccuugugcucccccgagggcugcuggggcccggagcccagggacugcgucucuugccggaaugucagccgaggcagggaaugcguggacaagugcaaccuucuggagggugagccaagggaguuuguggagaacucugagugcauacagugccacccagagugccugccucaggccaugaacaucaccugcacaggacggggaccagacaacuguauccagugugcccacuacauugacggcccccacugcgucaagaccugcccggcaggagucaugggagaaaacaacacccuggucuggaaguacgcagacgcuggccaugugugccaccugugccauccaaacugcaccuacggaugcacagggccaggucuugaaggcuguccaacgaaugggccuaagaucccguccaucgccacugggauggugggggcccuccucuugcugcuggugguggcccuggggaucgggccucuucauggaagauag

SEQ ID NO: 651 - RNA, 3276 nt, Artificial Sequence
  AAH94761
augcgacccuccgggacggccggggcagcgcuccuggcgcugcuggcugcgcucugcccggcgagucgggcucuggaggaaaagaaaguuugccaaggcacgaguaacaagcucacgcaguugggcacuuuugaagaucauuuucucagccuccagaggauguucaauaacugugaggugguccuugggaauuuggaaauuaccuaugugcagaggaauuaugaucuuuccuucuuaaagaccauccaggagguggcugguuauguccucauugcccucaacacaguggagcgaauuccuuuggaaaaccugcagaucaucagaggaaauauguacuacgaaaauuccuaugccuuagcagucuuaucuaacuaugaugcaaauaaaaccggacugaaggagcugcccaugagaaauuuacagggacaaaagugugauccaagcugucccaaugggagcugcuggggugcaggagaggagaacugccagaaacugaccaaaaucaucugugcccagcagugcuccgggcgcugccguggcaagucccccagugacugcugccacaaccagugugcugcaggcugcacaggcccccgggagagcgacugccuggucugccgcaaauuccgagacgaagccacgugcaaggacaccugccccccacucaugcucuacaaccccaccacguaccagauggaugugaaccccgagggcaaauacagcuuuggugccaccugcgugaagaaguguccccguaauuauguggugacagaucacggcucgugcguccgagccuguggggccgacagcuaugagauggaggaagacggcguccgcaaguguaagaagugcgaagggccuugccgcaaaguguguaacggaauagguauuggugaauuuaaagacucacucuccauaaaugcuacgaauauuaaacacuucaaaaacugcaccuccaucaguggcgaucuccacauccugccgguggcauuuaggggugacuccuucacacauacuccuccucuggauccacaggaacuggauauucugaaaaccguaaaggaaaucacaggguuuuugcugauucaggcuuggccugaaaacaggacggaccuccaugccuuugagaaccuagaaaucauacgcggcaggaccaagcaacauggucaguuuucucuugcagucgucagccugaacauaacauccuugggauuacgcucccucaaggagauaagugauggagaugugauaauuucaggaaacaaaaauuugugcuaugcaaauacaauaaacuggaaaaaacuguuugggaccuccggucagaaaaccaaaauuauaagcaacagaggugaaaacagcugcaaggccacaggccaggucugccaugccuugugcucccccgagggcugcuggggcccggagcccagggacugcgucucuugccggaaugucagccgaggcagggaaugcguggacaagugcaaccuucuggagggugagccaagggaguuuguggagaacucugagugcauacagugccacccagagugccugccucaggccaugaacaucaccugcacaggacggggaccagacaacuguauccagugugcccacuacauugacggcccccacugcgucaagaccugcccggcaggagucaugggagaaaacaacacccuggucuggaaguacgcagacgccggccaugugugccaccugugccauccaaacugcaccuacggaugcacugggccaggucuugaaggcuguccaacgaaugggccuaagaucccguccaucgccacugggauggugggggcccuccucuugcugcuggugguggcccuggggaucggccucuucaugcgaaggcgccacaucguucggaagcgcacgcugcggaggcugcugcaggagagggagcuuguggagccucuuacacccaguggagaagcucccaaccaagcucucuugaggaucuugaaggaaacugaauucaaaaagaucaaagugcugggcuccggugcguucggcacgguguauaagggacucuggaucccagaaggugagaaaguuaaaauucccgucgcuaucaaggaauuaagagaagcaacaucuccgaaagccaacaaggaaauccucgaugaagccuacgugauggccagcguggacaacccccacgugugccgccugcugggcaucugccucaccuccaccgugcagcucaucacgcagcucaugcccuucggcugccuccuggacuauguccgggaacacaaagacaauauuggcucccaguaccugcucaacuggugugugcagaucgcaaagggcaugaacuacuuggaggaccgucgcuuggugcaccgcgaccuggcagccaggaacguacuggugaaaacaccgcagcaugucaagaucacagauuuugggcuggccaaacugcugggugcggaagagaaagaauaccaugcagaaggaggcaaagugccuaucaaguggauggcauuggaaucaauuuuacacagaaucuauacccaccagagugaugucuggagcuacggggugaccguuugggaguugaugaccuuuggauccaagccauaugacggaaucccugccagcgagaucuccuccauccuggagaaaggagaacgccucccucagccacccauauguaccaucgaugucuacaugaucauggucaagugcuggaugauagacgcagauagucgcccaaaguuccgugaguugaucaucgaauucuccaaaauggcccgagacccccagcgcuaccuugucauucagggggaugaaagaaugcauuugccaaguccuacagacuccaacuucuaccgugcccugauggaugaagaagacauggacgacgugguggaugccgacgaguaccucaucccacagcagggcuucuucagcagccccuccacgucacggacuccccuccugagcucucugagugcaaccagcaacaauuccaccguggcuugcauugauagaaaugggcugcaaagcugucccaucaaggaagacagcuucuugcagcgauacagcucagaccccacaggcgccuugacugaggacagcauagacgacaccuuccucccagugccuggugaguggcuugucuggaaacaguccugcuccucaaccuccucgacccacucagcagcagccagucuccaguguccaagccaggugcucccuccagcaucuccagagggggaaacaguggcagauuugcagacacaguga

SEQ ID NO: 652 - RNA, 216 nt, Artificial Sequence
  CAA34902
augcgacccuccgggacggccggggcagcgcuccuggcgcugcuggcugcgcucugcccggcgagucgggcucuggaggaaaagaaagguaagggcgugucucgccggcucccgcgccgcccccggaucgcgccccggaccccgcagcccgcccaaccgcgcaccggcgcaccggcucgcgcccgcgcccccgcccguccuuuccuguuuccuuga

SEQ ID NO: 653 - RNA, 720 nt, Artificial Sequence
  AAH10992
augccccugggacacaucaugaggcuggaccuggagaaaauugcccuggaguacaucgugcccugucugcacgaggugggcuucugcuaccuggacaacuuccugggcgagguggugggcgacugcguccuggagcgcgucaagcagcugcacugcaccggggcccugcgggacggccagcuggcggggccgcgcgccggcgucuccaagcgacaccugcggggcgaccagaucacguggaucgggggcaacgaggagggcugcgaggccaucagcuuccuccugucccucaucgacaggcugguccucuacugcgggagccggcugggcaaauacuacgucaaggagaggucuaaggcaaugguggcuugcuauccgggaaauggaacagguuauguucgccacguggacaaccccaacggugauggucgcugcaucaccugcaucuacuaucugaacaagaauugggaugccaagcuacauggugggauccugcggauauuuccagaggggaaaucauucauagcagauguggagcccauuuuugacagacuccuguucuucuggucagaucguaggaacccacacgaagugcagcccucuuacgcaaccagauaugcuaugacugucugguacuuugaugcugaagaaagggcagaagccaaaaagaaauucaggaauuuaacuaggaaaacugaaucugcccucacugaagacuga

SEQ ID NO: 654 - RNA, 1566 nt, Artificial Sequence
  BAH13456
auggcgacgucucugcaugagggacccacgaaccagcuggaucugcucauccgggccguggaagcaucaguucacagcaguaaugcacacuguacagauaagacaauugaagcugcugaagcccugcuucauauggaaucuccuaccugcuugagggauucaagaaguccugaauucauccaugcugcuaugaggccagaugucauuacagaaacuguaguggaggugucaacugaagagucugaacccauggauaccucuccuauuccaacaucaccagauagccaugaaccaaugaaaaagaaaaaaguuggccguaaaccaaagacccagcaaucaccaauuuccaaugggucuccugaguuagguauaaagaagaaaccaagagaaggaaaaggaaacacaaccuauuugugggaguuucuuuuagaucuacuucaagauaaaaauacuugucccagguauauuaaauggacucagagagaaaaaggcauauucaagcugguggauucaaaggcugucucuaagcuuuggggaaagcauaagaacaaaccagacaugaacuaugaaaccaugggacgagcuuugagauacuacuaccaaaggggaauucuugcaaagguugaaggacagaggcuuguauaucaguucaaggauaugccgaaaaacauaguggucauagaugaugacaaaagugaaaccuguaaugaagauuuagcaggaacuacugaugaaaaaucauuagaacgagugucacugucugcagaaagucuccugaaagcagcauccucuguucgcaguggaaaaaauucauccccuauaaacugcuccagagcagagaaggguguagcuagaguugugaauaucacuuccccugggcacgaugcuucauccaggucuccuacuaccacugcaucugugucagcaacagcagcuccaaggacaguucguguggcaaugcagguaccuguuguaaugacaucauugggucagaaaauuucaacuguggcaguucagucaguuaaugcaggugcaccauuaauaaccagcacuaguccaacaacagcgaccucuccaaagguagucauucagacaaucccuacugugaugccagcuucuacugaaaauggagacaaaaucaccaugcagccugccaaaauuauuaccaucccagcuacacagcuugcacagugucaacugcagacaaagucaaaucugacuggaucaggaagcauuaacauuguuggaaccccauuggcugugagagcacuuaccccuguuucaauagcccaugguacaccuguaaugagacuaucaaugccuacucagcaggcaucuggccagacuccuccucgaguuaucagugcagucauaaaggggccagagguuaaaucggaagcaguggcaaaaaagcaagaacaugaugugaaaacuuugcagcuaguagaagaaaaaccagcagauggaaauaagacagugacccacguagugguugucagugcgccuucagcuauugcccuuccuguaacuaugaaaacagaaggacuagugacaugugagaaauaa

SEQ ID NO: 655 - RNA, 810 nt, Artificial Sequence
  BAC67168
auggcggcugcgcuguucgugcugcugggauucgcgcugcugggcacccacggagccuccggggcugccggcacagucuucacuaccguagaagaccuuggcuccaagauacuccucaccugcuccuugaaugacagcgccacagaggucacagggcaccgcuggcugaaggggggcguggugcugaaggaggacgcgcugcccggccagaaaacggaguucaagguggacuccgacgaccaguggggagaguacuccugcgucuuccuccccgagcccaugggcacggccaacauccagcuccacgggccucccagagugaaggcugugaagucgucagaacacaucaacgagggggagacggccaugcuggucugcaagucagaguccgugccaccugucacugacugggccugguacaagaucacugacucugaggacaaggcccucaugaacggcuccgagagcagguucuucgugaguuccucgcagggccggucagagcuacacauugagaaccugaacauggaggccgaccccggccaguaccggugcaacggcaccagcuccaagggcuccgaccaggccaucaucacgcuccgcgugcgcagccaccuggccgcccucuggcccuuccugggcaucguggcugaggugcuggugcuggucaccaucaucuucaucuacgagaagcgccggaagcccgaggacguccuggaugaugacgacgccggcucugcaccccugaagagcagcgggcagcaccagaaugacaaaggcaagaacguccgccagaggaacucuuccuga

SEQ ID NO: 656 - RNA, 945 nt, Artificial Sequence
  AAA35723
auggcgcccccgcagguccucgcguucgggcuucugcuugccgcggcgacggcgacuuuugccgcagcucaggaagaaugugucugugaaaacuacaagcuggccguaaacugcuuugugaauaauaaucgucaaugccaguguacuucaguuggugcacaaaauacugucauuugcucaaagcuggcugccaaauguuuggugaugaaggcagaaaugaauggcucaaaacuugggagaagagcaaaaccugaaggggcccuccagaacaaugaugggcuuuaugauccugacugcgaugagagcgggcucuuuaaggccaagcagugcaacggcaccuccaugugcuggugugugaacacugcuggggucagaagaacagacaaggacacugaaauaaccugcucugagcgagugagaaccuacuggaucaucauugaacuaaaacacaaagcaagagaaaaaccuuaugauaguaaaaguuugcggacugcacuucagaaggagaucacaacgcguuaucaacuggauccaaaauuuaucacgaguauuuuguaugagaauaauguuaucacuauugaucugguucaaaauucuucucaaaaaacucagaaugauguggacauagcugauguggcuuauuauuuugaaaaagauguuaaaggugaauccuuguuucauucuaagaaaauggaccugacaguaaauggggaacaacuggaucuggauccuggucaaacuuuaauuuauuauguugaugaaaaagcaccugaauucucaaugcagggucuaaaagcugguguuauugcuguuauugugguuguggugauagcaguuguugcuggaauuguugugcugguuauuuccagaaagaagagaauggcaaaguaugagaaggcugagauaaaggagaugggugagaugcauagggaacucaaugcauaa

SEQ ID NO: 657 - RNA, 2931 nt, Artificial Sequence
  CCDS169.1
auggagcuccaggcagcccgcgccugcuucgcccugcuguggggcugugcgcuggccgcggccgcggcggcgcagggcaaggaagugguacugcuggacuuugcugcagcuggaggggagcucggcuggcucacacacccguauggcaaagggugggaccugaugcagaacaucaugaaugacaugccgaucuacauguacuccgugugcaacgugaugucuggcgaccaggacaacuggcuccgcaccaacuggguguaccgaggagaggcugagcguaucuucauugagcucaaguuuacuguacgugacugcaacagcuucccugguggcgccagcuccugcaaggagacuuucaaccucuacuaugccgagucggaccuggacuacggcaccaacuuccagaagcgccuguucaccaagauugacaccauugcgcccgaugagaucaccgucagcagcgacuucgaggcacgccacgugaagcugaacguggaggagcgcuccguggggccgcucacccgcaaaggcuucuaccuggccuuccaggauaucggugccuguguggcgcugcucuccguccgugucuacuacaagaagugccccgagcugcugcagggccuggcccacuucccugagaccaucgccggcucugaugcaccuucccuggccacuguggccggcaccuguguggaccaugccguggugccaccggggggugaagagccccguaugcacugugcaguggauggcgaguggcuggugcccauugggcagugccugugccaggcaggcuacgagaagguggaggaugccugccaggccugcucgccuggauuuuuuaaguuugaggcaucugagagccccugcuuggagugcccugagcacacgcugccauccccugagggugccaccuccugcgagugugaggaaggcuucuuccgggcaccucaggacccagcgucgaugccuugcacacgaccccccuccgccccacacuaccucacagccgugggcaugggugccaagguggagcugcgcuggacgcccccucaggacagcgggggccgcgaggacauugucuacagcgucaccugcgaacagugcuggcccgagucuggggaaugcgggccgugugaggccagugugcgcuacucggagccuccucacggacugacccgcaccagugugacagugagcgaccuggagccccacaugaacuacaccuucaccguggaggcccgcaauggcgucucaggccugguaaccagccgcagcuuccguacugccagugucagcaucaaccagacagagccccccaaggugaggcuggagggccgcagcaccaccucgcuuagcgucuccuggagcauccccccgccgcagcagagccgaguguggaaguacgaggucacuuaccgcaagaagggagacuccaacagcuacaaugugcgccgcaccgaggguuucuccgugacccuggacgaccuggccccagacaccaccuaccugguccaggugcaggcacugacgcaggagggccagggggccggcagcaaggugcacgaauuccagacgcuguccccggagggaucuggcaacuuggcggugauuggcggcguggcugucggugugguccugcuucuggugcuggcaggaguuggcuucuuuauccaccgcaggaggaagaaccagcgugcccgccaguccccggaggacguuuacuucuccaagucagaacaacugaagccccugaagacauacguggacccccacacauaugaggaccccaaccaggcuguguugaaguucacuaccgagauccauccauccugugucacucggcagaaggugaucggagcaggagaguuuggggagguguacaagggcaugcugaagacauccucggggaagaaggaggugccgguggccaucaagacgcugaaagccggcuacacagagaagcagcgaguggacuuccucggcgaggccggcaucaugggccaguucagccaccacaacaucauccgccuagagggcgucaucuccaaauacaagcccaugaugaucaucacugaguacauggagaauggggcccuggacaaguuccuucgggagaaggauggcgaguucagcgugcugcagcuggugggcaugcugcggggcaucgcagcuggcaugaaguaccuggccaacaugaacuaugugcaccgugaccuggcugcccgcaacauccucgucaacagcaaccuggucugcaaggugucugacuuuggccugucccgcgugcuggaggacgaccccgaggccaccuacaccaccaguggcggcaagauccccauccgcuggaccgccccggaggccauuuccuaccggaaguucaccucugccagcgacguguggagcuuuggcauugucaugugggaggugaugaccuauggcgagcggcccuacugggaguuguccaaccacgaggugaugaaagccaucaaugauggcuuccggcuccccacacccauggacugccccuccgccaucuaccagcucaugaugcagugcuggcagcaggagcgugcccgccgccccaaguucgcugacaucgucagcauccuggacaagcucauucgugccccugacucccucaagacccuggcugacuuugacccccgcgugucuauccggcuccccagcacgagcggcucggagggggugcccuuccgcacgguguccgaguggcuggaguccaucaagaugcagcaguauacggagcacuucauggcggccggcuacacugccaucgagaagguggugcagaugaccaacgacgacaucaagaggauuggggugcggcugcccggccaccagaagcgcaucgccuacagccugcugggacucaaggaccaggugaacacuguggggauccccaucuga

SEQ ID NO: 658 - RNA, 2952 nt, Artificial Sequence
  AAG43576
auggauugucagcucuccauccuccuccuucucagcugcucuguucucgacagcuucggggaacugauuccgcagccuuccaaugaagucaaucuacuggauucaaaaacaauucaaggggagcugggcuggaucucuuauccaucacaugggugggaagagaucagugguguggaugaacauuacacacccaucaggacuuaccaggugugcaaugucauggaccacagucaaaacaauuggcugagaacaaacuggguccccaggaacucagcucagaagauuuauguggagcucaaguucacucuacgagacugcaauagcauuccauugguuuuaggaacuugcaaggagacauucaaccuguacuacauggagucugaugaugaucauggggugaaauuucgagagcaucaguuuacaaagauugacaccauugcagcugaugaaaguuucacucaaauggaucuuggggaccguauucugaagcucaacacugagauuagagaaguagguccugucaacaagaagggauuuuauuuggcauuucaagauguuggugcuuguguugccuuggugucugugagaguauacuucaaaaagugcccauuuacagugaagaaucuggcuauguuuccagacacgguacccauggacucccagucccugguggagguuagagggucuugugucaacaauucuaaggaggaagauccuccaaggauguacugcaguacagaaggcgaauggcuuguacccauuggcaaguguuccugcaaugcuggcuaugaagaaagagguuuuaugugccaagcuugucgaccagguuucuacaaggcauuggaugguaauaugaagugugcuaagugcccgccucacaguucuacucaggaagaugguucaaugaacugcaggugugagaauaauuacuuccgggcagacaaagacccuccauccauggcuuguacccgaccuccaucuucaccaagaaauguuaucucuaauauaaacgagaccucaguuauccuggacuggaguuggccccuggacacaggaggccggaaagauguuaccuucaacaucauauguaaaaaauguggguggaauauaaaacagugugagccaugcagcccaaauguccgcuuccucccucgacaguuuggacucaccaacaccacggugacagugacagaccuucuggcacauacuaacuacaccuuugagauugaugccguuaauggggugucagagcugagcuccccaccaagacaguuugcugcggucagcaucacaacuaaucaggcugcuccaucaccuguccugacgauuaagaaagaucggaccuccagaaauagcaucucuuuguccuggcaagaaccugaacauccuaaugggaucauauuggacuacgaggucaaauacuaugaaaagcaggaacaagaaacaaguuauaccauucugagggcaagaggcacaaauguuaccaucaguagccucaagccugacacuauauacguauuccaaauccgagcccgaacagccgcuggauaugggacgaacagccgcaaguuugaguuugaaacuaguccagacucuuucuccaucucuggugaaaguagccaaguggucaugaucgccauuucagcggcaguagcaauuauucuccucacuguugucaucuauguuuugauugggagguucuguggcuauaagucaaaacauggggcagaugaaaaaagacuucauuuuggcaaugggcauuuaaaacuuccaggucucaggacuuauguugacccacauacauaugaagacccuacccaagcuguucaugaguuugccaaggaauuggaugccaccaacauauccauugauaaaguuguuggagcaggugaauuuggagaggugugcaguggucgcuuaaaacuuccuucaaaaaaagagauuucaguggccauuaagacccugaaaguuggcuacacagaaaagcagaggagagacuuccugggagaagcaagcauuaugggacaguuugaccaccccaauaucauucgacuggaaggaguuguuaccaaaaguaagccaguuaugauugucacagaauacauggagaaugguuccuuggauaguuuccuacguaaacacgaugcccaguuuacugucauucagcuaguggggaugcuucgagggauagcaucuggcaugaaguaccugucagacaugggcuauguucaccgagaccucgcugcucggaacaucuugaucaacaguaacuugguguguaagguuucugauuucggacuuucgcguguccuggaggaugacccagaagcugcuuauacaacaagaggagggaagaucccaaucagguggacaucaccagaagcuauagccuaccgcaaguucacgucagccagcgauguauggaguuaugggauuguucucugggaggugaugucuuauggagagagaccauacugggagauguccaaucaggauguaauuaaagcuguagaugagggcuaucgacugccaccccccauggacugcccagcugccuuguaucagcugaugcuggacugcuggcagaaagacaggaacaacagacccaaguuugagcagauuguuaguauucuggacaagcuuauccggaaucccggcagccugaagaucaucaccagugcagccgcaaggccaucaaaccuucuucuggaccaaagcaauguggauaucacuaccuuccgcacaacaggugacuggcuuaauggugucuggacagcacacugcaaggaaaucuucacggguguggaguacaguucuugugacacaauagccaagauuuccacagaugacaugaaaaagguuggugucaccgugguugggccacagaagaagaucaucaguagcauuaaagcucuagaaacgcaaucaaagaauggcccaguucccguguaa

SEQ ID NO: 659 - RNA, 2952 nt, Artificial Sequence
  AAH63282
auggauugucagcucuccauccuccuccuucucagcugcucuguucucgacagcuucggggaacugauuccgcagccuuccaaugaagucaaucuacuggauucaaaaacaauucaaggggagcugggcuggaucucuuauccaucacaugggugggaagagaucagugguguggaugaacauuacacacccaucaggacuuaccaggugugcaaugucauggaccacagucaaaacaauuggcugagaacaaacuggguccccaggaacucagcucagaagauuuauguggagcucaaguucacucuacgagacugcaauagcauuccauugguuuuaggaacuugcaaggagacauucaaccuguacuacauggagucugaugaugaucauggggugaaauuucgagagcaucaguuuacaaagauugacaccauugcagcugaugaaaguuucacucaaauggaucuuggggaccguauucugaagcucaacacugagauuagagaaguagguccugucaacaagaagggauuuuauuuggcauuucaagauguuggugcuuguguugccuuggugucugugagaguauacuucaaaaagugcccauuuacagugaagaaucuggcuauguuuccagacacgguacccauggacucccagucccugguggagguuagagggucuugugucaacaauucuaaggaggaagauccuccaaggauguacugcaguacagaaggcgaauggcuuguacccauuggcaaguguuccugcaaugcuggcuaugaagaaagagguuuuaugugccaagcuugucgaccagguuucuacaaggcauuggaugguaauaugaagugugcuaagugcccgccucacaguucuacucaggaagaugguucaaugaacugcaggugugagaauaauuacuuccgggcagacaaagacccuccauccauggcuuguacccgaccuccaucuucaccaagaaauguuaucucuaauauaaacgagaccucaguuauccuggacuggaguuggccccuggacacaggaggccggaaagauguuaccuucaacaucauauguaaaaaauguggguggaauauaaaacagugugagccaugcagcccaaauguccgcuuccucccucgacaguuuggacucaccaacaccacggugacagugacagaccuucuggcacauacuaacuacaccuuugagauugaugccguuaauggggugucagagcugagcuccccaccaagacaguuugcugcggucagcaucacaacuaaucaggcugcuccaucaccuguccugacgauuaagaaagaucggaccuccagaaauagcaucucuuuguccuggcaagaaccugaacauccuaaugggaucauauuggacuacgaggucaaauacuaugaaaagcaggaacaagaaacaaguuauaccauucugagggcaagaggcacaaauguuaccaucaguagccucaagccugacacuauauacguauuccaaauccgagcccgaacagccgcuggauaugggacgaacagccgcaaguuugaguuugaaacuaguccagacucuuucuccaucucuggugaaaguagccaaguggucaugaucgccauuucagcggcaguagcaauuauucuccucacuguugucaucuauguuuugauugggagguucuguggcuauaagucaaaacauggggcagaugaaaaaagacuucauuuuggcaaugggcauuuaaaacuuccaggucucaggacuuauguugacccacauacauaugaagacccuacccaaacuguucaugaguuugccaaggaauuggaugccaccaacauauccauugauaaaguuguuggagcaggugaauuuggagaggugugcaguggucgcuuaaaacuuccuucaaaaaaagagauuucaguggccauuaagacccugaaaguuggcuacacagaaaagcagaggagagacuuccugggagaagcaagcauuaugggacaguuugaccaccccaauaucauucgacuggaaggaguuguuaccaaaaguaagccaguuaugauugucacagaauacauggagaaugguuccuuggauaguuuccuacguaaacacgaugcccaguuuacugucauucagcuaguggggaugcuucgagggauagcaucuggcaugaaguaccugucagacaugggcuauguucaccgagaccucgcugcucggaacaucuugaucaacaguaacuugguguguaagguuucugauuucggacuuucgcguguccuggaggaugacccagaagcugcuuauacaacaagaggagggaagaucccaaucagguggacaucaccagaagcuauagccuaccgcaaguucacgucagccagcgauguauggaguuaugggauuguucucugggaggugaugucuuauggagagagaccauacugggagauguccaaucaggauguaauuaaagcuguagaugagggcuaucgacugccaccccccauggacugcccagcugccuuguaucagcugaugcuggacugcuggcagaaagacaggaacaacagacccaaguuugagcagauuguuaguauucuggacaagcuuauccggaaucccggcagccugaagaucaucaccagugcagccgcaaggccaucaaaccuucuucuggaccaaagcaauguggauaucacuaccuuccgcacaacaggugacuggcuuaauggugucuggacagcacacugcaaggaaaucuucacggguguggaguacaguucuugugacacaauagccaagauuuccacagaugacaugaaaaagguuggugucaccgugguugggccacagaagaagaucaucaguagcauuaaagcucuagaaacgcaaucaaagaauggcccaguucccguguaa

SEQ ID NO: 660 - RNA, 1389 nt, Artificial Sequence
  BAG54127
augcccaugucuacuauuuugccagugacuaguccaugucuuccugcaacaggugugacaguuugggaguugaugaccuucggggcagagcccuaugcagggcuacgauuggcugaaguaccagaccugcuagagaagggggagcgguuggcacagccccagaucugcacaauugaugucuacauggugauggucaaguguuggaugauugaugagaacauucgcccaaccuuuaaagaacuagccaaugaguucaccaggauggcccgagacccaccacgguaucuggucauaaagagagagagugggccuggaauagccccugggccagagccccauggucugacaaacaagaagcuagaggaaguagagcuggagccagaacuagaccuagaccuagacuuggaagcagaggaggacaaccuggcaaccaccacacugggcuccgcccucagccuaccaguuggaacacuuaaucggccacgugggagccagagccuuuuaaguccaucaucuggauacaugcccaugaaccaggguaaucuuggggagucuugccaggagucugcaguuucugggagcagugaacggugcccccguccagucucucuacacccaaugccacggggaugccuggcaucagagucaucagaggggcauguaacaggcucugaggcugagcuccaggagaaagugucaauguguagaagccggagcaggagccggagcccacggccacgcggagauagcgccuaccauucccagcgccacagucugcugacuccuguuaccccacucuccccacccggguuagaggaagaggaugucaacgguuaugucaugccagauacacaccucaaagguacucccuccucccgggaaggcacccuuucuucagugggucucaguucuguccuggguacugaagaagaagaugaagaugaggaguaugaauacaugaaccggaggagaaggcacaguccaccucaucccccuaggccaaguucccuugaggagcuggguuaugaguacauggauguggggucagaccucagugccucucugggcagcacacagaguugcccacuccacccuguacccaucaugcccacugcaggcacaacuccagaugaagacuaugaauauaugaaucggcaacgagauggaggugguccugggggugauuaugcagccaugggggccugcccagcaucugagcaaggguaugaagagaugagagcuuuucaggggccuggacaucaggccccccauguccauuaugcccgccuaaaaacucuacguagcuuagaggcuacagacucugccuuugauaacccugauuacuggcauagcaggcuuuuccccaaggcuaaugcccagagaacguaa

SEQ ID NO: 661 - RNA, 2766 nt, Artificial Sequence
  BAG57868
augagggcgaacgacgcucugcaggugcugggcuugcuuuucagccuggcccggggcuccgaggugggcaacucucaggcaguguguccugggacucugaauggccugagugugaccggcgaugcugagaaccaauaccagacacuguacaagcucuacgagaggugugagguggugauggggaaccuugagauugugcucacgggacacaaugccgaccucuccuuccugcaguggauucgagaagugacaggcuauguccucguggccaugaaugaauucucuacucuaccauugcccaaccuccgcguggugcgagggacccaggucuacgaugggaaguuugccaucuucgucauguugaacuauaacaccaacuccagccacgcucugcgccagcuccgcuugacucagcucaccgagauucugucaggggguguuuauauugagaagaacgauaagcuuugucacauggacacaauugacuggagggacaucgugagggaccgagaugcugagauaguggugaaggacaauggcagaagcuguccccccugucaugagguuugcaaggggcgaugcugggguccuggaucagaagacugccagacauugaccaagaccaucugugcuccucaguguaauggucacugcuuugggcccaaccccaaccagugcugccaugaugagugugccgggggcugcucaggcccucaggacacagacugcuuugccugccggcacuucaaugacaguggagccuguguaccucgcuguccacagccucuugucuacaacaagcuaacuuuccagcuggaacccaauccccacaccaaguaucaguauggaggaguuuguguagccagcuguccccauaacuuugugguggaucaaacauccugugucagggccuguccuccugacaagauggaaguagauaaaaaugggcucaagaugugugagccuugugggggacuaugucccaaagccugugagggaacaggcucugggagccgcuuccagacuguggacucgagcaacauugauggauuugugaacugcaccaagauccugggcaaccuggacuuucugaucaccggccucaauggagaccccuggcacaagaucccugcccuggacccagagaagcucaaugucuuccggacaguacgggagaucacagguuaccugaacauccaguccuggccgccccacaugcacaacuucaguguuuuuuccaauuugacaaccauuggaggcagaagccucuacaaccggggcuucucauuguugaucaugaagaacuugaaugucacaucucugggcuuccgaucccugaaggaaauuagugcugggcguaucuauauaagugccaauaggcagcucugcuaccaccacucuuugaacuggaccaaggugcuucgggggccuacggaagagcgacuagacaucaagcauaaucggccgcgcagagacugcguggcagagggcaaagugugugacccacugugcuccucugggggaugcuggggcccaggcccuggucagugcuuguccugucgaaauuauagccgaggaggugucugugugacccacugcaacuuucugaauggggagccucgagaauuugcccaugaggccgaaugcuucuccugccacccggaaugccaacccauggagggcacugccacaugcaauggcucgggcucugauacuugugcucaaugugcccauuuucgagaugggccccacugugugagcagcugcccccauggaguccuaggugccaagggcccaaucuacaaguacccagauguucagaaugaaugucggcccugccaugagaacugcacccagggguguaaaggaccagagcuucaagacuguuuaggacaaacacuggugcugaucggcaaaacccaucugacaauggcuuugacagugauagcaggauugguagugauuuucaugaugcugggcggcacuuuucucuacuggcgugggcgccggauucagaauaaaagggcuaugaggcgauacuuggaacggggugagagcauagagccucuggaccccagugagaaggcuaacaaagucuuggccagaaucuucaaagagacagagcuaaggaagcuuaaagugcuuggcucgggugucuuuggaacugugcacaaaggaguguggaucccugagggugaaucaaucaagauuccagucugcauuaaagucauugaggacaagaguggacggcagaguuuucaagcugugacagaucauaugcuggccauuggcagccuggaccaugcccacauuguaaggcugcugggacuaugcccagggucaucucugcagcuugucacucaauauuugccucuggguucucugcuggaucaugugagacaacaccggggggcacuggggccacagcugcugcucaacuggggaguacaaauugccaagggaauguacuaccuugaggaacaugguauggugcauagaaaccuggcugcccgaaacgugcuacucaagucacccagucagguucagguggcagauuuugguguggcugaccugcugccuccugaugauaagcagcugcuauacagugaggccaagacuccaauuaaguggauggcccuugagaguauccacuuugggaaauacacacaccagagugaugucuggagcuauggucagugcaucuggaugcccucucuaccaucacuggccccaguuucaaauuuaccuuuugagacccccucuuag

SEQ ID NO: 662 - RNA, 3927 nt, Artificial Sequence
  AAB59446
augaagccggcgacaggacuuugggucugggugagccuucucguggcggcggggaccguccagcccagcgauucucagucagugugugcaggaacggagaauaaacugagcucucucucugaccuggaacagcaguaccgagccuugcgcaaguacuaugaaaacugugagguugucaugggcaaccuggagauaaccagcauugagcacaaccgggaccucuccuuccugcggucuguucgagaagucacaggcuacguguuaguggcucuuaaucaguuucguuaccugccucuggagaauuuacgcauuauucgugggacaaaacuuuaugaggaucgauaugccuuggcaauauuuuuaaacuacagaaaagauggaaacuuuggacuucaagaacuuggauuaaagaacuugacagaaauccuaaaugguggagucuauguagaccagaacaaauuccuuuguuaugcagacaccauucauuggcaagauauuguucggaacccauggccuuccaacuugacucuugugucaacaaaugguaguucaggauguggacguugccauaaguccuguacuggccguugcuggggacccacagaaaaucauugccagacuuugacaaggacggugugugcagaacaaugugacggcagaugcuacggaccuuacgucagugacugcugccaucgagaaugugcuggaggcugcucaggaccuaaggacacagacugcuuugccugcaugaauuucaaugacaguggagcauguguuacucaguguccccaaaccuuugucuacaauccaaccaccuuucaacuggagcacaauuucaaugcaaaguacacauauggagcauucugugucaagaaauguccacauaacuuugugguagauuccaguucuugugugcgugccugcccuaguuccaagauggaaguagaagaaaaugggauuaaaauguguaaaccuugcacugacauuugcccaaaagcuugugauggcauuggcacaggaucauugaugucagcucagacuguggauuccaguaacauugacaaauucauaaacuguaccaagaucaaugggaauuugaucuuucuagucacugguauucauggggacccuuacaaugcaauugaagccauagacccagagaaacugaacgucuuucggacagucagagagauaacagguuuccugaacauacagucauggccaccaaacaugacugacuucaguguuuuuucuaaccuggugaccauugguggaagaguacucuauaguggccuguccuugcuuauccucaagcaacagggcaucaccucucuacaguuccagucccugaaggaaaucagcgcaggaaacaucuauauuacugacaacagcaaccuguguuauuaucauaccauuaacuggacaacacucuucagcacaaucaaccagagaauaguaauccgggacaacagaaaagcugaaaauuguacugcugaaggaauggugugcaaccaucuguguuccagugauggcuguuggggaccugggccagaccaaugucugucgugucgccgcuucaguagaggaaggaucugcauagagucuuguaaccucuaugauggugaauuucgggaguuugagaauggcuccaucuguguggagugugacccccagugugagaagauggaagauggccuccucacaugccauggaccggguccugacaacuguacaaagugcucucauuuuaaagauggcccaaacuguguggaaaaauguccagauggcuuacagggggcaaacaguuucauuuucaaguaugcugauccagaucgggagugccacccaugccauccaaacugcacccaaggguguaacggucccacuagucaugacugcauuuacuacccauggacgggccauuccacuuuaccacaacaugcuagaacuccccugauugcagcuggaguaauuggugggcucuucauucuggucauugugggucugacauuugcuguuuauguuagaaggaagagcaucaaaaagaaaagagccuugagaagauucuuggaaacagaguugguggaaccauuaacucccaguggcacagcacccaaucaagcucaacuucguauuuugaaagaaacugagcugaagaggguaaaaguccuuggcucaggugcuuuuggaacgguuuauaaagguauuuggguaccugaaggagaaacugugaagauuccuguggcuauuaagauucuuaaugagacaacuggucccaaggcaaauguggaguucauggaugaagcucugaucauggcaaguauggaucauccacaccuaguccgguugcugggugugugucugagcccaaccauccagcugguuacucaacuuaugccccauggcugccuguuggaguauguccacgagcacaaggauaacauuggaucacaacugcugcuuaacugguguguccagauagcuaagggaaugauguaccuggaagaaagacgacucguucaucgggauuuggcagcccguaaugucuuagugaaaucuccaaaccaugugaaaaucacagauuuugggcuagccagacucuuggaaggagaugaaaaagaguacaaugcugauggaggaaagaugccaauuaaauggauggcucuggaguguauacauuacaggaaauucacccaucagagugacguuuggagcuauggaguuacuauaugggaacugaugaccuuuggaggaaaacccuaugauggaauuccaacgcgagaaaucccugauuuauuagagaaaggagaacguuugccucagccucccaucugcacuauugacguuuacauggucauggucaaauguuggaugauugaugcugacaguagaccuaaauuuaaggaacuggcugcugaguuuucaaggauggcucgagacccucaaagauaccuaguuauucagggugaugaucguaugaagcuucccaguccaaaugacagcaaguucuuucagaaucucuuggaugaagaggauuuggaagauaugauggaugcugaggaguacuuggucccucaggcuuucaacaucccaccucccaucuauacuuccagagcaagaauugacucgaauaggagugaaauuggacacagcccuccuccugccuacacccccaugucaggaaaccaguuuguauaccgagauggagguuuugcugcugaacaaggagugucugugcccuacagagccccaacuagcacaauuccagaagcuccuguggcacagggugcuacugcugagauuuuugaugacuccugcuguaauggcacccuacgcaagccaguggcaccccauguccaagaggacaguagcacccagagguacagugcugaccccaccguguuugccccagaacggagcccacgaggagagcuggaugaggaagguuacaugacuccuaugcgagacaaacccaaacaagaauaccugaauccaguggaggagaacccuuuuguuucucggagaaaaaauggagaccuucaagcauuggauaaucccgaauaucacaaugcauccaaugguccacccaaggccgaggaugaguaugugaaugagccacuguaccucaacaccuuugccaacaccuugggaaaagcugaguaccugaagaacaacauacugucaaugccagagaaggccaagaaagcguuugacaacccugacuacuggaaccacagccugccaccucggagcacccuucagcacccagacuaccugcaggaguacagcacaaaauauuuuuauaaacagaaugggcggauccggccuauuguggcagagaauccugaauaccucucugaguucucccugaagccaggcacugugcugccgccuccaccuuacagacaccggaauacugugguguaa

SEQ ID NO: 663 - RNA, 1461 nt, Artificial Sequence
  CCDS46648.1
augauucagacugucccggacccagcagcucauaucaaggaagccuuaucaguugugagugaggaccagucguuguuugagugugccuacggaacgccacaccuggcuaagacagagaugaccgcguccuccuccagcgacuauggacagacuuccaagaugagcccacgcgucccucagcaggauuggcugucucaacccccagccagggucaccaucaaaauggaauguaacccuagccaggugaauggcucaaggaacucuccugaugaaugcaguguggccaaaggcgggaagauggugggcagcccagacaccguugggaugaacuacggcagcuacauggaggagaagcacaugccacccccaaacaugaccacgaacgagcgcagaguuaucgugccagcagauccuacgcuauggaguacagaccaugugcggcaguggcuggagugggcggugaaagaauauggccuuccagacgucaacaucuuguuauuccagaacaucgaugggaaggaacugugcaagaugaccaaggacgacuuccagaggcucacccccagcuacaacgccgacauccuucucucacaucuccacuaccucagagagacuccucuuccacauuugacuucagaugauguugauaaagccuuacaaaacucuccacgguuaaugcaugcuagaaacacagggggugcagcuuuuauuuucccaaauacuucaguauauccugaagcuacgcaaagaauuacaacuaggccagauuuaccauaugagccccccaggagaucagccuggaccggucacggccaccccacgccccagucgaaagcugcucaaccaucuccuuccacagugcccaaaacugaagaccagcguccucaguuagauccuuaucagauucuuggaccaacaaguagccgccuugcaaauccaggcaguggccagauccagcuuuggcaguuccuccuggagcuccugucggacagcuccaacuccagcugcaucaccugggaaggcaccaacggggaguucaagaugacggaucccgacgagguggcccggcgcuggggagagcggaagagcaaacccaacaugaacuacgauaagcucagccgcgcccuccguuacuacuaugacaagaacaucaugaccaagguccaugggaagcgcuacgccuacaaguucgacuuccacgggaucgcccaggcccuccagccccaccccccggagucaucucuguacaaguaccccucagaccucccguacaugggcuccuaucacgcccacccacagaagaugaacuuuguggcgccccacccuccagcccuccccgugacaucuuccaguuuuuuugcugccccaaacccauacuggaauucaccaacuggggguauauaccccaacacuaggcuccccaccagccauaugccuucucaucugggcacuuacuacuaa

SEQ ID NO: 664 - RNA, 1359 nt, Artificial Sequence
  AAA19786
augucugagacuccugcucaguguagcauuaagcaggaacgaauuucauauacaccuccagagagcccagugccgaguuacgcuuccucgacgccacuucauguuccagugccucgagcgcucaggauggaggaagacucgauccgccugccugcgcaccugcgcuugcagccaauuuacuggagcagggaugacguagcccaguggcucaagugggcugaaaaugaguuuucuuuaaggccaauugacagcaacacguuugaaaugaauggcaaagcucuccugcugcugaccaaagaggacuuucgcuaucgaucuccucauucaggugaugugcucuaugaacuccuucagcauauucugaagcagaggaaaccucggauucuuuuuucaccauucuuccacccuggaaacucuauacacacacagccggaggucauacugcaucagaaccaugaagaagauaacuguguccagaggacccccaggccauccguggauaaugugcaccauaacccucccaccauugaacuguugcaccgcuccaggucaccuaucacgacaaaucaccggccuucuccugaccccgagcagcggccccuccgguccccccuggacaacaugauccgccgccucuccccggcugagagagcucagggacccaggccgcaccaggagaacaaccaccaggaguccuacccucugucagugucucccauggagaauaaucacugcccagcguccuccgagucccacccgaagccauccagcccccggcaggagagcacacgcgugauccagcugaugcccagccccaucaugcacccucugauccugaacccccggcacuccguggauuucaaacaguccaggcucuccgaggacgggcugcauagggaagggaagcccaucaaccucucucaucgggaagaccuggcuuacaugaaccacaucauggucucugucuccccgccugaagagcacgccaugcccauugggagaauagcagacuguagacugcuuugggauuacgucuaucaguugcuuucugacagccgguacgaaaacuucauccgaugggaggacaaagaauccaaaauauuccggauaguggaucccaacggacuggcucgacuguggggaaaccauaagaacagaacaaacaugaccuaugagaaaauguccagagcccugcgccacuacuacaaacuaaacauuaucaggaaggagccaggacaaaggcuuuuguucagguuuaugaaaaccccagaugaaaucaugaguggccgaacagaccgucuggagcaccuagagucccaggagcuggaugaacaaauauaccaagaagaugaaugcuga

SEQ ID NO: 665 - RNA, 1971 nt, Artificial Sequence
  AAH04817
auggcguccacggauuacaguaccuauagccaagcugcagcgcagcagggcuacagugcuuacaccgcccagcccacucaaggauaugcacagaccacccaggcauaugggcaacaaagcuauggaaccuauggacagcccacugaugucagcuauacccaggcucagaccacugcaaccuaugggcagaccgccuaugcaacuucuuauggacagccucccacugguuauacuacuccaacugccccccaggcauacagccagccuguccagggguauggcacuggugcuuaugauaccaccacugcuacagucaccaccacccaggccuccuaugcagcucagucugcauauggcacucagccugcuuauccagccuaugggcagcagccagcagccacugcaccuacaagaccgcaggauggaaacaagcccacugagacuagucaaccucaaucuagcacaggggguuacaaccagcccagccuaggauauggacagaguaacuacaguuauccccagguaccugggagcuaccccaugcagccagucacugcaccuccauccuacccuccuaccagcuauuccucuacacagccgacuaguuaugaucagagcaguuacucucagcagaacaccuaugggcaaccgagcagcuauggacagcagaguagcuauggucaacaaagcagcuaugggcagcagccucccacuaguuacccaccccaaacuggauccuacagccaagcuccaagucaauauagccaacagagcagcagcuacgggcagcagaguucauuccgacaggaccaccccaguagcauggguguuuaugggcaggagucuggaggauuuuccggaccaggagagaaccggagcaugaguggcccugauaaccggggcaggggaagagggggauuugaucguggaggcaugagcagaggugggcggggaggaggacgcgguggaaugggcagcgcuggagagcgagguggcuucaauaagccugguggacccauggaugaaggaccagaucuugaucuaggcccaccuguagauccagaugaagacucugacaacagugcaauuuauguacaaggauuaaaugacagugugacucuagaugaucuggcagacuucuuuaagcagugugggguuguuaagaugaacaagagaacugggcaacccaugauccacaucuaccuggacaaggaaacaggaaagcccaaaggcgaugccacaguguccuaugaagacccacccacugccaaggcugccguggaaugguuugaugggaaagauuuucaagggagcaaacuuaaagucucccuugcucggaagaagccuccaaugaacaguaugcgggguggucugccaccccgugagggcagaggcaugccaccaccacuccguggagguccaggaggcccaggagguccugggggacccaugggucgcaugggaggccguggaggagauagaggaggcuucccuccaagaggaccccgggguucccgagggaaccccucuggaggaggaaacguccagcaccgagcuggagacuggcagugucccaauccggguuguggaaaccagaacuucgccuggagaacagagugcaaccaguguaaggccccaaagccugaaggcuuccucccgccacccuuuccgcccccggguggugaucguggcagagguggcccugguggcaugcggggaggaagagguggccucauggaucgugguggucccgguggaauguucagagguggccgugguggagacagagguggcuuccgugguggccggggcauggaccgagguggcuuugguggaggaagacgagguggcccuggggggcccccuggaccuuugauggaacagaugggaggaagaagaggaggacguggaggaccuggaaaaauggauaaaggcgagcaccgucaggagcgcagagaucggcccuacuag

SEQ ID NO: 666 - RNA, 1998 nt, Artificial Sequence
  AEA07595
augggccagacugggaagaaaucugagaagggaccaguuuguuggcggaagcguguaaaaucagaguacaugcgacugagacagcucaagagguucagacgagcugaugaaguaaagaguauguuuaguuccaaucgucagaaaauuuuggaaagaacggaaaucuuaaaccaagaauggaaacagcgaaggauacagccugugcacauccugacuucugugagcucauugcgcgggacuagggagguggaagaugaaacuguuuuacauaacauuccuuauaugggagaugaaguuuuagaucaggaugguacuuucauugaagaacuaauaaaaaauuaugaugggaaaguacacggggauagagaauguggguuuauaaaugaugaaauuuuuguggaguuggugaaugcccuuggucaauauaaugaugaugacgaugaugaugauggagacgauccugaagaaagagaagaaaagcagaaagaucuggaggaucaccgagaugauaaagaaagccgcccaccucggaaauuuccuucugauaaaauuuuugaagccauuuccucaauguuuccagauaagggcacagcagaagaacuaaaggaaaaauauaaagaacucaccgaacagcagcucccaggcgcacuuccuccugaauguacccccaacauagauggaccaaaugcuaaaucuguucagagagagcaaagcuuacacuccuuucauacgcuuuucuguaggcgauguuuuaaauaugacugcuuccuacauccuuuucaugcaacacccaacacuuauaagcggaagaacacagaaacagcucuagacaacaaaccuuguggaccacaguguuaccagcauuuggagggagcaaaggaguuugcugcugcucucaccgcugagcggauaaagaccccaccaaaacguccaggaggccgcagaagaggacggcuucccaauaacaguagcaggcccagcacccccaccauuaaugugcuggaaucaaaggauacagacagugauagggaagcagggacugaaacggggggagagaacaaugauaaagaagaagaagagaagaaagaugaaacuucgagcuccucugaagcaaauucucggugucaaacaccaauaaagaugaagccaaauauugaaccuccugagaauguggaguggaguggugcugaagccucaauguuuagaguccucauuggcacuuacuaugacaauuucugugccauugcuagguuaauugggaccaaaacauguagacagguguaugaguuuagagucaaagaaucuagcaucauagcuccagcucccgcugaggauguggauacuccuccaaggaaaaagaagaggaaacaccgguugugggcugcacacugcagaaagauacagcugaaaaagggucaaaaccgcuuuccgggaugccgcugcaaagcacagugcaacaccaagcagugcccgugcuaccuggcuguccgagagugugacccugaccucugucuuacuuguggagccgcugaccauugggacaguaaaaauguguccugcaagaacugcaguauucagcggggcuccaaaaagcaucuauugcuggcaccaucugacguggcaggcugggggauuuuuaucaaagauccugugcagaaaaaugaauucaucucagaauacuguggagagauuauuucucaagaugaagcugacagaagagggaaaguguaugauaaauacaugugcagcuuucuguucaacuugaacaaugauuuugugguggaugcaacccgcaaggguaacaaaauucguuuugcaaaucauucgguaaauccaaacugcuaugcaaaaguuaugaugguuaacggugaucacaggauagguauuuuugccaagagagccauccagacuggcgaagagcuguuuuuugauuacagauacagccaggcugaugcccugaaguaugucggcaucgaaagagaaauggaaaucccuuga

SEQ ID NO: 667 - RNA, 1005 nt, Artificial Sequence
  EAW80068
augggccagacugggaagaaaucugagaagggaccaguuuguuggcggaagcguguaaaaucagaguacaugcgacugagacagcucaagagguucagacgagcugaugaaguaaagaguauguuuaguuccaaucgucagaaaauuuuggaaagaacggaaaucuuaaaccaagaauggaaacagcgaaggauacagccugugcacauccugacuucugugagcucauugcgcgggacuagggaguguucggugaccagugacuuggauuuuccaacacaagucaucccauuaaagacucugaaugcaguugcuucaguacccauaauguauucuuggucuccccuacagcagaauuuuaugguggaagaugaaacuguuuuacauaacauuccuuauaugggagaugaaguuuuagaucaggaugguacuuucauugaagaacuaauaaaaaauuaugaugggaaaguacacggggauagagaauguggguuuauaaaugaugaaauuuuuguggaguuggugaaugcccuuggucaauauaaugaugaugacgaugaugaugauggagacgauccugaagaaagagaagaaaagcagaaagaucuggaggaucaccgagaugauaaagaaagccgcccaccucggaaauuuccuucugauaaaauuuuugaagccauuuccucaauguuuccagauaagggcacagcagaagaacuaaaggaaaaauauaaagaacucaccgaacagcagcucccaggcgcacuuccuccugaauguacccccaacauagauggaccaaaugcuaaaucuguucagagagagcaaagcuuacacuccuuucauacgcuuuucuguaggcgauguuuuaaauaugacugcuuccuacauccuuuucaugcaacacccaacacuuauaagcggaagaacacagaaacagcucuagacaacaaaccuuguggaccacaguguuaccagcauuugccacuccuaccuaggaacuaa

SEQ ID NO: 668 - RNA, 195 nt, Artificial Sequence
  CCO13726
augcccuuggucaauauaaugaugaugacgaugaugaugauggagacgauccugaagaaagagaagaaaagcagaaagaucuggaggaucaccgagaugauaaagaaagccgcccaccucggaaauuuccuucugauaaaauuuuugaagccauuuccucaauguuuccagauaagggcacagcagaagaacuaa

SEQ ID NO: 669 - RNA, 2241 nt, Artificial Sequence
  AAC51520
augggccagacugggaagaaaucugagaagggaccaguuuguuggcggaagcguguaaaaucagaguacaugcgacugagacagcucaagagguucagacgagcugaugaaguaaagaguauguuuaguuccaaucgucagaaaauuuuggaaagaacggaaaucuuaaaccaagaauggaaacagcgaaggauacagccugugcacauccugacuucugugagcucauugcgcgggacuagggaguguucggugaccagugacuuggauuuuccaacacaagucaucccauuaaagacucugaaugcaguugcuucaguacccauaauguauucuuggucuccccuacagcagaauuuuaugguggaagaugaaacuguuuuacauaacauuccuuauaugggagaugaaguuuuagaucaggaugguacuuucauugaagaacuaauaaaaaauuaugaugggaaaguacacggggauagagaauguggguuuauaaaugaugaaauuuuuguggaguuggugaaugcccuuggucaauauaaugaugaugacgaugaugaugauggagacgauccugaagaaagagaagaaaagcagaaagaucuggaggaucaccgagaugauaaagaaagccgcccaccucggaaauuuccuucugauaaaauuuuugaagccauuuccucaauguuuccagauaagggcacagcagaagaacuaaaggaaaaauauaaagaacucaccgaacagcagcucccaggcgcacuuccuccugaauguacccccaacauagauggaccaaaugcuaaaucuguucagagagagcaaagcuuacacuccuuucauacgcuuuucuguaggcgauguuuuaaauaugacugcuuccuacauccuuuucaugcaacacccaacacuuauaagcggaagaacacagaaacagcucuagacaacaaaccuuguggaccacaguguuaccagcauuuggagggagcaaaggaguuugcugcugcucucaccgcugagcggauaaagaccccaccaaaacguccaggaggccgcagaagaggacggcuucccaauaacaguagcaggcccagcacccccaccauuaaugugcuggaaucaaaggauacagacagugauagggaagcagggacugaaacggggggagagaacaaugauaaagaagaagaagagaagaaagaugaaacuucgagcuccucugaagcaaauucucggugucaaacaccaauaaagaugaagccaaauauugaaccuccugagaauguggaguggaguggugcugaagccucaauguuuagaguccucauuggcacuuacuaugacaauuucugugccauugcuagguuaauugggaccaaaacauguagacagguguaugaguuuagagucaaagaaucuagcaucauagcuccagcucccgcugaggauguggauacuccuccaaggaaaaagaagaggaaacaccgguugugggcugcacacugcagaaagauacagcugaaaaaggacggcuccucuaaccauguuuacaacuaucaacccugugaucauccacggcagccuugugacaguucgugcccuugugugauagcacaaaauuuuugugaaaaguuuugucaauguaguucagagugucaaaaccgcuuuccgggaugccgcugcaaagcacagugcaacaccaagcagugcccgugcuaccuggcuguccgagagugugacccugaccucugucuuacuuguggagccgcugaccauugggacaguaaaaauguguccugcaagaacugcaguauucagcggggcuccaaaaagcaucuauugcuggcaccaucugacguggcaggcugggggauuuuuaucaaagauccugugcagaaaaaugaauucaucucagaauacuguggagagauuauuucucaagaugaagcugacagaagagggaaaguguaugauaaauacaugugcagcuuucuguucaacuugaacaaugauuuugugguggaugcaacccgcaaggguaacaaaauucguuuugcaaaucauucgguaaauccaaacugcuaugcaaaaguuaugaugguuaacggugaucacaggauagguauuuuugccaagagagccauccagacuggcgaagagcuguuuuuugauuacagauacagccaggcugaugcccugaaguaugucggcaucgaaagagaaauggaaaucccuuga

SEQ ID NO: 670 - RNA, 2124 nt, Artificial Sequence
  AEN79481
augggccagacugggaagaaaucugagaagggaccaguuuguuggcggaagcguguaaaaucagaguacaugcgacugagacagcucaagagguucagacgagcugaugaaguaaagaguauguuuaguuccaaucgucagaaaauuuuggaaagaacggaaaucuuaaaccaagaauggaaacagcgaaggauacagccugugcacauccugacuucugugagcucauugcgcgggacuagggagguggaagaugaaacuguuuuacauaacauuccuuauaugggagaugaaguuuuagaucaggaugguacuuucauugaagaacuaauaaaaaauuaugaugggaaaguacacggggauagagaauguggguuuauaaaugaugaaauuuuuguggaguuggugaaugcccuuggucaauauaaugaugaugacgaugaugaugauggagacgauccugaagaaagagaagaaaagcagaaagaucuggaggaucaccgagaugauaaagaaagccgcccaccucggaaauuuccuucugauaaaauuuuugaagccauuuccucaauguuuccagauaagggcacagcagaagaacuaaaggaaaaauauaaagaacucaccgaacagcagcucccaggcgcacuuccuccugaauguacccccaacauagauggaccaaaugcuaaaucuguucagagagagcaaagcuuacacuccuuucauacgcuuuucuguaggcgauguuuuaaauaugacugcuuccuacauccuuuucaugcaacacccaacacuuauaagcggaagaacacagaaacagcucuagacaacaaaccuuguggaccacaguguuaccagcauuuggagggagcaaaggaguuugcugcugcucucaccgcugagcggauaaagaccccaccaaaacguccaggaggccgcagaagaggacggcuucccaauaacaguagcaggcccagcacccccaccauuaaugugcuggaaucaaaggauacagacagugauagggaagcagggacugaaacggggggagagaacaaugauaaagaagaagaagagaagaaagaugaaacuucgagcuccucugaagcaaauucucggugucaaacaccaauaaagaugaagccaaauauugaaccuccugagaauguggaguggaguggugcugaagccucaauguuuagaguccucauuggcacuuacuaugacaauuucugugccauugcuagguuaauugggaccaaaacauguagacagguguaugaguuuagagucaaagaaucuagcaucauagcuccagcucccgcugaggauguggauacuccuccaaggaaaaagaagaggaaacaccgguugugggcugcacacugcagaaagauacagcugaaaaaggacggcuccucuaaccauguuuacaacuaucaacccugugaucauccacggcagccuugugacaguucgugcccuugugugauagcacaaaauuuuugugaaaaguuuugucaauguaguucagagugucaaaaccgcuuuccgggaugccgcugcaaagcacagugcaacaccaagcagugcccgugcuaccuggcuguccgagagugugacccugaccucugucuuacuuguggagccgcugaccauugggacaguaaaaauguguccugcaagaacugcaguauucagcggggcuccaaaaagcaucuauugcuggcaccaucugacguggcaggcugggggauuuuuaucaaagauccugugcagaaaaaugaauucaucucagaauacuguggagagauuauuucucaagaugaagcugacagaagagggaaaguguaugauaaauacaugugcagcuuucuguucaacuugaacaaugauuuugugguggaugcaacccgcaaggguaacaaaauucguuuugcaaaucauucgguaaauccaaacugcuaugcaaaaguuaugaugguuaacggugaucacaggauagguauuuuugccaagagagccauccagacuggcgaagagcuguuuuuugauuacagauacagccaggcugaugcccugaaguaugucggcaucgaaagagaaauggaaaucccuuga

SEQ ID NO: 671 - RNA, 399 nt, Artificial Sequence
  AAB87141
augguggaggcuuucugugcuaccuggaagcugaccaacagucagaacuuugaugaguacaugaaggcucuaggcgugggcuuugccacuaggcaggugggaaaugugaccaaaccaacgguaauuaucagucaagaaggagacaaaguggucaucaggacucucagcacauucaagaacacggagauuaguuuccagcugggagaagaguuugaugaaaccacugcagaugauagaaacuguaagucuguuguuagccuggauggagacaaacuuguucacauacagaaaugggauggcaaagaaacaaauuuuguaagagaaauuaaggauggcaaaaugguuaugacccuuacuuuuggugaugugguugcuguucgccacuaugagaaggcauaa

SEQ ID NO: 672 - RNA, 765 nt, Artificial Sequence
  CAA36870
auguggcagcugcuccucccaacugcucugcuacuucuaguuucagcuggcaugcggacugaagaucucccaaaggcugugguguuccuggagccucaaugguacagggugcucgagaaggacagugugacucugaagugccagggagccuacuccccugaggacaauuccacacagugguuucacaaugagagccucaucucaagccaggccucgagcuacuucauugacgcugccacagucgacgacaguggagaguacaggugccagacaaaccucuccacccucagugacccggugcagcuagaaguccauaucggcuggcuguugcuccaggccccucgguggguguucaaggaggaagacccuauucaccugaggugucacagcuggaagaacacugcucugcauaaggucacauauuuacagaauggcaaaggcaggaaguauuuucaucauaauucugacuucuacauuccaaaagccacacucaaagacagcggcuccuacuucugcagggggcuuuuugggaguaaaaaugugucuucagagacugugaacaucaccaucacucaagguuuggcagugucaaccaucucaucauucuuuccaccuggguaccaagucucuuucugcuuggugaugguacuccuuuuugcaguggacacaggacuauauuucucugugaagacaaacauucgaagcucaacaagagacuggaaggaccauaaauuuaaauggagaaaggacccucaagacaaauga

SEQ ID NO: 673 - RNA, 873 nt, Artificial Sequence
  CCDS1232.1
auggguggaggggcuggggaaaggcuguuuacuuccuccugucuagucgguuuggucccuuuagggcuccggauaucuuuggugacuuguccacuccaguguggcaucauguggcagcugcuccucccaacugcucugcuacuucuaguuucagcuggcaugcggacugaagaucucccaaaggcugugguguuccuggagccucaaugguacagggugcucgagaaggacagugugacucugaagugccagggagccuacuccccugaggacaauuccacacagugguuucacaaugagagccucaucucaagccaggccucgagcuacuucauugacgcugccacagucgacgacaguggagaguacaggugccagacaaaccucuccacccucagugacccggugcagcuagaaguccauaucggcuggcuguugcuccaggccccucgguggguguucaaggaggaagacccuauucaccugaggugucacagcuggaagaacacugcucugcauaaggucacauauuuacagaauggcaaaggcaggaaguauuuucaucauaauucugacuucuacauuccaaaagccacacucaaagacagcggcuccuacuucugcagggggcuuuuugggaguaaaaaugugucuucagagacugugaacaucaccaucacucaagguuuggcagugucaaccaucucaucauucuuuccaccuggguaccaagucucuuucugcuuggugaugguacuccuuuuugcaguggacacaggacuauauuucucugugaagacaaacauucgaagcucaacaagagacuggaaggaccauaaauuuaaauggagaaaggacccucaagacaaauga

SEQ ID NO: 674 - RNA, 807 nt, Artificial Sequence
  AAH74858
augagcuuguccuuccuccuccuccucuucuucagccaccugauccucagcgccugggcucacggggagaagcgucucgcccccaaagggcaacccggacccgcugccacugauaggaacccuagaggcuccagcagcagacagagcagcaguagcgcuaugucuuccucuucugccuccuccucccccgcagcuucucugggcagccaaggaaguggcuuggagcagagcaguuuccaguggagccccucggggcgccggaccggcagccucuacugcagagugggcaucgguuuccaucugcagaucuacccggauggcaaagucaauggaucccacgaagccaauauguuaaguguuuuggaaauauuugcugugucucaggggauuguaggaauacgaggaguuuucagcaacaaauuuuuagcgaugucaaaaaaaggaaaacuccaugcaagugccaaguucacagaugacugcaaguucagggagcguuuucaagaaaauagcuauaauaccuaugccucagcaauacauagaacugaaaaaacagggcgggagugguauguggcccugaauaaaagaggaaaagccaaacgagggugcagcccccggguuaaaccccagcauaucucuacccauuuucugccaagauucaagcagucggagcagccagaacuuucuuucacgguuacuguuccugaaaagaaaaagccaccuagcccuaucaagccaaagauuccccuuucugcaccucggaaaaauaccaacucagugaaauacagacucaaguuucgcuuuggauaa

SEQ ID NO: 675 - RNA, 117 nt, Artificial Sequence
  AAB06462
auguccacccggugcggcgaggcgggcagagccagaggcacgcagccgcacaggggcuacagagcccagaaucagcccuacaagaugcacuuaggacccccgcggcuggaagaauga

SEQ ID NO: 676 - RNA, 2466 nt, Artificial Sequence
  AAA59470
auggucagcuggggucguuucaucugccuggucguggucaccauggcaaccuugucccuggcccggcccuccuucaguuuaguugaggauaccacauuagagccagaagagccaccaaccaaauaccaaaucucucaaccagaaguguacguggcugcgccaggggagucgcuagaggugcgcugccuguugaaagaugccgccgugaucaguuggacuaaggauggggugcacuuggggcccaacaauaggacagugcuuauuggggaguacuugcagauaaagggcgccacgccuagagacuccggccucuaugcuuguacugccaguaggacuguagacagugaaacuugguacuucauggugaaugucacagaugccaucucauccggagaugaugaggaugacaccgauggugcggaagauuuugucagugagaacaguaacaacaagagagcaccauacuggaccaacacagaaaagauggaaaagcggcuccaugcugugccugcggccaacacugucaaguuucgcugcccagccggggggaacccaaugccaaccaugcgguggcugaaaaacgggaaggaguuuaagcaggagcaucgcauuggaggcuacaagguacgaaaccagcacuggagccucauuauggaaaguguggucccaucugacaagggaaauuauaccugugugguggagaaugaauacggguccaucaaucacacguaccaccuggauguuguggagcgaucgccucaccggcccauccuccaagccggacugccggcaaaugccuccacaguggucggaggagacguagaguuugucugcaagguuuacagugaugcccagccccacauccaguggaucaagcacguggaaaagaacggcaguaaauacgggcccgacgggcugcccuaccucaagguucucaaggccgccgguguuaacaccacggacaaagagauugagguucucuauauucggaauguaacuuuugaggacgcuggggaauauacgugcuuggcggguaauucuauugggauauccuuucacucugcaugguugacaguucugccagcgccuggaagagaaaaggagauuacagcuuccccagacuaccuggagauagccauuuacugcauaggggucuucuuaaucgccuguauggugguaacagucauccugugccgaaugaagaacacgaccaagaagccagacuucagcagccagccggcugugcacaagcugaccaaacguaucccccugcggagacagguaacaguuucggcugaguccagcuccuccaugaacuccaacaccccgcuggugaggauaacaacacgccucucuucaacggcagacacccccaugcuggcaggggucuccgaguaugaacuuccagaggacccaaaaugggaguuuccaagagauaagcugacacugggcaagccccugggagaagguugcuuugggcaaguggucauggcggaagcagugggaauugacaaagacaagcccaaggaggcggucaccguggccgugaagauguugaaagaugaugccacagagaaagaccuuucugaucuggugucagagauggagaugaugaagaugauugggaaacacaagaauaucauaaaucuucuuggagccugcacacaggaugggccucucuaugucauaguugaguaugccucuaaaggcaaccuccgagaauaccuccgagcccggaggccacccgggauggaguacuccuaugacauuaaccguguuccugaggagcagaugaccuucaaggacuuggugucaugcaccuaccagcuggccagaggcauggaguacuuggcuucccaaaaauguauucaucgagauuuagcagccagaaauguuuugguaacagaaaacaaugugaugaaaauagcagacuuuggacucgccagagauaucaacaauauagacuauuacaaaaagaccaccaaugggcggcuuccagucaaguggauggcuccagaagcccuguuugauagaguauacacucaucagagugaugucugguccuucgggguguuaaugugggagaucuucacuuuagggggcucgcccuacccagggauucccguggaggaacuuuuuaagcugcugaaggaaggacacagaauggauaagccagccaacugcaccaacgaacuguacaugaugaugagggacuguuggcaugcagugcccucccagagaccaacguucaagcaguugguagaagacuuggaucgaauucucacucucacaaccaaugaggaauacuuggaccucagccaaccucucgaacaguauucaccuaguuacccugacacaagaaguucuuguucuucaggagaugauucuguuuuuucuccagaccccaugccuuacgaaccaugccuuccucaguauccacacauaaacggcaguguuaaaacauga

SEQ ID NO: 677 - RNA, 1908 nt, Artificial Sequence
  EAW74574
auggccccgccgcuccugcugcugcugcuggccaguggagcggccgccugcccgcugcccugcgucugccagaaccuguccgagucgcucagcacccucugugcccaccgaggccugcuguuugugccgcccaacguggaccggcgcacaguggagcugcggcuggcugacaacuucauccaggcccuggggcccccugacuuccgcaacaugacgggacugguggaccugacacugucucgcaaugccaucacccgcauuggggcccgcgccuuuggggaccucgagagccugcguucccuccaccuugacggcaacaggcugguggagcugggcaccgggagccuccggggccccgucaaucugcagcaccucauccucagcggcaaccagcugggccgcaucgcgccgggagccuucgacgacuuccuagagagccuggaggaccuggaccuguccuacaacaaccuccggcaggugcccugggccggcaucggcgccaugccugcccugcacacccucaaccuggaccauaaccuuauugacgcacugcccccaggcgccuucgcccagcucggucagcucucccgccuggaccucaccuccaaccgccuggccacgcuggcuccggacccgcuuuucucucgugggcgugaugcagaggccucucccgccccccuggugcugagcuuuagcgggaacccccugcacugcaacugugagcugcuguggcugcggcggcuggcgcggccggacgaccuggaaacgugcgccuccccgcccggccuggccggccgcuacuucugggcagugcccgagggcgaguucuccugugagccgccccucauugcccgccacacgcagcgccucugggugcuggaaggccagcgggccacgcugcggugccgggcccugggugaccccgcgccuaccaugcacugggucgguccugacgaccgguugguuggcaacuccucccgagcccgggcuuuccccaacgggaccuuagagauuggggugaccggcgcuggggacgcugggggcuacaccugcaucgccaccaacccugcuggugaggccacagcccgaguagaacugcgggugcuggccuugccccauggugggaacagcagugccgaggggggccgccccgggcccucggacaucgccgccuccgcucgcacugcugccgagggugaggggacgcuggagucugagccagccgugcaggugacggaggugaccgccaccucagggcuggugagcuggggucccgggcggccagccgacccaguguggauguuccaaauccaguacaacagcagcgaagaugagacccucaucuaccggauugucccagccuccagccaccacuuccugcugaagcaccucguccccggcgcugacuaugaccucugccugcuggccuugucaccggccgcugggcccucugaccucacggccaccaggcugcugggcugugcccauuucuccacgcugccggccucgccccugugccacgcccugcaggcccacgugcugggcgggacccugaccguggccguggggggugugcugguggcugccuuacuggucuucacuguggccuugcugguucggggccggggggccggaaauggccgccucccccucaagcucagccacguccagucccagaccaauggaggccccagccccacacccaaggcccacccgccgcggagccccccgccccggccgcagcgcagcugcucucuggaccugggagaugccgggugcuacgguuaugccaggcgccugggaggagcuugggcccgacggagccacucugugcauggggggcugcucggggcagggugccgggggguaggaggcagcgccgagcggcuggaagagagugugguguga

SEQ ID NO: 678 - RNA, 3297 nt, Artificial Sequence
  EAW96782
augcccccccgccagcccccucggcaggcggggggagggcucagccgggaguuuggcaaacuccuccccgcguugagucauucgccucugggagguuuaggaagcggcuccgggucgguggccccaggacagggaagagcgggcgcuauggggagccggacgccagaguccccucuccacgccgugcagcugcgcuggggcccccggcgccgacccccgcugcugccgcugcuguugcugcugcugccgccgccacccagggucgggggcuucaacuuagacgcggaggccccagcaguacucucggggcccccgggcuccuucuucggauucucaguggaguuuuaccggccgggaacagacggggucagugugcuggugggagcacccaaggcuaauaccagccagccaggagugcugcaggguggugcugucuaccucuguccuuggggugccagccccacacagugcacccccauugaauuugacagcaaaggcucucggcuccuggaguccucacuguccagcucagagggagaggagccuguggaguacaaguccuugcagugguucggggcaacaguucgagcccauggcuccuccaucuuggcaugcgcuccacuguacagcuggcgcacagagaaggagccacugagcgaccccgugggcaccugcuaccucuccacagauaacuucacccgaauucuggaguaugcacccugccgcucagauuucagcugggcagcaggacaggguuacugccaaggaggcuucagugccgaguucaccaagacuggccgugugguuuuagguggaccaggaagcuauuucuggcaaggccagauccugucugccacucaggagcagauugcagaaucuuauuaccccgaguaccugaucaaccugguucaggggcagcugcagacucgccaggccaguuccaucuaugaugacagcuaccuaggauacucuguggcuguuggugaauucaguggugaugacacagaagacuuuguugcuggugugcccaaagggaaccucacuuacggcuaugucaccauccuuaauggcucagacauucgaucccucuacaacuucucaggggaacagauggccuccuacuuuggcuaugcaguggccgccacagacgucaauggggacgggcuggaugacuugcuggugggggcaccccugcucauggaucggaccccugacgggcggccucaggaggugggcagggucuacgucuaccugcagcacccagccggcauagagcccacgcccacccuuacccucacuggccaugaugaguuuggccgauuuggcagcuccuugaccccccugggggaccuggaccaggauggcuacaaugauguggccaucggggcucccuuugguggggagacccagcagggaguaguguuuguauuuccugggggcccaggagggcugggcucuaagccuucccagguucugcagccccugugggcagccagccacaccccagacuucuuuggcucugcccuucgaggaggccgagaccuggauggcaauggauauccugaucugauugugggguccuuugguguggacaaggcugugguauacaggggccgccccaucguguccgcuagugccucccucaccaucuuccccgccauguucaacccagaggagcggagcugcagcuuagaggggaacccuguggccugcaucaaccuuagcuucugccucaaugcuucuggaaaacacguugcugacuccauugguuucacaguggaacuucagcuggacuggcagaagcagaagggagggguacggcgggcacuguuccuggccuccaggcaggcaacccugacccagacccugcucauccagaauggggcucgagaggauugcagagagaugaagaucuaccucaggaacgagucagaauuucgagacaaacucucgccgauucacaucgcucucaacuucuccuuggacccccaagccccaguggacagccacggccucaggccagcccuacauuaucagagcaagagccggauagaggacaaggcucagaucuugcuggacuguggagaagacaacaucugugugccugaccugcagcuggaaguguuuggggagcagaaccauguguaccugggugacaagaaugcccugaaccucacuuuccaugcccagaaugugggugaggguggcgccuaugaggcugagcuucgggucaccgccccuccagaggcugaguacucaggacucgucagacacccagggaacuucuccagccugagcugugacuacuuugccgugaaccagagccgccugcuggugugugaccugggcaaccccaugaaggcaggagccagucugugggguggccuucgguuuacagucccucaucuccgggacacuaagaaaaccauccaguuugacuuccagauccucagcaagaaucucaacaacucgcaaagcgacgugguuuccuuucggcucuccguggaggcucaggcccaggucacccugaacggugucuccaagccugaggcagugcuauucccaguaagcgacuggcauccccgagaccagccucagaaggaggaggaccugggaccugcuguccaccaugucuaugagcucaucaaccaaggccccagcuccauuagccagggugugcuggaacucagcuguccccaggcucuggaaggucagcagcuccuauaugugaccagaguuacgggacucaacugcaccaccaaucaccccauuaacccaaagggccuggaguuggaucccgaggguucccugcaccaccagcaaaaacgggaagcuccaagccgcagcucugcuuccucgggaccucagauccugaaaugcccggaggcugaguguuucaggcugcgcugugagcucgggccccugcaccaacaagagagccaaagucugcaguugcauuuccgagucugggccaagacuuucuugcagcgggagcaccagccauuuagccugcagugugaggcuguguacaaagcccugaagaugcccuaccgaauccugccucggcagcugccccaaaaagagcgucagguggccacagcugugcaauggaccaaggcagaaggcagcuauggcgucccacuguggaucaucauccuagccauccuguuuggccuccugcuccuaggucuacucaucuacauccucuacaagcuuggauucuucaaacgcucccucccauauggcaccgccauggaaaaagcucagcucaagccuccagccaccucugaugccuga

SEQ ID NO: 679 - RNA, 3597 nt, Artificial Sequence
  EAX08808
auggcagaacauccaccacuacuggauacaacucagaucuuaaguagugauauuucucuuuugucugccccuauuguaagugcagauggaacacaacagguuauucugguacaaguuaacccaggagaagcauuuacaauaagaagagaagauggacaguuucagugcauuacagguccugcucagguuccaaugauguccccaaaugguucugugccuccuaucuaugugccuccuggauaugccccacagguuauugaagacaaugguguucgaagaguugucguggucccucaggcaccagaguuucacccugguagucacacaguucuccaccguucuccacauccuccucuaccugguuucauuccugucccaacuaugaugccgccuccaccacgucauauguacucacccgugacuggagcuggagacaugacaacacaguauaugccacaguaucagucuucacaagucuauggagauguagaugcucacucuacacauggaagguccaacuuuagagaugaacgaucuaguaaaacauaugaacguuugcagaaaaaauugaaggaucgccaaggaacacagaaagauaaaaugagcaguccaccaucaucaccccagaaaugcccuucucccauuaaugaacauaauggacuuauaaaaggacaaauugcuggugguauaaacacaggaucagcaaaaaucaagucugggaaggggaaaggugguacacaaguugauacagaaauugaagaaaaagaugaagaaacuaaagcauuugaagcacuucuuuccaacauugucaaaccaguggccuccgacauccaggcaaggacaguaguacuuaccuggucaccaccuuccagccucauuaauggugaaacagaugaaaguaguguaccagagcucuaugguuaugaaguucugaucucaaguacuggaaaagaugggaaauacaaaaguguauauguaggagaagaaacaaauaucacuuuaaaugaucucaagccagccauggauuaccaugcaaaaguccaggcagaauauaauucuauaaagggaacuccuucagaggcugaaaucuuuaccaccuugagcugugaaccugauauaccuaauccaccaaggauagccaaucggaccaaaaauucacucacuuugcaauggaaggcaccuagugacaaugguucuaaaauccaaaacuuuguauuagaaugggaugaaggaaaaggaaauggagaauuuugucaguguuacaugggcucacagaaacaauuuaaaauuacuaaacuuucaccagcaaugggcuguaaauucagacuaucggccagaaaugacuaugguacaagugguuuuagugaagaagucuuauauuacaccucaggcugugcuccuucuaugccagcaaguccuguauuaaccaaggcuggaauuacuugguuauccuuacaauggaguaagcccucaggaacaccaucagaugaaggaauuucuuacauuuuagagauggaggaagaaacuucaggauaugguuuuaagccuaaauaugauggagaagaucuugcuuacacagugaaaaaucucagacguaguacuaaguauaaauuuaagguuauugcuuacaacucagaagguaaaaguaauccaagugaaguaguagaauuuacuacuugcccugauaaaccaggcauaccuguaaagccuucagugaaaggaaagauacauucacacaguuuuaaaauaaccugggauccaccaaaagacaauggcggagcaaccaucaauaaauauguaguggagauggcagaagguucuaacggaaacaaaugggaaaugauauacaguggugcuaccagggaacaucuuugugaucgacugaauccaggcuguuucuaucguuuacgaguuuacugcaucagugauggaggacagagugcggucucugaaucuuuacuugugcagacuccagcugugccuccuggcccaugccucccucccagauuacaggguagacccaaagcaaaagaaauacaguuacgauggggacccccucugguugaugguggaucacccauuuccuguuacaguguggaaaugucuccuauagaaaaagaugaaccuagagaaguuuaccaagguucugaaguagaauguacagugagcagccuucuuccuggaaagacauacagcuucagacuacgugcagcuaacaaaaugggguuuggaccauuuucagaaaaaugugauauuacuacagccccugggccaccagaucagugcaagcccccucaagugacauguagaucugcaacuugugcacaagugaauugggagguuccuuugaguaauggaacagaugucacugaauaucgacuggaguggggaggaguugaaggaaguaugcagauauguuacugugggccuggucucaguuaugaaauaaaaggacuuucaccagcaacuaccuauuauugcaggguccaggcucugaguguugugggugcaggcccuuucagugaaguaguagccugugugacuccaccaucaguuccuggcauugugaccugucuucaagaaauaagcgaugaugagauagaaaauccccauuauucaccuucuacaugccuugcaauaagcugggaaaagccuugugaucaugguucggaaauccuugccuacagcauagacuuuggagauaaacaaucccuaacagugggaaagguuacaagcuauauuaucaacaauuugcaaccagauacaacauacagaauacgaauucaagccuugaauagccuuggagcugguccuuucagccauaugauaaaauuaaaaacuaagccucucccuccugauccaccucgucuggaauguguugccuuuagccaccagaaccuuaagcugaaauggggagaaggaacuccaaagacauugucaaccgauucuauucaguaccaccuucagauggaggauaagaauggacgguuuguaucccuauacagaggaccaugucauacauacaaaguacaaagacuuaaugagucaacauccuauaaauucuguauucaagcuuguaaugaagcuggggaagguccccucucccaagaauauauuuucacuacuccaaaaucugucccagcugccuugaaagcccccaaaauagagaaaguaaaugaucacauuugugaaauuacaugggaguguuuacagccaaugaaaggugauccaguuauuuacagucuucaaguuauguugggaaaagauucagaauucaaacagauuuacaagggucccgacucuuccuuccgguauuccagccuucagcugaacugugaauaucgcuuccguguaugugccauucgccagugccaagacucucugggacaccaggaccucguaggucccuacagcaccacagugcucuucaucucucagaggacugaaccaccagccagcaccaacagagacacuguggaaagcacaaggacccgacgggcacugagugacgagcagugugcugccgucauccuugugcuguuugcuuucuuuuccauuuugauugccuuuaucauucaguacuuuguaaucaaguga

SEQ ID NO: 680 - RNA, 3429 nt, Artificial Sequence
  EAX08809
augagugguccugcucagguuccaaugauguccccaaaugguucugugccuccuaucuaugugccuccuggauaugccccacagguuauugaagacaaugguguucgaagaguugucguggucccucaggcaccagaguuucacccugguagucacacaguucuccaccguucuccacauccuccucuaccugguuucauuccugucccaacuaugaugccgccuccaccacgucauauguacucacccgugacuggagcuggagacaugacaacacaguauaugccacaguaucagucuucacaagucuauggagauguagaugcucacucuacacauggaagguccaacuuuagagaugaacgaucuaguaaaacauaugaacguuugcagaaaaaauugaaggaucgccaaggaacacagaaagauaaaaugagcaguccaccaucaucaccccagaaaugcccuucucccauuaaugaacauaauggacuuauaaaaggacaaauugcuggugguauaaacacaggaucagcaaaaaucaagucugggaaggggaaaggugguacacaaguugauacagaaauugaagaaaaagaugaagaaacuaaagcauuugaagcacuucuuuccaacauugucaaaccaguggccuccgacauccaggcaaggacaguaguacuuaccuggucaccaccuuccagccucauuaauggugaaacagaugaaaguaguguaccagagcucuaugguuaugaaguucugaucucaaguacuggaaaagaugggaaauacaaaaguguauauguaggagaagaaacaaauaucacuuuaaaugaucucaagccagccauggauuaccaugcaaaaguccaggcagaauauaauucuauaaagggaacuccuucagaggcugaaaucuuuaccaccuugagcugugaaccugauauaccuaauccaccaaggauagccaaucggaccaaaaauucacucacuuugcaauggaaggcaccuagugacaaugguucuaaaauccaaaacuuuguauuagaaugggaugaaggaaaaggaaauggagaauuuugucaguguuacaugggcucacagaaacaauuuaaaauuacuaaacuuucaccagcaaugggcuguaaauucagacuaucggccagaaaugacuaugguacaagugguuuuagugaagaagucuuauauuacaccucaggcugugcuccuucuaugccagcaaguccuguauuaaccaaggcuggaauuacuugguuauccuuacaauggaguaagcccucaggaacaccaucagaugaaggaauuucuuacauuuuagagauggaggaagaaacuucaggauaugguuuuaagccuaaauaugauggagaagaucuugcuuacacagugaaaaaucucagacguaguacuaaguauaaauuuaagguuauugcuuacaacucagaagguaaaaguaauccaagugaaguaguagaauuuacuacuugcccugauaaaccaggcauaccuguaaagccuucagugaaaggaaagauacauucacacaguuuuaaaauaaccugggauccaccaaaagacaauggcggagcaaccaucaauaaauauguaguggagauggcagaagguucuaacggaaacaaaugggaaaugauauacaguggugcuaccagggaacaucuuugugaucgacugaauccaggcuguuucuaucguuuacgaguuuacugcaucagugauggaggacagagugcggucucugaaucuuuacuugugcagacuccagcugugccuccuggcccaugccucccucccagauuacaggguagacccaaagcaaaagaaauacaguuacgauggggacccccucugguugaugguggaucacccauuuccuguuacaguguggaaaugucuccuauagaaaaagaugaaccuagagaaguuuaccaagguucugaaguagaauguacagugagcagccuucuuccuggaaagacauacagcuucagacuacgugcagcuaacaaaaugggguuuggaccauuuucagaaaaaugugauauuacuacagccccugggccaccagaucagugcaagcccccucaagugacauguagaucugcaacuugugcacaagugaauugggagguuccuuugaguaauggaacagaugucacugaauaucgacuggaguggggaggaguugaaggaaguaugcagauauguuacugugggccuggucucaguuaugaaauaaaaggacuuucaccagcaacuaccuauuauugcaggguccaggcucugaguguugugggugcaggcccuuucagugaaguaguagccugugugacuccaccaucaguuccuggcauugugaccugucuucaagaaauaagcgaugaugagauagaaaauccccauuauucaccuucuacaugccuugcaauaagcugggaaaagccuugugaucaugguucggaaauccuugccuacagcauagacuuuggagauaaacaaucccuaacagugggaaagguuacaagcuauauuaucaacaauuugcaaccagauacaacauacagaauacgaauucaagccuugaauagccuuggagcugguccuuucagccauaugauaaaauuaaaaacuaagccucucccuccugauccaccucgucuggaauguguugccuuuagccaccagaaccuuaagcugaaauggggagaaggaacuccaaagacauugucaaccgauucuauucaguaccaccuucagauggaggauaagaauggacgguuuguaucccuauacagaggaccaugucauacauacaaaguacaaagacuuaaugagucaacauccuauaaauucuguauucaagcuuguaaugaagcuggggaagguccccucucccaagaauauauuuucacuacuccaaaaucugucccagcugccuugaaagcccccaaaauagagaaaguaaaugaucacauuugugaaauuacaugggaguguuuacagccaaugaaaggugauccaguuauuuacagucuucaaguuauguugggaaaagauucagaauucaaacagauuuacaagggucccgacucuuccuuccgguauuccagccuucagcugaacugugaauaucgcuuccguguaugugccauucgccagugccaagacucucugggacaccaggaccucguaggucccuacagcaccacagugcucuucaucucucagaggacugaaccaccagccagcaccaacagagacacuguggaaagcacaaggacccgacgggcacugagugacgagcagugugcugccgucauccuugugcuguuugcuuucuuuuccauuuugauugccuuuaucauucaguacuuuguaaucaaguga

SEQ ID NO: 681 - RNA, 1020 nt, Artificial Sequence
  EAW49214
augccacccucaaagccucauccaccugucgugggcaaagugacucaucacagcauugaauuauacugggaucuggaaaagaaagccaaacgccaaggaccucaagagcagugguucagguucucgauugaagaagaagaccccaaaaugcacacuuaugguaucauuuauacgggauaugcaacgaagcauguuguugaaggucuggaaccaaggacgcuguacagauuucgccugaaggucaccagccccucuggggagugugaguacagcccacucgucucagugucuacaaccagagagcccauaaguagugagcacuugcaccgggcugucagugugaaugaugaagauuugcugguccgaauacuucaaggaggccguguuaagguugauguucccaauaaguuuggcuuuaccgcucugaugguugcugcccagaaaggauacaccaggcuugugaaaauccuaguuucuaauggcacagacgugaaucugaagaauggaaguggcaaggacagucuaaugcuggcgugcuaugcgggacaccuagauguugugaaauaucuccgaagacauggcgcuucuuggcaggcuagagaccugggaggcuguacagcucugcacugggcugcagauggaggccacugcagugugauugaguggaugauaaaggauggcugugagguagacgucguggacacugguucaggauggaccccacucaugagagucucugcggugucgggaaaucagaggguggccucucuucuaauugaugcuggggccaaugugaaugugaaggacagaaauggaaagacgccccuuaugguggcuguguuaaauaaucaugaagaguuaguucaguuacuucuugacaaaggggcagaugcaaguguaaaaaaugaguucggcaaagguguccuagaaauggccagaguuuuugacagacagaguguagucuccuuauuagaagaaaggaaaaaaaagcagaggccaaagaagucuugugucugcuga

SEQ ID NO: 682 - RNA, 3150 nt, Artificial Sequence
  BAF84259
auggggagccggacgccagaguccccucuccacgccgugcagcugcgcuggggcccccggcgccgacccccgcugcugccgcugcuguugcugcugcugccgccgccacccagggucgggggcuucaacuuagacgcggaggccccagcaguacucucggggcccccgggcuccuucuucggauucucaguggaguuuuaccggccgggaacagacggggucagugugcuggugggagcacccaaggcuaauaccagccagccaggagugcugcaggguggugcugucuaccucuguccuuggggugccagccccacucagugcacccccauugaauuugacagcaaaggcucucggcuccuggaguccucacuguccagcucagagggagaggagccuguggaguacaaguccuugcagugguucggggcaacaguucgagcccauggcuccuccaucuuggcaugcgcuccacuguacagcuggcgcacagagaaggagccacugagcgaccccgugggcaccugcuaccucuccacagauaacuucacccgaauucuggaguaugcacccugccgcucagauuucagcugggcagcaggacaggguuacugccaaggaggcuucagugccgaguucaccaagacuggccgugugguuuuagguggaccaggaagcuauuucuggcaaggccagauccugucugccacucaggagcagauugcagaaucuuauuaccccgaguaccugaucaaccugguucaggggcagcugcagacucgccaggccaguuccaucuaugaugacagcuaccuaggauacucuguggcuguuggugaauucaguggugaugacacagaagacuuuguugcuggugugcccaaagggaaccucacuuacggcuaugucaccauccuuaauggcucagacauucgaucccucuacaacuucucaggggaacagauggccuccuacuuugccuaugcaguggccgccacagacgucaauggggacgggcuggaugacuugcuggugggggcaccccugcucauggaucggaccccugacgggcggccucaggaggugggcagggucuacgucuaccugcagcacccagccggcauagaguccacgcccacccuuacccucacuggccaugaugaguuuggccgauuuggcagcuccuugaccccccugggggaccuggaccaggauggcuacaaugauguggccaucggggcucccuuugguggggagacccagcagggaguaguguuuguauuuccugggggcccaggagggcugggcucuaagccuucccagguucugcagccccugugggcagccagccacaccccagacuucuuuggcucugcccuucgaggaggccgagaccuggauggcaauggauauccugaucugauugugggguccuuugguguggacaaggcugugguauacaggggccgccccaucguguccgcuagugccucccucaccaucuuccccgccauguucaacccagaggagcggagcugcagcuuagaggggaacccuguggccugcaucaaccuuagcuucugccucaaugcuucuggaaaacacguugcugacuccauugguuucacaguggaacuucagcuggacuggcagaagcagaagggagggguacggcgggcacuguuccuggccuccaggcaggcaacccugacccagacccugcucauccagaauggggcucgagaggauugcagagagaugaagaucuaccucaggaacgagucagaauuucgagacaaacucucgccgauucacaucgcucucaacuucuccuuggacccccaagccccaguggacagccacggccucaggccagcccuacauuaucagagcaagagccggauagaggacaaggcucagaucuugcugggcuguggagaagacaacaucugugugccugaccugcagcuggaaguguuuggggagcagaaccauguguaccugggugacaagaaugcccugaaccucacuuuccaugcccagaaugugggugaggguggcgccuaugaggcugagcuucgggucaccgccccuccagaggcugaguacucaggacucgucagacacccagggaacuucuccagccugagcugugacuacuuugccgugaaccagagccgccugcuggugugugaccugggcaaccccaugaaggcaggagccagucugugggguggccuucgguuuacagucccucaucuccgggacacuaagaaaaccauccaguuugacuuccagauccucagcaagaaucucaacaacucgcaaagcgacgugguuuccuuucggcucuccguggaggcucaggcccaggucacccugaacggugucuccaagccugaggcagugcuauucccaguaagcgacuggcauccccgagaccagccucaggaggaggaggaccugggaccugcuguccaccaugucuaugagcucaucaaccaaggccccagcuccauuagccagggugugcuggaacucagcuguccccaggcucuggaaggucagcagcuccuauaugugaccagaguuacgggacucaacugcaccaccaaucaccccauuaacccaaagggccuggaguuggaucccgaggguucccugcaccaccagcaaaaacgggaagcuccaagccgcagcucugcuuccucgggaccucagauccugaaaugcccggaggcugaguguuucaggcugcgcugugagcucgggccccugcaccaacaagagagccaaagucugcaguugcauuuccgagucugggccaagacuuucuugcagcgggagcaccagccauuuagccugcagugugaggcuguguacaaagcccugaagaugcccuaccgaauccugccucggcagcugccccaaaaagagcgucagguggccacagcugugcaauggaccaaggcagaaggcagcuauggcgucccacuguggaucaucauccuagccauccuguuuggccuccugcuccuaggucuacucaucuacauccucuacaagcuuggauucuucaaacgcucccucccauauggcaccgccauggaaaaagcucagcucaagccuccagccaccucugaugccuga

SEQ ID NO: 683 - RNA, 3150 nt, Artificial Sequence
  BAG35324
auggggagccggacgccagaguccccucuccacgccgugcagcugcgcuggggcccccggcgccgacccccgcugcugccgcugcuguugcugcugcugccgccgccacccagggucgggggcuucaacuuagacgcggaggccccagcaguacucucggggcccccgggcuccuucuucggauucucaguggaguuuuaccggccgggaacagacggggucagugugcuggugggagcacccaaggcuaauaccagccagccaggagugcugcaggguggugcugucuaccucuguccuuggggugccagccccacacagugcacccccauugaauuugacagcaaaggcucucggcuccuggaguccucacuguccagcucagagggagaggagccuguggaguacaaguccuugcagugguucggggcaacaguucgagcccauggcuccuccaucuuggcaugcgcuccacuguacagcuggcgcacagagaaggagccacugagcgaccccgugggcaccugcuaccucuccacagauaacuucacccgaauucuggaguaugcacccugccgcucagauuucagcugggcagcaggacaggguuacugccaaggaggcuucagugccgaguucaccaagacuggccgugugguuuuagguggaccaggaagcuauuucuggcaaggccagauccugucugccacucaggagcagauugcagaaucuuauuaccccgaguaccugaucaaccugguucaggggcagcugcagacucgccaggccaguuccaucuaugaugacagcuaccuaggauacucuguggcuguuggugaauucaguggugaugacacagaagacuuuguugcuggugugcccaaagggaaccucacuuacggcuaugucaccauccuuaauggcucagacauucgaucccucuacaacuucucaggggaacagauggccuccuacuuuggcuaugcaguggccgccacagacgucaauggggacgggcuggaugacuugcuggugggggcaccccugcucauggaucggaccccugacgggcggccucagggggugggcagggucuacgucuaccugcagcacccagccggcauagagcccacgcccacccuuacccucacuggccaugaugaguuuggccgauuuggcagcuccuugaccccccugggggaccuggaccaggauggcuacaaugauguggccaucggggcucccuuugguggggagacccagcagggaguaguguuuguauuuccugggggcccaggagggcugggcucuaagcuuucccagguucugcagccccugugggcagccagccacaccccagacuucuuuggcucugcccuucgaggaggccgagaccuggauggcaauggauauccugaucugauugugggguccuuugguguggacaaggcugugguauacaggggccgccccaucguguccgcuagugccucccucaccaucuuccccgccauguucaacccagaggagcggagcugcagcuuagaggggaacccuguggccugcaucaaccuuagcuucugccucaaugcuucuggaaaacacguugcugacuccauugguuucacaguggaacuucagcuggacuggcagaagcagaagggagggguacggcgggcacuguuccuggccuccaggcaggcaacccugacccagacccugcucauccagaauggggcucgagaggauugcagagagaugaagaucuaccucaggaacgagucagaauuucgagacaaacucucgccgauucacaucgcucucaacuucuccuuggacccccaagccccaguggacagccacggccucaggccagcccuacauuaucagagcaagagccggauagaggacaaggcucagaucuugcuggacuguggagaagacaacaucugugugccugaccugcagcuggaaguguuuggggagcagaaccauguguaccugggugacaagaaugcccugaaccucacuuuccaugcccagaaugugggugaggguggcgccuaugaggcugagcuucgggucaccgccccuccagaggcugaguacucaggacucgucagacacccagggaacuucuccagccugagcugugacuacuuugccgugaaccagagccgccugcuggugugugaccugggcaaccccaugaaggcaggagccagucugugggguggccuucgguuuacagucccucaucuccgggacacuaagaaaaccauccaguuugacuuccagauccucagcaagaaucucaacaacucgcaaagcgacgugguuuccuuucggcucuccguggaggcucaggcccaggucacccugaacggugucuccaagccugaggcagugcuauucccaguaagcgacuggcauccccgagaccagccucagaaggaggaggaccugggaccugcuguccaccaugucuaugagcucaucaaccaaggccccagcuccauuagccagggugugcuggaacucagcuguccccaggcucuggaaggucagcagcuccuauaugugaccagaguuacgggacucaacugcaccaccaaucaccccauuaacccaaagggccuggaguuggaucccgaggguucccugcaccaccagcaaaaacgggaagcuccaagccgcagcucugcuuccucgggaccucagauccugaaaugcccggaggcugaguguuucaggcugcgcugugagcucgggccccugcaccaacaagagagccaaagucugcaguugcauuuccgagucugggccaagacuuucuugcagcgggagcaccagccauuuagccugcagugugaggcuguguacaaagcccugaagaugcccuaccgaauccugccucggcagcugccccaaaaagagcgucagguggccacagcugugcaauggaccaaggcagaaggcagcuauggcgucccacuguggaucaucauccuagccauccuguuuggccuccugcuccuaggucuacucaucuacauccucuacaagcuuggauucuucaaacgcucccucccauauggcaccgccauggaaaaagcucagcucaagccuccagccaccucugaugccuga

SEQ ID NO: 684 - RNA, 1401 nt, Artificial Sequence
  BAG54537
augcuguccuugcgccagaggaugaugcaugccagauuccguaacccucucucccgacagccugccagacccucuuacagacaagguuauaauggcagaccaaauguagaagggaaaguccuuccugguaguaauggaaaaccgaauggacagagaauuaucaauggcccucaaggaacaaaguggguuguggaccuugaucguggguuaguauugaaugcagaaggaagguaccuccaagauucacauggaaauccucuucggauuaaacuaggaggagauggucgaaccauuguagaucuggaagggacccccguggugaguccugacggccucccacucuuugggcaggggcgacauggcacaccucuggccaaugcccaagauaagccaauuuugagucuuggaggaaagccgcuggugggcuuggaggucaucaaaaaaaccacccaucccccuaccacuaccaugcagcccaccacuacuacgacgccccugccuaccacuacaaccccgaggcccaccacugccaccacccgccgcacgaccaccaggcguccaacaaccacaguccgaaccacuacgcggacaaccaccaccaccacccccaaacccaccacucccauccccaccugucccccugggaccuuggaacggcacgacgaugauggcaaccugauaaugagcuccaaugggaucccagagugcuacgcugaagaagaugaguucucaggcuuggagacugacacugcaguaccuacggaagaggccuacguuauauaugaugaagauuaugaauuugagacgucaaggccaccaaccaccacugagccuucgaccacugcuaccacaccgagggugaucccagaggaaggcgccaucaguuccuuuccugaagaagaauuugaucuggcuggaaggaaacgauuuguugcuccuuacgugacguaccuaaauaaagacccaucagccccgugcucucugacugaugcacuggaucacuuccaaguggacagccuggaugaaaucauccccaaugaccugaagaagagugaccugccuccccagcaugcuccccgcaacaucaccgugguggccguggaagguugccacucauuugucauuguggacugggacaaagccaccccaggagauguggucacagguuacuugguuuacagugcauccuaugaagacuucaucaggaacaagugguccacucaagcuucaucaguaacucacuugcccauugagaaccuaaagcccaacacgagguauuauuuuaaagugcaagcacaaaauccucauggcuacggaccuaucagcccuucggucucauuugucaccgaaucagauaauccucugcuuguugugaggcccccaggcggugagccuaucuag

SEQ ID NO: 685 - RNA, 471 nt, Artificial Sequence
  BAG58437
auggaagaacagaggaaugaagaaauucagagcuuuaucuacucccugaaacagaugcugcugaacguggaggcgaacucggcgaaggugcaggaggaccucgaagcagaguuccagucccucuucucccuccuggaggagcugaaagaaggcaugcuuaugaagauaaaacaggaccgugccagccgcaccuacgagcugcagaaccagcuggcugccugcacgcgggcccuggagagcuccgaggagcuucuggagacagccaaccagacucugcaggccauggacagcgaggacuuuccucaggcugccaagcaaaucaaagauggagugaccauggccccugccuuccggcuaucauugaaagcgaaggucagugacaacaugagucaccucaugguggacuucgcgcaagagcggcagaugcuacaggcacucaaguuccugccuggugagaggggcacgcacuag

SEQ ID NO: 686 - RNA, 921 nt, Artificial Sequence
  BAH14721
augaucuuugaggaacaugguuuuaggcggaccacaccgcccacaacggccacccccauaaggcauaggccaagaccauacccgccgaauguaggacaagaagcucucucucagacaaccaucucaugggccccauuccaggacacuucugaguacaucauuucaugucauccuguuggcacugaugaagaacccuuacaguucaggguuccuggaacuucuaccagugccacucugacaggccucaccagaggugccaccuacaacaucauaguggaggcacugaaagaccagcagaggcauaagguucgggaagagguuguuaccgugggcaacucugucaacgaaggcuugaaccaaccuacggaugacucgugcuuugaccccuacacaguuucccauuaugccguuggagaugagugggaacgaaugucugaaucaggcuuuaaacuguugugccagugcuuaggcuuuggaaguggucauuucagaugugauucaucuagauggugccaugacaauggugugaacuacaagauuggagagaagugggaccgucagggagaaaauggccagaugaugagcugcacaugucuugggaacggaaaaggagaauucaagugugacccucaugaggcaacguguuaugaugaugggaagacauaccacguaggagaacaguggcagaaggaauaucucggugccauuugcuccugcacaugcuuuggaggccagcggggcuggcgcugugacaacugccgcagaccugggggugaacccagucccgaaggcacuacuggccaguccuacaaccaguauucucagagauaccaucagagaacaaacacuaauguuaauugcccaauugagugcuucaugccuuuagauguacaggcugacagagaagauucccgagaguaa

SEQ ID NO: 687 - RNA, 1920 nt, Artificial Sequence
  BAG61560
auggaaaaaauucuuuuuuaucuguuucucauuggcauagcagugaaagcucagaucuguccaaagcguugugucugucagauuuugucuccuaaucuugcaacccuuugugccaagaaagggcuuuuauuuguuccaccaaacauugacagaagaacuguggaacugcgguuggcagacaauuuuguuacaaauauuaaaaggaaagauuuugccaauaugaccagcuugguggaccugacucuauccaggaauacaauaaguuuuauuacaccucaugcuuucgcugaccuacgaaauuugaggucuuugcauuugaauagcaacagauugacuaaaauuacaaaugauauguucaguggucuuuccaaucuucaucauuugauacugaacaacaaucagcugacuuuaauuuccucuacagcguuugaugaugucuucgcccuugaggagcuggaucuguccuauaauaaucuagaaaccauuccuugggaugcuguugagaagaugguuagcuugcauacccuuaguuuggaucacaauaugauugauaacauuccuaaggggaccuucucccauuugcacaagaugacucgguuagaugugacaucaaauaaauugcagaagcuaccaccugacccucucuuucagcgagcucagguacuagcaaccucaggaaucauaagcccaucuacuuuugcauuaaguuuugguggaaaccccuugcauugcaauugugaauuguugugguugaggcgucuguccagagaauaugacuuagagaccugugcuucuccuccacuuuuaacuggccgcuacuuuuggucaauuccugaagaagaguuuuugugugagccuccucucauuacucgucauacacaugagaugagaguccuggagggacaaagggcaacacugaggugcaaagccaggggagacccugagccugcaauucacuggauuucuccugaagggaagcuuauuucaaaugcaacaagaucucugguguaugauaacggaacacuugacauucuuaucacaacuguaaaggauacaggugcuuuuaccugcauugcuuccaauccugcuggggaagcaacacaaauaguggaucuucauauaauuaagcucccucacuuacuaaauaguacaaaccauauccaugagccugauccugguucuucagauaucucaacuucuaccaagucagguucuaauacaagcaguaguaaugauggcaucacuucccucacugccacaagagucguggguugcauccaguuuacuacggaacaggauuaugugcguugccauuucaugcagucccaguuuuugggaggcaccaugauuauuauuauugguggaaucauuguagcaucugugcugguauucaucauuauucugaugauccgguauaagguuugcaacaauaaugggcaacacaaggucaccaagguuagcaauguuuauucccaaacuaacggggcucaaauacaaggcuguaguguaacgcugccccaguccguguccaaacaagcugugggacacgaagagaaugcccaguguuguaaagcuaccagugacaaugugauucaaucuucagaaacuuguucgagucaggacuccgcuaccacuaccucugcuuugccuccuuccuggacuucaagcacuucugugucccaaaagcagaaaagaaagacuggcacaaagccaaguacagaaccacagaaugaagccgucacaaauguugaaucccaaaacacuaacaggaacaacucaacugccuugcaguuagcuagccguccucccgauucugucacagaggggcccacgucuaaaagagcacauauaaagccaaaugcuuugcugacuaauguugaccagauuguccaggaaacacagaggcuggaguuaaucuga

SEQ ID NO: 688 - RNA, 1014 nt, Artificial Sequence
  BAG61984
augaucuuugaggaacaugguuuuaggcggaccacaccgcccacaacggccacccccauaaggcauaggccaagaccauacccgccgaauguaggugaggaaauccaaauuggucacauccccagggaagauguagacuaucaccuguacccacacgguccgggacucaauccaaaugccucuacaggacaagaagcucucucucagacaaccaucucaugggccccauuccaggacacuucugaguacaucauuucaugucauccuguuggcacugaugaagaacccuuacaguucaggguuccuggaacuucuaccagugccacucugacaggccucaccagaggugccaccuacaacaucauaguggaggcacugaaagaccagcagaggcauaagguucgggaagagguuguuaccgugggcaacucugucaacgaaggcuugaaccaaccuacggaugacucgugcuuugaccccuacacaguuucccauuaugccguuggagaugagugggaacgaaugucugaaucaggcuuuaaacuguugugccagugcuuaggcuuuggaaguggucauuucagaugugauucaucuagauggugccaugacaauggugugaacuacaagauuggagagaagugggaccgucagggagaaaauggccagaugaugagcugcacaugucuugggaacggaaaaggagaauucaagugugacccucaugaggcaacguguuaugaugaugggaagacauaccacguaggagaacaguggcagaaggaauaucucggugccauuugcuccugcacaugcuuuggaggccagcggggcuggcgcugugacaacugccgcagaccugggggugaacccagucccgaaggcacuacuggccaguccuacaaccaguauucucagagauaccaucagagaacaaacacuaauguuaauugcccaauugagugcuucaugccuuuagauguacaggcugacagagaagauucccgagaguaa

SEQ ID NO: 689 - RNA, 3045 nt, Artificial Sequence
  BAG62013
augcgugucaccugggcuccacccccauccauugauuuaaccaacuuccuggugcguuacucaccugugaaaaaugaggaagauguugcagaguugucaauuucuccuucagacaaugcaguggucuuaacaaaucuccugccugguacagaauauguagugagugucuccagugucuacgaacaacaugagagcacaccucuuagaggaagacagaaaacaggucuugauuccccaacuggcauugacuuuucugauauuacuggcaacucuuuuacugugcacuggauugcuccucgagccaccaucacuggcuacaggauccgccaucaucccgagcacuucagugggagaccucgagaagaucgggugccccacucucggaauuccaucacccucaccaaccucacuccaggcacagaguauguggucagcaucguugcucuuaauggcagagaggaaagucccuuauugauuggccaacaaucaacaguuucugauguuccgagggaccuggaaguuguugcugcgacccccaccagccuacugaucagcugggaugcuccugcugucacagugagauauuacaggaucacuuacggagaaacaggaggaaauagcccuguccaggaguucacugugccugggagcaagucuacagcuaccaucagcggccuuaaaccuggaguugauuauaccaucacuguguaugcugucacuggccguggagacagccccgcaagcagcaagccaauuuccauuaauuaccgaacagaaauugacaaaccaucccagaugcaagugaccgauguucaggacaacagcauuagugucaaguggcugccuucaaguuccccuguuacugguuacagaguaaccaccacucccaaaaauggaccaggaccaacaaaaacuaaaacugcagguccagaucaaacagaaaugacuauugaaggcuugcagcccacaguggaguaugugguuagugucuaugcucagaauccaagcggagagagucagccucugguucagacugcaguaaccacuauuccugcaccaacugaccugaaguucacucaggucacacccacaagccugagcgcccaguggacaccacccaauguucagcucacuggauaucgagugcgggugacccccaaggagaagaccggaccaaugaaagaaaucaaccuugcuccugacagcucauccgugguuguaucaggacuuaugguggccaccaaauaugaagugagugucuaugcucuuaaggacacuuugacaagcagaccagcucaggguguugucaccacucuggagaaugucagcccaccaagaagggcucgugugacagaugcuacugagaccaccaucaccauuagcuggagaaccaagacugagacgaucacuggcuuccaaguugaugccguuccagccaauggccagacuccaauccagagaaccaucaagccagaugucagaagcuacaccaucacagguuuacaaccaggcacugacuacaagaucuaccuguacaccuugaaugacaaugcucggagcuccccuguggucaucgacgccuccacugccauugaugcaccauccaaccugcguuuccuggccaccacacccaauuccuugcugguaucauggcagccgccacgugccaggauuaccggcuacaucaucaaguaugagaagccugggucuccucccagagaaguggucccucggccccgcccuggugucacagaggcuacuauuacuggccuggaaccgggaaccgaauauacaauuuaugucauugcccugaagaauaaucagaagagcgagccccugauuggaaggaaaaagacagacgagcuuccccaacugguaacccuuccacaccccaaucuucauggaccagagaucuuggauguuccuuccacaguucaaaagaccccuuucgucacccacccuggguaugacacuggaaaugguauucagcuuccuggcacuucuggucagcaacccaguguugggcaacaaaugaucuuugaggaacaugguuuuaggcggaccacaccgcccacaacggccacccccauaaggcauaggccaaggccauacccgccgaauguaggugaggaaauccaaauuggucacauccccagggaagauguagacuaucaccuguacccacacgguccgggacucaauccaaaugccucuacaggacaagaagcucucucucagacaaccaucucaugggccccauuccaggacacuucugaguacaucauuucaugucauccuguuggcacugaugaagaacccuuacaguucaggguuccuggaacuucuaccagugccacucugacaggccucaccagaggugccaccuacaacaucauaguggaggcacugaaagaccagcagaggcauaagguucgggaagagguuguuaccgugggcaacucugucaacgaaggcuugaaccaaccuacggaugacucgugcuuugaccccuacacaguuucccauuaugccguuggagaugagugggaacgaaugucugaaucaggcuuuaaacuguugugccagugcuuaggcuuuggaaguggccauuucagaugugauucaucuagauggugccaugacaauggugugaacuacaagauuggagagaagugggaccgucagggagaaaauggccagaugaugagcugcacaugucuugggaacggaaaaggagaauucaagugugacccucaugaggcaacguguuacgaugaugggaagacauaccacguaggagaacaguggcagaaggaauaucucggugccauuugcuccugcacaugcuuuggaggccagcggggcuggcgcugugacaacugccgcagaccugggggugaacccagucccgaaggcacuacuggccaguccuacaaccaguauucucagagauaccaucagagaacaaacacuaauguuaauugcccaauugagugcuucaugccuuuagauguacaggcugacagagaagauucccgagaguaa

SEQ ID NO: 690 - RNA, 2685 nt, Artificial Sequence
  BAG62178
augcgugucaccugggcuccacccccauccauugauuuaaccaacuuccuggugcguuacucaccugugaaaaaugaggaagauguugcagaguugucaauuucuccuucagacaaugcaguggucuuaacaaaucuccugccugguacagaauauguagugagugucuccagugucuacgaacaacaugagagcacaccucuuagaggaagacagaaaacaggucuugauuccccaacuggcauugacuuuucugauauuacugccaacucuuuuacugugcacuggauugcuccucgagccaccaucacuggcuacaggauccgccaucaucccgagcacuucagugggagaccucgagaagaucgggugccccacucucggaauuccaucacccucaccaaccucacuccaggcacagaguauguggucagcaucguugcucuuaauggcagagaggaaagucccuuauugauuggccaacaaucaacaguuucugauguuccgagggaccuggaaguuguugcugcgacccccaccagccuacugaucagcugggaugcuccugcugucacagugagauauuacaggaucacuuacggagaaacaggaggaaauagcccuguccaggaguucacugugccugggagcaagucuacagcuaccaucagcggccuuaaaccuggaguugauuauaccaucacuguguaugcugucacuggccguggagacagccccgcaagcagcaagccaauuuccauuaauuaccgaacagaaauugacaaaccaucccagaugcaagugaccgauguucaggacaacagcauuagugucaaguggcugccuucaaguuccccuguuacugguuacagaguaaccaccacucccaaaaauggaccaggaccaacaaaaacuaaaacugcagguccagaucaaacagaaaugacuauugaaggcuugcaucccacaguggaguaugugguuagugucuaugcucagaauccaagcggagagagucagccucugguucagacugcaguaaccacuauuccugcaccaacugaccugaaguucacucaggucacacccacaagccugagcgcccaguggacaccacccaauguucagcucacuggauaucgagugcgggugacccccaaggagaagaccggaccaaugaaagaaaucaaccuugcuccugacagcucauccgugguuguaucaggacuuaugguggccaccaaauaugaagugagugucuaugcucuuaaggacacuuugacaagcagaccagcucaggguguugucaccacucuggagaaugucagcccaccaagaagggcucgugugacagaugcuacugagaccaccaucaccauuagcuggagaaccaagacugagacgaucacuggcuuccaaguugaugccguuccagccaauggccagacuccaauccagagaaccaucaagccagauguuagaagcuacaccaucacagguuuacaaccaggcacugacuacaagaucuaccuguacaccuugaaugacaaugcucggagcuccccuguggucaucgacgccuccacugccauugaugcaccauccaaccugcguuuccuggccaccacacccaauuccuugcugguaucauggcagccgccacgugccaggauuaccggcuacaucaucaaguaugagaagccugggucuccucccagagaaguggucccucggccccgcccuggugucacagaggcuacuauuacuggccuggaaccgggaaccgaauauacaauuuaugucauugcccugaagaauaaucagaagagcgagccccugauuggaaggaaaaagacaggacaagaagcucucucucagacaaccaucucaugggccccauuccaggacacuucugaguacaucauuucaugucauccuguuggcacugaugaagaacccuuacaguucaggguuccuggaacuucuaccagugccacucugacaggccucaccagaggugccaccuacaacaucauaguggaggcacugaaagaccagcagaggcauaagguucgggaagagguuauuaccgugggcaacucugucaacgaaggcuugaaccaaccuacggaugacucgugcuuugaccccuacacaguuucccauuaugccguuggagaugagugggaacgaaugucugaaucaggcuuuaaacuguugugccagugcuuaggcuuuggaaguggucauuucagaugugauucaucuagauggugccaugacaauggugugaacuacaagauuggagagaagugggaccgucagggagaaaauggccagaugaugagcugcacaugucuugggaacggaaaaggagaauucaagugugacccucaugaggcaacguguuacgaugaugggaagacauaccacguaggagaacaguggcagaaggaauaucucggugccauuugcuccugcacaugcuuuggaggccagcggggcuggcgcugugacaacugccgcagaccugggggugaacccagucccgaaggcacuacuggccaguccuacaaccaguauucucagagauaccaucagagaacaaacacuaauguuaauugcccaauugagugcuucaugccuuuagauguacaggcugacagagaagauucccgagaguaa

SEQ ID NO: 691 - RNA, 1152 nt, Artificial Sequence
  BAH12351
auggcuucagccuuucgccuuucuuugaaaccaaaggucagugacaacaugacucauuuaaugguggauuucucacaggaaagacagaugcugcaaacuuugaaguuuuugccaguccccaaagcuccagagauagauccaguagaguguuugguggcagauaacucuguaacaguggcuuggagaaugccagaagaagauaauaagauugaccauuuuauacuggaacauaggaagacuaauuuugauggacuuccacguguaaaggaugagcgaugcugggagauaauugauaauauuaaggguacugaauauacacuaucaggcuuaaaauuugauucaaaguauaugaauuucagagugcgagcuuguaacaaggcuguggcuggagaguauucugauccagugacucuagagaccaaagcacuuaacuucaauuuggauaacuccucaucccauuugaaccugaaaguugaagauacauguguagagugggauccuacuggaggaaaaggucaagaaaguaaaauuaaaggaaaagagaacaagggcaguguccauguuacuucacugaagaaacauacaagugguacaccauccccaaaacgaacaucuguaggcuccaggccaccagcaguaagaggcaguagagaucguuuuacuggagaaucauacacagugcugggagacacugcuauugaaaguggacaacauuauugggaggucaaggcccagaaggauuguaaauccuacagugugggaguagcauacaaaacguuggggaaauuugaccaauugggaaagacaaacacuaguugguguauccaugucaacaacuggcuacaaaacacauuugcagcaaagcauaauaauaaagucaaagcuuuggauguuacuguuccugaaaaaauagguguauuuugugauuuugaugggggucaacuuucauucuaugaugcaaauucuaaacaguugcuauauuccuuuaagacaaaauuuacucagccaguacuaccugguuucaugguauggugugguggacuuucuuugaguacugggaugcagguuccaagugcugugagaacacuucagaaaagugaaaauggaaugacugguucagcuagcagccugaacaauguuguuacucaauag

SEQ ID NO: 692 - RNA, 441 nt, Artificial Sequence
  BAH14175
augccacccucaaagccucauccaccugucgugggcaaagugacucaucacagcauugaauuauacugggaucuggaaaagaaagccaaacgccaaggaccucaagagcagugguucagguucucgauugaagaagaagaccccaaaaugcacacuuaugguaucauuuauacgggauaugcaacgaagcauguuguugaaggucuggaaccaaggacgcuguacagauuucgccugaaggucaccagccccucuggggagugugaguacagcccacucgucucagugucuacaaccagugaguauucagaccguccacacucaccucucucuagaucaauggagaugacaagcaauuuagaaaaaauauucugccucucguuuggccuuaccagaagcagaaaugauacaauuuuuaaacacugcaauaauauuugcuag

SEQ ID NO: 693 - RNA, 2055 nt, Artificial Sequence
  EAX08810
auggcagaacauccaccacuacuggauacaacucagaucuuaaguagugauauuucucuuuugucugccccuauuguaagugcagauggaacacaacagguuauucugguacaaguuaacccaggagaagcauuuacaauaagaagagaagauggacaguuucagugcauuacagguccugcucagguuccaaugauguccccaaaugguucugugccuccuaucuaugugccuccuggauaugccccacagguuauugaagacaaugguguucgaagaguugucguggucccucaggcaccagaguuucacccugguagucacacaguucuccaccguucuccacauccuccucuaccugguuucauuccugucccaacuaugaugccgccuccaccacgucauauguacucacccgugacuggagcuggagacaugacaacacaguauaugccacaguaucagucuucacaagucuauggagauguagaugcucacucuacacauggaagguccaacuuuagagaugaacgaucuaguaaaacauaugaacguuugcagaaaaaauugaaggaucgccaaggaacacagaaagauaaaaugagcaguccaccaucaucaccccagaaaugcccuucucccauuaaugaacauaauggacuuauaaaaggacaaauugcuggugguauaaacacaggaucagcaaaaaucaagucugggaaggggaaaggugguacacaaguugauacagaaauugaagaaaaagaugaagaaacuaaagcauuugaagcacuucuuuccaacauugucaaaccaguggccuccgacauccaggcaaggacaguaguacuuaccuggucaccaccuuccagccucauuaauggugaaacagaugaaaguaguguaccagagcucuaugguuaugaaguucugaucucaaguacuggaaaagaugggaaauacaaaaguguauauguaggagaagaaacaaauaucacuuuaaaugaucucaagccagccauggauuaccaugcaaaaguccaggcagaauauaauucuauaaagggaacuccuucagaggcugaaaucuuuaccaccuugagcugugaaccugauauaccuaauccaccaaggauagccaaucggaccaaaaauucacucacuuugcaauggaaggcaccuagugacaaugguucuaaaauccaaaacuuuguauuagaaugggaugaaggaaaaggaaauggagaauuuugucaguguuacaugggcucacagaaacaauuuaaaauuacuaaacuuucaccagcaaugggcuguaaauucagacuaucggccagaaaugacuaugguacaagugguuuuagugaagaagucuuauauuacaccucaggcugugcuccuucuaugccagcaaguccuguauuaaccaaggcuggaauuacuugguuauccuuacaauggaguaagcccucaggaacaccaucagaugaaggaauuucuuacauuuuagagauggaggaagaaacuucaggauaugguuuuaagccuaaauaugauggagaagaucuugcuuacacagugaaaaaucucagacguaguacuaaguauaaauuuaagguuauugcuuacaacucagaagguaaaaguaauccaagugaaguaguagaauuuacuacuugcccugauaaaccaggcauaccuguaaagccuucagugaaaggaaagauacauucacacaguuuuaaaauaaccugggauccaccaaaagacaauggcggagcaaccaucaauaaauauguaguggagauggcagaagguucuaacggaaacaaaugggaaaugauauacaguggugcuaccagggaacaucuuugugaucgacugaauccaggcuguuucuaucguuuacgaguuuacugcaucagugauggaggacagagugcggucucugaaucuuuacuugugcagacuccagcugugccuccuggcccaugccucccucccagauuacaggguagacccaaagcaaaagaaauacagacccccucugguuga

SEQ ID NO: 694 - RNA, 492 nt, Artificial Sequence
  AAG35520
augucugaaucaggcuuuaaacuguugugccagugcuuaggcuuuggaaguggucauuucagaugugauucaucuagauggugccaugacaauggugugaacuacaagauuggagagaagugggaccgucagggagaaaauggccagaugaugagcugcacaugucuugggaacggaaaaggagaauucaagugugacccucaugaggcaacguguuaugaugaugggaagacauaccacguaggagaacaguggcagaaggaauaucucggugccauuugcuccugcacaugcuuuggaggccagcggggcuggcgcugugacaacugccgcagaccugggggugaacccagucccgaaggcacuacuggccaguccuacaaccaguauucucagagauaccaucagagaacaaacacuaauguuaauugcccaauugagugcuucaugccuuuagauguacaggcugacagagaagauucccgagaguaa

SEQ ID NO: 695 - RNA, 1143 nt, Artificial Sequence
  AAA52471
augauguucucgggcuucaacgcagacuacgaggcgucauccucccgcugcagcagcgcguccccggccggggauagccucucuuacuaccacucacccgcagacuccuucuccagcaugggcucgccugucaacgcgcaggacuucugcacggaccuggccgucuccagugccaacuucauucccacggucacugccaucucgaccaguccggaccugcaguggcuggugcagcccgcccucgucuccucuguggccccaucgcagaccagagccccucacccuuucggaguccccgcccccuccgcuggggcuuacuccagggcuggcguugugaagaccaugacaggaggccgagcgcagagcauuggcaggaggggcaagguggaacaguuaucuccagaagaagaagagaaaaggagaauccgaagggaaaggaauaagauggcugcagccaaaugccgcaaccggaggagggagcugacugauacacuccaagcggagacagaccaacuagaagaugagaagucugcuuugcagaccgagauugccaaccugcugaaggagaaggaaaaacuagaguucauccuggcagcucaccgaccugccugcaagaucccugaugaccugggcuucccagaagagaugucuguggcuucccuugaucugacugggggccugccagagguugccaccccggagucugaggaggccuucacccugccucuccucaaugacccugagcccaagcccucaguggaaccugucaagagcaucagcagcauggagcugaagaccgagcccuuugaugacuuccuguucccagcaucauccaggcccaguggcucugagacagcccgcuccgugccagacauggaccuaucuggguccuucuaugcagcagacugggagccucugcacaguggcucccuggggauggggcccauggccacagagcuggagccccugugcacuccgguggucaccuguacucccagcugcacugcuuacacgucuuccuucgucuucaccuaccccgaggcugacuccuuccccagcugugcagcugcccaccgcaagggcagcagcagcaaugagccuuccucugacucgcucagcucacccacgcugcuggcccuguga

SEQ ID NO: 696 - RNA, 1296 nt, Artificial Sequence
  AAG53607
augcccaaccccaggccuggcaagcccucggccccuuccuuggcccuuggcccauccccaggagccucgcccagcuggagggcugcacccaaagccucagaccugcugggggcccggggcccagggggaaccuuccagggccgagaucuucgaggcggggcccaugccuccucuucuuccuugaaccccaugccaccaucgcagcugcagcugcccacacugccccuagucaugguggcacccuccggggcacggcugggccccuugccccacuuacaggcacuccuccaggacaggccacauuucaugcaccagcucucaacgguggaugcccacgcccggaccccugugcugcaggugcacccccuggagagcccagccaugaucagccucacaccacccaccaccgccacuggggucuucucccucaaggcccggccuggccucccaccugggaucaacguggccagccuggaauggguguccagggagccggcacugcucugcaccuucccaaaucccagugcacccaggaaggacagcacccuuucggcugugccccagagcuccuacccacugcuggcaaauggugucugcaaguggcccggaugugagaaggucuucgaagagccagaggacuuccucaagcacugccaggcggaccaucuucuggaugagaagggcagggcacaaugucuccuccagagagagaugguacagucucuggagcagcagcuggugcuggagaaggagaagcugagugccaugcaggcccaccuggcugggaaaauggcacugaccaaggcuucaucuguggcaucauccgacaagggcuccugcugcaucguagcugcuggcagccaaggcccugucgucccagccuggucuggcccccgggaggccccugacagccuguuugcuguccggaggcaccugugggguagccauggaaacagcacauucccagaguuccuccacaacauggacuacuucaaguuccacaacaugcgacccccuuucaccuacgccacgcucauccgcugggccauccuggaggcuccagagaagcagcggacacucaaugagaucuaccacugguucacacgcauguuugccuucuucagaaaccauccugccaccuggaagaacgccauccgccacaaccugagucugcacaagugcuuugugcggguggagagcgagaagggggcuguguggaccguggaugagcuggaguuccgcaagaaacggagccagaggcccagcagguguuccaacccuacaccuggccccuga

SEQ ID NO: 697 - RNA, 1098 nt, Artificial Sequence
  AAA52639
auguggcuccggagccaucgucagcucugccuggccuuccugcuagucuguguccucucuguaaucuucuuccuccauauccaucaagacagcuuuccacauggccuaggccugucgauccuguguccagaccgccgccuggugacacccccaguggccaucuucugccugccggguacugcgaugggccccaacgccuccucuuccuguccccagcacccugcuucccucuccggcaccuggacugucuaccccaauggccgguuugguaaucagaugggacaguaugccacgcugcuggcucuggcccagcucaacggccgccgggccuuuauccugccugccaugcaugccgcccuggccccgguauuccgcaucacccugcccgugcuggccccagaaguggacagccgcacgccguggcgggagcugcagcuucacgacuggaugucggaggaguacgcggacuugagagauccuuuccugaagcucucuggcuuccccugcucuuggacuuucuuccaccaucuccgggaacagauccgcagagaguucacccugcacgaccaccuucgggaagaggcgcagagugugcugggucagcuccgccugggccgcacaggggaccgcccgcgcaccuuugucggcguccacgugcgccguggggacuaucugcagguuaugccucagcgcuggaaggguguggugggcgacagcgccuaccuccggcaggccauggacugguuccgggcacggcacgaagcccccguuuucguggucaccagcaacggcauggagugguguaaagaaaacaucgacaccucccagggcgaugugacguuugcuggcgauggacaggaggcuacaccguggaaagacuuugcccugcucacacagugcaaccacaccauuaugaccauuggcaccuucggcuucugggcugccuaccuggcuggcggagacacugucuaccuggccaacuucacccugccagacucugaguuccugaagaucuuuaagccggaggcggccuuccugcccgagugggugggcauuaaugcagacuugucuccacucuggacauuggcuaagccuuga

SEQ ID NO: 698 - RNA, 1380 nt, Artificial Sequence
  EAW58359
auggcuccccugugccccagccccuggcucccucuguugaucccggccccugcuccaggccucacugugcaacugcugcugucacugcugcuucuggugccuguccauccccagagguugccccggaugcaggaggauucccccuugggaggaggcucuucuggggaagaugacccacugggcgaggaggaucugcccagugaagaggauucacccagagaggaggauccacccggagaggaggaucuaccuggagaggaggaucuaccuggagaggaggaucuaccugaaguuaagccuaaaucagaagaagagggcucccugaaguuagaggaucuaccuacuguugaggcuccuggagauccucaagaaccccagaauaaugcccacagggacaaagaaggggaugaccagagucauuggcgcuauggaggcgacccgcccuggccccggguguccccagccugcgcgggccgcuuccaguccccgguggauauccgcccccagcucgccgccuucugcccggcccugcgcccccuggaacuccugggcuuccagcucccgccgcucccagaacugcgccugcgcaacaauggccacagugugcaacugacccugccuccugggcuagagauggcucugggucccgggcgggaguaccgggcucugcagcugcaucugcacuggggggcugcaggucguccgggcucggagcacacuguggaaggccaccguuucccugccgagauccacgugguucaccucagcaccgccuuugccagaguugacgaggccuuggggcgcccgggaggccuggccguguuggccgccuuucuggaggagggcccggaagaaaacagugccuaugagcaguugcugucucgcuuggaagaaaucgcugaggaaggcucagagacucaggucccaggacuggacauaucugcacuccugcccucugacuucagccgcuacuuccaauaugaggggucucugacuacaccgcccugugcccagggugucaucuggacuguguuuaaccagacagugaugcugagugcuaagcagcuccacacccucucugacacccuguggggaccuggugacucucggcuacagcugaacuuccgagcgacgcagccuuugaaugggcgagugauugaggccuccuucccugcuggaguggacagcaguccucgggcugcugagccaguccagcugaauuccugccuggcugcuggugacauccuagcccugguuuuuggccuccuuuuugcugucaccagcgucgcguuccuugugcagaugagaaggcagcacagaaggggaaccaaagggggugugagcuaccgcccagcagagguagccgagacuggagccuag

SEQ ID NO: 699 - RNA, 417 nt, Artificial Sequence
  U19142.1
augaguuggcgaggaagaucgaccuaucggccuagaccaagacgcuacguagagccuccugaaaugauugggccuaugcggcccgagcaguucagugaugaaguggaaccagcaacaccugaagaaggggaaccagcaacucaacgucaggauccugcagcugcucaggagggagaggaugagggagcaucugcaggucaagggccgaagccugaagcugauagccaggaacagggucacccacagacugggugugagugugaagaugguccugaugggcaggagauggacccgccaaauccagaggaggugaaaacgccugaagaagagaugaggucucacuauguugcccagacugggauucucuggcuuuuaaugaacaauugcuucuuaaaucuuuccccacggaaaccuuga

SEQ ID NO: 700 - RNA, 351 nt, Artificial Sequence
  AAH69397
augaguuggcgaggaagaucgaccuaucggccuagaccaagacgcuacguagagccuccugaaaugauugggccuaugcggcccgagcaguucagugaugaaguggaaccagcaacaccugaagaaggggaaccagcaacucaacgucaggauccugcagcugcucaggagggacaggaugagggagcaucugcaggucaagggccgaagccugaagcucauagccaggaacagggucacccacagacugggugugagugugaagaugguccugaugggcaggagauggacccgccaaauccagaggaggugaaaacgccugaagaaggugaaaagcaaucacaguguuaa

SEQ ID NO: 701 - RNA, 357 nt, Artificial Sequence
  AAA82746
augaaucucaguagaggaaaaucgaccuauuauuggccuagaccaaggcgcuauguacagccuccugaagugauugggccuaugcggcccgagcaguucagugaugaaguggaaccagcaacaccugaagaaggggaaccagcaacucaacgucaggauccugcagcugcucaggagggagaggaugagggagcaucugcaggucaagggccgaagccugaagcugauagccaggaacagggucacccacagacugggugugagugugaagaugguccugaugggcaggagauggacccgccaaauccagaggaggugaaaacgccugaagaaggugaaaagcaaucacaguguuaa

SEQ ID NO: 702 - RNA, 354 nt, Artificial Sequence
  AAH69470
augaguuggcgaggaagaucgaccuauuauuggccuagaccaaggcgcuauguacagccuccugaaaugauugggccuaugcggcccgagcaguucagugaugaaguggaaccagcaacaccugaagaaggggaaccagcaacucaacgucaggauccugcagcugcucaggagggagaggaugagggagcaucugcaggucaagggccgaagccugaagcugauagccaggaacagggucacccacagacugggugugagugugaagaugguccugaugggcaggagauggacccgccaaauccagaggaggugaaaacgccugaagaaggugaagggcaaucacaguguuaa

SEQ ID NO: 703 - RNA, 354 nt, Artificial Sequence
  AAA82748
augaguuggcgaggaagaucgaccuauuauuggccuagaccaaggcgcuauguacagccuccugaagugauugggccuaugcggcccgagcaguucagugaugaaguggaaccagcaacaccugaagaaggggaaccagcaacucaacgucaggauccugcagcugcucaggagggagaggaugagggagcaucugcaggucaagggccgaagccugaagcugauagccaggaacagggucacccacagacugggugugagugugaagaugguccugaugggcaggagauggacccgccaaauccagaggaggugaaaacgccugaagaaggugaaaagcaaucacaguguuaa

SEQ ID NO: 704 - RNA, 354 nt, Artificial Sequence
  AAA82749
augaguuggcgaggaagaucgaccuauuauuggccuagaccaaggcgcuauguacagccuccugaagugauugggccuaugcggcccgagcaguucagugaugaaguggaaccagcaacaccugaagaaggggaaccagcaacucaacgucaggauccugcagcugcucaggagggagaggaugagggagcaucugcaggucaagggccgaagccugaagcugauagccaggaacagggucacccacagacugggugugagugugaagaugguccugaugggcaggagguggacccgccaaauccagaggaggugaaaacgccugaagaaggugaaaagcaaucacaguguuaa

SEQ ID NO: 705 - RNA, 354 nt, Artificial Sequence
  AAC25989
augaguuggcgaggaagaucgaccuauuauuggccuagaccaaggcgcuauguacagccuccugaaaugauugggccuaugcggcccgagcaguucagugaugaaguggaaccagcaacaccugaagaaggggaaccagcaacucaacgucaggauccugcagcugcucaggagggagaggaugagggagcaucugcaggucaagggccgaagccugaagcucauagccaggaacagggucacccacagacugggugugagugugaagaugguccugaugggcaggagauggacccgccaaauccagaggaggugaaaacgccugaagaaggugaaaagcaaucacaguguuaa

SEQ ID NO: 706 - RNA, 351 nt, Artificial Sequence
  AAC33676
augaguuggcgaggaagaucgaccuaucggccuagaccaagacgcuacguagagccuccugaaaugauugggccuaugcggcccgagcaguucagugaugaaguggaaccagcaacaccugaagaaggggaaccagcaacucaacgucaggauccugcagcugcucaggagggagaggaugagggagcaucugcaggucaagggccgaagccugaagcugauagccaggaacagggucacccacagacugggugugagugugaagaugguccugaugggcaggagauggacccgccaaauccagaggaggugaaaacgccugaagaaggugaaaagcaaucacaguguuaa

SEQ ID NO: 707 - RNA, 1344 nt, Artificial Sequence
  AAA35657
auggagcugcuaaagcugaaccggagcgugcagggaaccggacccgggccgggggcuucccugugccgcccgggggcgccucuccucaacagcagcagugugggcaaccucagcugcgagcccccucgcauucgcggagccgggacacgagaauuggagcuggccauuagaaucacucuuuacgcagugaucuuccugaugagcguuggaggaaauaugcucaucaucgugguccugggacugagccgccgccugaggacugucaccaaugccuuccuccucucacuggcagucagcgaccuccugcuggcuguggcuugcaugcccuucacccuccugcccaaucucaugggcacauucaucuuuggcaccgucaucugcaaggcgguuuccuaccucaugggggugucugugaguguguccacgcuaagccucguggccaucgcacuggagcgguacagcgccaucugccgaccacugcaggcacgaguguggcagacgcgcucccacgcggcucgcgugauuguagccacguggcugcuguccggacuacucauggugcccuaccccguguacacugucgugcaaccaguggggccucgugugcugcagugcgugcaucgcuggcccagugcgcggguccgccagaccugguccguacugcugcuucugcucuuguucuucaucccgggugugguuauggccguggccuacgggcuuaucucucgcgagcucuacuuagggcuucgcuuugacggcgacagugacagcgacagccaaagcaggguccgaaaccaaggcgggcugccaggggcuguucaccagaacgggcguugccggccugagacuggcgcgguuggcgaagacagcgauggcugcuacgugcaacuuccacguucccggccugcccuggagcugacggcgcugacggcuccugggccgggauccggcucccggcccacccaggccaagcugcuggcuaagaagcgcguggugcgaauguugcuggugaucguugugcuuuuuuuucuguguugguugccaguuuauagugccaacacguggcgcgccuuugauggcccgggugcacaccgagcacucucgggugcuccuaucuccuucauucacuugcugagcuacgccucggccugugucaacccccuggucuacugcuucaugcaccgucgcuuucgccaggccugccuggaaacuugcgcucgcugcugcccccggccuccacgagcucgccccagggcucuucccgaugaggacccucccacucccuccauugcuucgcuguccaggcuuagcuacaccaccaucagcacacugggcccuggcuga

SEQ ID NO: 708 - RNA, 2226 nt, Artificial Sequence
  AAD22449
auggcucucuucacuccguggaaguuguccucucagaagcugggcuuuuuccuggugacuuuuggcuucauuugggguaugaugcuucugcacuuuaccauccagcagcgaacucagccugaaagcagcuccaugcugcgcgagcagauccuggaccucagcaaaagguacaucaaggcacuggcagaagaaaacaggaaugugguggaugggccauacgcuggagucaugacagcuuaugaucugaagaaaacccuugcuguguuauuagauaacauuuugcagcgcauuggcaaguuggagucgaagguggacaaucuuguugucaauggcaccggaacaaacucaaccaacuccacuacagcuguucccagcuugguugcacuugagaaaauuaauguggcagauaucauuaacggagcucaagaaaaauguguauugccuccuauggacggcuacccucacugugagggaaagaucaaguggaugaaagacauguggcguucagaucccugcuacgcagacuauggaguggauggauccaccugcucuuuuuuuauuuaccucagugagguugaaaauugguguccucauuuaccuuggagagcaaaaaaucccuacgaagaagcugaucauaauucauuggcggaaauucguacagauuuuaauauucucuacaguaugaugaaaaagcaugaagaauuccgguggaugagacuacggauccggcgaauggcugacgcauggauccaagcaaucaagucccuggcagaaaagcagaaccuugaaaagagaaagcggaagaaaguccucguucaccugggacuccugaccaaggaaucuggauuuaagauugcagagacagcuuucagugguggcccucuuggugaauuaguucaauggagugauuuaauuacaucucuguacuuacugggccaugacauuaggauuucagcuucacuggcugagcucaaggaaaucaugaagaagguuguaggaaaccgaucuggcugcccaacuguaggagacagaauuguugagcucauuuacauugauauuguaggacuugcucaauucaagaaaacucuuggaccauccuggguucauuaccagugcaugcuccgagugcuggauuccuuuggaacagaaccugaguucaaucacgcaaauuaugcccaaucgaaaggccacaagaccccuuggggaaaauggaaucugaacccucagcaguuuuauaccauguucccucauaccccagacaacagcuuucugggguuugugguugagcagcaccugaacuccagugauauccaccacauuaaugaaaucaaaaggcagaaccagucccuuguguauggcaaaguggauagcuucuggaagaauaagaagaucuacuuggacauuauucacacauacauggaagugcaugcaacuguuuauggcuccagcacaaagaauauucccaguuacgugaaaaaccaugguauccucaguggacgggaccugcaguuccuucuucgagaaaccaaguuguuuguuggacuuggguucccuuacgagggcccagcuccccuggaagcuaucgcaaauggaugugcuuuucugaaucccaaguucaacccacccaaaagcagcaaaaacacagacuucuucauuggcaagccaacacugagagagcucacaucccagcauccuuacgcugaaguuuucaucgggcggccacauguguggacuguugaccucaacaaucaggaggaaguagaggaugcagugaaagccaucuuaaaccagaagauugagccauacaugccauaugaauuuacgugcgaggggaugcuacagagaaucaaugcuuucauugaaaaacaggacuucugccaugggcaagugauguggccaccccucagcgcccuacaggucaagcuugcugagcccgggcaguccugcaagcaggugugccaggagagccagcucaucugcgagccuucuuucuuccagcaccucaacaaggacaaggacaugcugaaguacaaggugaccugccaaagcucagagcuggccaaggacauccuggugcccuccuuugacccuaagaauaagcacuguguguuucaaggugaccuccugcucuucagcugugcaggcgcccaccccaggcaccagagggucugccccugccgggacuucaucaagggccagguggcucucugcaaagacugccuauag

SEQ ID NO: 709 - RNA, 1743 nt, Artificial Sequence
  EAX11770
auggccgggaccgugcgcaccgcgugcuuggugguggcgaugcugcucagcuuggacuucccgggacaggcgcagcccccgccgccgccgccggacgccaccugucaccaaguccgcuccuucuuccagagacugcagcccggacucaagugggugccagaaacucccgugccaggaucagauuugcaaguaugucucccuaagggcccaacaugcugcucaagaaagauggaagaaaaauaccaacuaacagcacgauugaacauggaacagcugcuucagucugcaaguauggagcucaaguucuuaauuauucagaaugcugcgguuuuccaagaggccuuugaaauuguuguucgccaugccaagaacuacaccaaugccauguucaagaacaacuacccaagccugacuccacaagcuuuugaguuugugggugaauuuuucacagaugugucucucuacaucuuggguucugacaucaauguagaugacauggucaaugaauuguuugacagccuguuuccagucaucuauacccagcuaaugaacccaggccugccugauucagccuuggacaucaaugagugccuccgaggagcaagacgugaccugaaaguauuugggaauuuccccaagcuuauuaugacccagguuuccaagucacugcaagucacuaggaucuuccuucaggcucugaaucuuggaauugaagugaucaacacaacugaucaccugaaguucaguaaggacuguggccgaaugcucaccagaaugugguacugcucuuacugccagggacugaugaugguuaaacccuguggcgguuacugcaauguggucaugcaaggcuguauggcaggugugguggagauugacaaguacuggagagaauacauucugucccuugaagaacuugugaauggcauguacagaaucuaugacauggagaacguacugcuuggucucuuuucaacaauccaugauucuauccaguauguccagaagaaugcaggaaagcugaccaccacuauuggcaaguuaugugcccauucucaacaacgccaauauagaucugcuuauuauccugaagaucucuuuauugacaagaaaguauuaaaaguugcucauguagaacaugaagaaaccuuauccagccgaagaagggaacuaauucagaaguugaagucuuucaucagcuucuauagugcuuugccuggcuacaucugcagccauagcccuguggcggaaaacgacacccuuugcuggaauggacaagaacucguggagagauacagccaaaaggcagcaaggaauggaaugaaaaaccaguucaaucuccaugagcugaaaaugaagggcccugagccaguggucagucaaauuauugacaaacugaagcacauuaaccagcuccugagaaccaugucuaugcccaaagguagaguucuggauaaaaaccuggaugaggaaggguuugaaaguggagacugcggugaugaugaagaugagugcauuggaggcucuggugauggaaugauaaaagugaagaaucagcuccgcuuccuugcagaacuggccuaugaucuggauguggaugaugcgccuggaaacagucagcaggcaacuccgaaggacaacgagauaagcaccuuucacaaccucgggaacguucauuccccgcugaagcuucucaccagcauggccaucucgguggugugcuucuucuuccuggugcacuga

SEQ ID NO: 710 - RNA, 1743 nt, Artificial Sequence
  AAA93471
auggccgggaccgugcgcaccgcgugcuuggugguggcgaugcugcucagcuuggacuucccgggacaggcgcagcccccgccgccgccgccggacgccaccugucaccaaguccgcuccuucuuccagagacugcagcccggacucaagugggugccagaaacucccgugccaggaucagauuugcaaguaugucucccuaagggcccaacaugcugcucaagaaagauggaagaaaaauaccaacuaacagcucgauugaacauggaacagcugcuucagucugcaaguauggagcucaaguucuuaauuauucagaaugcugcgguuuuccaagaggccuuugaaauuguuguucgccaugccaagaacuacaccaaugccauguucaagaacaacuacccaagccugacuccacaagcuuuugaguuugugggugaauuuuucacagaugugucucucuacaucuuggguucugacaucaauguagaugacauggucaaugaauuguuugacagccuguuuccagucaucuauacccagcuaaugaacccaggccugccugauucagccuuggacaucaaugagugccuccgaggagcaagacgugaccugaaaguauuugggaauuuccccaagcuuauuaugacccagguuuccaagucacugcaagucacuaggaucuuccuucaggcucugaaucuuggaauugaagugaucaacacaacugaucaccugaaguucaguaaggacuguggccgaaugcucaccagaaugugguacugcucuuacugccagggacugaugaugguuaaacccuguggcgguuacugcaauguggucaugcaaggcuguauggcaggugugguggagauugacaaguacuggagagaauacauucugucccuugaagaacuugugaauggcauguacagaaucuaugacauggagaacguacugcuuggucucuuuucaacaauccaugauucuauccaguauguccagaagaaugcaggaaagcugaccaccacuauuggcaaguuaugugcccauucucaacaacgccaauauagaucugcuuauuauccugaagaucucuuuauugacaagaaaguauuaaaaguugcucauguagaacaugaagaaaccuuauccagccgaagaagggaacuaauucagaaguugaagucuuucaucagcuucuauagugcuuugccuggcuacaucugcagccauagcccuguggcggaaaacgacacccuuugcuggaauggacaagaacucguggagagauacagccaaaaggcagcaaggaauggaaugaaaaaccaguucaaucuccaugagcugaaaaugaagggcccugagccaguggucagucaaauuauugacaaacugaagcacauuaaccagcuccugagaaccaugucuaugcccaaagguagaguucuggauaaaaaccuggaugaggaaggguuugaaaguggagacugcggugaugaugaagaugagugcauuggagggucuggugauggaaugauaaaagugaagaaucagcuccgcuuccuugcagaacuggccuaugaucuggauguggaugaugcgccuggaaacagucagcaggcaacuccgaaggacaacgagauaagcaccuuucacaaccucgggaacguucauuccccgcugaagcuucucaccagcauggccaucucgguggugugcuucuucuuccuggugcacuga

SEQ ID NO: 711 - RNA, 1743 nt, Artificial Sequence
  AAH35972
auggccgggaccgugcgcaccgcgugcuuggugguggcgaugcugcucagcuuggacuucccgggacaggcgcagcccccgccgccgccgccggacgccaccugucaccaaguccgcuccuucuuccagagacugcagcccggacucaagugggugccagaaacucccgugccaggaucagauuugcaaguaugucucccuaagggcccaacaugcugcucaagaaagauggaagaaaaauaccaacuaacagcacgauugaacauggaacagcugcuucagucugcaaguauggagcucaaguucuuaauuauucagaaugcugcgguuuuccaagaggccuuugaaauuguuguucgccaugccaagaacuacaccaaugccauguucaagaacaacuacccaagccugacuccacaagcuuuugaguuugugggugaauuuuucacagaugugucucucuacaucuuggguucugacaucaauguagaugacauggucaaugaauuguuugacagccuguuuccagucaucuauacccagcuaaugaacccaggccugccugauucagccuuggacaucaaugagugccuccgaggagcaagacgugaccugaaaguauuugggaauuuccccaagcuuauuaugacccagguuuccaagucacugcaagucacuaggaucuuccuucaggcucugaaucuuggaauugaagugaucaacacaacugaucaccugaaguucaguaaggacuguggccgaaugcucaccagaaugugguacugcucuuacugccagggacugaugaugguuaaacccuguggcgguuacugcaauguggucaugcaaggcuguauggcaggugugguggagauugacaaguacuggagagaauacauucugucccuugaagaacuugugaauggcauguacagaaucuaugacauggagaacguacugcuuggucucuuuucaacaauccaugauucuauccaguauguccagaagaaugcaggaaagcugaccaccacuauuggcaaguuaugugcccauucucaacaacgccaauauagauuugcuuauuauccugaagaucucuuuauugacaagaaaguauuaaaaguugcucauguagaacaugaagaaaccuuauccagccgaagaagggaacuaauucagaaguugaagucuuucaucagcuucuauagugcuuugccuggcuacaucugcagccauagcccuguggcggaaaacgacacccuuugcuggaauggacaagaacucguggagagauacagccaaaaggcagcaaggaauggaaugaaaaaccaguucaaucuccaugagcugaaaaugaagggcccugagccaguggucagucaaauuauugacaaacugaagcacauuaaccagcuccugagaaccaugucuaugcccaaagguagaguucuggauaaaaaccuggaugaggaaggguuugaaaguggagacugcggugaugaugaagaugagugcauuggaggcucuggugauggaaugauaaaagugaagaaucagcuccgcuuccuugcagaacuggccuaugaucuggauguggaugaugcgccuggaaacagucagcaggcaacuccgaaggacaacgagauaagcaccuuucacaaccucgggaacguucauuccccgcugaagcuucucaccagcauggccaucucgguggugugcuucuucuuccuggugcacuga

SEQ ID NO: 712 - RNA, 1683 nt, Artificial Sequence
  EAW93784
auggaaugucucuacuauuuccugggauuucugcuccuggcugcaagauugccacuugaugccgccaaacgauuucaugaugugcugggcaaugaaagaccuucugcuuacaugagggagcacaaucaauuaaauggcuggucuucugaugaaaaugacuggaaugaaaaacucuacccaguguggaagcggggagacaugagguggaaaaacuccuggaagggaggccgugugcaggcgguccugaccagugacucaccagcccucgugggcucaaauauaacauuugcggugaaccugauauucccuagaugccaaaaggaagaugccaauggcaacauagucuaugagaagaacugcagaaaugaggcugguuuaucugcugauccguauguuuacaacuggacagcauggucagaggacagugacggggaaaauggcaccggccaaagccaucauaacgucuucccugaugggaaaccuuuuccucaccaccccggauggagaagauggaauuucaucuacgucuuccacacacuuggucaguauuuccagaaauugggacgauguucagugagaguuucugugaacacagccaaugugacacuugggccucaacucauggaagugacugucuacagaagacauggacgggcauauguucccaucgcacaagugaaagauguguacgugguaacagaucagauuccuguguuugugacuauguuccagaagaacgaucgaaauucauccgacgaaaccuuccucaaagaucuccccauuauguuugauguccugauucaugauccuagccacuuccucaauuauucuaccauuaacuacaaguggagcuucggggauaauacuggccuguuuguuuccaccaaucauacugugaaucacacguaugugcucaauggaaccuucagccuuaaccucacugugaaagcugcagcaccaggaccuuguccgccaccgccaccaccacccagaccuucaaaacccaccccuucuuuaggaccugcuggugacaacccccuggagcugaguaggauuccugaugaaaacugccagauuaacagauauggccacuuucaagccaccaucacaauuguagagggaaucuuagagguuaacaucauccagaugacagacguccugaugccggugccauggccugaaagcucccuaauagacuuugucgugaccugccaagggagcauucccacggaggucuguaccaucauuucugaccccaccugcgagaucacccagaacacagucugcagcccuguggauguggaugagaugugucugcugacugugagacgaaccuucaaugggucugggacguacugugugaaccucacccugggggaugacacaagccuggcucucacgagcacccugauuucuguuccugacagagacccagccucgccuuuaaggauggcaaacagugcccugaucuccguuggcugcuuggccauauuugucacugugaucucccucuugguguacaaaaaacacaaggaauacaacccaauagaaaauaguccugggaauguggucagaagcaaaggccugagugucuuucucaaccgugcaaaagccguguucuucccgggaaaccaggaaaaggauccgcuacucaaaaaccaagaauuuaaaggaguuucuuaa

SEQ ID NO: 713 - RNA, 1719 nt, Artificial Sequence
  AAH32783
auggaaugucucuacuauuuccugggauuucugcuccuggcugcaagauugccacuugaugccgccaaacgauuucaugaugugcugggcaaugaaagaccuucugcuuacaugagggagcacaaucaauuaaauggcuggucuucugaugaaaaugacuggaaugaaaaacucuacccaguguggaagcggggagacaugagguggaaaaacuccuggaagggaggccgugugcaggcgguccugaccagugacucaccagcccucgugggcucaaauauaacauuugcggugaaccugauauucccuagaugccaaaaggaagaugccaauggcaacauagucuaugagaagaacugcagaaaugaggcugguuuaucugcugauccguauguuuacaacuggacagcauggucagaggacagugacggggaaaauggcaccggccaaagccaucauaacgucuucccugaugggaaaccuuuuccucaccaccccggauggagaagauggaauuucaucuacgucuuccacacacuuggucaguauuuccagaaauugggacgauguucagugagaguuucugugaacacagccaaugugacacuugggccucaacucauggaagugacugucuacagaagacauggacgggcauauguucccaucgcacaagugaaagauguguacgugguaacagaucagauuccuguguuugugacuauguuccagaagaacgaucgaaauucauccgacgaaaccuuccucaaagaucuccccauuauguuugauguccugauucaugauccuagccacuuccucaauuauucuaccauuaacuacaaguggagcuucggggauaauacuggccuguuuguuuccaccaaucauacugugaaucacacguaugugcucaauggaaccuucagccuuaaccucacugugaaagcugcagcaccaggaccuuguccgccaccgccaccaccacccagaccuucaaaacccaccccuucuuuagcaacuacucuaaaaucuuaugauucaaacaccccaggaccugcuggugacaacccccuggagcugaguaggauuccugaugaaaacugccagauuaacagauauggccacuuucaagccaccaucacaauuguagagggaaucuuagagguuaacaucauccagaugacagacguccugaugccggugccauggccugaaagcucccuaauagacuuugucgugaccugccaagggagcauucccacggaggucuguaccaucauuucugaccccaccugcgagaucacccagaacacagucugcagcccuguggauguggaugagaugugucugcugacugugagacgaaccuucaaugggucugggacguacugugugaaccucacccugggggaugacacaagccuggcucucacgagcacccugauuucuguuccugacagagacccagccucgccuuuaaggauggcaaacagcgcccugaucuccguuggcugcuuggccauauuugucacugugaucucccucuugguguacaaaaaacacaaggaauacaacccaauagaaaauaguccugggaauguggucagaagcaaaggccugagugucuuucucaaccgugcaaaagccguguucuucccgggaaaccaggaaaaggauccgcuacucaaaaaccaagaauuuaaaggaguuucuuaa

SEQ ID NO: 714 - RNA, 621 nt, Artificial Sequence
  CAD43718
auggaaugucucuacuauuuccugggauuucugcuccuggcugcaagauugccacuugaugccgccaaacgauuucaugaugugcugggcaaugaaagaccuucugcuuacaugagggagcacaaucaauuaaauggcuggucuucugaugaaaaugacuggaaugaaaaacucuacccaguguggaagcggggagacaugagguggaaaaacuccuggaagggaggccgugugcaggcgguccugaccagugacucaccagcccucgugggcucaaauauaacauuugcggugaaccugauauucccuagaugccaaaaggaagaugccaauggcaacauagucuaugagaagaacugcagaaaugaggcugguuuaucugcugauccguauguuuacaacuggacagcauggucagaggacagugacggggaaaauggcaccggccaaagccaucauaacgucuucccugaugggaaaccuuuuccucaccaccccggauggagaagauggaauuucaucuacgucuuccacacacuugauuggcuuuuacaaaccccuaagcuucuucuuuaccuuuccuuaaaauuucaaccuucucuuuucuuacucuauaauuga

SEQ ID NO: 715 - RNA, 621 nt, Artificial Sequence
  AAH11595
auggaaugucucuacuauuuccugggauuucugcuccuggcugcaagauugccacuugaugccgccaaacgauuucaugaugugcugggcaaugaaagaccuucugcuuacaugagggagcacaaucaauuaaauggcuggucuucugaugaaaaugacuggaaugaaaaacucuacccaguguggaagcggggagacaugagguggaaaaacuccuggaagggaggccgugugcaggcgguccugaccagugacucaccagcccucgugggcucaaauauaacauuugcggugaaccugauauucccuagaugccaaaaggaagaugccaauggcaacauagucuaugagaagaacugcagaaaugaggcugguuuaucugcugauccauauguuuacaacuggacagcauggucagaggacagugacggggaaaauggcaccggccaaagccaucauaacgucuucccugaugggaaaccuuuuccucaccaccccggauggagaagauggaauuucaucuacgucuuccacacacuugguuggcuuuuacaaaccccuaagcuucuucuuuaccuuuccuuaaaauuucaaccuucucuuuucuuacucuauaauuga

SEQ ID NO: 716 - RNA, 2640 nt, Artificial Sequence
  CCDS5600.1
augaagauguugacaagacugcaaguucuuaccuuagcuuuguuuucaaagggauuuuuacucucuuuaggggaccauaacuuucuaaggagagagauuaaaauagaaggugaccuuguuuuagggggccuguuuccuauuaacgaaaaaggcacuggaacugaagaaugugggcgaaucaaugaagaccgagggauucaacgccuggaagccauguuguuugcuauugaugaaaucaacaaagaugauuacuugcuaccaggagugaaguuggguguucacauuuuggauacauguucaagggauaccuaugcauuggagcaaucacuggaguuugucagggcaucuuugacaaaaguggaugaagcugaguauauguguccugauggauccuaugccauucaagaaaacaucccacuucucauugcaggggucauugguggcucuuauagcaguguuuccauacagguggcaaaccugcugcggcucuuccagaucccucagaucagcuacgcauccaccagcgccaaacucagugauaagucgcgcuaugauuacuuugccaggaccgugccccccgacuucuaccaggccaaagccauggcugagaucuugcgcuucuucaacuggaccuacguguccacaguagccuccgagggugauuacggggagacagggaucgaggccuucgagcaggaagcccgccugcgcaacaucugcaucgcuacggcggagaaggugggccgcuccaacauccgcaaguccuacgacagcgugauccgagaacuguugcagaagcccaacgcgcgcgucgugguccucuucaugcgcagcgacgacucgcgggagcucauugcagccgccagccgcgccaaugccuccuucaccuggguggccagcgacggcuggggcgcgcaggagagcaucaucaagggcagcgagcauguggccuacggcgccaucacccuggagcuggccucccagccuguccgccaguucgaccgcuacuuccagagccucaaccccuacaacaaccaccgcaaccccugguuccgggacuucugggagcaaaaguuucagugcagccuccagaacaaacgcaaccacaggcgcgucugcgacaagcaccuggccaucgacagcagcaacuacgagcaagaguccaagaucauguuuguggugaacgcgguguaugccauggcccacgcuuugcacaaaaugcagcgcacccucugucccaacacuaccaagcuuugugaugcuaugaagauccuggaugggaagaaguuguacaaggauuacuugcugaaaaucaacuucacggcuccauucaacccaaauaaagaugcagauagcauagucaaguuugacacuuuuggagauggaauggggcgauacaacguguucaauuuccaaaauguagguggaaaguauuccuacuugaaaguuggucacugggcagaaaccuuaucgcuagaugucaacucuauccacuggucccggaacucaguccccacuucccagugcagcgaccccugugcccccaaugaaaugaagaauaugcaaccaggggaugucugcugcuggauuugcauccccugugaacccuacgaauaccuggcugaugaguuuaccuguauggauugugggucuggacaguggcccacugcagaccuaacuggaugcuaugaccuuccugaggacuacaucaggugggaagacgccugggccauuggcccagucaccauugccugucuggguuuuauguguacaugcaugguuguaacuguuuuuaucaagcacaacaacacacccuuggucaaagcaucgggccgagaacucugcuacaucuuauuguuugggguuggccugucauacugcaugacauucuucuucauugccaagccaucaccagucaucugugcauugcgccgacucgggcuggggaguuccuucgcuaucuguuacucagcccugcugaccaagacaaacugcauugcccgcaucuucgauggggucaagaauggcgcucagaggccaaaauucaucagccccaguucucagguuuucaucugccugggucugauccuggugcaaauugugauggugucuguguggcucauccuggaggccccaggcaccaggagguauacccuugcagagaagcgggaaacagucauccuaaaaugcaaugucaaagauuccagcauguugaucucucuuaccuacgaugugauccuggugaucuuaugcacuguguacgccuucaaaacgcggaagugcccagaaaauuucaacgaagcuaaguucauagguuuuaccauguacaccacgugcaucaucugguuggccuuccucccuauauuuuaugugacaucaagugacuacagagugcagacgacaaccaugugcaucucugucagccugaguggcuuuguggucuugggcuguuuguuugcacccaagguucacaucauccuguuucaaccccagaagaauguugucacacacagacugcaccucaacagguucagugucaguggaacugggaccacauacucucaguccucugcaagcacguaugugccaacggugugcaaugggcgggaaguccucgacuccaccaccucaucucuguga

SEQ ID NO: 717 - RNA, 1947 nt, Artificial Sequence
  CCDS4977.1
augucccaccacggaggagcucccaaggccucuacgugggucguugcuagucggcgaagcucgacagugucccgagcgccagagaggaggccggcggaggaguugaaucgaacagguccugagggauauagugucggcagagguggucgcuggagaggcaccucuaggcccccggaggccguggccgcuggucacgaggaacugccgcuguguuuugcuuugaagagccacuuuguuggcgcgguaaucggucguggugggucaaaaauaaagaauauacaaaguacaacaaacaccacaauccaaauaauacaagaacaaccagaaucauuagucaaaauuuuuggcagcaaggcaaugcaaacgaaagcaaaagcagugauagacaauuuuguuaaaaagcuagaagaaaauuacaauucagaaugcggaauugauacugcauuccaaccuucuguuggaaaagauggaagcacagauaacaauguuguugcaggagaucggccauugauagauugggaucaaauuagagaggaagguuugaaauggcaaaaaacaaagugggcagauuuaccaccaauuaagaaaaacuuuuauaaagaguccacugccacaagugccaugucaaaaguagaagcagauaguuggaggaaagaaaauuuuaauauaacgugggaugacuugaaggauggggagaaacgaccuauccccaauccuaccugcacauuugaugacgccuuucaauguuauccugagguuauggaaaacauuaaaaaggcagguuuucaaaagccaacaccuauucagucacaggcauggcccauuguguugcaaggaauagaucuuauaggaguagcccagacuggaacaggaaagacauuguguuauuuaaugccuggauuuauucaucugguccuucaacccagccuuaaaggucaaaggaauagacccggcauguuaguucuaacucccacucgggaauuagcacuucaaguagaaggagaauguugcaaauauucauauaaagggcuucggaguguuuguguauauggugguggaaauagagaugaacaaauagaagagcuuaaaaaagguguagauaucauaauugcaacucccggaagauugaaugaucugcaaaugaguaacuucgucaaucugaagaauauaaccuacuugguuuuagaugaagcagacaagauguuggacaugggauuugaaccccagauaaugaagauuuuguuagaugugcgcccagauaggcagacaguuaugaccagugcuacauggccucauucaguucaucgccucgcacaaucuuauuugaaagaaccaaugauugucuauguugguacauuggaucuaguugcuguaaguucagugaagcaaaauauaauuguaaccaccgaggaagagaaauggagucacaugcaaacuuuucuacagaguaugucauccacagacaaagucauugucuucguuucucgaaaagcuguugcggaucacuuaucaagugaccuaauacuuggaaauauaucaguagagucucugcauggagauagagaacagagagaucgggagaaagcauuagagaacuuuaaaacaggcaaagugagaauacuaauugcaacugaucuagccucuagaggacuugauguccaugacguuacacaugucuauaauuuugacuuuccacggaauauugaagaauacguacaccgaauagggcgcacgggaagagcagggaggacugguguuuccauuacaacuuugacuagaaaugauuggaggguugccucugaauugauuaauauucuggaaagagcaaaucagaguauuccagaggagcuuguaucaauggcugagagguuuaaggcacaucaacagaaaagggaaauggaaagaaaaauggaaagaccucaaggaaggcccaagaaguuucauuaa

SEQ ID NO: 718 - RNA, 1209 nt, Artificial Sequence
  ACD02430
auggcgcagaaggaggguggccggacugugccaugcugcuccagacccaagguggcagcucucacugcggggacccugcuacuucugacagccaucggggcggcauccugggccauuguggcuguucuccucaggagugaccaggagccgcuguacccagugcaggucagcucugcggacgcucggcucauggucuuugacaagacggaagggacguggcggcugcugugcuccucgcgcuccaacgccaggguagccggacucagcugcgaggagaugggcuuccucagggcacugacccacuccgagcuggacgugcgaacggcgggcgccaauggcacgucgggcuucuucuguguggacgaggggaggcugccccacacccagaggcugcuggaggucaucuccgugugugauugccccagaggccguuucuuggccgccaucugccaagacuguggccgcaggaagcugcccguggaccgcaucgugggaggccgggacaccagcuugggccgguggccguggcaagucagccuucgcuaugauggagcacaccucugugggggaucccugcucuccggggacugggugcugacagccgcccacugcuucccggagcggaaccggguccugucccgauggcgaguguuugccggugccguggcccaggccucuccccacggucugcagcugggggugcaggcuguggucuaccacgggggcuaucuucccuuucgggaccccaacagcgaggagaacagcaacgauauugcccugguccaccucuccaguccccugccccucacagaauacauccagccugugugccucccagcugccggccaggcccugguggauggcaagaucuguaccgugacgggcuggggcaacacgcaguacuauggccaacaggccgggguacuccaggaggcucgaguccccauaaucagcaaugaugucugcaauggcgcugacuucuauggaaaccagaucaagcccaagauguucugugcuggcuaccccgaggguggcauugaugccugccagggcgacagcgguggucccuuugugugugaggacagcaucucucggacgccacguuggcggcuguguggcauugugaguuggggcacuggcugugcccuggcccagaagccaggcgucuacaccaaagucagugacuuccgggaguggaucuuccaguga

SEQ ID NO: 719 - RNA, 1254 nt, Artificial Sequence
  AAA36013
auggcgcagaaggaggguggccggacugugccaugcugcuccagacccaagguggcagcucucacugcggggacccugcuacuucugacagccaucggggcggcauccugggccauuguggcuguucuccucaggagugaccaggagccgcuguacccagugcaggucagcucugcggacgcucggcucauggucuuugacaagacggaagggacguggcggcugcugugcuccucgcgcuccaacgccaggguagccggacucagcugcgaggagaugggcuuccucagggcacugacccacuccgagcuggacgugcgaacggcgggcgccaauggcacgucgggcuucuucuguguggacgaggggaggcugccccacacccagaggcugcuggaggucaucuccgugugugauugccccagaggccguuucuuggccgccaucugccaagacuguggccgcaggaagcugcccguggaccgcaucgugggaggccgggacaccagcuugggccgguggccguggcaagucagccuucgcuaugauggagcacaccucugugggggaucccugcucuccggggacugggugcugacagccgcccacugcuucccggagcggaaccggguccugucccgauggcgaguguuugccggugccguggcccaggccucuccccacggucugcagcugggggugcaggcuguggucuaccacgggggcuaucuucccuuucgggaccccaacagcgaggagaacagcaacgauauugcccugguccaccucuccaguccccugccccucacagaauacauccagccugugugccucccagcugccggccaggcccugguggauggcaagaucuguaccgugacgggcuggggcaacacgcaguacuauggccaacaggccgggguacuccaggaggcucgaguccccauaaucagcaaugaugucugcaauggcgcugacuucuauggaaaccagaucaagcccaagauguucugugcuggcuaccccgaggguggcauugaugccugccagggcgacagcgguggucccuuugugugugaggacagcaucucucggacgccacguuggcggcuguguggcauugugaguuggggcacuggcugugcccuggcccagaagccaggcgucuacaccaaagucagugacuuccgggaguggaucuuccaggccauaaagacucacuccgaagccagcggcauggugacccagcucuga

SEQ ID NO: 720 - RNA, 2940 nt, Artificial Sequence
  BAG62073
auggagcuggcggccuugugccgcugggggcuccuccucgcccucuugccccccggagccgcgagcacccaagacaacuaccuuucuacggacgugggauccugcacccucgucugcccccugcacaaccaagaggugacagcagaggauggaacacagcggugugagaagugcagcaagcccugugcccgagugugcuauggucugggcauggagcacuugcgagaggugagggcaguuaccagugccaauauccaggaguuugcuggcugcaagaagaucuuugggagccuggcauuucugccggagagcuuugauggggacccagccuccaacacugccccgcuccagccagagcagcuccaaguguuugagacucuggaagagaucacagguuaccuauacaucucagcauggccggacagccugccugaccucagcgucuuccagaaccugcaaguaauccggggacgaauucugcacaauggcgccuacucgcugacccugcaagggcugggcaucagcuggcuggggcugcgcucacugagggaacugggcaguggacuggcccucauccaccauaacacccaccucugcuucgugcacacggugcccugggaccagcucuuucggaacccgcaccaagcucugcuccacacugccaaccggccagaggacgagugugugggcgagggccuggccugccaccagcugugcgcccgagggcacugcugggguccagggcccacccagugugucaacugcagccaguuccuucggggccaggagugcguggaggaaugccgaguacugcaggggcuccccagggaguaugugaaugccaggcacuguuugccgugccacccugagugucagccccagaauggcucagugaccuguuuuggaccggaggcugaccaguguguggccugugcccacuauaaggacccucccuucugcguggcccgcugccccagcggugugaaaccugaccucuccuacaugcccaucuggaaguuuccagaugaggagggcgcaugccagccuugccccaucaacugcacccacuccuguguggaccuggaugacaagggcugccccgccgagcagagagccagcccucugacguccaucaucucugcggugguuggcauucugcuggucguggucuuggggguggucuuugggauccucaucaagcgacggcagcagaagauccggaaguacacgaugcggagacugcugcaggaaacggagcugguggagccgcugacaccuagcggagcgaugcccaaccaggcgcagaugcggauccugaaagagacggagcugaggaaggugaaggugcuuggaucuggcgcuuuuggcacagucuacaagggcaucuggaucccugauggggagaaugugaaaauuccaguggccaucaaaguguugagggaaaacacaucccccaaagccaacaaagaaaucuuagacgaagcauacgugauggcuggugugggcuccccauaugucucccgccuucugggcaucugccugacauccacggugcagcuggugacacagcuuaugcccuauggcugccucuuagaccauguccgggaaaaccgcggacgccugggcucccaggaccugcugaacugguguaugcagauugccaaggggaugagcuaccuggaggaugugcggcucguacacagggacuuggccgcucggaacgugcuggucaagagucccaaccaugucaaaauuacagacuucgggcuggcucggcugcuggacauugacgagacagaguaccaugcagaugggggcaaggugcccaucaaguggauggcgcuggaguccauucuccgccggcgguucacccaccagagugauguguggaguuauggugugacugugugggagcugaugacuuuuggggccaaaccuuacgaugggaucccagcccgggagaucccugaccugcuggaaaagggggagcggcugccccagccccccaucugcaccauugaugucuacaugaucauggucaaauguuggaugauugacucugaaugucggccaagauuccgggaguuggugucugaauucucccgcauggccagggacccccagcgcuuuguggucauccagaaugaggacuugggcccagccagucccuuggacagcaccuucuaccgcucacugcuggaggacgaugacaugggggaccugguggaugcugaggaguaucugguaccccagcagggcuucuucuguccagacccugccccgggcgcugggggcaugguccaccacaggcaccgcagcucaucuaccaggaguggcgguggggaccugacacuagggcuggagcccucugaagaggaggcccccaggucuccacuggcacccuccgaaggggcuggcuccgauguauuugauggugaccugggaaugggggcagccaaggggcugcaaagccuccccacacaugaccccagcccucuacagcgguacagugaggaccccacaguaccccugcccucugagacugauggcuacguugccccccugaccugcagcccccagccugaauaugugaaccagccagauguucggccccagcccccuucgccccgagagggcccucugccugcugcccgaccugcuggugccacucuggaaaggcccaagacucucuccccagggaagaauggggucgucaaagacguuuuugccuuugggggugccguggagaaccccgaguacuugacaccccagggaggagcugccccucagccccacccuccuccugccuucagcccagccuucgacaaccucuauuacugggaccaggacccaccagagcggggggcuccacccagcaccuucaaagggacaccuacggcagagaacccagaguaccugggucuggacgugccaguguga

SEQ ID NO: 721 - RNA, 264 nt, Artificial Sequence
  CCQ43016
augaugaggaugaaaaccuuugugaugauccacuuccacuuaaugaaugguggcaaagcaaagcuauauucaagaccacaugcaaagcuacucccugagcaaagagucacagauaaaacgggggcaccaguagaauggccaggacaaacgcagugcagcacagagacucagacccuggcagccaugccugcgcaggcagugaugagagugacauguacuguuguggacaugcacaaaagugagugugcaccggcacagacauga

SEQ ID NO: 722 - RNA, 3768 nt, Artificial Sequence
  AAI67147
auggagcuggcggccuugugccgcugggggcuccuccucgcccucuugccccccggagccgcgagcacccaagugugcaccggcacagacaugaagcugcggcucccugccagucccgagacccaccuggacaugcuccgccaccucuaccagggcugccagguggugcagggaaaccuggaacucaccuaccugcccaccaaugccagccuguccuuccugcaggauauccaggaggugcagggcuacgugcucaucgcucacaaccaagugaggcaggucccacugcagaggcugcggauugugcgaggcacccagcucuuugaggacaacuaugcccuggccgugcuagacaauggagacccgcugaacaauaccaccccugucacaggggccuccccaggaggccugcgggagcugcagcuucgaagccucacagagaucuugaaaggaggggucuugauccagcggaacccccagcucugcuaccaggacacgauuuuguggaaggacaucuuccacaagaacaaccagcuggcucucacacugauagacaccaaccgcucucgggccugccaccccuguucuccgauguguaagggcucccgcugcuggggagagaguucugaggauugucagagccugacgcgcacugucugugccgguggcugugcccgcugcaaggggccacugcccacugacugcugccaugagcagugugcugccggcugcacgggccccaagcacucugacugccuggccugccuccacuucaaccacaguggcaucugugagcugcacugcccagcccuggucaccuacaacacagacacguuugaguccaugcccaaucccgagggccgguauacauucggcgccagcugugugacugccugucccuacaacuaccuuucuacggacgugggauccugcacccucgucugcccccugcacaaccaagaggugacagcagaggauggaacacagcggugugagaagugcagcaagcccugugcccgagugugcuauggucugggcauggagcacuugcgagaggugagggcaguuaccagugccaauauccaggaguuugcuggcugcaagaagaucuuugggagccuggcauuucugccggagagcuuugauggggacccagccuccaacacugccccgcuccagccagagcagcuccaaguguuugagacucuggaagagaucacagguuaccuauacaucucagcauggccggacagccugccugaccucagcgucuuccagaaccugcaaguaauccggggacgaauucugcacaauggcgccuacucgcugacccugcaagggcugggcaucagcuggcuggggcugcgcucacugagggaacugggcaguggacuggcccucauccaccauaacacccaccucugcuucgugcacacggugcccugggaccagcucuuucggaacccgcaccaagcucugcuccacacugccaaccggccagaggacgagugugugggcgagggccuggccugccaccagcugugcgcccgagggcacugcugggguccagggcccacccagugugucaacugcagccaguuccuucggggccaggagugcguggaggaaugccgaguacugcaggggcuccccagggaguaugugaaugccaggcacuguuugccgugccacccugagugucagccccagaauggcucagugaccuguuuuggaccggaggcugaccaguguguggccugugcccacuauaaggacccucccuucugcguggcccgcugccccagcggugugaaaccugaccucuccuacaugcccaucuggaaguuuccagaugaggagggcgcaugccagccuugccccaucaacugcacccacuccuguguggaccuggaugacaagggcugccccgccgagcagagagccagcccucugacguccaucaucucugcggugguuggcauucugcuggucguggucuuggggguggucuuugggauccucaucaagcgacggcagcagaagauccggaaguacacgaugcggagacugcugcaggaaacggagcugguggagccgcugacaccuagcggagcgaugcccaaccaggcgcagaugcggauccugaaagagacggagcugaggaaggugaaggugcuuggaucuggcgcuuuuggcacagucuacaagggcaucuggaucccugauggggagaaugugaaaauuccaguggccaucaaaguguugagggaaaacacaucccccaaagccaacaaagaaaucuuagacgaagcauacgugauggcuggugugggcuccccauaugucucccgccuucugggcaucugccugacauccacggugcagcuggugacacagcuuaugcccuauggcugccucuuagaccauguccgggaaaaccgcggacgccugggcucccaggaccugcugaacugguguaugcagauugccaaggggaugagcuaccuggaggaugugcggcucguacacagggacuuggccgcucggaacgugcuggucaagagucccaaccaugucaaaauuacagacuucgggcuggcucggcugcuggacauugacgagacagaguaccaugcagaugggggcaaggugcccaucaaguggauggcgcuggaguccauucuccgccggcgguucacccaccagagugauguguggaguuauggugugacugugugggagcugaugacuuuuggggccaaaccuuacgaugggaucccagcccgggagaucccugaccugcuggaaaagggggagcggcugccccagccccccaucugcaccauugaugucuacaugaucauggucaaauguuggaugauugacucugaaugucggccaagauuccgggaguuggugucugaauucucccgcauggccagggacccccagcgcuuuguggucauccagaaugaggacuugggcccagccagucccuuggacagcaccuucuaccgcucacugcuggaggacgaugacaugggggaccugguggaugcugaggaguaucugguaccccagcagggcuucuucuguccagacccugccccgggcgcugggggcaugguccaccacaggcaccgcagcucaucuaccaggaguggcgguggggaccugacacuagggcuggagcccucugaagaggaggcccccaggucuccacuggcacccuccgaaggggcuggcuccgauguauuugauggugaccugggaaugggggcagccaaggggcugcaaagccuccccacacaugaccccagcccucuacagcgguacagugaggaccccacaguaccccugcccucugagacugauggcuacguugccccccugaccugcagcccccagccugaauaugugaaccagccagauguucggccccagcccccuucgccccgagagggcccucugccugcugcccgaccugcuggugccacucuggaaaggcccaagacucucuccccagggaagaauggggucgucaaagacguuuuugccuuugggggugccguggagaaccccgaguacuugacaccccagggaggagcugccccucagccccacccuccuccugccuucagcccagccuucgacaaccucuauuacugggaccaggacccaccagagcggggggcuccacccagcaccuucaaagggacaccuacggcagagaacccagaguaccugggucuggacgugccaguguga

SEQ ID NO: 723 - RNA, 1260 nt, Artificial Sequence
  AAD56009
auggagcuggcggccuugugccgcugggggcuccuccucgcccucuugccccccggagccgcgagcacccaagugugcaccggcacagacaugaagcugcggcucccugccagucccgagacccaccuggacaugcuccgccaccucuaccagggaugccagguggugcagggaaaccuggaacucaccuaccugcccaccaaugccagccuguccuuccugcaggauauccaggaggugcagggcuacgugcucaucgcucacaaccaagugaggcaggucccacugcagaggcugcggauugugcgaggcacccagcucuuugaggacaacuaugcccuggccgugcuagacaauggagacccgcugaacaauaccaccccugucacaggggccuccccaggaggccugcgggagcugcagcuucgaagccucacagagaucuugaaaggaggggucuugauccagcggaacccccagcucugcuaccaggacacgauuuuguggaaggacaucuuccacaagaacaaccagcuggcucucacacugauagacaccaaccgcucucgggccugccaccccugcucuccgauguguaagggcucccgcugcuggggagagaguucugaggauugucagagccugacgcgcacugucugugccgguggcugugcccgcugcaaggggccacugcccacugacugcugccaugagcagugugcugccggcugcacgggccccaagcacucugacugccuggccugccuccacuucaaccacaguggcaucugugagcugcacugcccagcccuggucaccuacaacacagacacguuugaguccaugcccaaucccgagggccgguauacauucggcgccagcugugucacugccugucccuacaacuaccuuucuacggacgugggauccugcacccucgucugcccccugcacaaccaagaggugacagcagaggauggaacacagcggugugagaagugcagcaagcccugugcccgagguacccacucacugcccccgaggccagcugcaguuccugucccucugcgcaugcagccuggcccagcccacccuguccuauccuuccucagacccucuugggaccuagucucugccuucuacucucuaccccuggccccccucagcccuacaagugucccuauauccccugucaguguggggaggggcccggacccugaugcucauguggcuguugaccugucccgguaugaaggcuga

SEQ ID NO: 724 - RNA, 546 nt, Artificial Sequence
  U70863.1
ggcucucacuccaugagguauuucuucacauccgugucccggcccggccgcggggagccccgcuucaucgcagugggcuacguggacgacacgcaguucgugcgguucgacagcgacgccgcgagccagaggauggagccgcgggcgccguggauagagcaggaggguccggaguauugggacggggagacacggaaagugaaggcccacucacagacucaccgaguggaccuggggacccugcgcggcuacuacaaccagagcgaggccgguucucacaccguccagaggauguauggcugcgacguggggucggacuggcgcuuccuccgcggguaccaccaguacgccuacgacggcaaggauuacaucgcccugaaagaggaccugcgcucuuggaccgcggcggacauggcagcucagaccaccaagcacaagugggagacggcccauguggcggagcaguugagagccuaccuggagggcacgugcguggaguggcuccgcagauaccuggagaacgggaaggagacgcugcagcgcacg

SEQ ID NO: 725 - RNA, 543 nt, Artificial Sequence
  AH009136.2
ucucacuccaugagguauuucuucacauccgugucccggcccggccgcggggagccccgcuucaucgcagugggcuacguggacgacacgcaguucgugcgguucgacagcgacgccgcgagccagaggauggagccgcgggcgccguggauagagcaggaggguccggaguauugggacggggagacacggaaagugaaggcccacucacagacucaccgaguggaccuggggacccugcgcggcuacuacaaccagagcgaggccgguucucacaccguccagaggauguauggcugcgacguggggucggacuggcgcuuccuccgcggguaccaccaguacgccuacgacggcaaggauuacaucgcccugaaagaagaccugcgcucuuggaccgcggcggacauggcagcucagaccaccaagcacaagugggaggcggcccauguggcggagcaguugagagccuaccuggagggcacgugcguggaguggcuccgcagauaccuggagaacgggaaggagacgcugcagcgcacg

SEQ ID NO: 726 - RNA, 705 nt, Artificial Sequence
  AAG09781
augcucaggguuccggagccgcggcccggggaggcgaaagcggagggggccgcgccgccgaccccguccaagccgcucacguccuuccucauccaggacauccugcgggacggcgcgcagcggcaaggcggccgcacgagcagccagagacagcgcgacccggagccggagccagagccagagccagagggaggacgcagccgcgccggggcgcagaacgaccagcugagcaccgggccccgcgccgcgccggaggaggccgagacgcuggcagagaccgagccagaaaggcacuuggggucuuaucuguuggacucugaaaacacuucaggcgcccuuccaaggcuuccccaaaccccuaagcagccgcagaagcgcucccgagcugccuucucccacacucaggugaucgaguuggagaggaaguucagccaucagaaguaccugucagccccugaacgggcccaccuggccaagaaccucaagcucacggagacccaagugaagauaugguuccagaacagacgcuauaagacuaagcgaaagcagcucuccucggagcugggagacuuggagaagcacuccucuuugccggcccugaaagaggaggccuucucccgggccucccuggucuccguguauaacagcuauccuuacuacccauaccuguacugcgugggcagcuggagcccagcuuuuugguaa

SEQ ID NO: 727 - RNA, 942 nt, Artificial Sequence
  BAG37303
auggcuucguuucggaagcuaacgcuuucugaaaaagugccgccaaaucaucccagucggaaaaagguuaacuuccuagauaugucucuagacgacauuauaaucuauaaagaguuagaagggacaaaugcugaagaagaaaagaauaaaagacagaaccauaguaaaaaggaaucgccuucaagacagcaaucaaaagcucauagacaucgccaucggagagacuacucaagaugcagaagcaacucugaggaaggaaaucaugauaaaaaaccaucccaaaaaccuucuggauucaagucuggacaacacccuuuaaaugggcagccuuuaauugagcaggagaagugcagugacaauuaugaggcccaagcagagaagaaucaaggccagucagaggggaaccagcaucaaucagaaggaaauccggacaaaucagaagaaucccagggccaaccagaagaaaaucaucauucugagcgaucccgaaaccacuuagagagaucucuuucucagucagacagaucucaagggcagcuaaagagacaucauccccaauaugagagaucucauggccaauacaagagaucucauggucagucugagagaucucauggccacucagagagaucucauggucacucagagagaucucauggucacucagagagaucucauggucacucaaagagaucucguagccagggagaucuuguggacacucagagugaucucauagccacucagagagaucucauagccacucagaaagaucucauagccacucagagagaucucauagccacucagagagaucucauagucacucagagagaucucguggccacugagagagaucucauaaaucagucagggagaucucauggccaaucagaaagacaucagagauacucaacagguaaaaauacaauaacuacuuaa

SEQ ID NO: 728 - RNA, 942 nt, Artificial Sequence
  AAI28135
auggcuucguuucggaagcuaacgcuuucugaaaaagugccgccaaaucaucccagucggaaaaagguuaacuuccuagauaugucucuagacgacauuauaaucuauaaagaguuagaagggacaaaugcugaagaagaaaagaauaaaagacagaaccauaguaaaaaggaaucgccuucaagacagcaaucaaaagcucauagacaucgccaucggagaggcuacucaagaugcagaagcaacucugaggaaggaaaucaugauaaaaaaccaucccaaaaaccuucuggauucaagucuggacaacacccuuuaaaugggcagccuuuaauugagcaggagaagugcagugacaauuaugaggcccaagcagagaagaaucaaggccagucagaggggaaccagcaucaaucagaaggaaauccggacaaaucagaagaaucccagggccaaccagaagaaaaucaucauucugagcgaucccgaaaccacuuagagagaucucuuucucagucagacagaucucaagggcagcuaaagagacaucauccccaauaugagagaucucauggccaauacaagagaucucauggucaaucugagagaucucauggccacucagagagaucucauggucacucagagagaucucauggucacucagagagaucucauggucacucaaagagaucucguagccagggagaucuuguggacacucagagugaucucauagccacucagagagaucucauagccacucagaaagaucucauagccacucagagagaucucauagccacucagagagaucucauagucacucagagagaucucguggccacugagagagaucucauaaaucagucagggagaucucauggccaaucagaaagacaucagagauacucaacagguaaaaauacaauaacuacuuaa

SEQ ID NO: 729 - RNA, 384 nt, Artificial Sequence
  12543784
augauaaaaaaaaaucuuaaaaaacuggguauagaagaaacauaccuuaacauaauaaaagccauauaugacagacccacagcuaguauacaaaaaacugaaaaccuuuccacuaaaacuggaacaagccaagaauaccaccugucaccacugugguucuacauaguacuggaaauccuagcuagcacaaucagacaagagaaaaauuuaaaggacauccacacugaaaaagaagaagucaaauuauccuuguuugcugaugcuaugaucuuauauuugaaaaaaccuaaugacuccacaagaaaauuauuagaacugauaaaaaaaauucauucaaguugcaggauaaaaaucaauauacauuuugcauuuuguucacaauga

SEQ ID NO: 730 - RNA, 1926 nt, Artificial Sequence
  AAA63226
auggccaaagccgcggcgaucggcaucgaccugggcaccaccuacuccugcguggggguguuccaacacggcaagguggagaucaucgccaacgaccagggcaaccgcaccacccccagcuacguggccuucacggacaccgagcggcucaucggggaugcggccaagaaccagguggcgcugaacccgcagaacaccguguuugacgcgaagcgccugauuggccgcaaguucggcgacccgguggugcagucggacaugaagcacuggccuuuccaggugaucaacgacggagacaagcccaaggugcaggugagcuacaagggggagaccaaggcauucuaccccgaggagaucucguccauggugcugaccaagaugaaggagaucgccgaggcguaccugggcuacccggugaccaacgcggugaucaccgugccggccuacuucaacgacucgcagcgccaggccaccaaggaugcgggugugaucgcggggcucaacgugcugcggaucaucaacgagcccacggccgccgccaucgccuacggccuggacagaacgggcaagggggagcgcaacgugcucaucuuugaccugggcgggggcaccuucgacguguccauccugacgaucgacgacggcaucuucgaggugaaggccacggccggggacacccaccuggguggggaggacuuugacaacaggcuggugaaccacuucguggaggaguucaagagaaaacacaagaaggacaucagccagaacaagcgagccgugaggcggcugcgcaccgccugcgagagggccaagaggacccugucguccagcacccaggccagccuggagaucgacucccuguuugagggcaucgacuucuacacguccaucaccagggcgagguucgaggagcugugcuccgaccuguuccgaagcacccuggagcccguggagaaggcucugcgcgacgccaagcuggacaaggcccagauucacgaccugguccuggucgggggcuccacccgcauccccaaggugcagaagcugcugcaggacuucuucaacgggcgcgaccugaacaagagcaucaaccccgacgaggcuguggccuacggggcggcggugcaggcggccauccugaugggggacaaguccgagaacgugcaggaccugcugcugcuggacguggcuccccugucgcuggggcuggagacggccggaggcgugaugacugcccugaucaagcgcaacuccaccauccccaccaagcagacgcagaucuucaccaccuacuccgacaaccaacccggggugcugauccagguguacgagggcgagagggccaugacgaaagacaacaaucuguuggggcgcuucgagcugagcggcaucccuccggcccccaggggcgugccccagaucgaggugaccuucgacaucgaugccaacggcauccugaacgucacggccacggacaagagcaccggcaaggccaacaagaucaccaucaccaacgacaagggccgccugagcaaggaggagaucgagcgcauggugcaggaggcggagaaguacaaagcggaggacgaggugcagcgcgagagggugucagccaagaacgcccuggaguccuacgccuucaacaugaagagcgccguggaggaugaggggcucaagggcaagaucagcgaggccgacaagaagaaggugcuggacaagugucaagaggucaucucguggcuggacgccaacaccuuggccgagaaggacgaguuugagcacaagaggaaggagcuggagcagguguguaaccccaucaucagcggacuguaccagggugccgguggucccgggccugggggcuucggggcucagggucccaagggagggucugggucaggccccaccauugaggagguagauuag

SEQ ID NO: 731 - RNA, 1926 nt, Artificial Sequence
  AAA63227
auggccaaagccgcggcgaucggcaucgaccugggcaccaccuacuccugcguggggguguuccaacacggcaagguggagaucaucgccaacgaccagggcaaccgcaccacccccagcuacguggccuucacggacaccgagcggcucaucggggaugcggccaagaaccagguggcgcugaacccgcagaacaccguguuugacgcgaagcgccugaucggccgcaaguucggcgacccgguggugcagucggacaugaagcacuggccuuuccaggugaucaacgacggagacaagcccaaggugcaggugagcuacaagggggagaccaaggcauucuaccccgaggagaucucguccauggugcugaccaagaugaaggagaucgccgaggcguaccugggcuacccggugaccaacgcggugaucaccgugccggccuacuucaacgacucgcagcgccaggccaccaaggaugcgggugugaucgcggggcucaacgugcugcggaucaucaacgagcccacggccgccgccaucgccuacggccuggacagaacgggcaagggggagcgcaacguccugaucuuugaccugggcgggggcaccuucgacguguccauccugacgaucgacgacggcaucuucgaggugaaggccacggccggggacacccaccuggguggggaggacuuugacaacaggcuggugaaccacuucguggaggaguucaagagaaaacacaagaaggacaucagccagaacaagcgagccgugaggcggcugcgcaccgccugcgagagggccaagaggacccugucguccagcacccaggccagccuggagaucgacucccuguuugagggcaucgacuucuacacguccaucaccagggcgagguucgaggagcugugcuccgaccuguuccgaagcacccuggagcccguggagaaggcucugcgcgacgccaagcuggacaaggcccagauucacgaccugguccuggucgggggcuccacccgcauccccaaggugcagaagcugcugcaagacuucuucaacgggcgcgaccugaacaagagcaucaaccccgacgaggcuguggccuacggggcggcggugcaggcggccauccugaugggggacaaguccgagaacgugcaggaccugcugcugcuggacguggcuccccugucgcuggggcuggagacggccggaggcgugaugacugcccugaucaagcgcaacuccaccauccccaccaagcagacgcagaucuucaccaccuacuccgacaaccaacccggggugcugauccagguguacgagggcgagagggccaugacgaaagacaacaaucuguuggggcgcuucgagcugagcggcaucccuccggcccccaggggcgugccccagaucgaggugaccuucgacaucgaugccaacggcauccugaacgucacggccacggacaagagcaccggcaaggccaacaagaucaccaucaccaacgacaagggccgccugagcaaggaggagaucgagcgcauggugcaggaggcggagaaguacaaagcggaggacgaggugcagcgcgagagggugucagccaagaacgcccuggaguccuacgccuucaacaugaagagcgccguggaggaugaggggcucaagggcaagaucagcgaggccgacaagaagaagguucuggacaagugucaagaggucaucucguggcuggacgccaacaccuuggccgagaaggacgaguuugagcacaagaggaaggagcuggagcagguguguaaccccaucaucagcggacuguaccagggugccgguggucccgggccuggcggcuucggggcucagggucccaagggagggucugggucaggcccuaccauugaggagguggauuag

SEQ ID NO: 732 - RNA, 627 nt, Artificial Sequence
  AAI21098
auggcccugggacagaaacuguucaucacuaugucccggggagcaggacgucugcagggcacgcugugggcucucgucuuccuaggcauccuagugggcaugguggugcccucgccugcaggcacccgugccaacaacacgcugcuggacucgaggggcuggggcacccugcuguccaggucucgcgcggggcuagcuggagagauugccggggugaacugggaaaguggcuauuugguggggaucaagcggcagcggaggcucuacugcaacgugggcaucggcuuucaccuccaggugcuccccgacggccggaucagcggaacccacgaggagaaccccuacagccugcuggaaauuuccaccguggagcgaggcguggugagucucuuuggagugagaagugcccucuucgucgccaugaacaguaaaggaagauuguacgcaacgcccagcuuccaagaagaaugcaaguucagagaaacccuccugcccaacaauuacaaugccuacgagucagacuuguaccaagggaccuacauugcccugagcaaauacggacggguaaagcggggcagcaagguguccccgaucaugacugucacucauuuccuucccaggaucuaa

SEQ ID NO: 733 - RNA, 1569 nt, Artificial Sequence
  BAA74724
augccgcgcgcuccccgcugccgagccgugcgcucccugcugcgcagccacuaccgcgaggugcugccgcuggccacguucgugcggcgccuggggccccagggcuggcggcuggugcagcgcggggacccggcggcuuuccgcgcgcugguggcccagugccuggugugcgugcccugggacgcacggccgccccccgccgcccccuccuuccgccagguguccugccugaaggagcugguggcccgagugcugcagaggcugugcgagcgcggcgcgaagaacgugcuggccuucggcuucgcgcugcuggacggggcccgcgggggcccccccgaggccuucaccaccagcgugcgcagcuaccugcccaacacggugaccgacgcacugcgggggagcggggcgugggggcugcuguugcgccgcgugggcgacgacgugcugguucaccugcuggcacgcugcgcgcucuuugugcugguggcucccagcugcgccuaccaggugugcgggccgccgcuguaccagcucggcgcugccacucaggcccggcccccgccacacgcuaguggaccccgaaggcgucugggaugcgaacgggccuggaaccauagcgucagggaggccggggucccccugggccugccagccccgggugcgaggaggcgcgggggcagugccagccgaagucugccguugcccaagaggcccaggcguggcgcugccccugagccggagcggacgcccguugggcagggguccugggcccacccgggcaggacgcguggaccgagugaccgugguuucuguguggugucaccugccagacccgccgaagaagccaccucuuuggagggugcgcucucuggcacgcgccacucccacccauccgugggccgccagcaccacgcgggccccccauccacaucgcggccaccacgucccugggacacgccuugucccccgguguacgccgagaccaagcacuuccucuacuccucaggcgacaaggagcagcugcggcccuccuuccuacucagcucucugaggcccauccugacuggcgcucggaggcucguggagaccaucuuucuggguuccagcccuggaugccagggacuccccgcagguugccccgccugccccagcgcuacuggcaaaugcggccccuguuucuggagcugcuugggaaccacgcgcagugccccuacggggugcuccucaagacgcacugcccgcugcgagcugcggucaccccagcagccggugucugugcccgggagaagccccagggcucuguggcggcccccgaggaggaggacacagacccccgucgccuggugcagcugcuccgccagcacagcaccccuggcagguguacggcuucgugcgggccugccugcgccggcuggugcccccaggccucuggggcuccaggcacaacgacgccgcuuccucaggaacaccaagaaguucaucucccuggggaagcaugccaagcucucgcugcaggagcugacguggaagaugagcgugcgggacugcgcuuggcugcgcaggagccca

SEQ ID NO: 734 - RNA, 1680 nt, Artificial Sequence
  BAA23606
augcggcugcacagacuucgugcgcggcugagcgcgguggccugugggcuucugcugcuucuuguccggggccagggccaggacucagccagucccauccggaccacacacacggggcaggugcuggggagucuuguccaugugaagggcgccaaugccgggguccaaaccuuccugggaauuccauuugccaagccaccucuagguccgcugcgauuugcacccccugagcccccugaaucuuggaguggugugagggauggaaccacccauccggccaugugucuacaggaccucaccgcaguggagucagaguuucuuagccaguucaacaugaccuucccuuccgacuccaugucugaggacugccuguaccucagcaucuacacgccggcccauagccaugaaggcucuaaccugccggugaugguguggauccacgguggugcgcuuguuuuuggcauggcuuccuuguaugaugguuccaugcuggcugccuuggagaacguggugguggucaucauccaguaccgccuggguguccugggcuucuucagcacuggagacaagcacgcaaccggcaacuggggcuaccuggaccaaguggcugcacuacgcuggguccagcagaauaucgcccacuuuggaggcaacccugaccgugucaccauuuuuggcgagucugcggguggcacgagugugucuucgcuuguugugucccccauaucccaaggacucuuccacggagccaucauggagaguggcguggcccuccugcccggccucauugccagcucagcugaugucaucuccacggugguggccaaccugucugccugugaccaaguugacucugaggcccuggugggcugccugcggggcaagaguaaagaggagauucuugcaauuaacaagccuuucaagaugauccccggagugguggauggggucuuccugcccaggcacccccaggagcugcuggccucugccgacuuucagccugucccuagcauuguuggugucaacaacaaugaauucggcuggcucauccccaaggucaugaggaucuaugauacccagaaggaaauggacagagaggccucccaggcugcucugcagaaaauguuaacgcugcugauguugccuccuacauuuggugaccugcugagggaggaguacauuggggacaauggggauccccagacccuccaagcgcaguuccaggagaugauggcggacuccauguuugugaucccugcacuccaaguagcacauuuucaguguucccgggccccuguguacuucuacgaguuccagcaucagcccagcuggcucaagaacaucaggccaccgcacaugaaggcagaccauggugaugagcuuccuuuuguuuucagaaguuucuuugggggcaacuacauuaaauucacugaggaagaggagcagcuaagcaggaagaugaugaaguacugggccaacuuugcgagaaaugggaacccgaauggcgagggucugccacacuggccgcuguucgaccaggaggagcaauaccugcagcugaaccuacagccugcggugggccgggcucugaaggcccacaggcuccaguucuggaagaaggcgcugccccaaaagauccaggagcucgaggagccugaagagagacacacagagcuguag

SEQ ID NO: 735 - RNA, 1740 nt, Artificial Sequence
  AAH65269
augaacaaacuguauaucggaaaccucagcgagaacgccgcccccucggaccuagaaaguaucuucaaggacgccaagaucccggugucgggacccuuccuggugaagacuggcuacgcguucguggacugcccggacgagagcugggcccucaaggccaucgaggcgcuuucagguaaaauagaacugcacgggaaacccauagaaguugagcacucggucccaaaaaggcaaaggauucggaaacuucagauacgaaauaucccgccucauuuacagugggaggugcuggauaguuuacuaguccaguauggagugguggagagcugugagcaagugaacacugacucggaaacugcaguuguaaauguaaccuauuccaguaaggaccaagcuagacaagcacuagacaaacugaauggauuucaguuagagaauuucaccuugaaaguagccuauaucccugaugaaauggccgcccagcaaaaccccuugcagcagccccgaggucgccgggggcuugggcagaggggcuccucaaggcaggggucuccaggauccguauccaagcagaaaccaugugauuugccucugcgccugcugguucccacccaauuuguuggagccaucauaggaaaagaaggugccaccauucggaacaucaccaaacagacccagucuaaaaucgauguccaccguaaagaaaaugcgggggcugcugagaagucgauuacuauccucucuacuccugaaggcaccucugcggcuuguaagucuauucuggagauuaugcauaaggaagcucaagauauaaaauucacagaagagauccccuugaagauuuuagcucauaauaacuuuguuggacgucuuauugguaaagaaggaagaaaucuuaaaaaaauugagcaagacacagacacuaaaaucacgauaucuccauugcaggaauugacgcuguauaauccagaacgcacuauuacaguuaaaggcaauguugagacaugugccaaagcugaggaggagaucaugaagaaaaucagggagucuuaugaaaaugauauugcuucuaugaaucuucaagcacauuuaauuccuggauuaaaucugaacgccuugggucuguucccacccacuucagggaugccaccucccaccucagggcccccuucagccaugacuccucccuacccgcaguuugagcaaucagaaacggagacuguucaucuguuuaucccagcucuaucagucggugccaucaucggcaagcagggccagcacaucaagcagcuuucucgcuuugcuggagcuucaauuaagauugcuccagcagaagcaccagaugcuaaagugaggauggugauuaucacuggaccaccagaggcucaguucaaggcucagggaagaauuuauggaaaaauuaaagaagaaaacuuuguuaguccuaaagaagaggugaaacuugaagcucauaucagagugccauccuuugcugcuggcagaguuauuggaaaaggaggcaaaacggugaaugaacuucagaauuugucaagugcagaaguuguugucccucgugaccagacaccugaugagaaugaccaagugguugucaaaauaacuggucacuucuaugcuugccagguugcccagagaaaaauucaggaaauucugacucagguaaagcagcaccaacaacagaaggcucugcaaaguggaccaccucagucaagacggaaguaa

SEQ ID NO: 736 - RNA, 537 nt, Artificial Sequence
  AAA63207
augcacagcucagcacugcucuguugccugguccuccugacuggggugagggccagcccaggccagggcacccagucugagaacagcugcacccacuucccaggcaaccugccuaacaugcuucgagaucuccgagaugccuucagcagagugaagacuuucuuucaaaugaaggaucagcuggacaacuuguuguuaaaggaguccuugcuggaggacuuuaaggguuaccuggguugccaagccuugucugagaugauccaguuuuaccuggaggaggugaugccccaagcugagaaccaagacccagacaucaaggcgcaugugaacucccugggggagaaccugaagacccucaggcugaggcuacggcgcugucaucgauuucuucccugugaaaacaagagcaaggccguggagcaggugaagaaugccuuuaauaagcuccaagagaaaggcaucuacaaagccaugagugaguuugacaucuucaucaacuacauagaagccuacaugacaaugaagauacgaaacuga

SEQ ID NO: 737 - RNA, 1143 nt, Artificial Sequence
  AAB17170
auggcuuucguuugcuuggcuaucggaugcuuauauaccuuucugauaagcacaacauuuggcuguacuucaucuucagacaccgagauaaaaguuaacccuccucaggauuuugagauaguggaucccggauacuuagguuaucucuauuugcaauggcaacccccacugucucuggaucauuuuaaggaaugcacaguggaauaugaacuaaaauaccgaaacauugguagugaaacauggaagaccaucauuacuaagaaucuacauuacaaagauggguuugaucuuaacaagggcauugaagcgaagauacacacgcuuuuaccauggcaaugcacaaauggaucagaaguucaaaguuccugggcagaaacuacuuauuggauaucaccacaaggaauuccagaaacuaaaguucaggauauggauugcguauauuacaauuggcaauauuuacucuguucuuggaaaccuggcauagguguacuucuugauaccaauuacaacuuguuuuacugguaugagggcuuggaucaugcauuacaguguguugauuacaucaaggcugauggacaaaauauaggaugcagauuucccuauuuggaggcaucagacuauaaagauuucuauauuuguguuaauggaucaucagagaacaagccuaucagauccaguuauuucacuuuucagcuucaaaauauaguuaaaccuuugccgccagucuaucuuacuuuuacucgggagaguucaugugaaauuaagcugaaauggagcauaccuuugggaccuauuccagcaagguguuuugauuaugaaauugagaucagagaagaugauacuaccuuggugacugcuacaguugaaaaugaaacauacaccuugaaaacaacaaaugaaacccgacaauuaugcuuuguaguaagaagcaaagugaauauuuauugcucagaugacggaauuuggagugaguggagugauaaacaaugcugggaaggugaagaccuaucgaagaaaacuuugcuacguuucuggcuaccauuugguuucaucuuaauauuaguuauauuuguaaccggucugcuuuugcguaagccaaacaccuacccaaaaaugauuccagaauuuuucugugauacauga

SEQ ID NO: 738 - RNA, 819 nt, Artificial Sequence
  AAA67527
auggauucauaccugcugauguggggacugcucacguucaucauggugccuggcugccaggcagagcucugugacgaugacccgccagagaucccacacgccacauucaaagccauggccuacaaggaaggaaccauguugaacugugaaugcaagagagguuuccgcagaauaaaaagcgggucacucuauaugcucuguacaggaaacucuagccacucguccugggacaaccaaugucaaugcacaagcucugccacucggaacacaacgaaacaagugacaccucaaccugaagaacagaaagaaaggaaaaccacagaaaugcaaaguccaaugcagccaguggaccaagcgagccuuccaggucacugcagggaaccuccaccaugggaaaaugaagccacagagagaauuuaucauuucgugguggggcagaugguuuauuaucagugcguccagggauacagggcucuacacagagguccugcugagagcgucugcaaaaugacccacgggaagacaagguggacccagccccagcucauaugcacaggugaaauggagaccagucaguuuccaggugaagagaagccucaggcaagccccgaaggccguccugagagugagacuuccugccucgucacaacaacagauuuucaaauacagacagaaauggcugcaaccauggagacguccauauuuacaacagaguaccagguagcaguggccggcuguguuuuccugcugaucagcguccuccuccugagugggcucaccuggcagcggagacagaggaagaguagaagaacaaucuag

SEQ ID NO: 739 - RNA, 1656 nt, Artificial Sequence
  AAA59143
auggcggccccugcucuguccuggcgucugccccuccucauccuccuccugccccuggcuaccucuugggcaucugcagcggugaauggcacuucccaguucacaugcuucuacaacucgagagccaacaucuccugugucuggagccaagauggggcucugcaggacacuuccugccaaguccaugccuggccggacagacggcgguggaaccaaaccugugagcugcuccccgugagucaagcauccugggccugcaaccugauccucggagccccagauucucagaaacugaccacaguugacaucgucacccugagggugcugugccgugagggggugcgauggagggugauggccauccaggacuucaagcccuuugagaaccuucgccugauggcccccaucucccuccaaguuguccacguggagacccacagaugcaacauaagcugggaaaucucccaagccucccacuacuuugaaagacaccuggaguucgaggcccggacgcuguccccaggccacaccugggaggaggccccccugcugacucucaagcagaagcaggaauggaucugccuggagacgcucaccccagacacccaguaugaguuucaggugcgggucaagccucugcaaggcgaguucacgaccuggagccccuggagccagccccuggccuucaggacaaagccugcagcccuugggaaggacaccauuccguggcucggccaccuccucgugggccucagcggggcuuuuggcuucaucaucuuaguguacuugcugaucaacugcaggaacaccgggccauggcugaagaagguccugaaguguaacaccccagaccccucgaaguucuuuucccagcugagcucagagcauggaggagacguccagaaguggcucucuucgcccuuccccucaucguccuucagcccuggcggccuggcaccugagaucucgccacuagaagugcuggagagggacaaggugacgcagcugcuccugcagcaggacaaggugccugagcccgcauccuuaagcagcaaccacucgcugaccagcugcuucaccaaccaggguuacuucuucuuccaccucccggaugccuuggagauagaggccugccagguguacuuuacuuacgaccccuacucagaggaagacccugaugaggguguggccggggcacccacagggucuuccccccaaccccugcagccucugucaggggaggacgacgccuacugcaccuuccccuccagggaugaccugcugcucuucucccccagucuccucgguggccccagccccccaagcacugccccugggggcaguggggccggugaagagaggaugcccccuucuuugcaagaaagaguccccagagacugggacccccagccccuggggccucccaccccaggagucccagaccugguggauuuucagccacccccugagcuggugcugcgagaggcuggggaggaggucccugacgcuggccccagggagggagucaguuuccccugguccaggccuccugggcagggggaguucagggcccuuaaugcucgccugccccugaacacugaugccuacuugucccuccaagaacuccagggucaggacccaacucacuugguguag

SEQ ID NO: 740 - RNA, 1110 nt, Artificial Sequence
  AAA59145
auguugaagccaucauuaccauucacaucccucuuauuccugcagcugccccugcugggaguggggcugaacacgacaauucugacgcccaaugggaaugaagacaccacagcugauuucuuccugaccacuaugcccacugacucccucaguguuuccacucuaccccucccagagguucaguguuuuguguucaaugucgaguacaugaauugcacuuggaacagcagcucugagccccagccuaccaaccucacucugcauuauugguacaagaacucggauaaugauaaaguccagaagugcagccacuaucuauucucugaagaaaucacuucuggcugucaguugcaaaaaaaggagauccaccucuaccaaacauuuguuguucagcuccaggacccacgggaacccaggagacaggccacacagaugcuaaaacugcagaaucuggugauccccugggcuccagagaaccuaacacuucacaaacugagugaaucccagcuagaacugaacuggaacaacagauucuugaaccacuguuuggagcacuuggugcaguaccggacugacugggaccacagcuggacugaacaaucaguggauuauagacauaaguucuccuugccuaguguggaugggcagaaacgcuacacguuucguguucggagccgcuuuaacccacucuguggaagugcucagcauuggagugaauggagccacccaauccacugggggagcaauacuucaaaagagaauccuuuccuguuugcauuggaagccgugguuaucucuguuggcuccaugggauugauuaucagccuucucuguguguauuucuggcuggaacggacgaugccccgaauucccacccugaagaaccuagaggaucuuguuacugaauaccacgggaacuuuucggccuggaguggugugucuaagggacuggcugagagucugcagccagacuacagugaacgacucugccucgucagugagauucccccaaaaggaggggcccuuggggaggggccuggggccuccccaugcaaccagcauagccccuacugggcccccccauguuacacccuaaagccugaaaccuga

SEQ ID NO: 741 - RNA, 405 nt, Artificial Sequence
  AAA74469
augaggaugcuucugcauuugaguuugcuagcucuuggagcugccuacguguaugccauccccacagaaauucccacaagugcauuggugaaagagaccuuggcacugcuuucuacucaucgaacucugcugauagccaaugagacucugaggauuccuguuccuguacauaaaaaucaccaacugugcacugaagaaaucuuucagggaauaggcacacuggagagucaaacugugcaaggggguacuguggaaagacuauucaaaaacuuguccuuaauaaagaaauacauugacggccaaaaaaaaaaguguggagaagaaagacggagaguaaaccaauuccuagacuaccugcaagaguuucuugguguaaugaacaccgaguggauaauagaaaguuga

SEQ ID NO: 742 - RNA, 555 nt, Artificial Sequence
  AAH06487
auggugcggaagcuuaaguuccacgagcagaagcugcugaagcagguggacuuccugaacugggaggucaccgaccacaaccugcacgagcugcgcgugcugcggcguuaccggcugcagcggcgggaggacuacacgcgcuacaaccagcugagccgugccgugcgugagcuggcgcggcgccugcgcgaccugcccgaacgcgaccaguuccgcgugcgcgcuucggccgcgcugcuggacaagcuguaugcucucggcuuggugcccacgcgcgguucgcuggagcucugcgacuucgucacggccucguccuucugccgccgccgccuccccaccgugcuccucaagcugcgcauggcgcagcaccuucaggcugcaguggccuuuguggagcaagggcacguacgcgugggcccugacgugguuaccgaccccgccuuccuugucacgcgcagcauggaggacuuugucacuuggguggacucguccaagaucaagcggcacgugcuagaguacaaugaggagcgcgaugacuucgaucuggaagccuag

SEQ ID NO: 743 - RNA, 3150 nt, Artificial Sequence
  AAH08786
auggggagccggacgccagaguccccucuccacgccgugcagcugcgcuggggcccccggcgccgacccccgcugcugccgcugcuguugcugcugcugccgccgccacccagggucgggggcuucaacuuagacgcggaggccccagcaguacucucggggcccccgggcuccuucuucggauucucaguggaguuuuaccggccgggaacagacggggucagugugcuggugggagcacccaaggcuaauaccagccagccaggagugcugcaggguggugcugucuaccucuguccuuggggugccagccccacacagugcacccccauugaauuugacagcaaaggcucucggcuccuggaguccucacuguccagcucagagggagaggagccuguggaguacaaguccuugcagugguucggggcaacaguucgagcccauggcuccuccaucuuggcaugcgcuccacuguacagcuggcgcacagagaaggagccacugagcgaccccgugggcaccugcuaccucuccacagauaacuucacccgaauucuggaguaugcacccugccgcucagauuucagcugggcagcaggacaggguuacugccaaggaggcuucagugccgaguucaccaagacuggccgugugguuuuagguggaccaggaagcuauuucuggcaaggccagauccugucugccacucaggagcagauugcagaaucuuauuaccccgaguaccugaucaaccugguucaggggcagcugcagacucgccaggccaguuccaucuaugaugacagcuaccuaggauacucuguggcuguuggugaauucaguggugaugacacagaagacuuuguugcuggugugcccaaagggaaccucacuuacggcuaugucaccauccuuaauggcucagacauucgaucccucuacaacuucucaggggaacagauggccuccuacuuuggcuaugcaguggccgccacagacgucaauggggacgggcuggaugacuugcuggugggggcaccccugcucauggaucggaccccugacgggcggccucaggaggugggcagggucuacgucuaccugcagcacccagccggcauagagcccacgcccacccuuacccucacuggccaugaugaguuuggccgauuuggcagcuccuugaccccccugggggaccuggaccaggauggcuacaaugauguggccaucggggcucccuuugguggggagacccagcagggaguaguguuuguauuuccugggggcccaggagggcugggcucuaagccuucccagguucugcagccccugugggcagccagccacaccccagacuucuuuggcucugcccuucgaggaggccgagaccuggauggcaauggauauccugaucugauugugggguccuuugguguggacaaggcugugguauacaggggccgccccaucguguccgcuagugccucccucaccaucuuccccgccauguucaacccagaggagcggagcugcagcuuagaggggaacccuguggccugcaucaaccuuagcuucugccucaaugcuucuggaaaacacguugcugacuccauugguuucacaguggaacuucagcuggacuggcagaagcagaagggagggguacggcgggcacuguuccuggccuccaggcaggcaacccugacccagacccugcucauccagaauggggcucgagaggauugcagagagaugaagaucuaccucaggaacgagucagaauuucgagacaaacucucgccgauucacaucgcucucaacuucuccuuggacccccaagccccaguggacagccacggccucaggccagcccuacauuaucagagcaagagccggauagaggacaaggcucagaucuugcuggacuguggagaagacaacaucugugugccugaccugcagcuggaaguguuuggggagcagaaccauguguaccugggugacaagaaugcccugaaccucacuuuccaugcccagaaugugggugaggguggcgccuaugaggcugagcuucgggucaccgccccuccagaggcugaguacucaggacucgucagacacccagggaacuucuccagccugagcugugacuacuuugccgugaaccagagccgccugcuggugugugaccugggcaaccccaugaaggcaggagccagucugugggguggccuucgguuuacagucccucaucuccgggacacuaagaaaaccauccaguuugacuuccagauccucagcaagaaucucaacaacucgcaaagcgacgugguuuccuuucggcucuccguggaggcucaggcccaggucacccugaacggugucuccaagccugaggcagugcuauucccaguaagcgacuggcauccccgagaccagccucagaaggaggaggaccugggaccugcuguccaccaugucuaugagcucaucaaccaaggccccagcuccauuagccagggugugcuggaacucagcuguccccaggcucuggaaggucagcagcuccuauaugugaccagaguuacgggacucaacugcaccaccaaucaccccauuaacccaaagggccuggaguuggaucccgaggguucccugcaccaccagcaaaaacgggaagcuccaagccgcagcucugcuuccucgggaccucagauccugaaaugcccggaggcugaguguuucaggcugcgcugugagcucgggccccugcaccaacaagagagccaaagucugcaguugcauuuccgagucugggccaagacuuucuugcagcgggagcaccagccauuuagccugcagugugaggcuguguacaaagcccugaagaugcccuaccgaauccugccucggcagcugccccaaaaagagcgucagguggccacagcugugcaauggaccaaggcagaaggcagcuauggcgucccacuguggaucaucauccuagccauccuguuuggccuccugcuccuaggucuacucaucuacauccucuacaagcuuggauucuucaaacgcucccucccauauggcaccgccauggaaaaagcucagcucaagccuccagccaccucugaugccuga

SEQ ID NO: 744 - RNA, 2397 nt, Artificial Sequence
  AAH20057
augaauuuacaaccaauuuucuggauuggacugaucaguucaguuugcuguguguuugcucaaacagaugaaaauagauguuuaaaagcaaaugccaaaucauguggagaauguauacaagcagggccaaauuguggguggugcacaaauucaacauuuuuacaggaaggaaugccuacuucugcacgaugugaugauuuagaagccuuaaaaaagaaggguugcccuccagaugacauagaaaaucccagaggcuccaaagauauaaagaaaaauaaaaauguaaccaaccguagcaaaggaacagcagagaagcucaagccagaggauauuacucagauccaaccacagcaguugguuuugcgauuaagaucaggggagccacagacauuuacauuaaaauucaagagagcugaagacuaucccauugaccucuacuaccuuauggaccugucuuacucaaugaaagacgauuuggagaauguaaaaagucuuggaacagaucugaugaaugaaaugaggaggauuacuucggacuucagaauuggauuuggcucauuuguggaaaagacugugaugccuuacauuagcacaacaccagcuaagcucaggaacccuugcacaagugaacagaacugcaccagcccauuuagcuacaaaaaugugcucagucuuacuaauaaaggagaaguauuuaaugaacuuguuggaaaacagcgcauaucuggaaauuuggauucuccagaaggugguuucgaugccaucaugcaaguugcaguuuguggaucacugauuggcuggaggaauguuacacggcugcugguguuuuccacagaugccggguuucacuuugcuggagaugggaaacuugguggcauuguuuuaccaaaugauggacaaugucaccuggaaaauaauauguacacaaugagccauuauuaugauuauccuucuauugcucaccuuguccagaaacugagugaaaauaauauucagacaauuuuugcaguuacugaagaauuucagccuguuuacaaggagcugaaaaacuugaucccuaagucagcaguaggaacauuaucugcaaauucuagcaauguaauucaguugaucauugaugcauacaauucccuuuccucagaagucauuuuggaaaacggcaaauugucagaaggaguaacaauaaguuacaaaucuuacugcaagaacggggugaauggaacaggggaaaauggaagaaaauguuccaauauuuccauuggagaugagguucaauuugaaauuagcauaacuucaaauaaguguccaaaaaaggauucugacagcuuuaaaauuaggccucugggcuuuacggaggaaguagagguuauucuucaguacaucugugaaugugaaugccaaagcgaaggcaucccugaaagucccaagugucaugaaggaaaugggacauuugaguguggcgcgugcaggugcaaugaagggcguguugguagacauugugaaugcagcacagaugaaguuaacagugaagacauggaugcuuacugcaggaaagaaaacaguucagaaaucugcaguaacaauggagagugcgucugcggacaguguguuuguaggaagagggauaauacaaaugaaauuuauucuggcaaauucugcgagugugauaauuucaacugugauagauccaauggcuuaauuuguggaggaaaugguguuugcaagugucgugugugugagugcaaccccaacuacacuggcagugcaugugacuguucuuuggauacuaguacuugugaagccagcaacggacagaucugcaauggccggggcaucugugaguguggugucuguaaguguacagauccgaaguuucaagggcaaacgugugagaugugucagaccugccuuggugucugugcugagcauaaagaauguguucagugcagagccuucaauaaaggagaaaagaaagacacaugcacacaggaauguuccuauuuuaacauuaccaagguagaaagucgggacaaauuaccccagccgguccaaccugauccugugucccauuguaaggagaaggauguugacgacuguugguucuauuuuacguauucagugaaugggaacaacgaggucaugguucauguuguggagaauccagagugucccacugguccagacaucauuccaauuguagcuggugugguugcuggaauuguucuuauuggccuugcauuacugcugauauggaagcuuuuaaugauaauucaugacagaagggaguuugcuaaauuugaaaaggagaaaaugaaugccaaaugggacacgggugaaaauccuauuuauaagagugccguaacaacuguggucaauccgaaguaugagggaaaauga

SEQ ID NO: 745 - RNA, 2367 nt, Artificial Sequence
  AAA36122
auggggauugaacugcuuugccuguucuuucuauuucuaggaaggaaugaucacguacaagguggcugugcccugggaggugcagaaaccugugaagacugccugcuuauuggaccucagugugccuggugugcucaggagaauuuuacucauccaucuggaguuggcgaaaggugugauaccccagcaaaccuuuuagcuaaaggaugucaauuaaacuucaucgaaaacccugucucccaaguagaaauacuuaaaaauaagccucucaguguaggcagacagaaaaauaguucugacauuguucagauugcgccucaaagcuugauccuuaaguugagaccagguggugcgcagacucugcaggugcauguccgccagacugaggacuacccgguggauuuguauuaccucauggaccucuccgccuccauggaugacgaccucaacacaauaaaggagcugggcucccggcuuuccaaagagaugucuaaauuaaccagcaacuuuagacugggcuucggaucuuuuguggaaaaaccuguauccccuuucgugaaaacaacaccagaagaaauugccaacccuugcaguaguauuccauacuucuguuuaccuacauuuggauucaagcacauuuugccauugacaaaugaugcugaaagauucaaugaaauugugaagaaucagaaaauuucugcuaauauugacacacccgaagguggauuugaugcaauuaugcaagcugcuguguguaaggaaaaaauuggcuggcggaaugacucccuccaccuccuggucuuugugagugaugcugauucucauuuuggaauggacagcaaacuagcaggcaucgucauuccuaaugacgggcucugucacuuggacagcaagaaugaauacuccaugucaacugucuuggaauauccaacaauuggacaacucauugauaaacugguacaaaacaacguguuauugaucuucgcuguaacccaagaacaaguucauuuauaugagaauuacgcaaaacuuauuccuggagcuacaguaggucuacuucagaaggacuccggaaacauucuccagcugaucaucucagcuuaugaagaacugcggucugagguggaacuggaaguauuaggagacacugaaggacucaacuugucauuuacagccaucuguaacaacgguacccucuuccaacaccaaaagaaaugcucucacaugaaagugggagacacagcuuccuucagcgugacugugaauaucccacacugcgagagaagaagcaggcacauuaucauaaagccuguggggcugggggaugcccuggaauuacuugucagcccagaaugcaacugcgacugucagaaagaaguggaagugaacagcuccaaaugucaccacgggaacggcucuuuccaguguggggugugugccugccacccuggccacauggggccucgcugugaguguggcgaggacaugcugagcacagauuccugcaaggaggccccagaucaucccuccugcagcggaaggggugacugcuacugugggcaguguaucugccacuugucucccuauggaaacauuuaugggccuuauugccagugugacaauuucuccugcgugagacacaaagggcugcucugcggagguaacggcgacugugacuguggugaaugugugugcaggagcggcuggacuggcgaguacugcaacugcaccaccagcacggacuccugcgucucugaagauggagugcucugcagcgggcgcggggacuguguuuguggcaaguguguuugcacaaacccuggagccucaggaccaaccugugaacgauguccuaccuguggugaccccuguaacucuaaacggagcugcauugagugccaccugucagcagcuggccaagcccgagaagaauguguggacaagugcaaacuagcuggugcgaccaucagugaagaagaagauuucucaaaggaugguucuguuuccugcucucugcaaggagaaaaugaaugucuuauuacauuccuaauaacuacagauaaugaggggaaaaccaucauucacagcaucaaugaaaaagauuguccgaagccuccaaacauucccaugaucauguuagggguuucccuggcuauucuucucaucgggguuguccuacugugcaucuggaagcuacuggugucauuucaugaucguaaagaaguugccaaauuugaagcagaacgaucaaaagccaaguggcaaacgggaaccaauccacucuacagaggauccacaaguacuuuuaaaaauguaacuuauaaacacagggaaaaacaaaagguagaccuuuccacagauugcuag

SEQ ID NO: 746 - RNA, 786 nt, Artificial Sequence
  EAW71937
augugggaccugguucucuccaucgccuugucuguggggugcacuggugccgugccccucauccagucucggauugugggaggcugggagugugagaagcauucccaacccuggcagguggcuguguacagucauggaugggcacacuguggggguguccuggugcacccccagugggugcucacagcugcccauugccuaaagaagaauagccaggucuggcugggucggcacaaccuguuugagccugaagacacaggccagagggucccugucagccacagcuucccacacccgcucuacaauaugagccuucugaagcaucaaagccuuagaccagaugaagacuccagccaugaccucaugcugcuccgccugucagagccugccaagaucacagauguugugaagguccugggccugcccacccaggagccagcacuggggaccaccugcuacgccucaggcuggggcagcaucgaaccagaggaguucuugcgccccaggagucuucagugugugagccuccaucuccuguccaaugacaugugugcuagagcuuacucugagaaggugacagaguucauguugugugcugggcucuggacaggugguaaagacacuugugggggugauucuggggguccacuugucuguaauggugugcuucaagguaucacaucauggggcccugagccaugugcccugccugaaaagccugcuguguacaccaagguggugcauuaccggaaguggaucaaggacaccaucgcagccaaccccuga

SEQ ID NO: 747 - RNA, 672 nt, Artificial Sequence
  EAW71938
augugggaccugguucucuccaucgccuugucuguggggugcacuggugccgugccccucauccagucucggauugugggaggcugggagugugagaagcauucccaacccuggcagguggcuguguacagucauggaugggcacacuguggggguguccuggugcacccccagugggugcucacagcugcccauugccuaaagaagaauagccaggucuggcugggucggcacaaccuguuugagccugaagacacaggccagagggucccugucagccacagcuucccacacccgcucuacaauaugagccuucugaagcaucaaagccuuagaccagaugaagacuccagccaugaccucaugcugcuccgccugucagagccugccaagaucacagauguugugaagguccugggccugcccacccaggagccagcacuggggaccaccugcuacgccucaggcuggggcagcaucgaaccagaggaguucuugcgccccaggagucuucagugugugagccuccaucuccuguccaaugacaugugugcuagagcuuacucugagaaggugacagaguucauguugugugcugggcucuggacaggugguaaagacacuuguggggugagucaucccuacucccaacaucuggaggggaaaggguga

SEQ ID NO: 748 - RNA, 189 nt, Artificial Sequence
  BAF98781
augagccuucugaagcaucaaagccuuagaccagaugaagacuccagccaugaccucaugcugcuucgccugucagagccugccaagaucacagauguugugaagguccugggccugcccacccaggagccagcacuggggaccaccugcuacgccucaggcuggggcagcaucgaaccagaggaguga

SEQ ID NO: 749 - RNA, 735 nt, Artificial Sequence
  BAG62239
augggcacacuguggggguguccuggugcacccccagugggugcucacagcugcccauugccuaaagaaguaaguaggacccugggaucuggggagggaauggcugugucccacaggaauaacagcgggaugcuucccccagggucacuucucaggaauagccaggucuggcugggucggcacaaccuguuugagccugaagacacaggccggagggucccugucagccacagcuucccacacccgcucuacaauaugagccuucugaagcaucaaagccuuagaccagaugaagacuccagccaugaccucaugcugcuccgccugucagagccugccaagaucacagauguugugaagguccugggccugcccacccaggagccagcacuggggaccaccugcuacgccucaggcuggggcagcaucgaaccagaggaguucuugcgccccaggagucuucagugugugagccuccaucuccuguccaaugacaugugugcuagagcuuacucugagaaggugacagaguucauguugugugcugggcucuggacaggugguaaagacacuugugggggugauucuggggguccacuugucuguaauggugugcuucaagguaucacaucauggggcccugagccaugugcccugccugaaaagccugcuguguacaccaagguggugcauuaccggaaguggaucaaggacaccaucgcagccaaccccuga

SEQ ID NO: 750 - RNA, 786 nt, Artificial Sequence
  AAA74454
augugggaccugguucucuccaucgccuugucuguggggugcacuggugccgugccccucauccagucucggauugugggaggcugggagugugagaagcauucccaacccuggcagguggcuguguacagucauggaugggcacacuguggggguguccuggugcacccccagugggugcucacagcugcccauugccuaaagaagaauagccaggucuggcugggucggcacaaccuguuugagccugaagacacaggccagagggucccugucagccacagcuucccacacccgcucuacaauaugagccuucugaagcaucaaagccuuagaccagaugaagacuccagccaugaccucaugcugcuccgccugucagagccugccaagaucacagauguugugaagguccugggccugcccacccaggagccagcacuggggaccaccugcuacgccucaggcuggggcagcaucgaaccagaggaguucuugcgccccaggagucuucagugugugagccuccaucuccuguccaaugacaugugugcuagagcuuacucugagaaggugacagaguucauguugugugcugggcucuggacaggugguaaagacacuugugggggugauucuggggguccacuugucuguaauggggugcuucaagguaucacaucauggggcccugagccaugugcccugccugaaaagccugcuguguacaccaagguggugcauuaccggaaguggaucaaggacaccaucgcagccaaccccuga

SEQ ID NO: 751 - RNA, 150 nt, Artificial Sequence
  AAR10469
augugggaccugguucucuccaucgccuugucuguggggugcacuggaauagccaggucuggcugggucggcacaaccuguuugagccugaagacacaggccagagggucccugucagccacagcuucccacacccgcucuacaauauga

SEQ ID NO: 752 - RNA, 543 nt, Artificial Sequence
  AAR10468
augugggaccugguucucuccaucgccuugucuguggggugcacuggugccgugccccucauccagucucggauugugggaggcugggagugugagaagcauucccaacccuggcagguggcuguguacagucauggaugggcacacuguggggguguccuggugcacccccagugggugcucacagcugcccauugccuaaagaagaauagccaggucuggcugggucggcacaaccuguuugagccugaagacacaggccagagggucccugucagccacagcuucccacacccgcucuacaauaugagccuucugaagcaucaaagccuuagaccagaugaagacuccagccaugaccucaugcugcuccgccugucagagccugccaagaucacagauguugugaagguccugggccugcccacccaggagccagcacuggggaccaccugcuacgccucaggcuggggcagcaucgaaccagaggaguguacgccugggccagaugguguagcugggagcccagaugccugggucuga

SEQ ID NO: 753 - RNA, 765 nt, Artificial Sequence
  EAW71943
auggccacagcaggaaaucccuggggcugguuccugggguaccucauccuuggugucgcaggaucgcucgucucugguagcugcagccaaaucauaaacggcgaggacugcagcccgcacucgcagcccuggcaggcggcacuggucauggaaaacgaauuguucugcucgggcguccuggugcauccgcagugggugcugucagccgcacacuguuuccagaacuccuacaccaucgggcugggccugcacagucuugaggccgaccaagagccagggagccagaugguggaggccagccucuccguacggcacccagaguacaacagacccuugcucgcuaacgaccucaugcucaucaaguuggacgaauccguguccgagucugacaccauccggagcaucagcauugcuucgcagugcccuaccgcggggaacucuugccucguuucuggcuggggucugcuggcgaacggcagaaugccuaccgugcugcagugcgugaacgugucgguggugucugaggaggucugcaguaagcucuaugacccgcuguaccaccccagcauguucugcgccggcggagggcaagaccagaaggacuccugcaacggugacucuggggggccccugaucugcaacggguacuugcagggccuugugucuuucggaaaagccccguguggccaaguuggcgugccaggugucuacaccaaccucugcaaauucacugaguggauagagaaaaccguccaggccaguuaa

SEQ ID NO: 754 - RNA, 228 nt, Artificial Sequence
  AAX30051
auggccacagcaggaaaucccuggggcugguuccugggguaccucauccuuggugucgcaggaucgcucgucucugguagcugcagccaaaucauaaacggcgaggacugcagcccgcacucgcagcccuggcaggcggcacuggucauggaaaacgaauuguucugcucgggcguccuggugcauccgcagugggugcugucagccgcacacuguuuccagaaguga

SEQ ID NO: 755 - RNA, 588 nt, Artificial Sequence
  AAL14782
auggccacagcaggaaaucccuggggcugguuccugggguaccucauccuuggugucgcaggaucucucgucucugguagcugcagccaaaucauaaacggcgaggacugcagcccgcacucgcagcccuggcaggcggcacuggucauggaaaacgaauuguucugcucgggcguccuggugcauccgcagugggugcugucagccgcacacuguuuccagaacuccuacaccaucgggcugggccugcacagucuugaggccgaccaagagccagggagccagaugguggaggccagccucuccguacggcacccagaguacaacagacccuugcucgcuaacgaccucaugcucaucaaguuggacgaauccguguccgagucugacaccauccggagcaucagcauugcuucgcagugcccuaccgcggggaacucuugccucguuucuggcuggggucugcuggcgaacggugagcucacgggugugugucugcccucuucaaggagguccucugcccagucgcgggggcugacccagagcucugcgucccaggcagaaugccuaccgugcugcagugcguga

SEQ ID NO: 756 - RNA, 480 nt, Artificial Sequence
  AAL14781
auggccacagcaggaaaucccuggggcugguuccugggguaccucauccuuggugucgcaggaucucucgucucugguagcugcagccaaaucauaaacggcgaggacugcagcccgcacucgcagcccuggcaggcggcacuggucauggaaaacgaauuguucugcucgggcguccuggugcauccgcagugggugcugucagccgcacacuguuuccagaacuccuacaccaucgggcugggccugcacagucuugaggccgaccaagagccagggagccagaugguggaggccagccucuccguacggcacccagaguacaacagacccuugcucgcuaacgaccucaugcucaucaaguuggacgaauccguguccgagucugacaccauccggagcaucagcauugcuucgcagugcccuaccgcggggaacucuugccucguuucuggcuggggucugcuggcgaacggguga

SEQ ID NO: 757 - RNA, 765 nt, Artificial Sequence
  AAD21580
auggccacagcaggaaaucccuggggcugguuccugggguaccucauccuuggugucgcaggaucgcucgucucugguagcugcagccaaaucauaaacggcgaggacugcagcccgcacucgcagcccuggcaggcggcacuggucauggaaaacgaauuguucugcucgggcguccuggugcauccgcagugggugcugucagccgcacacuguuuccagaacuccuacaccaucgggcugggccugcacagucuugaggccgaccaagagccagggagccagaugguggaggccagccucuccguacggcacccagaguacaacagacccuugcucgcuaacgaccucaugcucaucaaguuggacgaauccguguccgagucugacaccauccggagcaucagcauugcuucgcagugcccuaccgcggggaacucuugccucguuucuggcuggggucugcuggcgaacggcagaaugccuaccgugcugcagugcgugaacgugucgguggugucugaggaggucugcaguaagcucuaugacccgcuguaccaccccagcauguucugcgccggcggagggcacgaccagaaggacuccugcaacggugacucuggggggccccugaucugcaacggguacuugcagggccuugugucuuucggaaaagccccguguggccaaguuggcgugccaggugucuacaccaaccucugcaaauucacugaguggauagagaaaaccguccaggccaguuaa

SEQ ID NO: 758 - RNA, 2673 nt, Artificial Sequence
  AAC83230
augucgcaagggauccuuucuccgccagcgggcuugcuguccgaugacgaugucguaguuucucccauguuugaguccacagcugcagauuuggggucugugguacgcaagaaccugcuaucagacugcucugucgucucuaccucccuagaggacaagcagcagguuccaucugaggacaguauggagaaggugaaaguauacuugaggguuaggcccuuguuaccuucagaguuggaacgacaggaagaucaggguuguguccguauugagaauguggagacccuuguucuacaagcacccaaggacucguuugcccugaagagcaaugaacggggaauuggccaagccacacacagguucaccuuuucccagaucuuugggccagaagugggacaggcauccuucuucaaccuaacugugaaggagaugguaaaggauguacucaaagggcagaacuggcucaucuauacauauggagucacuaacucagggaaaacccacacgauucaagguaccaucaaggauggagggauucucccccggucccuggcgcugaucuucaauagccuccaaggccaacuucauccaacaccugaucugaagcccuugcucuccaaugagguaaucuggcuagacagcaagcagauccgacaggaggaaaugaagaagcugucccugcuaaauggaggccuccaagaggaggagcuguccacuuccuugaagaggagugucuacaucgaaagucggauagguaccagcaccagcuucgacaguggcauugcugggcucucuucuaucagucaguguaccagcaguagccagcuggaugaaacaagucaucgaugggcacagccagacacugccccacuaccugucccggcaaacauucgcuucuccaucuggaucucauucuuugagaucuacaacgaacugcuuuaugaccuauuagaaccgccuagccaacagcgcaagaggcagacuuugcggcuaugcgaggaucaaaauggcaaucccuaugugaaagaucucaacuggauucaugugcaagaugcugaggaggccuggaagcuccuaaaagugggucguaagaaccagagcuuugccagcacccaccucaaccagaacuccagccgcagucacagcaucuucucaaucaggauccuacaccuucagggggaaggagauauaguccccaagaucagcgagcugucacucugugaucuggcuggcucagagcgcugcaaagaucagaagaguggugaacgguugaaggaagcaggaaacauuaacaccucucuacacacccugggccgcuguauugcugcccuucgucaaaaccagcagaaccggucaaagcagaaccugguucccuuccgugacagcaaguugacucgaguguuccaagguuucuucacaggccgaggccguuccugcaugauugucaaugugaaucccugugcaucuaccuaugaugaaacucuucauguggccaaguucucagccauugcuagccagcuugugcaugccccaccuaugcaacugggauucccaucccugcacucguucaucaaggaacauagucuucagguaucccccagcuuagagaaaggggcuaaggcagacacaggccuugaugaugauauugaaaaugaagcugacaucuccauguauggcaaagaggagcuccuacaaguuguggaagccaugaagacacugcuuuugaaggaacgacaggaaaagcuacagcuggagaugcaucuccgagaugaaauuugcaaugagaugguagaacagaugcaacagcgggaacaguggugcagugaacauuuggacacccaaaaggaacuauuggaggaaauguaugaagaaaaacuaaauauccucaaggagucacugacaaguuuuuaccaagaagagauucaggagcgggaugaaaagauugaagagcuagaagcucucuugcaggaagccagacaacagucaguggcccaucagcaaucagggucugaauuggcccuacggcggucacaaagguuggcagcuucugccuccacccagcagcuucaggagguuaaagcuaaauuacagcagugcaaagcagagcuaaacucuaccacugaagaguugcauaaguaucagaaaauguuagaaccaccacccucagccaagcccuucaccauugauguggacaagaaguuagaagagggccagaagaauauaaggcuguugcggacagagcuucagaaacuuggugagucucuccaaucagcagagagagcuuguugccacagcacuggggcaggaaaacuucgucaagccuugaccacuugugaugacaucuuaaucaaacaggaccagacucuggcugaacugcagaacaacauggugcuagugaaacuggaccuucggaagaaggcagcauguauugcugagcaguaucauacuguguugaaacuccaaggccagguuucugccaaaaagcgccuugguaccaaccaggaaaaucagcaaccaaaccaacaaccaccagggaagaaaccauuccuucgaaauuuacuuccccgaacaccaaccugccaaagcucaacagacugcagcccuuaugcccggauccuacgcucacggcguuccccuuuacucaaaucugggccuuuuggcaaaaaguacuaa

SEQ ID NO: 759 - RNA, 1113 nt, Artificial Sequence
  AAH34621
auggcuauaacuuuggaagaagcuccguggcugggcuggcucuuggugaaagcacugaugagguuugccuucauggucgucaacaaccugguugcuauuccauccuacaucugcuauguaauuauacuucagccccuucgagugcuggacaguaagcgguucugguauaucgaaggaaucauguauaaauggcuuuuaggaaugguagcuuccuggggaugguaugcuggauauacagugauggaauggggagaagauauuaaagcaguuucaaaagaugaagcagugauguuggugaaucaucaggcaacaggagaugugugcacacugaugaugugccuccaggacaaaggacugguuguugcucagaugaugugguugauggaucauauuuuuaaguacacaaacuuuggaauuguuucucuaguucauggagacuucuuuauaagacagggaagaucuuaucgugaccaacagcugcugcuucucaagaagcacuuagaaaauaauuacaggagcagagaucgaaaauggauuguuuuguuuccagaagggggcuuccucaggaagaggcgagaaacaagucaggcauuugccaagaaaaauaacuugccauuucuuacaaauguuacucugccaaggucuggggcaacaaaaauuauuuugaaugcacuuguagcacaacagaaaaauggaaguccagcaggaggagaugcuaaagaauuagacagcaaaucaaaaggccuccaguggauaauagauacaacgauagcuuaucccaaagcugaaccuauagauauucaaaccuggauccuuggauacaggaaaccaacagucacacauguacauuacaggaucuuuccaauuaaagauguaccccuggagacugaugaccuuaccacuuggcucuaucagcgguuuguugaaaaagaagaccucuuaucacauuuuuaugaaacaggagcuuuuccaccuuccaagggccauaaggaagcuguuuccagggagaugacccucagcaacuuguggauauuucucauacagucuuuugcauuuuugucaggcuauaugugguacaacaucauucaguauuuuuaccauugccuguuuuag

SEQ ID NO: 760 - RNA, 2178 nt, Artificial Sequence
  AAH14924
auggccauggacucgucgcuucaggcccgccuguuucccggucucgcuaucaagauccaacgcaguaaugguuuaauucacagugccaauguaaggacugugaacuuggagaaauccuguguuucaguggaaugggcagaaggaggugccacaaagggcaaagagauugauuuugaugauguggcugcaauaaacccagaacucuuacagcuucuucccuuacauccgaaggacaaucugcccuugcaggaaaauguaacaauccagaaacaaaaacggagauccgucaacuccaaaauuccugcuccaaaagaaagucuucgaagccgcuccacucgcauguccacugucucagagcuucgcaucacggcucaggagaaugacauggagguggagcugccugcagcugcaaacucccgcaagcaguuuucaguuccuccugcccccacuaggccuuccugcccugcaguggcugaaauaccauugaggauggucagcgaggagauggaagagcaaguccauuccauccgaggcagcucuucugcaaacccugugaacucaguucggaggaaaucaugucuugugaaggaaguggaaaaaaugaagaacaagcgagaagagaagaaggcccagaacucugaaaugagaaugaagagagcucaggaguaugacaguaguuuuccaaacugggaauuugcccgaaugauuaaagaauuucgggcuacuuuggaaugucauccacuuacuaugacugauccuaucgaagagcacagaauaugugucuguguuaggaaacgcccacugaauaagcaagaauuggccaagaaagaaauugaugugauuuccauuccuagcaagugucuccucuugguacaugaacccaaguugaaaguggacuuaacaaaguaucuggagaaccaagcauucugcuuugacuuugcauuugaugaaacagcuucgaaugaaguugucuacagguucacagcaaggccacugguacagacaaucuuugaagguggaaaagcaacuuguuuugcauauggccagacaggaaguggcaagacacauacuaugggcggagaccucucugggaaagcccagaaugcauccaaagggaucuaugccauggccucccgggacgucuuccuccugaagaaucaacccugcuaccggaaguugggccuggaagucuaugugacauucuucgagaucuacaaugggaagcuguuugaccugcucaacaagaaggccaagcugcgcgugcuggaggacggcaagcaacaggugcaagugguggggcugcaggagcaucugguuaacucugcugaugaugucaucaagaugaucgacaugggcagcgccugcagaaccucugggcagacauuugccaacuccaauuccucccgcucccacgcgugcuuccaaauuauucuucgagcuaaagggagaaugcauggcaaguucucuuugguagaucuggcagggaaugagcgaggcgcggacacuuccagugcugaccggcagacccgcauggagggcgcagaaaucaacaagagucucuuagcccugaaggagugcaucagggcccugggacagaacaaggcucacaccccguuccgugagagcaagcugacacaggugcugagggacuccuucauuggggagaacucuaggacuugcaugauugccacgaucucaccaggcauaagcuccugugaauauacuuuaaacacccugagauaugcagacagggucaaggagcugagcccccacagugggcccaguggagagcaguugauucaaauggaaacagaagagauggaagccugcucuaacggggcgcugauuccaggcaauuuauccaaggaagaggaggaacugucuucccagauguccagcuuuaacgaagccaugacucagaucagggagcuggaggagaaggcuauggaagagcucaaggagaucauacagcaaggaccagacuggcuugagcucucugagaugaccgagcagccagacuaugaccuggagaccuuugugaacaaagcggaaucugcucuggcccagcaagccaagcauuucucagcccugcgagaugucaucaaggccuugcgccuggccaugcagcuggaagagcaggcuagcagacaaauaagcagcaagaaacggccccaguga

SEQ ID NO: 761 - RNA, 342 nt, Artificial Sequence
  AAH62223
augaacuucuauuuacuccuagcgagcagcauucugugugccuugauugucuucuggaaauaucgccgcuuucagagaaacacuggcgaaaugucaucaaauucaacugcucuugcacuagugagacccucuucuucuggguuaauuaacagcaauacagacaacaaucuugcagucuacgaccucucucgggauauuuuaaauaauuucccacacucaauagccaggcagaagcgaauauugguaaaccucaguaugguggaaaacaagcugguugaacuggaacauacucuacuuagcaaggguuucagaggugcaucaccucaccggaaauccaccuaa

SEQ ID NO: 762 - RNA, 2583 nt, Artificial Sequence
  AAA56833
auggggcccuggggcuggaaauugcgcuggaccgucgccuugcuccucgccgcggcggggacugcagugggcgacagaugugaaagaaacgaguuccagugccaagacgggaaaugcaucuccuacaagugggucugcgauggcagcgcugagugccaggauggcucugaugagucccaggagacgugcuugucugucaccugcaaauccggggacuucagcugugggggccgugucaaccgcugcauuccucaguucuggaggugcgauggccaaguggacugcgacaacggcucagacgagcaaggcuguccccccaagacgugcucccaggacgaguuucgcugccacgaugggaagugcaucucucggcaguucgucugugacucagaccgggacugcuuggacggcucagacgaggccuccugcccggugcucaccuguggucccgccagcuuccagugcaacagcuccaccugcaucccccagcugugggccugcgacaacgaccccgacugcgaagauggcucggaugaguggccgcagcgcuguaggggucuuuacguguuccaaggggacaguagccccugcucggccuucgaguuccacugccuaaguggcgagugcauccacuccagcuggcgcugugaugguggccccgacugcaaggacaaaucugacgaggaaaacugcgcuguggccaccugucgcccugacgaauuccagugcucugauggaaacugcauccauggcagccggcagugugaccgggaauaugacugcaaggacaugagcgaugaaguuggcugcguuaaugugacacucugcgagggacccaacaaguucaagugucacagcggcgaaugcaucacccuggacaaagucugcaacauggcuagagacugccgggacuggucagaugaacccaucaaagagugcgggaccaacgaaugcuuggacaacaacggcggcuguucccacgucugcaaugaccuuaagaucggcuacgagugccugugccccgacggcuuccagcugguggcccagcgaagaugcgaagauaucgaugagugucaggaucccgacaccugcagccagcucugcgugaaccuggaggguggcuacaagugccagugugaggaaggcuuccagcuggacccccacacgaaggccugcaaggcugugggcuccaucgccuaccucuucuucaccaaccggcacgaggucaggaagaugacgcuggaccggagcgaguacaccagccucauccccaaccugaggaacguggucgcucuggacacggagguggccagcaauagaaucuacuggucugaccugucccagagaaugaucugcagcacccagcuugacagagcccacggcgucucuuccuaugacaccgucaucagcagggacauccaggcccccgacgggcuggcuguggacuggauccacagcaacaucuacuggaccgacucuguccugggcacugucucuguugcggauaccaagggcgugaagaggaaaacguuauucagggagaacggcuccaagccaagggccaucgugguggauccuguucauggcuucauguacuggacugacuggggaacucccgccaagaucaagaaagggggccugaaugguguggacaucuacucgcuggugacugaaaacauucaguggcccaauggcaucacccuagaucuccucaguggccgccucuacuggguugacuccaaacuucacuccaucucaagcaucgaugucaaugggggcaaccggaagaccaucuuggaggaugaaaagaggcuggcccaccccuucuccuuggccgucuuugaggacaaaguauuuuggacagauaucaucaacgaagccauuuucagugccaaccgccucacagguuccgaugucaacuuguuggcugaaaaccuacuguccccagaggauaugguccucuuccacaaccucacccagccaagaggagugaacuggugugagaggaccacccugagcaauggcggcugccaguaucugugccucccugccccgcagaucaacccccacucgcccaaguuuaccugcgccugcccggacggcaugcugcuggccagggacaugaggagcugccucacagaggcugaggcugcaguggccacccaggagacauccaccgucaggcuaaaggucagcuccacagccguaaggacacagcacacaaccacccggccuguucccgacaccucccggcugccuggggccaccccugggcucaccacgguggagauagugacaaugucucaccaagcucugggcgacguugcuggcagaggaaaugagaagaagcccaguagcgugagggcucuguccauuguccuccccaucgugcuccucgucuuccuuugccugggggucuuccuucuauggaagaacuggcggcuuaagaacaucaacagcaucaacuuugacaaccccgucuaucagaagaccacagaggaugagguccacauuugccacaaccaggacggcuacagcuaccccucgagacagauggucagucuggaggaugacguggcguga

SEQ ID NO: 763 - RNA, 1302 nt, Artificial Sequence
  CAA70989
augguuuggaaaguagcuguauuccucaguguggcccugggcauuggugccguuccuauagaugauccugaagauggaggcaagcacuggguggugaucguggcagguucaaauggcugguauaauuauaggcaccaggcagacgcgugccaugccuaccagaucauucaccgcaaugggauuccugacgaacagaucguugugaugauguacgaugacauugcuuacucugaagacaaucccacuccaggaauugugaucaacaggcccaauggcacagaugucuaucagggagucccgaaggacuacacuggagaggauguuaccccacaaaauuuccuugcuguguugagaggcgaugcagaagcagugaagggcauaggauccggcaaaguccugaagaguggcccccaggaucacguguucauuuacuucacugaccauggaucuacuggaauacugguuuuucccaaugaagaucuucauguaaaggaccugaaugagaccauccauuacauguacaaacacaaaauguaccgaaagaugguguucuacauugaagccugugagucuggguccaugaugaaccaccugccggauaacaucaauguuuaugcaacuacugcugccaaccccagagagucguccuacgccuguuacuaugaugagaagagguccacguaccugggggacugguacagcgucaacuggauggaagacucggacguggaagaucugacuaaagagacccugcacaagcaguaccaccugguaaaaucgcacaccaacaccagccacgucaugcaguauggaaacaaaacaaucuccaccaugaaagugaugcaguuucaggguaugaaacgcaaagccaguucucccgucccccuaccuccagucacacaccuugaccucacccccagcccugaugugccucucaccaucaugaaaaggaaacugaugaacaccaaugaucuggaggaguccaggcagcucacggaggagauccagcggcaucuggaugccaggcaccucauugagaagucagugcguaagaucgucuccuugcuggcagcguccgaggcugagguggagcagcuccuguccgagagagccccgcucacggggcacagcugcuacccagaggcccugcugcacuuccggacccacugcuucaacuggcacucccccacguacgaguaugcguugagacauuuguacgugcuggucaaccuuugugagaagccguauccacuucacaggauaaaauuguccauggaccacgugugccuuggucacuacuga

SEQ ID NO: 764 - RNA, 1797 nt, Artificial Sequence
  AAL36991
augacccccaucgucacaguccugaucugucucgggcugagucugggccccaggacccacgugcagacagggaccauucccaagcccacccugugggcugagccagacucugugaucacccaggggagucccgucacccucaguugucaggggagccuugaagcccaggaguaccgucuauauagggagaaaaaaucagcaucuuggauuacacggauacgaccagagcuugugaagaacggccaguuccacaucccauccaucaccugggaacacacagggcgauauggcugucaguauuacagccgcgcucgguggucugagcucagugacccccuggugcuggugaugacaggagccuacccaaaacccacccucucagcccagcccagcccuguggugaccucaggaggaagggugacccuccagugugagucacagguggcauuuggcggcuucauucuguguaaggaaggagaagaagaacacccacaaugccugaacucccagccccaugcccgugggucgucccgcgccaucuucuccgugggccccgugagcccgaaucgcagguggucgcacaggugcuaugguuaugacuugaacucucccuauguguggucuucacccagugaucuccuggagcuccuggucccagguguuucuaagaagccaucacucucagugcagccggguccugucguggccccuggggaaagccugacccuccagugugucucugaugucggcuaugacagauuuguucuguacaaggagggggaacgugaccuucgccagcucccuggccggcagccccaggcugggcucucccaggccaacuucacccugggcccugugagccgcuccuacgggggccaguacagaugcuacggugcacacaaccucuccucugagugcucggcccccagcgacccccuggacauccugaucacaggacagauccguggcacacccuucaucucagugcagccaggccccacaguggccucaggagagaacgugacccugcugugucagucauggcggcaguuccacacuuuccuucugaccaaggcgggagcagcugaugccccacuccgucuaagaucaauacacgaauauccuaaguaccaggcugaauuccccaugaguccugugaccucagcccacgcggggaccuacaggugcuacggcucacucaacuccgaccccuaccugcugucucaccccagugagccccuggagcucguggucucaggacccuccauggguuccagccccccacccaccggucccaucuccacaccugcaggcccugaggaccagccccucacccccacugggucggauccccaaaguggucugggaaggcaccuggggguugugaucggcaucuugguggccgucguccuacugcuccuccuccuccuccuccucuuccucauccuccgacaucgacgucagggcaaacacuggacaucgacccagagaaaggcugauuuccaacauccugcaggggcuguggggccagagcccacagacagaggccugcaguggagguccagcccagcugccgacgcccaggaagaaaaccucuaugcugccgugaaggacacacagccugaagaugggguggagauggacacucgggcugcugcaucugaagccccccaggaugugaccuacgcccagcugcacagcuugacccucagacggaaggcaacugagccuccuccaucccaggaaagggaaccuccagcugagcccagcaucuacgccacccuggccauccacuag

SEQ ID NO: 765 - RNA, 498 nt, Artificial Sequence
  CCDS6385.2
auggcgcugcucgccuugcugcuggucguggcccuaccgcggguguggacagacgccaaccugacugcgagacaacgagauccagaggacucccagcgaacggacgagggugacaauagaguguggugucauguuugugagagagaaaacacuuucgagugccagaacccaaggaggugcaaauggacagagccauacugcguuauagcggccgugaaaauauuuccacguuuuuucaugguugcgaagcagugcuccgcugguugugcagcgauggagagacccaagccagaggagaagcgguuucuccuggaagagcccaugcccuucuuuuaccucaaguguuguaaaauucgcuacugcaauuuagaggggccaccuaucaacucaucaguguucaaagaauaugcugggagcaugggugagagcuguggugggcuguggcuggccauccuccugcugcuggccuccauugcagccggccucagccugucuuga

SEQ ID NO: 766 - RNA, 375 nt, Artificial Sequence
  AAA68873
augucucuugagcagaagagucagcacugcaagccugaggaaggccuugacacccaagaagaggcccugggccuggugggugugcaggcugccacuacugaggagcaggaggcuguguccuccuccucuccucuggucccaggcacccugggggaggugccugcugcugggucaccagguccucucaagaguccucagggagccuccgccauccccacugccaucgauuucacucuauggaggcaauccauuaagggcuccagcaaccaagaagaggaggggccaagcaccuccccugacccagagucuguguuccgagcagcacucaguaagaagguggcugacuugauucauuuucugcuccucaaguauuaa

SEQ ID NO: 767 - RNA, 957 nt, Artificial Sequence
  AAH02455
augcuucuugggcagaagagucagcgcuacaaggcugaggaaggccuucaggcccaaggagaggcaccagggcuuauggaugugcagauucccacagcugaggagcagaaggcugcauccuccuccucuacucugaucaugggaacccuugaggaggugacugauucugggucaccaaguccuccccagaguccugagggugccuccucuucccugacugucaccgacagcacucuguggagccaauccgaugaggguuccagcagcaaugaagaggaggggccaagcaccuccccggacccagcucaccuggagucccuguuccgggaagcacuugaugagaaaguggcugaguuaguucguuuccugcuccgcaaauaucaaauuaaggagccggucacaaaggcagaaaugcuugagagugucaucaaaaauuacaagaaccacuuuccugauaucuucagcaaagccucugagugcaugcaggugaucuuuggcauugaugugaaggaaguggacccugccggccacuccuacauccuugucaccugccugggccucuccuaugauggccugcugggugaugaucagaguacgcccaagaccggccuccugauaaucguccugggcaugaucuuaauggagggcagccgcgccccggaggaggcaaucugggaagcguugagugugauggggcuguaugaugggagggagcacagugucuauuggaagcucaggaagcugcucacccaagagugggugcaggagaacuaccuggaguaccgccaggcgcccggcagugauccugugcgcuacgaguuccugugggguccaagggcccuugcugaaaccagcuaugugaaaguccuggagcauguggucagggucaaugcaagaguucgcauuuccuacccaucccugcaugaagaggcuuugggagaggagaaaggaguuuga

SEQ ID NO: 768 - RNA, 1290 nt, Artificial Sequence
  AAH04479
auggagacucaguuccgcagagggggucuggggugcagcccugccagcaucaagaggaagaagaagagggaggacucaggagacuuuggacuccaggugagcacuauguucucagaggacgacuuccagucaacagaaagagccccauaugguccacaacuacaguggucccaggaucugccaagaguccagguuuuuagagaacaggccaaccuggaggacaggagucccaggagaacccagaggaucacuggaggagaacaagugcuguggggccccaucacccagauauuucccacaguucggccugcugaccuaaccagagucaucaugccucuugagcaaagaagucagcacugcaagccugaggaaggccuucaggcccaagaagaagaccugggccuggugggugcacaggcucuccaagcugaggagcaggaggcugccuucuucuccucuacucugaaugugggcacucuagaggaguugccugcugcugagucaccaaguccuccccagaguccucaggaagaguccuucucucccacugccauggaugccaucuuugggagccuaucugaugagggcucuggcagccaagaaaaggaggggccaaguaccucgccugaccugauagacccugaguccuuuucccaagauauacuacaugacaagauaauugauuugguucauuuauugcuccgcaaguaucgagucaaggggcugaucacaaaggcagaaaugcuggggagugucaucaaaaauuaugaggacuacuuuccugagauauuuagggaagccucuguaugcaugcaacugcucuuuggcauugaugugaaggaaguggaccccacuagccacuccuauguccuugucaccucccucaaccucucuuaugauggcauacaguguaaugagcagagcaugcccaagucuggccuccugauaauaguccuggguguaaucuucauggaggggaacugcaucccugaagagguuaugugggaaguccugagcauuauggggguguaugcuggaagggagcacuuccucuuuggggagcccaagaggcuccuuacccaaaauugggugcaggaaaaguaccugguguaccggcaggugcccggcacugauccugcaugcuaugaguuccugugggguccaagggcccacgcugagaccagcaagaugaaaguucuugaguacauagccaaugccaaugggagggaucccacuucuuacccaucccuguaugaagaugcuuugagagaggagggagagggagucuga

SEQ ID NO: 769 - RNA, 1110 nt, Artificial Sequence
  EAW99421
augccucgagcuccaaagcgucagcgcugcaugccugaagaagaucuucaaucccaaagugagacacagggccucgagggugcacaggcuccccuggcuguggaggaggaugcuucaucauccacuuccaccagcuccucuuuuccauccucuuuucccuccuccuccucuuccuccuccuccuccugcuauccucuaauaccaagcaccccagaggagguuucugcugaugaugagacaccaaauccuccccagagugcucagauagccugcuccucccccucggucguugcuucccuuccauuagaucaaucugaugagggcuccagcagccaaaaggaggagaguccaagcacccuacagguccugccagacagugagucuuuacccagaagugagauagaugaaaaggugacugauuuggugcaguuucugcucuucaaguaucaaaugaaggagccgaucacaaaggcagaaauacuggagagugucauaaaaaauuaugaagaccacuucccuuuguuguuuagugaagccuccgagugcaugcugcuggucuuuggcauugauguaaaggaaguggaucccacuggccacuccuuuguccuugucaccucccugggccucaccuaugaugggaugcugagugauguccagagcaugcccaagacuggcauucucauacuuauccuaagcauaaucuucauagagggcuacugcaccccugaggaggucaucugggaagcacugaauaugauggggcuguaugaugggauggagcaccucauuuauggggagcccaggaagcugcucacccaagauugggugcaggaaaacuaccuggaguaccggcaggugccuggcagugauccugcacgguaugaguuucugugggguccaagggcucaugcugaaauuaggaagaugagucuccugaaauuuuuggccaagguaaaugggagugauccaagauccuucccacugugguaugaggaggcuuugaaagaugaggaagagagagcccaggacagaauugccaccacagaugauacuacugccauggccagugcaaguucuagcgcuacagguagcuucuccuacccugaauaa

SEQ ID NO: 770 - RNA, 945 nt, Artificial Sequence
  AAH03408
augccacuugagcagaggagucagcacugcaagccugaggaaggccuugaggcccaaggagaggcccugggcuuggugggugcgcaggcuccugcuacugaggagcaggagacugccuccuccuccucuacucuaguggaagucacccugcgggaggugccugcugccgagucaccaaguccuccccacaguccucagggagccuccacccuccccacuaccaucaacuauacucucuggagucaauccgaugagggcuccagcaacgaagaacaggaagggccaagcaccuuuccugaccuggagacgagcuuccaaguagcacucaguaggaagauggcugaguugguucauuuucugcuccucaaguaucgagccagggagccauucacaaaggcagaaaugcuggggagugucaucagaaauuuccaggacuucuuuccugugaucuucagcaaagccuccgaguacuugcagcuggucuuuggcaucgaggugguggaagugguccgcaucggccacuuguacauccuugucaccugccugggccucuccuacgauggccugcugggcgacaaucagaucgugcccaagacaggccuccugauaaucguccuggccauaaucgcaaaagagggcgacugugccccugaggagaaaaucugggaggagcugaguguguuggaggcaucugaugggagggaggacagugucuuugcgcaucccaggaagcugcucacccaagauuuggugcaggaaaacuaccuggaguaccggcagguccccggcagugauccugcaugcuacgaguuccugugggguccaagggcccucguugaaaccagcuaugugaaaguccugcaccauuugcuaaagaucaguggaggaccucacauuuccuacccaccccugcaugaaugggcuuuuagagagggggaagaguga

SEQ ID NO: 771 - RNA, 930 nt, Artificial Sequence
  AAA03229
augucucuugagcagaggagucugcacugcaagccugaggaagcccuugaggcccaacaagaggcccugggccuggugugugugcaggcugccaccuccuccuccucuccucugguccugggcacccuggaggaggugcccacugcugggucaacagauccuccccagaguccucagggagccuccgccuuucccacuaccaucaacuucacucgacagaggcaacccagugaggguuccagcagccgugaagaggaggggccaagcaccucuuguauccuggaguccuuguuccgagcaguaaucacuaagaagguggcugauuugguugguuuucugcuccucaaauaucgagccagggagccagucacaaaggcagaaaugcuggagagugucaucaaaaauuacaagcacuguuuuccugagaucuucggcaaagccucugaguccuugcagcuggucuuuggcauugacgugaaggaagcagaccccaccggccacuccuauguccuugucaccugccuaggucucuccuaugauggccugcugggugauaaucagaucaugcccaagacaggcuuccugauaauuguccuggucaugauugcaauggagggcggccaugcuccugaggaggaaaucugggaggagcugagugugauggagguguaugaugggagggagcacagugccuauggggagcccaggaagcugcucacccaagauuuggugcaggaaaaguaccuggaguaccggcaggugccggacagugaucccgcacgcuaugaguuccugugggguccaagggcccucgcugaaaccagcuaugugaaaguccuugaguaugugaucaaggucagugcaagaguucgcuuuuucuucccaucccugcgugaagcagcuuugagagaggaggaagagggagucuga

SEQ ID NO: 772 - RNA, 945 nt, Artificial Sequence
  AAA17729
augccucuugagcagaggagucagcacugcaagccugaagaaggccuugaggcccgaggagaggcccugggccuggugggugcgcaggcuccugcuacugaggagcagcagaccgcuucuuccucuucuacucuaguggaaguuacccugggggaggugccugcugccgacucaccgaguccuccccacaguccucagggagccuccagcuucucgacuaccaucaacuacacucuuuggagacaauccgaugagggcuccagcaaccaagaagaggaggggccaagaauguuucccgaccuggaguccgaguuccaagcagcaaucaguaggaagaugguugaguugguucauuuucugcuccucaaguaucgagccagggagccggucacaaaggcagaaaugcuggagaguguccucagaaauugccaggacuucuuucccgugaucuucagcaaagccuccgaguacuugcagcuggucuuuggcaucgaggugguggaagugguccccaucagccacuuguacauccuugucaccugccugggccucuccuacgauggccugcugggcgacaaucaggucaugcccaagacaggccuccugauaaucguccuggccauaaucgcaauagagggcgacugugccccugaggagaaaaucugggaggagcugaguauguuggagguguuugaggggagggaggacagugucuucgcacaucccaggaagcugcucaugcaagaucuggugcaggaaaacuaccuggaguaccggcaggugcccggcagugauccugcaugcuacgaguuccugugggguccaagggcccucauugaaaccagcuaugugaaaguccugcaccauacacuaaagaucgguggagaaccucacauuuccuacccaccccugcaugaacgggcuuugagagagggagaagaguga

SEQ ID NO: 773 - RNA, 945 nt, Artificial Sequence
  AAA17446
augccucuugagcagaggagucagcacugcaagccugaagaaggccuugaggcccgaggagaggcccugggccuggugggugcgcaggcuccugcuacugaggagcaggaggcugccuccuccucuucuacucuaguugaagucacccugggggaggugccugcugccgagucaccagauccuccccagaguccucagggagccuccagccuccccacuaccaugaacuacccucucuggagccaauccuaugaggacuccagcaaccaagaagaggaggggccaagcaccuucccugaccuggaguccgaguuccaagcagcacucaguaggaagguggccgaguugguucauuuucugcuccucaaguaucgagccagggagccggucacaaaggcagaaaugcuggggagugucgucggaaauuggcaguauuucuuuccugugaucuucagcaaagcuuccaguuccuugcagcuggucuuuggcaucgagcugauggaaguggaccccaucggccacuuguacaucuuugccaccugccugggccucuccuacgauggccugcugggugacaaucagaucaugcccaaggcaggccuccugauaaucguccuggccauaaucgcaagagagggcgacugugccccugaggagaaaaucugggaggagcugaguguguuagagguguuugaggggagggaagacaguaucuugggggaucccaagaagcugcucacccaacauuucgugcaggaaaacuaccuggaguaccggcagguccccggcagugauccugcauguuaugaauuccugugggguccaagggcccucguugaaaccagcuaugugaaaguccugcaccauaugguaaagaucaguggaggaccucacauuuccuacccaccccugcaugaguggguuuugagagagggggaagaguga

SEQ ID NO: 774 - RNA, 954 nt, Artificial Sequence
  EAW99410
augucuucugagcagaagagucagcacugcaagccugaggaaggcguugaggcccaagaagaggcccugggccuggugggugcacaggcuccuacuacugaggagcaggaggcugcugucuccuccuccucuccucuggucccuggcacccuggaggaagugccugcugcugagucagcagguccuccccagaguccucagggagccucugccuuacccacuaccaucagcuucacuugcuggaggcaacccaaugaggguuccagcagccaagaagaggaggggccaagcaccucgccugacgcagaguccuuguuccgagaagcacucaguaacaagguggaugaguuggcucauuuucugcuccgcaaguaucgagccaaggagcuggucacaaaggcagaaaugcuggagagagucaucaaaaauuacaagcgcugcuuuccugugaucuucggcaaagccuccgagucccugaagaugaucuuuggcauugacgugaaggaaguggaccccgccagcaacaccuacacccuugucaccugccugggccuuuccuaugauggccugcuggguaauaaucagaucuuucccaagacaggccuucugauaaucguccugggcacaauugcaauggagggcgacagcgccucugaggaggaaaucugggaggagcugggugugauggggguguaugaugggagggagcacacugucuauggggagcccaggaaacugcucacccaagauugggugcaggaaaacuaccuggaguaccggcagguacccggcaguaauccugcgcgcuaugaguuccugugggguccaagggcucuggcugaaaccagcuaugugaaaguccuggagcauguggucagggucaaugcaagaguucgcauugccuacccaucccugcgugaagcagcuuuguuagaggaggaagagggagucuga

SEQ ID NO: 775 - RNA, 954 nt, Artificial Sequence; identical to SEQ ID NO: 774
  AAA68871

SEQ ID NO: 776 - RNA, 954 nt, Artificial Sequence
  AAY27261
augucuucugagcagaagagucagcacugcaagccugaggaaggcguugaggcccaagaagaggcccugggccuggugggugcgcaggcuccuacuacugaggagcaggaggcugcugucuccuccuccucuccucuggucccuggcacccuggaggaagugccugcugcugagucagcagguccuccccagaguccucagggagccucugccuuacccacuaccaucagcuucacuugcuggaggcaacccaaugaggguuccagcagccaagaagaggaggggccaagcaccucgccugacgcagaguccuuguuccgagaagcacucaguaacaagguggaugaguuggcucauuuucugcuccgcaaguaucgagccaaggagcuggucacaaaggcagaaaugcuggagagagucaucaaaaauuacaagcgcugcuuuccugugaucuucggcaaagccuccgagucccugaagaugaucuuuggcauugacgugaaggaaguggaccccaccagcaacaccuacacccuugucaccugccugggccuuuccuaugauggccugcuggguaauaaucagaucuuucccaagacaggccuucugauaaucguccugggcacaauugcaauggagggcgacagcgccucugaggaggaaaucugggaggagcugggugugauggggguguaugaugggagggagcacacugucuauggggagcccaggaaacugcucacccaagauugggugcaggaaaacuaccuggaguaccggcagguacccggcaguaauccugcgcgcuaugaguuccugugggguccaagggcucuggcugaaaccagcuaugugaaaguccuggagcauguggucagggucaaugcaagaguucgcauugccuacccaucccugcgugaagcagcuuuguuagaggaggaagagggagucuga

SEQ ID NO: 777 - RNA, 945 nt, Artificial Sequence
  BAF82126
augccucuugagcagaggagucagcacugcaagccugaagaaggccuugaggcccgaggagaggcccugggccuggugggugcgcaggcuccugcuacugaggagcaggaggcugccuccuccucuucuacucuaguugaagucacccugggggaggugccugcugccgagucaccagauccuccccagaguccucagggagccuccagccuccccacuaccaugaacuacccucucuggagccaauccuaugaggacuccagcaaccaagaagaggaggggccaagcaccuucccugaccuggagucugaguuccaagcagcacucaguaggaagcuggccaaguugguucauuuucugcuccucaaguaucgagccagggagccggucacaaaggcagaaaugcuggggagugucgucggaaauuggcaguacuucuuuccugugaucuucagcaaagcuuccgauuccuugcagcuggucuuuggcaucgagcugauggaaguggaccccaucggccacguguacaucuuugccaccugccugggccucuccuacgauggccugcugggugacaaucagaucaugcccaagacaggcuuccugauaaucauccuggccauaaucgcaaaagagggcgacugugccccugaggagaaaaucugggaggagcugaguguguuagagguguuugaggggagggaagacauuaucuucggggaucccaagaagcugcucacccaauauuucgugcaggaaaacuaccuggaguaccggcagguccccggcagugauccugcaugcuaugaguuccugugggguccaagggcccucauugaaaccagcuaugugaaaguccugcaccauaugguaaagaucaguggaggaccucgcauuuccuacccacuccugcaugagugggcuuugagagagggggaagaguga

SEQ ID NO: 778 - RNA, 945 nt, Artificial Sequence
  AAA19006
augccucuugagcagaggagucagcacugcaagccugaagaaggccuugaggcccgaggagaggcccugggccuggugggugcgcaggcuccugcuacugaggagcaggaggcugccuccuccucuucuacucuaguugaagucacccugggggaggugccugcugccgagucaccagauccuccccagaguccucagggagccuccagccuccccacuaccaugaacuacccucucuggagccaauccuaugaggacuccagcaaccaagaagaggaggggccaagcaccuucccugaccuggagucugaguuccaagcagcacucaguaggaagguggccaaguugguucauuuucugcuccucaaguaucgagccagggagccggucacaaaggcagaaaugcuggggagugucgucggaaauuggcaguacuucuuuccugugaucuucagcaaagcuuccgauuccuugcagcuggucuuuggcaucgagcugauggaaguggaccccaucggccacguguacaucuuugccaccugccugggccucuccuacgauggccugcugggugacaaucagaucaugcccaagacaggcuuccugauaaucauccuggccauaaucgcaaaagagggcgacugugccccugaggagaaaaucugggaggagcugaguguguuagagguguuugaggggagggaagacaguaucuucggggaucccaagaagcugcucacccaauauuucgugcaggaaaacuaccuggaguaccggcagguccccggcagugauccugcaugcuaugaguuccugugggguccaagggcccucauugaaaccagcuaugugaaaguccugcaccauaugguaaagaucaguggaggaccucgcauuuccuacccacuccugcaugagugggcuuugagagagggggaagaguga

SEQ ID NO: 779 - RNA, 945 nt, Artificial Sequence
  CAG46567
augccacuugagcagaggagucagcacugcaagccugaagaaggccuugaggcccgaggagaggcccugggccuggugggugcgcaggcuccugcuacugaggagcaggaggcugccuccuccucuucuacucuaguugaagucacccugggggaggugccugcugccgagucaccagauccuccccagaguccucagggagccuccagccuccccacuaccaugaacuacccucucuggagccaauccuaugaggacuccagcaaccaagaagaggaggggccaagcaccuucccugaccuggagucugaguuccaagcagcacucaguaggaagguggccaaguugguucauuuucugcuccucaaguaucgagccagggagccggucacaaaggcagaaaugcuggggagugucgucggaaauuggcaguacuucuuuccugugaucuucagcaaagcuuccgauuccuugcagcuggucuuuggcaucgagcugauggaaguggaccccaucggccacguguacaucuuugccaccugccugggccucuccuacgauggccugcugggugacaaucagaucaugcccaagacaggcuuccugauaaucauccuggccauaaucgcaaaagagggcgacugugccccugaggagaaaaucugggaggagcugaguguguuagagguguuugaggggagggaagacaguaucuucggggaucccaagaagcugcucacccaauauuucgugcaggaaaacuaccuggaguaccggcagguccccggcagugauccugcaugcuaugaguuccugugggguccaagggcccucauugaaaccagcuaugugaaaguccugcaccauaugguaaagaucaguggaggaccucgcauuuccuacccacuccugcaugagugggcuuuuagagagggggaagaguga

SEQ ID NO: 780 - RNA, 948 nt, Artificial Sequence
  AAA68877
augucucucgagcagaggaguccgcacugcaagccugaugaagaccuugaagcccaaggagaggacuugggccugaugggugcacaggaacccacaggcgaggaggaggagacuaccuccuccucugacagcaaggaggaggaggugucugcugcugggucaucaaguccuccccagaguccucagggaggcgcuuccuccuccauuuccgucuacuacacuuuauggagccaauucgaugagggcuccagcagucaagaagaggaagagccaagcuccucggucgacccagcucagcuggaguucauguuccaagaagcacugaaauugaagguggcugaguugguucauuuccugcuccacaaauaucgagucaaggagccggucacaaaggcagaaaugcuggagagcgucaucaaaaauuacaagcgcuacuuuccugugaucuucggcaaagccuccgaguucaugcaggugaucuuuggcacugaugugaaggagguggaccccgccggccacuccuacauccuugucacugcucuuggccucucgugcgauagcaugcugggugauggucauagcaugcccaaggccgcccuccugaucauuguccugggugugauccuaaccaaagacaacugcgccccugaagagguuaucugggaagcguugagugugauggggguguauguugggaaggagcacauguucuacggggagcccaggaagcugcucacccaagauugggugcaggaaaacuaccuggaguaccggcaggugcccggcagugauccugcgcacuacgaguuccugugggguuccaaggcccacgcugaaaccagcuaugagaaggucauaaauuauuuggucaugcucaaugcaagagagcccaucugcuacccaucccuuuaugaagagguuuugggagaggagcaagagggagucuga

SEQ ID NO: 781 - RNA, 1044 nt, Artificial Sequence
  AAI01309
augccucgaggucagaagaguaaacuccgugccagggaaaaacgccgucaggcccgaggagggcuggaagauuugauagaugcucuggacauuuuagaagaggaggaagaaucuccccccucugccucugcuuguuugaaggauguuuuccagaguucacuugauggggcauccaacaauccccauggacuucgggaagcccaauccaccagcacaucugcuacagcugcuucacacacaagacaucccgaaggagucaacgaccaaauggaagaaaggccaauaugcacacaagaucuagaagccacugauagcuuucccagaggcccuguagaugagaaaguaauuauauuggugcauuacuugcuguacaaguaccaaaugaaagagcccauuacaaaggcagauaugcugagaaauguaacccaaauguccaagagccaguucccuguaauccugagcagagcuucugagcaccuggagcugaucuuuggucuugaccugaaggaaguggagccuaauaagcacaucuauguccuugucaacaaacuagaucuaggcugugaugcaaagcugagugaugaaacaggcgugcccaagacuggccugcugaugacuguccuggguauuaucuucacaaauggcaauugugucgcugaggaggaagucuggaaaguguuuaacacgaugggguuauaugacggaauugagcacuucauguuuggggagcccaggaagcuccuuaccaaagauuuggugaaagaaaauuaccuggaguaccagcaagugcccaacagugauccuccacgcuaucaauuccuauggggcccaagagcccaugcugaaaccagcaagaugaaaguucuugaguuuuuggccaagguaaaugauacagcucccagugaauucucaaacugguauacagaggcuuuacaagaugaggaagagagagccagagccagaguugcagccaaggcucgcguuagugccacagccggugcacguuccaagguuaaguccagcaaguccucccaacugcaguaa

SEQ ID NO: 782 - RNA, 975 nt, Artificial Sequence
  CCDS43927.1
augucucaggaucaggagaguccacgaugcacacaugaucagcaccuucagaccuucagugagacccagagccuggagguugcacaggucuccaaggcucuggagaagacccuccucuccuccucccauccucuagugccuggcaaacugaaggaagcuccugcugcuaaggcagagaguccucuugagguuccucagaguuucugcuccucuuccauugccgucacaaccaccucaucaagugaaucugaugaggcuuccagcaaucaagaagaggaagauaguccaagcuccucagaggauacaucagaccccaggaaugugcccgcagaugcucucgaccagaaaguggcuuuuuuggugaauuucaugcugcacaagugucagaugaaaaagccaauaacaaaggcagauauguugaagauuaucaucaaagaugaugagagccacuucucugagauccuccugagagcuucugagcaccuagagaugauauuuggccuugaugugguggagguggaccccaccacccauugcuauggccucuucaucaaacugggccucaccuaugaugggaugcugaguggugaaaagggugugcccaagacuggccuccugauaauuguccugggugugaucuucaugaagggcaaccgugccacugaagaggaagucugggaagugcugaauuugacgggaguauauucugggaagaagcacuucaucuuuggagagcccagaaugcucaucaccaaagauuuugugaaggagaaguaccuggaguaccagcagguggccaacagugauccugcacgauaugaauuccuguggggcccaagagccaaagcugaaaccagcaagaugaaaguccuggaguuuguggccaaaguucaugggucuuacccacauucuuucccaucucaguaugcggaagcucugaaagaggaagaagagagagcuagagccagaauuuga

SEQ ID NO: 783 - RNA, 1011 nt, Artificial Sequence
  CCDS59524.1
augccucgcggucaggcgaguaagcgccgugcccgugagaaacgccgccaggcucgaggugaagaccaaugucucgggggugcucaagccaccgcagcagagaaggaaaagcugccauccuccuccucuccugcaugccagaguccuccccagagcuuccccaaugcaggcauuccucaggagucccagagagccagcuaccccagcucuccugcuucagcuguuucacucacaaguucugaugaaggugccaagggccaaaagggggaaagucccaacuccuuccauggcccguccuccucugagagcacaggaagagaucuucugaacacgaagacgggcgaauuggugcaguuccuccucaacaaguauauaaggaaagagcccauuacgagggaagccaugcugaagguuaucaacagaaaguacaagcagcacuucccugagauccuccggagaagcacugagaacguagagguggucuuuggccucuaccugaaggaaauggaccccagccgucaguccuaugugcuuguuggcaagcuggacuuucccaaucaaggaagcuugagcgauggcgggggcuuuccccugagcgggcuccugaugguucuccugagcaccaucuucaugcauggcaaccgugccacugaggaagagaugugggaaugccugaaugcauuggggauguauaaggguaggaagcacuucaucuauggggagccccaggagcuugucaccaaagauuuggugcgagagggguaccuggaguaccagcaggugcccagcagcgauccuccacgcuacgaguuccuguggggucccagggcccgugcugaaaccagcaaaaugaaaguccuggaguuuguggccaagcucaaugauaccguugccaguaccuacaagucccgguaugaggaggcucugagagaggaggaagagcaagccagagccagagcgguagccagggauagcgccagggccagggcuagcagguccuuucagcccuag

SEQ ID NO: 784 - RNA, 1044 nt, Artificial Sequence
  AAC23616
augccucggggucagaagaguaagcuccgugcucgugagaaacgccgcaaggcgcgagaggagacccagggucucaagguucgucacgccacugcagcagagaaagaggagugccccuccuccucuccuguuuuaggggauacucccacaagcuccccugcugcuggcauuccccagaagccucagggagcuccacccaccaccacugcugcugcagcugugucauguaccgaaucugacgaaggugccaaaugccaaggugaggaaaaugcaaguuucucccaggccacaacauccacugagagcucagucaaagauccuguagccugggaggcaggaaugcugaugcacuucauucuacguaaguauaaaaugagagagcccauuaugaaggcagauaugcugaagguuguugaugaaaaguacaaggaucacuucacugagauccucaauggagccucucgccgcuuggagcucgucuuuggccuugauuugaaggaagacaacccuaguagccacaccuacacccucgucaguaagcuaaaccucaccaaugauggaaaccugagcaaugauugggacuuucccaggaaugggcuucugaugccucuccugggugugaucuucuuaaagggcaacucugccaccgaggaagagaucuggaaauucaugaauguguugggagccuaugauggagaggagcacuuaaucuauggggaaccccguaaguucaucacccaagaucuggugcaggaaaaauaucugaaguacgagcaggugcccaacagugaucccccacgcuaucaauuccuaugggguccgagagccuaugcugaaaccaccaagaugaaaguccucgaguuuuuggccaagaugaauggugccacuccccgugacuucccaucccauuaugaagaggcuuugagagaugaggaagagagagcccaaguccgauccaguguuagagccaggcgucgcacuacugccacgacuuuuagagcgcguucuagagccccauucagcagguccucccaccccauguga

SEQ ID NO: 785 - RNA, 960 nt, Artificial Sequence
  AAD10635
augccucguggucagaagaguaagcuccgugcccgugagaaacgccgcaaggcccgagaugagacccggggucucaauguuccucaggucacugaagcagaggaagaagaggcccccugcuguuccucuucuguuucugggggugcugcuucaagcucuccugcugcuggcauuccccaggagccucagagagccccaaccacugccgcugcugcggcugcggguguuucauccacaaaaucuaaaaaaggugccaagagccaccaaggugagaaaaaugcaaguuccucccaggccucaacauccacuaagagcccaagcgaagauccucuaaccaggaagucagggucguuggugcaguuccuguuguacaaguauaaaauaaaaaaguccguuacaaagggagaaaugcugaaaauuguuggcaaaagguucagggagcacuucccugagauccucaagaaagccucugagggccucaguguugucuuuggccuugagcugaauaaagucaaccccaacggccacacuuacaccuucaucgacaagguagaccucacugaugaggaaucccugcucaguuccugggacuuucccaggagaaagcuucugaugccucuccugggugugaucuucuuaaauggcaacucagcuacugaggaagagaucugggaauuccugaauauguugggagucuaugauggagaggagcacucagucuuuggggaacccuggaagcucaucaccaaagaucuggugcaggaaaaauaucuggaguacaagcaggugcccagcagugaucccccacgcuuucaauuccugugggguccgagagccuaugcugaaaccagcaagaugaaaguccuggaguuuuuggccaagguaaaugguaccacccccugugccuucccaacccauuacgaagaagcuuugaaagaugaagagaaagccggagucuga

SEQ ID NO: 786 - RNA, 1041 nt, Artificial Sequence
  AAD10636
augccucggggucagaagaguacgcuccaugcacgugagaaacgccagcagacccggggucagacccaggaucaccagggugcucagaucacugcaacuaacaagaaaaaaguauccuuuucauccccucuuauuuugggggcuacuauccagaaaaagucugcugguaggucacguagugcucucaagaagccucagagagcacuauccaccacuacaucuguagauguuucuuacaaaaagucauacaagggagccaacagcaaaauugagaaaaagcaaagcuucucucagggucuauccuccacugugcagucucgcacagacccucuaaucaugaagacaaauauguuggugcaguuccugauggaaauguacaagaugaaaaagcccauuaugaaagcagauaugcuaaaaauuguccaaaaaagccauaagaauugcuucccugagauccuuaaaaaagcuucuuucaacauggaggugguauuugguguugauuuaaagaaaguugauucuaccaaggacuccuauguccuugucagcaaaauggaucuccccaacaaugggacagugacucgugggaggggauuucccaagacaggucuccugcugaaucuccugggcgugaucuucaugaagggcaacugugccacugaggagaagaucugggaauuccugaauaagaugagaauauaugaugggaagaaacacuucauauuuggggagcccagaaagcucaucacccaagauuuggugaagcuuaaauaccuggaguaccgacaagugcccaacaguaauccugcacgcuaugaauuccugugggguccaagagcccaugcugaaaccagcaagaugaagguccuggaguuuugggccaaggucaauaaaacuguccccagugcguuccaguucugguaugaagaggcuuugagagaugaggaagaaagaguccaagcugcagcuaugcucaaugauggcaguagugccaugggcagaaaguguuccaaggccaaggcuagcagcucuucccacgccuag

SEQ ID NO: 787 - RNA, 1041 nt, Artificial Sequence
  AAC23619
augccucggggucagaagaguaagcuccgugcccgugagaaacgccagcggacccguggucagacccaggaucucaagguuggucagccuacugcagcagagaaagaagagucuccuuccucuuccucaucuguuuugagggauacugccuccagcucccuugcuuuuggcauuccccaggagccucagagagagccacccaccaccucugcugcugcagcuaugucaugcacuggaucugauaaaggcgacgagagccaagaugaggaaaaugcaaguuccucccaggccucaacauccacugagagaucacucaaagauucucuaaccaggaagacgaagauguuagugcaguuccugcuguacaaguauaaaaugaaagagcccacuacaaaggcagaaaugcugaagaucaucagcaaaaaguacaaggagcacuucccugagaucuucaggaaagucucucagcgcacggagcuggucuuuggccuugccuugaaggaggucaaccccaccacucacuccuacauccucgucagcaugcuaggccccaacgauggaaaccagagcagugccuggacccuuccaaggaaugggcuucugaugccucuacugagugugaucuucuuaaauggcaacugugcccgugaagaggaaaucugggaauuccugaauaugcuggggaucuaugauggaaagaggcaccuuaucuuuggggaaccccgaaagcucaucacccaagaucuggugcaggaaaaauaucuggaauaccagcaggugcccaacagugaucccccacgcuaucaauuccugugggguccaagagcucaugcagaaaccagcaagaugaaaguccuggaguuuuuggccaaggugaaugacaccacccccaauaacuucccacuccuuuaugaagaggcuuugagagaugaagaagagagagcuggagcccggcccagaguugcagccaggcguggcacuacagccaugacuagugcguauuccagggccacauccaguagcucuucccaacccauguga

SEQ ID NO: 788 - RNA, 828 nt, Artificial Sequence
  CCDS65233.1
augacuucugcagguguuuuuaaugcaggaucugacgaaagggcuaacaguagagaugaggaguacccauguuccucagaggucucacccuccacugagaguucaugcagcaauuucauaaauauuaagguggguuuguuggagcaguuccugcucuacaaguucaaaaugaaacagcguauuuugaaggaagauaugcugaagauugucaacccaagauaccaaaaccaguuugcugagauucacagaagagcuucugagcacauugagguugucuuugcaguugacuugaaggaagucaacccaacuugucacuuauaugaccuugucagcaagcugaaacuccccaacaaugggaggauucauguuggcaaaguguuacccaagacuggucuccucaugacuuuccugguugugaucuuccugaaaggcaacugugccaacaaggaagauaccuggaaauuucuggauaugaugcaaauauaugaugggaagaaguacuacaucuauggagagcccaggaagcucaucacucaggauuucgugaggcuaacguaccuggaguaccaccaggugcccugcaguuauccugcacacuaucaauuccuuugggguccaagagccuauacugaaaccagcaagaugaaaguccuggaauauuuggccaaggucaaugauauugcuccaggugccuucucaucacaauaugaagaggcuuugcaagaugaggaagagagcccaagccagagaugcagccgaaacuggcacuacugcaguggccaagacugucucagggcgaaguucagcagcuucucucaacccuauuga

SEQ ID NO: 789 - RNA, 1224 nt, Artificial Sequence
  AAH67286
augccucggggucacaagaguaagcuccguaccugugagaaacgccaagagaccaauggucagccacagggucucacggguccccaggccacugcagagaagcaggaagagucccacucuuccucauccucuucucgcgcuugucugggugauugucguaggucuucugaugccuccauuccucaggagucucagggagugucacccacugggucuccugaugcaguuguuucauauucaaaauccgauguggcugccaacggccaagaugagaaaaguccaagcaccucccgugaugccuccguuccucaggagucucagggagcuucacccacuggcucuccugaugcagguguuucaggcucaaaauaugauguggcugccaacggccaagaugagaaaaguccaagcacuucccaugaugucuccguuccucaggagucucagggagcuucacccacuggcucgccugaugcagguguuucaggcucaaaauaugauguggcugccgagggugaagaugaggaaaguguaagcgccucacagaaagccaucauuuuuaagcgcuuaagcaaagaugcuguaaagaagaaggcgugcacguuggcgcaauuccugcagaagaaguuugagaagaaagaguccauuuugaaggcagacaugcugaaguguguccgcagagaguacaagcccuacuucccucagauccucaacagaaccucccaacauuuggugguggccuuuggcguugaauugaaagaaauggauuccagcggcgaguccuacacccuugucagcaagcuaggccuccccagugaaggaauucugaguggugauaaugcgcugccgaagucgggucuccugaugucgcuccugguugugaucuucaugaacggcaacugugccacugaagaggaggucugggaguuccugggucuguuggggauauaugaugggauccugcauucaaucuauggggaugcucggaagaucauuacugaagauuuggugcaagauaaguacgugguuuaccggcaggugugcaacagugauccuccaugcuaugaguuccugugggguccacgagccuaugcugaaaccaccaagaugagaguccugcguguuuuggccgacagcaguaacaccagucccgguuuauacccacaucuguaugaagacgcuuugauagaugagguagagagagcauugagacugagagcuuaa

SEQ ID NO: 790 - RNA, 3429 nt, Artificial Sequence
  CCDS35417.1
augggggacaaggauaugccuacugcugggaugccgagucuucuccagaguuccucugagaguccucagaguuguccugagggggaggacucccagucuccucuccagauuccccagaguucuccugagagcgacgacacccuguauccucuccagaguccucagagucguucugagggggaggacuccucggauccucuccagagaccuccugaggggaaggacucccagucuccucuccagauuccccagaguucuccugagggcgacgacacccagucuccucuccagaauucucagaguucuccugaggggaaggacucccugucuccucuagagauuucucagagcccuccugagggugaggauguccagucuccucugcagaauccugcgaguuccuucuucuccucugcuuuauugaguauuuuccagaguuccccugagaguacucaaaguccuuuugaggguuuuccccagucuguucuccagauuccugugagcgccgccuccuccuccacuuuagugaguauuuuccagaguuccccugagaguacucaaaguccuuuugaggguuuuccccagucuccacuccagauuccugugagccgcuccuucuccuccacuuuauugaguauuuuccagaguuccccugagagaacucagaguacuuuugaggguuuugcccagucuccucuccagauuccugugagccccuccuccuccuccacuuuacugagucuuuuccagaguuucucugagagaacucagaguacuuuugaggguuuugcccagucuucucuccagauuccugugagccccuccuucuccuccacuuuagugagucuuuuccagaguuccccugagagaacucagaguacuuuugaggguuuuccccagucuccucuccagauuccugugagcuccuccuccuccuccacuuuauugagucuuuuccagaguuccccugagagaacucacaguacuuuugaggguuuuccccagucucuucuccagauuccuaugaccuccuccuucuccucuacuuuauugaguauuuuccagaguucuccugagagugcucaaaguacuuuugaggguuuuccccagucuccucuccagauuccugggagccccuccuucuccuccacuuuacugagucuuuuccagaguuccccugagagaacucacaguacuuuugaggguuuuccccagucuccucuccagauuccuaugaccuccuccuucuccucuacuuuauugaguauuuuacagaguucuccugagagugcucaaagugcuuuugaggguuuuccccagucuccucuccagauuccugugagcuccucuuucuccuacacuuuauugagucuuuuccagaguuccccugagagaacucacaguacuuuugaggguuuuccccagucuccucuccagauuccugugagcuccuccuccuccuccuccacuuuauugagucuuuuccagaguuccccugaguguacucaaaguacuuuugaggguuuuccccagucuccucuccagauuccucagaguccuccugaaggggagaauacccauucuccucuccagauuguuccaagucuuccugagugggaggacucccugucuccucacuacuuuccucagagcccuccucagggggaggacucccuaucuccucacuacuuuccucagagcccuccucagggggaggacucccugucuccucacuacuuuccucagagcccucagggggaggacucccugucuccucacuacuuuccucagagcccuccucagggggaggacuccaugucuccucucuacuuuccucagaguccucuucagggggaggaauuccagucuucucuccagagcccugugagcaucugcuccuccuccacuccauccagucuuccccagaguuucccugagaguucucagaguccuccugaggggccuguccagucuccucuccauaguccucagagcccuccugaggggaugcacucccaaucuccucuccagaguccugagagugcuccugagggggaggauucccugucuccucuccaaauuccucagaguccucuugagggagaggacucccugucuucucuccauuuuccucagaguccuccugagugggaggacucccucucuccucuccacuuuccucaguuuccuccucagggggaggacuuccagucuucucuccagaguccugugaguaucugcuccuccuccacuucuuugagucuuccccagaguuucccugagaguccucagaguccuccugaggggccugcucagucuccucuccagagaccugucagcuccuucuucuccuacacuuuagcgagucuucuccaaaguucccaugagaguccucagaguccuccugaggggccugcccagucuccucuccagaguccugugagcuccuuccccuccuccacuucaucgagucuuucccagaguucuccugugagcuccuuccccuccuccacuucaucgagucuuuccaagaguuccccugagaguccucuccagaguccugugaucuccuucuccuccuccacuucauugagcccauucagugaagaguccagcagcccaguagaugaauauacaaguuccucagacaccuugcuagagagugauuccuugacagacagcgaguccuugauagagagcgagcccuuguucacuuauacacuggaugaaaagguggacgaguuggcgcgguuucuucuccucaaauaucaagugaagcagccuaucacaaaggcagagaugcugacgaaugucaucagcagguacacgggcuacuuuccugugaucuucaggaaagcccgugaguucauagagauacuuuuuggcauuucccugagagaaguggacccugaugacuccuaugucuuuguaaacacauuagaccucaccucugaggggugucugagugaugagcagggcaugucccagaaccgccuccugauucuuauucugaguaucaucuucauaaagggcaccuaugccucugaggaggucaucugggaugugcugaguggaauaggggugcgugcugggagggagcacuuugccuuuggggagcccagggagcuccucacuaaaguuugggugcaggaacauuaccuagaguaccgggaggugcccaacucuucuccuccucguuacgaauuccugugggguccaagagcucauucagaagucauuaagaggaaaguaguagaguuuuuggccaugcuaaagaauaccgucccuauuaccuuuccauccucuuacaaggaugcuuugaaagauguggaagagagagcccaggccauaauugacaccacagaugauucgacugccacagaaagugcaagcuccagugucaugucccccagcuucucuucugaguga

SEQ ID NO: 791 - RNA, 1122 nt, Artificial Sequence
  AAF07210
augccucccguuccaggcguuccauuccgcaacguugacaacgacuccccgaccucaguugaguuagaagacuggguagaugcacagcaucccacagaugaggaagaggaggaagccuccuccgccucuuccacuuuguacuuaguauuuucccccucuucuuucuccacauccucuucucugauucuuggugguccugaggaggaggaggugcccucuggugugauaccaaaucuuaccgagagcauucccaguaguccuccacaggguccuccacaggguccuucccagaguccucugagcuccugcugcuccucuuuuucauggagcucauucagugaggaguccagcagccagaaaggggaggauacaggcaccugucagggccugccagacagugaguccucuuucacauauacacuagaugaaaagguggccgaguuaguggaguuccugcuccucaaauacgaagcagaggagccuguaacagaggcagagaugcugaugauugucaucaaguacaaagauuacuuuccugugauacucaagagagcccgugaguucauggagcuucuuuuuggccuugcccugauagaagugggcccugaccacuucuguguguuugcaaacacaguaggccucaccgaugaggguagugaugaugagggcaugcccgagaacagccuccugauuauuauucugagugugaucuucauaaagggcaacugugccucugaggaggucaucugggaagugcugaaugcaguagggguauaugcugggagggagcacuucgucuauggggagccuagggagcuccucacuaaaguuugggugcagggacauuaccuggaguaucgggaggugccccacaguucuccuccauauuaugaauuccugugggguccaagagcccauucagaaagcaucaagaagaaaguacuagaguuuuuagccaagcugaacaacacuguuccuaguuccuuuccauccugguacaaggaugcuuugaaagauguggaagagagaguccaggccacaauugauaccgcagaugaugccacugucauggccagugaaagccucagugucauguccagcaacgucuccuuuucugaguga

SEQ ID NO: 792 - RNA, 1932 nt, Artificial Sequence
  AAM08355
augcugcugcccugccacuggguguuggaugccaccuucagugauggcagucuaggccagugggugaaaaacacaugugccacauaugccuuauccccaguggugcucccaccucagccccagccccggaaaaaggccacagauaaggacuauucugccuuucaucuugggcaucugagggaggugaggcuuuuucugagggguggaacuucagaucagcgaauggauagucuuguccucugccccacauacuucaagcucuggaggacccuaucaggguccccagguuuacaacuuucugacuugcauuuugggagucagccggaggggaaguuuucucugaggagggcaguuucaguuaagcagagggaggaaccccaggacuggccacucaacgagaagagaacucuguggaaggacagugaccuuccaacauggaggagaggcacaggcuacacccuuucccuuccugccgucagcccuggaaaaagguuguggggggagaaagcggggagcuugccagagagcgagcccuuguucacuuauacacuggaugaaaagguggacaaguuggugcaguuucuucuccucaaauaucaagcaaaagagccucucacaagagcagagaugcagaugaaugucaucaacacauacacgggcuacuuuccuaugaucuucaggaaagcccgugaguucauagagauucuuuuuggcauuucccugacagaaguggaccccgaccauuucuaugucuuuguaaacacauuagaccucaccugugaggggagucugagugaugagcagggcaugccccagaaccgccuccugauucuuauucugagugugaucuucauaaagggcaacugugcaucugaggaggucaucugggaagugcugaaugcaauagggcccuggucagccuuggcaggguucgcggaugugcuuucccgacuugcacugugggagucugaaggaccugaagcauuuugcgaggagucuggacucaggucagcagagggaagcgucuuagaccuggccaauccucaaggacuugcaggccacagacaggaagauggccgccgagggcugaccgaggcguccccacaacagaagaagggaggagaagaugaggauaugccugcugcugggaugccaccucuuccccagaguccuccugagauuccuccccaggguccucccaagaucucuccccaggguccuccgcagaguccuccccagaguccucuagacuccugcucauccccucuuuuguggacccgauuggaugaggaguccagcagugaagaggaggauacagcuacuuggcaugccuugccagaaagugaauccuugcccagguaugcccuggaugaaaagguggcugaguuggugcaguuucuucuccucaaauaucaaacaaaagagccugucacaaaggcagagaugcugacgacugucaucaagaaguauaaggacuauuuucccaugaucuucgggaaagcccaugaguucauagagcuaauuuuuggcauugcccugacugauauggaccccgacaaccacuccuauuucuuugaagacacauuagaccucaccuaugagggaagccugauugaugaccagggcaugcccaagaacugucuccugauucuuauucucaguaugaucuucauaaagggcagcuguguccccgaggaggucaucugggaaguguugagugcaauagggcccauucagaggccagcaagagaagucuuagaguuuuuauccaagcuauccaguaucaucccuagugccuuuccauccugguacauggaugcuuugaaagauauggaagacagagcccaggccauaauugacaccacagaugaugcuacugccauggccagugcaagccccagugucauguccaccaacuucuguccugaguga

SEQ ID NO: 793 - RNA, 2337 nt, Artificial Sequence
  AAG23757
auggcucagaaaauggacuguggugcgggccuccucggcuuccaggcugaggccuccguagaagacagcgccuugcuuaugcagaccuugauggaggccauccagaucucagaggcuccaccuacuaaccaggccaccgcagcugcuaguccccagaguucacagcccccaacugccaaugagauggcugacauucagguuucagcagcugccgcuaggccuaagucagccuuuaaaguccagaaugccaccacaaaaggcccaaauggugucuaugauuucucucaggcucauaaugccaaggaugugcccaacacgcagcccaaggcagccuuuaagucccaaaaugcuaccccaaaggguccaaaugcugccuaugauuuuucccaggcagcaaccacuggugaguuagcugcuaacaagucugagauggccuucaaggcccagaaugccacuacuaaagugggcccaaaugccaccuacaauuucucucagucucucaaugccaaugaccuggccaacagcaggccuaagaccccuuucaaggcuuggaaugauaccacuaaggccccaacagcugauacccagacccagaauguaaaucaggccaaaauggccacuucccaggcugacauagagaccgacccagguaucucugaaccugacggugcaacugcacagacaucagcagaugguucccaggcucagaaucuggagucccggacaauaauucggggcaagaggacccgcaagauuaauaacuugaauguugaagagaacagcaguggggaucagaggcgggccccacuggcugcagggaccuggaggucugcaccaguuccagugaccacucagaacccaccuggcgcaccccccaaugugcucuggcagacgccauuggcuuggcagaaccccucaggcuggcaaaaccagacagccaggcagaccccaccagcacgucagagcccuccagcuaggcagaccccaccagccuggcagaacccagucgcuuggcagaacccagugauuuggccaaacccaguaaucuggcagaacccagugaucuggccaaaccccauugucuggcccggcccuguugucuggccgaauccacuggccuggcagaauccaccuggauggcagacuccaccuggauggcagaccccaccgggcuggcaggguccuccagacuggcaagguccuccugacuggccgcuaccacccgacuggccacugccaccugauuggccacuucccacugacuggccacuaccaccugacuggauccccgcugauuggccaauuccaccugacuggcagaaccugcgccccucgccuaaccugcgcccuucucccaacucgcgugccucacagaacccaggugcugcacagccccgagauguggcccuucuucaggaaagagcaaauaaguuggucaaguacuugaugcuuaaggacuacacaaaggugcccaucaagcgcucagaaaugcugagagauaucauccgugaauacacugauguuuauccagaaaucauugaacgugcaugcuuuguccuagagaagaaauuugggauucaacugaaagaaauugacaaagaagaacaccuguauauucucaucaguacccccgagucccuggcuggcauacugggaacgaccaaagacacacccaagcucggucuccucuuggugauucugggugucaucuucaugaauggcaaccgugccagugaggcuguccucugggaggcacuacgcaagaugggacugcguccuggggugagacauccccuccuuggagaucuaaggaaacuucucaccuaugaguuuguaaagcagaaauaccuggacuacagacgagugcccaacagcaaccccccggaguaugaguuccucuggggccuccguuccuaccaugagacuagcaagaugaaagugcugagauucauugcagagguucagaaaagagacccucgugacuggacugcacaguucauggaggcugcagaugaggccuuggaugcucuggaugcugcugcagcugaggccgaagccagggcugaagcaagaacccgcaugggaauuggagaugaggcugugucugggcccuggagcugggaugacauugaguuugagcugcugaccugggaugaggaaggagauuuuggagaucccugguccagaauuccauuuaccuucugggccagauaccaccagaaugcccgcuccagauucccucagaccuuugccggucccauuauugguccuggugguacagccagugccaacuucgcugccaacuuuggugccauugguuucuucuggguugaguga

SEQ ID NO: 794 - RNA, 1821 nt, Artificial Sequence
  AAD28598
augucugacacaagcgagaguggugcaggucuaacucgcuuccaggcugaagcuucagaaaaggacaguagcucgaugaugcagacucuguugacagugacccagaauguggaggucccagagacaccgaaggccucaaaggcacuggaggucucagaggaugugaaggucucaaaagccucuggggucucaaaggccacagaggucucaaagaccccagaggcucgggaggcaccugccacccaggccucgucuacuacucagcugacugauacccagguucuggcagcugaaaacaagagucuagcagcugacaccaagaaacagaaugcugacccgcaggcugugacaaugccugccacugagaccaaaaaggucagccauguggcugauacgaaggucaauacaaaggcucaggagacugaggcugcacccucucaggccccagcagaugaaccugagccugagagugcagcugcccagucucaggagaaucaggauacucggcccaaggucaaagccaagaaagcccgaaaggugaagcaucuggauggggaagaggauggcagcagugaucagagucaggcuucuggaaccacagguggccgaagggucucaaaggcucuaauggccucaauggcccgcagggcuucaaggggucccauagccuuuugggcccgcagggcaucaaggacucgguuggcugcuugggcccggagagccuugcucucccugagaucaccuaaagcccguaggggcaaggcucgccguagagcugccaagcuccagucaucccaagagccugaagcaccaccaccucgggauguggcccuuuugcaagggagggcaaaugauuuggugaaguaccuuuuggcuaaagaccagacgaagauucccaucaagcgcucggacaugcugaaggacaucaucaaagaauacacugauguguaccccgaaaucauugaacgagcaggcuauucuuuggagaagguauuugggauucaauugaaggaaauugauaagaaugaccacuuguacauucuucucagcaccuuagagcccacugaugcaggcauacugggaacgacuaaggacucacccaagcugggucugcucauggugcuucuuagcaucaucuucaugaauggaaaucgguccagugaggcugucaucugggaggugcugcgcaaguuggggcugcgcccugggauacaucauucacucuuuggggacgugaagaagcucaucacugaugaguuugugaagcagaaguaccuggacuaugccagaguccccaauagcaaucccccugaauaugaguucuucuggggccugcgcucuuacuaugagaccagcaagaugaaaguccucaaguuugccugcaagguacaaaagaaggaucccaaggaaugggcagcucaguaccgagaggcgauggaagcggauuugaaggcugcagcugaggcugcagcugaagccaaggcuagggccgagauuagagcucgaaugggcauugggcucggcucggagaaugcugccgggcccugcaacugggacgaagcugauaucggacccugggccaaagcccggauccaggcgggagcagaagcuaaagccaaagcccaagagaguggcagugccagcacuggugccaguaccaguaccaauaacagugccagugccagugccagcaccagugguggcuucagugcuggugccagccugaccgccacucucacauuugggcucuucgcuggccuugguggagcuggugccagcaccaguggcagcucuggugccugugguuucuccuacaaguga

SEQ ID NO: 795 - RNA, 2226 nt, Artificial Sequence
  AAH63838
auggcugagggaagcuucagcgugcaaucggaaagcuacaguguugaagacauggaugaggguagcgacgaagucggggaggaagagaugguugaaggcaacgacuaugaagaauucggugcguuugguggcuauggcacccucaccagcuuugacauccauauccucagagccuucggaagcuuggguccaggccuucgcaucuuaucgaaugagcccugggaacuggaaaacccugugcuggcccagacccugguggaggcauugcagcuggauccggaaacacuugccaaugagacggccgcccgugcugccaacguagcccgcgccgccgccuccaaccgugcggcucgggccgcugccgccgcugcccguaccgccuucagucagguggucgcuagccaccggguggccacgccgcaggucucaggagaggauacccagcccacgaccuacgccgccgaggcucaggggcccaccccugagccaccccuugcuucuccgcagaccucccagauguuagucaccaguaagauggcugcccccgaggcuccggcaaccuccgcacagucccagacaggcuccccggcccaggaggcugcuacugagggcccuaguagcgccugugcuuucucucaggcuccgugugccagggagguggacgccaaccggcccagcacagccuuccugggccagaaugaugucuucgauuucacucagccggcaggugucaguggcauggccuucccgcgccccaagagaccugccccagcccaagaggcugccacagagggccccagugcugccucuggugugccccagacgggaccuggcagggagguggcagccacccggcccaagaccaccaagucggggaaggcgcuggccaagacucgguggguggagccucagaauguuguggcagcagcugcugccaaggccaagauggccacgagcaucccugagccggagggugcagcugcugccacugcucagcacagugcugagcccugggccaggaugggaggcaagaggaccaagaaguccaagcaccuggaugaugaguaugagagcagcgaggaggagagagagacucccgcggucccacccaccuggagagcaucacagcccucauugacggugcgggcucaguuggccccucggcccccgauggccccgaggucccagauacccucaaggcacguacugugccugcccccccgcaacgugacccuucugcaggagagggcaaauaaguuggugaaauaccugaugauuaaggacuacaagaagauccccaucaagcgcgcagacaugcugaaggaugucaucagagaauaugaugaacauuucccugagaucauugaacgagcaacguacacccuggaaaagaaguuugggauccaccugaaggagaucgacaaggaagaacaccuguauauucuugucugcacacgggacuccucagcucgccuccuuggaaaaaccaaggacacucccaggcugagucuccucuuggugauucugggcgucaucuucaugaauggcaaccgugccagcgaggcuguccucugggaggcacuacgcaagaugggacugcgcccuggggugaggcacccauuccucggcgaucugaggaagcucaucacagaugacuuugugaagcagaaguaccuggaauacaagaagauccccaacagcaacccaccugaguaugaauuccucuggggccugcgagcccgccaugagaccagcaagaugaggguccugagauucaucgcccagaaucagaaccgagacccccgggaauggaaggcucauuucuuggaggcuguggaugaugcuuucaagacaauggauguggauauggccgaggaacaugccagggcccagaugagggcccagaugaauaucggggaugaagcgcugauuggacgguggagcugggaugacauacaagucgagcuccugaccugggaugaggacggagauuuuggcgaugccugggccaggauccccuuugcuuucugggccagauaccaucaguacauucugaauagcaaccgugccaacaggagggccacguggagagcuggcgucagcaguggcaccaauggaggggccagcaccagcguccuagauggccccagcaccagcuccaccauccggaccagaaaugcugccagagcuggcgccagcuucuucuccuggauccagcaccguuga

SEQ ID NO: 796 - RNA, 1122 nt, Artificial Sequence
  CAG33449
augccucccguuccaggcguuccauuccgcaacguugacaacgacuccccgaccucaguugaguuagaagacuggguagaugcacagcaucccacagaugaggaagaggaggaagccuccuccgccucuuccacuuuguacuuaguauuuucccccucuucuuucuccacauccucuucucugauucuuggugguccugaggaggaggaggugcccucuggugugauaccaaaucuuaccgagagcauucccaguaguccuccacaggguccuccacaggguccuucccagaguccucugagcuccugcugcuccucuuuuucauggagcucauucagugaggaguccagcagccagaaaggggaggauacaggcaccugucagggccugccagacagugaguccucuuucacauauacacuagaugaaaagguggccgaguuaguggaguuccugcuccucaaauacgaagcagaggagccuguaacagaggcagagaugcugaugauugucaucaaguacaaagauuacuuuccugugauacucaagagagcccgugaguucauggagcuucuuuuuggccuugcccugauagaagugggcccugaccacuucuguguguuugcaaacacaguaggccucaccgaugaggguagugaugaugagggcaugcccgagaacagccuccugauuauuauucugagugugaucuucauaaagggcaacugugccucugaggaggucaucugggaagugcugaaugcaguagggguauaugcugggagggagcacuucgucuauggggagccuagggagcuccucacuaaaguuugggugcagggacauuaccuggaguaucgggaggugccccacaguucuccuccauauuaugaauuccugugggguccaagagcccauucagaaagcaucaagaagaaaguacuagaguuuuuagccaagcugaacaacacuguuccuaguuccuuuccauccugguacaaggaugcuuugaaagauguggaagagagaguccaggccacaauugauaccgcagaugaugccacugucauggccagugaaagccucagugucauguccagcaacgucuccuuuucugauuaa

SEQ ID NO: 797 - RNA, 2874 nt, Artificial Sequence
  AAM08354
augucucugguaagccagaauucgcgccgccgccgccgccgcguugcaaaggcuacugcgcacaacagcagcuggggcgaaaugcaggccccuaaugcccccggucuccccgcugaugugccaggcucagacgucccccagggucccagcgauucccagauccuccagggccucugcgccucugagggcccaagcaccuccguucugcccaccuccgcugagggcccaagcaccuuugugccgcccaccaucucugaggccucaagcgccuccgggcagcccaccaucucugagggaccuggcaccuccgugcugcccacccccagugagggccuaagcaccuccgggccucccaccaucucuaaggggcugugcaccucugugacgcuugccgccucugagggccggaacaccuccaggccgcccacuuccucugaggaaccuagcaccuccgugccgcccaccgccucugagguaccgagcaccucccugccgcccaccccuggugagggaacgagcaccuccgugccgcccacagccuaugagggaccaagcaccuccguggugcccaccccugaugagggaccaagcaccuccgugcugccuacaccuggugagggaccaggcaccuccgugccgcucgccgccacugagggccugagcaccuccgugcaggccacuccugaugagggaccgagcaccuccgugccgcccaccgccacugagggccuaagcacccccgugccacccacccgugaugagggaccgagcaccuccgugccggccacuccuggugagggaccgagcaccuccgugcugcccgccgccucugacggacaaagcaucuccuuggugcccacccgcgguaagggaucaagcaccuccgugccccccaccgccaccgagggccugagcaccuccgugcagcccacugcuggugagggaucgagcaccuccgugccgcccaccccuggugggggacugagcaccuccgugccgcccaccgccacugaggaguugagcaccuccgugccgcccacucccggugagggaccaagcacuuccguacugccaauccccggugagggacugagcaccucugugccgcccaccgccucugauggaucggacaccuccgugccgcccacuccuggugagggcgcaagcaccuuagugcagcccaccgccccugacggaccgggaagcuccgugcugccuaacccuggugagggcccgagcacauuguuuagcucuagugcuucuguggaccggaaccccuccaaguguucccuuguuuugccaagcccuaggguaaccaaggccuccguggacucagauucugaggguccuaagggugcagaaggcccuauagaauucgagguccugagagacugugagagccccaacuccauuaguauuaugggccucaauacuucccggguugcaauuacccugaagccccaagacccuauggaacagaacguagcugagcuguugcaguuccugcuggugaaggaucagagcaaguacccuauccgggagucugaaaugcgggaauauauuguuaaagaauaucgcaaccaguuuccugagauacucaggcgagcagcagcccaccuggagugcauuuuuagguuugaauugagagaacuugacccugaggcacacaccuacauucuguuaaacaaacugggaccugugcccuuugaaggguuagaagagagcccaaaugggccaaagaugggccuccugaugaugauucuaggccaaauauuccugaauggcaaccaagccaaggaggcugagauuugggaaaugcucuggaggaugggggugcagcgggaaaggaggcuuuccauuuuugggaacccaaagagacuucugucuguggaguuuguauggcagcguuacuuagacuacaggccaguaacugacuguaaaccaguggaguaugaguuuuucuggggcccaagaucccaccuagaaaccaccaagaugaaaauucugaaguucauggcgaaaauauauaacaaagauccuauggauuggccagagaaauacaacgaagcucuggaagaagaugcugccagagccuuugcugaggguuggcaggcucucccucacuuuaggaggcccuuuuuugaggaagcugcugcagagguaccauccccugauucagagguuuccagcuauuccucaaaauaugccccacauucauggccugagucaagauuggagagcaaggcaaggaagcuggugcaguuauuucugcuuauggauucaacuaagcugccuauaccaaagaaaggaauucuguacuacauuggccgagagugcagcaaaguguucccugaccuccugaaucgugcugcccgcacccugaaccaugucuaugggacagaacuagugguacuugaucccaggaaucacuccuauacucuguacaaccgaagggagauggaagaaacugaggagaucguagacaguccaaacaggccuggcaacaacuuuuugaugcagguccuaagcuucaucuuuauuaugggcaaccaugccagggagucugcagucugggccuuucugcggggcuuagggguucaagcugggagaaagcaugugauuaccugcagauacuugagucagcgcuauauagacaguuuacggguuccugacagugauccagugcaauaugaguuuguaugggguccuagagcccguuuggaaaccucuaagaugaaagccuugcgauauguggccagaauccacagaaaggaaccacaggacuggccacagcaguacagggaggcaauggaagaugaggccaauagagcugauguugggcacaggcaaaucuuuguucacaacuucagguag

SEQ ID NO: 798 - RNA, 1572 nt, Artificial Sequence
  AAH93964
augucucugguaagccagaaugcacgccacuguagcgcagagaucacugcagauuacggcgacggcagaggugaaauacaagcuacuaacgccuccgggucccccaccuccaugcuagucguugaugccccccagugcccucaggcgccaaucaacucucagugugucaacacuucccaggccguucaggacccgaaugaccuggagguccugaucgacgagcaguccagacguuugggggcgcucaggguccaugacccucuagaagacaggucgauugcuuuggugaauuucaugagaaugaaaagccagacggaggggucuauccagcaguccgagaugcuggaguuucucagagaguacucagaucaguucccugagauccucagacgagccucagcucaccuggaccaggucuuuggguugaaccugagaguuauugauccucaggcugacaccuacaauuuagucagcaaacgggguuuccagaucaccgauaggauagcggagucccuggacaugccaaaagcaagucuccuggcccuaguccuaggccacauccucuugaaugggaaccgagcaagagaggccuccauuugggacuugcugcuaaaaguugauaugugggauaagccucagaggaucaacaaccucuuugggaacacaaggaaccuccucacuacugacuuugugugcaugcgauucuuggaguacuggccgguguauggcacuaauccccuugaguuugaguucuuguggggcucuagagcccacagggaaaucacaaagauggaagcccugaaguuugugucagaugcccaugaugaagaacccuggagcuggccagaagaauauaauaaggcccuggaaggugacaaaaccaaagaaagaagccugacugcuggcuuagaguucuggucggaggacacuaugaaugauaaggcaaaugauuugguccaguuggcuauuagugucacugaggagaugcugccuauacaucaggaugagcuauuggcucacacuggcaaagaauuugaggauguguucccaaauauccucaauagagcuacucuaauucuugauauguucuauggguugucucugauugagguugauaccagugagcacaucuaccuccuuguccagcaaccagaaucagaggaagagcaagugaugcuagagagccuggggagacccacucaagaauauguaaugccaauccuagguuugaucuuccugaugggcaaccgugucaaagaggccaaugucuggaacuugcuucgaagauuuaguguggauguagggagaaagcauuccaucacccguaagcuuaugagacagcgcuaucuggaaugcaggccacuguccuacucuaauccaguugaauaugagcuucuaugggguccucgagcucaccaugaaaccaucaaaaugaaagucuuggaguacauggccaggcucuacagaaagcgaccacagaacuggccagaacaauauagggaggcuguggaagaugaggaggccagagccaaaucugaggcaacuaucauguuuuuccuugaccccacguga

SEQ ID NO: 799 - RNA, 924 nt, Artificial Sequence
  CCDS3269.1
auguugcagacaccagagagcagggggcucccggucccgcaggccgagggggagaaggauggcggccaugauggugagacccgggccccgaccgccucgcaggagcgccccaaggaggagcuuggcgccgggagggaggagggggcugcggagcccgcccucacccggaaaggcgcgagggccuuggcggccaaagccuuggcaaggcgcagggccuaccgccggcugaaucggacgguggcggaguuggugcaguuccuccuggugaaagacaagaagaagagucccaucacacgcucggagauggugaaauacguuauuggagacuugaagauucuguucccggacaucaucgcaagggccgcagagcaucugcgguaugucuuugguuuugagcugaaacaguuugaccgcaagcaccacacuuacauccugaucaacaaacuaaaaccucuggaggaggaggaggaggaggaucugggaggagauggccccagauugggucuguuaaugaugauccugggccuuaucuauaugagagguaauagcgccagggaggcccaggucugggagaugcugcgucgguugggggugcaacccucaaaguaucauuuccucuuuggguauccgaagaggcuuauuauggaagauuuugugcagcagcgauaucucaguuacaggcgggugccucacaccaauccaccagaauaugaauucucuugggguccccgaagcaaccuggaaaucagcaagauggaaguccugggguucguggccaaacugcauaagaaggaaccgcagcacuggccagugcaguaccgugaggcccuagcagacgaggccgacagggccagagccaaggccagagcugaagccaguaugagggccagggccagugcuagggccggcauccaccucugguga

SEQ ID NO: 800 - RNA, 660 nt, Artificial Sequence
  AAD31314
augccucggggacgaaagagucggcgccgccguaaugcgagagccgcagaagagaaccgcaacaaucgcaaaauccaggccucagaggccuccgagaccccuauggccgccucugugguagcgagcacccccgaagacgaccugagcggccccgaggaagacccgagcacuccagaggaggccucuaccaccccugaagaagccucgagcacugcccaagcacaaaagccuucagugccccggagcaauuuucagggcaccaagaaaagucuccugaugucuauauuagcgcucaucuucaucaugggcaacagcgccaaggaagcucuggucuggaaagugcuggggaaguuaggaaugcagccuggacgucagcacagcaucuuuggagauccgaagaagaucgucacagaagaguuugugcgcagaggguaccugauuuauaaaccggugccccguagcaguccgguggaguaugaguucuucugggggccccgagcacacguggaaucgagcaaacugaaagucaugcauuuuguggcaaggguucguaaccgaugcucuaaagacuggccuuguaauuaugacugggauucggacgaugaugcagagguugaggcuauccucaauucaggugcuagggguuauuccgccccuuaa

SEQ ID NO: 801 - RNA, 3750 nt, Artificial Sequence
  CCDS73700.1
augucgcagcuaaguaagaaucugggugacucgaguccuccggcggaggccccgaagccgccugucuauagccgcccuacgguucugaugcgggccccgcccgcuuccucccgggcuccgccagucccuugggauccaccuccaauugacuugcaggcuucauuggccgcuuggcaggcaccucagccugccugggaggccccacagggccagcugcccgccccggugguuccgaugacccagccuccugcccuagggggcccgauagucccggcucccccgcuggggggcccgauggguaagccuccgacucccgggguccugauggugcauccuccaccuccgggagccccgauggcccagccuccgaccccgggaguccugauggugcauccuucagcucccggagcucccauggcccauccuccuccuccggggaccccaaugucccacccucccccuccggggaccccaauggcccauccuccuccuccggggaccccgauggcccauccuccuccuccggggaccccgauggugcauccuccuccuccggggaccccgauggcucauccucccccuccggggacaccgauggcucauccucccccuccggggacaccgauggcucauccuccaccuccggggacaccgauggcucauccucccccuccggguacaccgauggcccagccuccagcuccgggaguccugauggcccagccucugacuccgggaguccugaugguccagccugcugcuccgggagcaccgaugguccagccgccuccagcagccaugaugacccagccucagccuucaggagcaccgauggccaagccuccagguccaggaguccugaugauucauccuccaggugcgagagcuccgaugacccagccuccagcuucaggagcaccgauggcacagccggcggccccaccugcacagccgauggccccaccugcacagccgauggcuucuugggccccgcaggcucagccucugauccugcaaauccagucucaaguuauaagggcuccuccgcagguuccccagggcccgcaggcacccccagcgcagcuagccacacccccgggcuggcaggcgaccucgccaggauggcaggccacgcagcaaggcuggcaggccacuccccugacuuggcagaccacgcaggucaccuggcaggcaccagccguuaccuggcaggugccgccgcccaugcgccaggggcccccgcccauccgcccuggcccaccacccauccgcccuggcccaccaccggugcgacaggccccaccgcugauccgccaggccccaccggugauccgccaggccccacccgugauccgccaggccccacccgugauccgccaggcccccgcugugauccgccaggccccaccugugauccgccaggccccaccugugauccgccaggcuccaccugugauccgccaggccccgccgcugauccgccaggcgccgccgcccauccgaccugccccacagguccuggccacccagccaccgcucuggcaggcccugccacccccaccuccacugcggcaggccccgcaggcuaggcugccggccccgcaggugcaggcggcgccgcaggugccuacggccccaccugcuacgcagguacccgcggcgccgcccgcuggcccgcaggugccccagccugugcugccggccccgcugucugccccacugucugccccgcaggcugugcacugcccuuccaucaucuggcaggcccccaaaggucagcccccggugccacacgagauuccaacgucaauggaauuccaggaggugcagcagacacaggcgcuggccuggcaggcccagaaggcccccacucacaucuggcagccccugccugcccaggaggcccagaggcaggcuccccccuugguccagcuggagcagcccuuucagggagccccgcccucccaaaaagccgugcaaauccagcuacccccccagcaggcccaggcaucggguccgcaagcggaggugcccacacugccgcuccagccuuccuggcaggcaccgccugcagucuugcaggcccagcccggacccccgguagcagcggcaaauuuuccccugggcuccgcuaaaucauugaugacuccaucaggagaaugcagggccucuucuauagaccgcaggggcuccucuaaagagcgcaggaccuccucgaaggagcgcagggccccuucaaaagaccgcaugaucuuugcugccaccuucugugcucccaaggcagugucagcugcgcgagcacaccugccagcugccuggaaaaaccugccugccacaccggagaccuuugcucccuccucaagugucuucccagcuaccucccaguuucagccugccucucugaaugccuuuaaaggccccucugcugccucagagaccccaaagucacugccauaugcucugcaggaucccuuugccuguguagaggcccugccugcaguuccaugggucccacagcccaauaugaaugccucaaaggcaucgcaggcagugcccaccuuccugauggcuacagcagcugccccccaggcaacugccaccacucaagaggccuccaagaccuccgucgagccgccacgccgcuccggcaaggccacccggaagaagaagcaucuggaagcccaagaggacagccguggccacacgcuagccuuucaugacuggcagggcccaaggcccugggagaaucuaaaucugagugacugggagguccaaagcccuauccaggucucgggugacugggagcacccaaacaccccccguggccugagugguugggagggcccuagcaccuccaggauccugaguggcugggaagggcccagcgcauccugggcccugagugccugggagggcccgagcaccuccagggcccugggucucucugaaagcccagggagcucucugcccguaguugugucugaggucgcaagugucucuccgggauccagugccacccaggauaauuccaagguggaggcacagcccuugucucccuuggaugagagggcaaaugcguuggugcaguuccucuuagucaaggaccaagccaaggugccuguccagcgcucggagauggugaaagucauccuccgagaguauaaagaugagugcuuagauaucaucaaccgugccaacaauaagcuggagugugccuuugguuaucaauugaaagaaauugauaccaaaaaccacgccuauauuaucaucaacaagcugggcuaccauacagggaauuugguggcauccuauuuagacaggcccaaguuuggccuucugaugguggucuugagccucaucuuuaugaaaggcaacugugucagggaggaucugaucuuuaauuuucuguucaaguuaggguuggauguccgggagacaaacggucucuuuggaaauacuaagaagcucaucaccgaaguguuugucaggcagaaguaccuagaguacaggcgaaucccuuacacugagcccgcagaguaugaguuccucuggggcccucgagcauuccuggaaaccagcaagaugcuuguccugagguuuuuggccaagcuccauaagaaagauccacagagcuggccauuccauuaccuugaagcgcucgcagagugugagugggaagacacagaugaggaugaaccugacaccggugacagugcccacggccccaccagcaggcccccuccccgcuaa

SEQ ID NO: 802 - RNA, 282 nt, Artificial Sequence
  AAC39608
augaaguugcugaugguccucaugcuggcggcccucucccagcacugcuacgcaggcucuggcugccccuuauuggagaaugugauuuccaagacaaucaauccacaagugucuaagacugaauacaaagaacuucuucaagaguucauagacgacaaugccacuacaaaugccauagaugaauugaaggaauguuuucuuaaccaaacggaugaaacucugagcaauguugagguguuuaugcaauuaauauaugacagcagucuuugugauuuauuuuaa

SEQ ID NO: 803 - RNA, 363 nt, Artificial Sequence
  AAH67220
augaaguugcugaugguccucaugcuggcggcccucucccagcacugcuacgcaggcucuggcugccccuuauuggagaaugugauuuccaagacaaucaauccacaagugucuaagacugaauacaaagaacuucuucaagaguucauagacgacaaugccacuacaaaugccauagaugaauugaaggaauguuuucuuaaccaaacggaugaaacucugagcaauguugagguguuuaugguaauuucauuuucuuccuauaagcuuuuuaaauccccugaccagggacaagugggcucuucauuucucacugacaaugccaaagccacuagugaacaagccuuuucuuacauugguuaa

SEQ ID NO: 804 - RNA, 357 nt, Artificial Sequence
  AAA19238
augccaagagaagaugcucacuucaucuaugguuaccccaagaaggggcacggccacucuuacaccacggcugaagaggccgcugggaucggcauccugacagugauccugggagucuuacugcucaucggcuguugguauuguagaagacgaaauggauacagagccuugauggauaaaagucuucauguuggcacucaaugugccuuaacaagaagaugcccacaagaaggguuugaucaucgggacagcaaagugucucuucaagagaaaaacugugaaccugugguucccaaugcuccaccugcuuaugagaaacucucugcagaacagucaccaccaccuuauucaccuuaa

SEQ ID NO: 805 - RNA, 1482 nt, Artificial Sequence
  EAW93427
augcugccccgaugggaacuggcacuuuaccuacuugccucacuaggcuuccacuucuauuccuucuaugaaguuuacaaagucuccagagaacacgaagaggagcuggaccaggaauuugagcuggagacugacacuuuauuuggaggauuaaagaaggaugcgaccgacuuugaguggagcuucuggauggaaugggggaagcaguggcugguguggcuucuccuuggccacaugguagugucucaaauggccacacugcuggcaagaaagcacagacccuggauucucaugcucuaugggaugugggccugcuggugugugcuggggaccccugguguggcuaugguuuugcuccauaccaccaucucuuucugcguggcccaguuccggucucagcuccugacguggcucuguucucuccuccuccucuccacacugaggcugcaggguguggaagaaguuaagagaaggugguacaagacagaaaacgaguacuaccugcugcaguucacgcugaccguucgcugccucuacuacaccagcuucagccuggagcucugcuggcagcagcugccugcugcaucgaccuccuacuccuuucccuggaugcuggccuaugucuuuuauuauccagucuuacacaaugggcccauccucagcuucucggaguucaucaaacagaugcagcagcaggagcaugacucccugaaggccagccuguguguccuggcccuggggcugggccgccuucuuugcuggugguggcuggccgagcugauggcucaccugauguacaugcaugccaucuacagcagcaucccccuccuggagacugucucuuguuggaccuuaggaggacuggcguuagcccaggugcucuuuuucuacgugaaguacuuggugcucuuuggcgugccugcucugcucaugcgccuggauggacucacuccacccgcccucccccgcugcgugagcaccauguucaguuucaccgggauguggagguauuuugauguuggacugcauaauuucuuaaucagguauguguacauuccagugggcgggucccagcauggccugcuggggacacuguuuuccacggcgaugacauuugcauuugugagcuacuggcauggcggcuacgacuaccucuggugcugggcagcgcucaacuggcugggagucacuguggagaauggaguccggaggcugguggagacucccugcauccaggacagucuggcccgauacuucuccccacaagcucgccgucgauuccacgcugcccuugcuucuuguuccaccucgaugcugauccuguccaaccugguauuucuugggggcaaugagguugggaaaaccuacuggaauaggaucuucauacaaggcuggccuugggugacccucucuguccugggauuccuguacugcuacucccacgugggcauugccugggcccagaccuacgccacggacuaa

SEQ ID NO: 806 - RNA, 954 nt, Artificial Sequence
  AAD41349
auggcugugcagggaucccagagaagacuucugggcucccucaacuccacccccacagccaucccccagcuggggcuggcugccaaccagacaggagcccggugccuggagguguccaucucugacgggcucuuccucagccuggggcuggugagcuugguggagaacgcgcuggugguggccaccaucgccaagaaccggaaccugcacucacccauguacugcuucaucugcugccuggccuugucggaccugcuggugagcgggagcaacgugcuggagacggccgucauccuccugcuggaggccggugcacugguggcccgggcugcggugcugcagcagcuggacaaugucauugacgugaucaccugcagcuccaugcuguccagccucugcuuccugggcgccaucgccguggaccgcuacaucuccaucuucuacgcacugcgcuaccacagcaucgugacccugccgcgggcgcggcgagccguugcggccaucuggguggccagugucgucuucagcacgcucuucaucgccuacuacgaccacguggccguccugcugugccucguggucuucuuccuggcuaugcuggugcucauggccgugcuguacguccacaugcuggcccgggccugccagcacgcccagggcaucgcccggcuccacaagaggcagcgcccgguccaccagggcuuuggccuuaaaggcgcugucacccucaccauccugcugggcauuuucuuccucugcuggggccccuucuuccugcaucucacacucaucguccucugccccgagcaccccacgugcggcugcaucuucaagaacuucaaccucuuucucgcccucaucaucugcaaugccaucaucgacccccucaucuacgccuuccacagccaggagcuccgcaggacgcucaaggaggugcugacaugcuccugguga

SEQ ID NO: 807 - RNA, 954 nt, Artificial Sequence; identical to SEQ ID NO: 806
  AHC09522

SEQ ID NO: 808 - RNA, 954 nt, Artificial Sequence
  AHC09804
auggcugugcagggaucccagagaagacuucugggcucccucaacuccacccccacagccaucccccagcuggggcuggcugccaaccagacaggagcccggugccuggagguguccaucucugacgggcucuuccucagccuggggcuggugagcuugguggagaacgcgcuggugguggccaccaucgccaagaaccggaaccugcacucacccauguacugcuucaucugcugccuggccuugucggaccugcuggugagcgggagcaacgugcuggagacggccgucauccuccugcuggaggccggugcacugguggcccgggcugcggugcugcagcagcuggacaaugucauugacgugaucaccugcagcuccaugcuguccagccucugcuuccugggcgccaucgccguggaccgcuacaucuccaucuucuacgcacugcgcuaccacagcaucgugacccugccgcgggcgcggcaagccguugcggccaucuggguggccagugucgucuucagcacgcucuucaucgccuacuacgaccacguggccguccugcugugccucguggucuucuuccuggcuaugcuggugcucauggccgugcuguacguccacaugcuggcccgggccugccagcacgcccagggcaucgcccggcuccacaagaggcagcgcccgguccaccagggcuuuggccuuaaaggcgcugucacccucaccauccugcugggcauuuucuuccucugcuggggccccuucuuccugcaucucacacucaucguccucugccccgagcaccccacgugcggcugcaucuucaagaacuucaaccucuuucucgcccucaucaucugcaaugccaucaucgacccccucaucuacgccuuccacagccaggagcuccgcaggacgcucaaggaggugcugacaugcuccugguga

SEQ ID NO: 809 - RNA, 954 nt, Artificial Sequence
  BAE94313
auggcugugcagggaucccagagaagacuucugggcucccucaacuccacccccacagccaucccccagcuggggcuggcugccaaccagacaggagcccggugccuggagguguccaucucugacgggcucuuccucagccuggggcuggugagcuugguggagaacgcgcuggugguggccaccaucgccaagaaccggaaccugcacucacccauguacugcuucaucugcugccuggccuugucggaccugcuggugagcgggagcaacgugcuggagacggccgucauccuccugcuggaggccggugcacugguggcccgggcugcggugcugcagcagcuggacaaugucacugacgugaucaccugcagcuccaugcuguccagccucugcuuccugggcgccaucgccguggaccgcuacaucuccaucuucuacgcacugcgcuaccacagcaucgugacccugccgcgggcgcggcgagccguugcggccaucuggguggccagugucgucuucagcacgcucuucaucgccuacuacgaccacguggccguccugcugugccucguggucuucuuccuggcuaugcuggugcucauggccgugcuguacguccacaugcuggcccgggccugccagcacgcccagggcaucgcccggcuccacaagaggcagcgcccgguccaccagggcuuuggccuuaaaggcgcugucacccucaccauccugcugggcauuuucuuccucugcuggggccccuucuuccugcaucucacacucaucguccucugccccgagcaccccacgugcggcugcaucuucaagaacuucaaccucuuucucgcccucaucaucugcaaugccaucaucgacccccucaucuacgccuuccacagccaggagcuccgcaggacgcucaaggaggugcugacaugcuccugguga

SEQ ID NO: 810 - RNA, 954 nt, Artificial Sequence
  AHC09531
auggcugugcagggaucccagagaagacuucugggcucccucaacuccacccccacagccaucccccagcuggggcuggcugccaaccagacaggagcccggugccuggagguguccaucucugacgggcucuuccucagccuggggcuggugagcuugguggagaacgcgcuggugguggccaccaucgccaagaaccggaaccugcacucacccauguacugcuucaucugcugccuggccuugucggaccugcuggugagcgggagcaacaugcuggagacggccgucauccuccugcuggaggccggugcacugguggcccgggcugcggugcugcagcagcuggacaaugucauugacgugaucaccugcagcuccaugcuguccagccucugcuuccugggcgccaucgccguggaccgcuacaucuccaucuucuacgcacugcgcuaccacagcaucgugacccugccgcgggcgcggcgagccguugcggccaucuggguggccagugucgucuucagcacgcucuucaucgccuacuacgaccacguggccguccugcugugccucguggucuucuuccuggcuaugcuggugcucauggccgugcuguacguccacaugcuggcccgggccugccagcacgcccagggcaucgcccggcuccacaagaggcagcgcccgguccaccagggcuuuggccuuaaaggcgcugucacccucaccauccugcugggcauuuucuuccucugcuggggccccuucuuccugcaucucacacucaucguccucugccccgagcaccccacgugcggcugcaucuucaagaacuucaaccucuuucucgcccucaucaucugcaaugccaucaucgacccccucaucuacgccuuccacagccaggagcuccgcaggacgcucaaggaggugcugacgugcuccugguga

SEQ ID NO: 811 - RNA, 954 nt, Artificial Sequence
  BAE94311
auggcugugcagggaucccagagaagacuucugggcucccucaacuccacccccacagccaucccccagcuggggcuggcugccaaccagacaggagcccggugccuggagguguccaucucugacgggcucuuccucagccuggggcuggugagcuugguggagaacgcgcuggugguggccaccaucgccaagaaccagaaccugcacucacccauguacugcuucaucugcugccuggccuugucggaccugcuggugagcgggagcaacgugcuggagacggccgucauccuccugcuggaggccggugcacugguggcccgggcugcggugcugcagcagcuggacaaugucauugacgugaucaccugcagcuccaugcuguccagccucugcuuccugggcgccaucgccguggaccgcuacaucuccaucuucuacgcacugcgcuaccacagcaucgugacccugccgcgggcgcggcaagccguugcggccaucuggguggccagugucgucuucagcacgcucuucaucgccuacuacgaccacguggccguccugcugugccucguggucuucuuccuggcuaugcuggugcucauggccgugcuguacguccacaugcuggcccgggccugccagcacgcccagggcaucgcccggcuccacaagaggcagcgcccgguccaccagggcuuuggccuuaaaggcgcugucacccucaccauccugcugggcauuuucuuccucugcuggggccccuucuuccugcaucucacacucaucguccucugccccgagcaccccacgugcggcugcaucuucaagaacuucaaccucuuucucgcccucaucaucugcaaugccaucaucgacccccucaucuacgccuuccacagccaggagcuccgcaggacgcucaaggaggugcugacaugcuccugguga

SEQ ID NO: 812 - RNA, 954 nt, Artificial Sequence
  BAE94309
auggcugugcagggaucccagagaagacuucugggcucccucaacuccacccccacagccaucccccagcuggggcuggcugccaaccagacaggagcccggugccuggagguguccaucucugacgggcucuuccucagccuggggcuggugagcuugguggagaacgcgcuggugguggccaccaucgccaagaaccggaaccugcacucacccauguacugcuucaucugcugccuggccuugucggaccugcuggugagcgggagcaacgugcuggagacggccgucauccuccugcuggaggccggugcacugguggcccgggcugcggugcugcagcagcuggacaaugucauugacgugaucaccugcagcuccaugcuguccagccucugcuuccugggcgccaucgccguggaccgcuacaucuccaucuucuacgcacugcgcuaccacagcaucgugacccugccgcgggcgcggcaagccguuggggccaucuggguggccagugucgucuucagcacgcucuucaucgccuacuacgaccacguggccguccugcugugccucguggucuucuuccuggcuaugcuggugcucauggccgugcuguacguccacaugcuggcccgggccugccagcacgcccagggcaucgcccggcuccacaagaggcagcgcccgguccaccagggcuuuggccuuaaaggcgcugucacccucaccauccugcugggcauuuucuuccucugcuggggccccuucuuccugcaucucacacucaucguccucugccccgagcaccccacgugcggcugcaucuucaagaacuucaaccucuuucucgcccucaucaucugcaaugccaucaucgacccccucaucuacgccuuccacagccaggagcuccgcaggacgcucaaggaggugcugacaugcuccugguga

SEQ ID NO: 813 - RNA, 954 nt, Artificial Sequence
  BAE94308
auggcugugcagggaucccagagaagacuucugggcucccucaacuccacccccacagccaucccccagcuggggcuggcugccaaccagacaggagcccggugccuggagguguccaucucugacgggcucuuccucagccuggggcuggugagcuugguggagaacgcgcuggugguggccaccaucgccaagaaccggaaccugcacucacccauguacugcuucaucugcugccuggccuugucggaccugcuggugagcgggagcaacgugcuggagacggccgucauccuccugcuggaggccggugcacugguggcccgggcugcggugcugcagcagcuggacaaugucacugacgugaucaccugcagcuccaugcuguccagccucugcuuccugggcgccaucgccguggaccgcuacaucuccaucuucuacgcacugcgcuaccacagcaucgugacccugacgcgggcgcggcgagccguugcggccaucuggguggccagugucgucuucagcacgcucuucaucgccuacuacgaccacguggccguccugcugugccucguggucuucuuccuggcuaugcuggugcucauggccgugcuguacguccacaugcuggcccgggccugccagcacgcccagggcaucgcccggcuccacaagaggcagcgcccgguccaccagggcuuuggccuuaaaggcgcugucacccucaccauccugcugggcauuuucuuccucugcuggggccccuucuuccugcaucucacacucaucguccucugccccgagcaccccacgugcggcugcaucuucaagaacuucaaccucuuucucgcccucaucaucugcaaugccaucaucgacccccucaucuacgccuuccacagccaggagcuccgcaggacgcucaaggaggugcugacaugcuccugguga

SEQ ID NO: 814 - RNA, 954 nt, Artificial Sequence
  BAE94307
auggcugugcagggaucccagagaagacuucugggcucccucaacuccacccccacagccaucccccagcuggggcuggcugccaaccagacaggagcccggugccuggagguguccaucucugacgggcucuuccucagccuggggcuggugagcuugguggagaacgcgcuggugguggccaccaucgccaagaaccggaaccugcacucacccauguacugcuucaucugcugccuggccuugucggaccugcuggugagcgggagcaacaugcuggagacggccgucauccuccugcuggaggccggugcacugguggcccgggcugcggugcugcagcagcuggacaaugucauugacgugaucaccugcagcuccaugcuguccagccucugcuuccugggcgccaucgccguggaccgcuacaucuccaucuucuacgcacugcgcuaccacagcaucgugauccugccgcgggcgcggcgagccguugcggccaucuggguggccagugucgucuucagcacgcucuucaucgccuacuacgaccacguggccguccugcugugccucguggucuucuuccuggcuaugcuggugcucauggccgugcuguacguccacaugcuggcccgggccugccagcacgcccagggcaucgcccggcuccacaagaggcagcgcccgguccaccagggcuuuggccuuaaaggcgcugucacccucaccauccugcugggcauuuucuuccucugcuggggccccuucuuccugcaucucacacucaucguccucugccccgagcaccccacgugcggcugcaucuucaagaacuucaaccucuuucucgcccucaucaucugcaaugccaucaucgacccccucaucuacgccuuccacagccaggagcuccgcaggacgcucaaggaggugcugacgugcuccugguga

SEQ ID NO: 815 - RNA, 951 nt, Artificial Sequence
  BAE94306
auggcugugcagggaucccagagaagacuucugggcucccucaacuccacccccacagccaucccccagcuggggcuggcugccaaccagacaggagcccggugccuggagguguccaucucugacgggcucuuccucagccuggggcuggugagcuugguggagaacgcgcuggugguggccaccaucgccaagaaccggaaccugcacucacccauguacugcuucaucugcugccuggccuugucggaccugcuggugagcgggagcaacgugcuggagacggccgucauccuccugcuggaggccggugcacugguggcccgggcugcggugcugcagcagcuggacaaugucauugacgugaucaccugcagcuccaugcuguccagccucugcuuccugggcgccaucgccguggaccgcuacaucuccaucuacgcacugcgcuaccacagcaucgugacccugccgcgggcgcggcaagccguugcggccaucuggguggccagugucgucuucagcacgcucuucaucgccuacuacgaccacguggccguccugcugugccucguggucuucuuccuggcuaugcuggugcucauggccgugcuguacguccacaugcuggcccgggccugccagcacgcccagggcaucgcccggcuccacaagaggcagcgcccgguccaccagggcuuuggccuuaaaggcgcugucacccucaccauccugcugggcauuuucuuccucugcuggggccccuucuuccugcaucucacacucaucguccucugccccgagcaccccacgugcggcugcaucuucaagaacuucaaccucuuucucgcccucaucaucugcaaugccaucaucgacccccucaucuacgccuuccacagccaggagcuccgcaggacgcucaaggaggugcugacaugcuccugguga

SEQ ID NO: 816 - RNA, 954 nt, Artificial Sequence
  AAQ62977
auggcugugcagggaucccagagaagacuucugggcucccucaacuccacccccacagccaucccccagcuggggcuggcugccaaccagacaggagcccggugccuggagguguccaucucugacgggcucuuccucagccuggggcuggugagcuugguggagaacgcgcuggugguggccaccaucgccaagaaccggaaccugcacucacccauguacugcuucaucugcugccuggccuugucggaccugcuggugagcgggagcaacgugcuggagacggccgucauccuccugcuggaggccggugcacugguggcccgggcugcggugcugcagcagcuggacaaugucauugacgugaucaccugcagcuccaugcuguccagccucugcuuccugggcgccaucgccguggaccgcuacaucuccaucuucuacgcacugcgcuaccacagcaucgugacccugccgcgggcgcggcgagccguugcggccaucuggguggccagugucgucuucagcacgcucuucaucgccuacuacgaccacguggccguccugcugugccucguggucuucuuccuggcuaugcuggugcucauggccgugcuguacguccacaugcuggcccgggccugccagcacgcccagggcaucgcccggcuccacaagaggcagcgcccgguccaccagggcuuuggccuuaaaggcgcugucacccucaccauccugcugggcauuuucuuccucugcuggggccccuucuuccugcaucucacacucaucauccucugccccgagcaccccacgugcggcugcaucuucaagaacuucaaccucuuucucgcccucaucaucugcaaugccaucaucgacccccucaucuacgccuuccacagccaggagcuccgcaggacgcucaaggaggugcugacaugcuccugguga

SEQ ID NO: 817 - RNA, 954 nt, Artificial Sequence
  AAQ62975
auggcugugcagggaucccagagaagacuucugggcucccucaacuccacccccacagccaucccccagcuggggcuggcugccaaccagacaggagcccggugccuggagguguccaucucugacgggcucuuccucagccuggggcuggugagcuugguggagaacgcgcuggugguggccaccaucgccaagaaccggaaccugcacucacccauguacugcuucaucugcugccuggccuugucggaccugcuggugagcgggagcaacgugcuggagacggccgucauccuccugcuggaggccggugcacugguggcccgggcuguggugcugcagcagcuggacaaugucauugacgugaucaccugcagcuccaugcuguccagccucugcuuccugggcgccaucgccguggaccgcuacaucuccaucuucuacgcacugcgcuaccacagcaucgugacccugccgcgggcgcggcgagccguugcggccaucuggguggccagugucgucuucagcacgcucuucaucgccuacuacgaccacguggccguccugcugugccucguggucuucuuccuggcuaugcuggugcucauggccgugcuguacguccacaugcuggcccgggccugccagcacgcccagggcaucgcccggcuccacaagaggcagcgcccgguccaccagggcuuuggccuuaaaggcgcugucacccucaccauccugcugggcauuuucuuccucugcuggggccccuucuuccugcaucucacacucaucguccucugccccgagcaccccacgugcggcugcaucuucaagaacuucaaccucuuucucgcccucaucaucugcaaugccaucaucgacccccucaucuacgccuuccacagccaggagcuccgcaggacgcucaaggaggugcugacaugcuccugguga

SEQ ID NO: 818 - RNA, 954 nt, Artificial Sequence
  AAQ62974
auggcugugcagggaucccagagaagacuucugggcucccucaacuccacccccacagccaucccccagcuggggcuggcugccaaccagacaggagcccggugccuggagguguccaucucugacgggcucuuccucagccuggggcuggugagcuugguggagaacgcgcuggugguggccaccaucgccaagaaccggaaccugcacucacccauguacugcuucaucugcugccuggccuugucggaccugcuggugagcgggagcaacgugcuggagacggccgucauccuccugcuggaggccggugcacugguggcccgggcugcggugcugcagcagcuggacaaugucauugacgugaucaccugcagcuccaugcuguccagccucugcuuccugggcgccaucgccguggaccgcuacaucuccaucuucuacgcacugcgcuaccacagcaucgugacccugccgcgggcgcggcgagccguugcggccaucuggguggccagugucgucuucagcacgcucuucaucgccuacuacgaccacguggccguccugcugugccucguggucuucuuccuggcuaugcuggugcucauggccgugcuguacguccacaugcuggcccgggccugccagcacgcccagggcaucgcccggcuccacaagaggcagcgcccgguccaccagggcuuuggccuuaaaggcgcugucacccucaccauccugcugggcauuuucuuccucugcuggggccccuucuuccugcaucucacacucaucguccucugccccgagcaccccacgugcggcugcaucuucaagaacuucaaccucuuucucgcccucaucaucugcaaugccaucaucgacccccucaucuacgccuuccacagccaggagcuccgcaggacgcucaaggaggugcugacacgcuccugguga

SEQ ID NO: 819 - RNA, 954 nt, Artificial Sequence
  AAQ62973
auggcugugcagggaucccagagaagacuucugggcucccucaacuccacccccacagccaucccccagcuggggcuggcugccaaccagacaggagcccggugccuggagguguccaucucugacgggcucuuccucagccuggggcuggugagcuugguggagaacgcgcuggugguggccaccaucgccaagaaccggaaccugcacucacccauguacugcuucaucugcugccuggccuugucggaccugcuggugagcgggagcaacgugcuggagacggccgucauccuccugcuggaggccggugcacugguggcccgggcugcggugcugcagcagcuggacaaugucauugacgugaucaccugcagcuccaugcuguccagccucugcuuccugggcgccaucgccguggaccgcuacaucuccaucuucuacgcacugcgcuaccacagcaucgugacccugccgcgggcgcggcgagccguugcggccaucuggguggccagugucgucuucagcacgcucuucaucgccuacuacgaccacguggccguccugcugugccucguggucuucuuccuggcuaugcuggugcucauggccgugcuguacguccacaugcuggcccgggccugccagcacgcccagggcaucgcccggcuccacaagaggcagcgcccgguccaccagggcuuuggccuuaaaggcgcugucacccucaccauccugcugggcauuuucuuccucugcuggggccccuucuuccugcaucucacacucaucguccucugccccgagcaccccacgugcggcugcaucuucaagaacuucaaccucuuucucgcccucaucaucugcaaugccaucaucgacccccucaucuacgccuuccacagccaggagcuccgcaggaugcucaaggaggugcugacaugcuccugguga

SEQ ID NO: 820 - RNA, 954 nt, Artificial Sequence
  AAQ62972
auggcugugcagggaucccagagaagacuucugggcucccucaacuccacccccacagccaucccccagcuggggcuggcugccaaccagacaggagcccggugccuggagguguccaucucugacgggcucuuccucagccuggggcuggugagcuugguggagaacgcgcuggugguggccaccaucgccaagaaccggaaccugcacucacccauguacugcuucaucugcugccuggccuugucggaccugcuggugagcgggagcaacgugcuggagacggccgucauccuccugcuggaggccggugcacugguggcccgggcugcggugcugcagcagcuggacaaugucauugacgugaucaccugcagcuccaugcuguccagccucugcuuccugggcgccaucgccguggaccgcuacaucuccaucuucuacgcacugcgcuaccacagcaucgugacccugccgcgggcgcggcgagccguugcggccaucuggguggccagugucgucuucagcacgcucuucaucgccuacuacgaccacguggccguccugcugugccucguggucuucuuccuggcuaugcuggugcucauggccgugcuguacguccacaugcuggccugggccugccagcacgcccagggcaucgcccggcuccacaagaggcagcgcccgguccaccagggcuuuggccuuaaaggcgcugucacccucaccauccugcugggcauuuucuuccucugcuggggccccuucuuccugcaucucacacucaucguccucugccccgagcaccccacgugcggcugcaucuucaagaacuucaaccucuuucucgcccucaucaucugcaaugccaucaucgacccccucaucuacgccuuccacagccaggagcuccgcaggacgcucaaggaggugcugacaugcuccugguga

SEQ ID NO: 821 - RNA, 954 nt, Artificial Sequence
  AAQ62971
auggcugugcagggaucccagagaagacuucugggcucccucaacuccacccccacagccaucccccagcuggggcuggcugccaaccagacaggagcccggugccuggagguguccaucucugacgggcucuuccucagccuggggcuggugagcuugguggagaacgcgcuggugguggccaccaucgccaagaaccggaaccugcacucacccauguacugcuucaucugcugccuggccuugucggaccugcuggugagcgggagcaacgugcuggagacggccgucauccuccugcuggaggccggugcacugguggcccgggcugcggugcugcagcagcuggacaaugucauugacgugaucaccugcagcuccaugcuguccagccucugcuuccugggcgccaucgccguggaccgcuacaucuccaucuucuacgcacugcgcuaccacagcaucgugacccugccgcaggcgcggcgagccguugcggccaucuggguggccagugucgucuucagcacgcucuucaucgccuacuacgaccacguggccguccugcugugccucguggucuucuuccuggcuaugcuggugcucauggccgugcuguacguccacaugcuggcccgggccugccagcacgcccagggcaucgcccggcuccacaagaggcagcgcccgguccaccagggcuuuggccuuaaaggcgcugucacccucaccauccugcugggcauuuucuuccucugcuggggccccuucuuccugcaucucacacucaucguccucugccccgagcaccccacgugcggcugcaucuucaagaacuucaaccucuuucucgcccucaucaucugcaaugccaucaucgacccccucaucuacgccuuccacagccaggagcuccgcaggacgcucaaggaggugcugacaugcuccugguga

SEQ ID NO: 822 - RNA, 954 nt, Artificial Sequence
  AAQ62970
auggcugugcagggaucccagagaagacuucugggcucccucaacuccacccccacagccaucccccagcuggggcuggcugccaaccagacaggagcccggugccuggagguguccaucucugacgggcucuuccucagccuggggcuggugagcuugguggagaacgcgcuggugguggccaccaucgccaagaaccggaaccugcacucacccauguacugcuucaucugcugccuggccuuguuggaccugcuggugagcgggagcaacgugcuggagacggccgucauccuccugcuggaggccggugcacugguggcccgggcugcggugcugcagcagcuggacaaugucauugacgugaucaccugcagcuccaugcuguccagccucugcuuccugggcgccaucgccguggaccgcuacaucuccaucuucuacgcacugcgcuaccacagcaucgugacccugccgcgggcgcggcgagccguugcggccaucuggguggccagugucgucuucagcacgcucuucaucgccuacuacgaccacguggccguccugcugugccucguggucuucuuccuggcuaugcuggugcucauggccgugcuguacguccacaugcuggcccgggccugccagcacgcccagggcaucgcccggcuccacaagaggcagcgcccgguccaccagggcuuuggccuuaaaggcgcugucacccucaccauccugcugggcauuuucuuccucugcuggggccccuucuuccugcaucucacacucaucguccucugccccgagcaccccacgugcggcugcaucuucaagaacuucaaccucuuucucgcccucaucaucugcaaugccaucaucgacccccucaucuacgccuuccacagccaggagcuccgcaggacgcucaaggaggugcugacaugcuccugguga

SEQ ID NO: 823 - RNA, 954 nt, Artificial Sequence
  AAQ62969
auggcugugcagggaucccagagaagacuucugggcucccucaacuccacccccacagccaucccccagcuggggcuggcugccaaccagacaggagcccggugccuggagguguccaucucugacgggcuccuccucagccuggggcuggugagcuugguggagaacgcgcuggugguggccaccaucgccaagaaccggaaccugcacucacccauguacugcuucaucugcugccuggccuugucggaccugcuggugagcgggagcaacgugcuggagacggccgucauccuccugcuggaggccggugcacugguggcccgggcugcggugcugcagcagcuggacaaugucauugacgugaucaccugcagcuccaugcuguccagccucugcuuccugggcgccaucgccguggaccgcuacaucuccaucuucuacgcacugcgcuaccacagcaucgugacccugccgcgggcgcggcgagccguugcggccaucuggguggccagugucgucuucagcacgcucuucaucgccuacuacgaccacguggccguccugcugugccucguggucuucuuccuggcuaugcuggugcucauggccgugcuguacguccacaugcuggcccgggccugccagcacgcccagggcaucgcccggcuccacaagaggcagcgcccgguccaccagggcuuuggccuuaaaggcgcugucacccucaccauccugcugggcauuuucuuccucugcuggggccccuucuuccugcaucucacacucaucguccucugccccgagcaccccacgugcggcugcaucuucaagaacuucaaccucuuucucgcccucaucaucugcaaugccaucaucgacccccucaucuacgccuuccacagccaggagcuccgcaggacgcucaaggaggugcugacaugcuccugguga

SEQ ID NO: 824 - RNA, 954 nt, Artificial Sequence
  AAO21073
auggcugugcagggaucccagagaagacuucugggcucccucaacuccacccccacagccaucccccagcuggggcuggcugccaaccagacaggagcccggugccuggagguguccaucucugacgggcucuuccucagccuggggcuggugagcuugguggagaacgcgcuggugguggccaccaucgccaagaaccggaaccugcacucacccauguacugcuucaucugcugccuggccuugucggaccugcuggugagcgggagcaacgugcgggagacggccgucauccuccugcuggaggccggugcacugguggcccgggcugcggugcugcagcagcuggacaaugucauugacgugaucaccugcagcuccaugcuguccagccucugcuuccugggcgccaucgccguggaccgcuacaucuccaucuucuacgcacugcgcuaccacagcaucgugacccugccgcgggcgcggcgagccguugcggccaucuggguggccagugucgucuucagcacgcucuucaucgccuacuacgaccacguggccguccugcugugccucguggucuucuuccuggcuaugcuggugcucauggccgugcuguacguccacaugcuggcccgggccugccagcacgcccagggcaucgcccggcuccacaagaggcagcgcccgguccaccagggcuuuggccuuaaaggcgcugucacccucaccauccugcugggcauuuucuuccucugcuggggccccuucuuccugcaucucacacucaucguccucugccccgagcaccccacgugcggcugcaucuucaagaacuucaaccucuuucucgcccucaucaucugcaaugccaucaucgacccccucaucuacgccuuccacagccaggagcuccgcaggacgcucaaggaggugcugacaugcuccugguga

SEQ ID NO: 825 - RNA, 954 nt, Artificial Sequence
  AHC09567
auggcugugcagggaucccagagaagacuucugggcucccucaacuccacccccacagccaucccccagcuggggcuggcugccaaccagacaggagcccggugccuggagguguccaucucugacgggcucuuccucagccuggggcuggugagcuugguggagaacgcgcuggugguggccaccaucgccaagaaccggaaccugcacucacccauguacugcuucaucugcugccuggccuugccggaccugcuggugagcgggagcaacgugcuggagacggccgucauccuccugcuggaggccggugcacugguggcccgggcugcggugcugcagcagcuggacaaugucauugacgugaucaccugcagcuccaugcuguccagccucugcuuccugggcgccaucgccguggaccgcuacaucuccaucuucuacgcacugcgcuaccacagcaucgugacccugccgcgggcgcggcgagccguugcggccaucuggguggccagugucgucuucagcacgcucuucaucgccuacuacgaccacguggccguccugcugugccucguggucuucuuccuggcuaugcuggugcucauggccgugcuguacguccacaugcuggcccgggccugccagcacgcccagggcaucgcccggcuccacaagaggcagcgcccgguccaccagggcuuuggccuuaaaggcgcugucacccucaccauccugcugggcauuuucuuccucugcuggggccccuucuuccugcaucucacacucaucguccucugccccgagcaccccacgugcggcugcaucuucaagaacuucaaccucuuucucgcccucaucaucugcaaugccaucaucgacccccucaucuacgccuuccacagccaggagcuccgcaggacgcucaaggaggugcugacaugcuccugguga

SEQ ID NO: 826 - RNA, 954 nt, Artificial Sequence
  AHC09812
auggcugugcagggaucccagagaagacuucugggcucccucaacuccacccccacagccaucccccagcuggggcuggcugccaaccagacaggagcccggugccuggagguguccaucucugacgggcucuuccucagccuggggcuggugagcuugguggagaacgcgcuggugguggccaccaucgccaagaaccggaaccugcacucacccauguacugcuucaucugcugccuggccuugucggaccugcuggugagcgggagcaacgugcuggagacggccgucauccuccugcuggaggccggugcacugguggcccgggcugcggugcugcagcagcuggacaaugucauugacgugaucaccugcagcuccaugcuguccagccucugcuuccugggcgccaucgccguggaccgcuacaucuccaucuucuacgcacugcgcuaccacagcaucgugacccugccgcgggcgcggcgagccguugcggccaucuggguggccagugucgucuucagcacgcucuucaucgccuacuacgaccacguggccguccugcugugccucauggucuucuuccuggcuaugcuggugcucauggccgugcuguacguccacaugcuggcccgggccugccagcacgcccagggcaucgcccggcuccacaagaggcagcgcccgguccaccagggcuuuggccuuaaaggcgcugucacccucaccauccugcugggcauuuucuuccucugcuggggccccuucuuccugcaucucacacucaucguccucugccccgagcaccccacgugcggcugcaucuucaagaacuucaaccucuuucucgcccucaucaucugcaaugccaucaucgacccccucaucuacgccuuccacagccaggagcuccgcaggacgcucaaggaggugcugacaugcuccugguga

SEQ ID NO: 827 - RNA, 954 nt, Artificial Sequence
  AHC10192
auggcugugcagggaucccagagaagacuucugggcucccucaacuccacccccacagccaucccccagcuggggcuggcugccaaccagacaggagcccggugccuggagguguccaucucugacgggcucuuccucagccuggggcuggugagcuugguggagaacgcgcuggugguggccaccaucgccaagaaccggaaccugcacucacccauguacugcuucaucugcugccuggccuugucggaccugcuggugagcgggagcaacgugcuggagacggccgucauccuccugcuggaggccggugcacugguggcccgggcugcggugcugcagcagcuggacaaugucauugacgugaucaccugcagcuccaugcuguccagccucugcuuccugggcgccaucgccguggaccgcuacaucuccaucuucuacgcacugcgcuaccacagcaucgugacccugccgcgggcgcggcgagccguugcggccaucuggguggccagugucgucuucagcacgcucuucaucgccuacuacgaccacguggccguccugcugugccucguggucuucuuccuggcuaugcuggugcucauggccgugcuguacguccacaugcuggcccgggccugccagcacgcccagggcaccgcccggcuccacaagaggcagcgcccgguccaccagggcuuuggccuuaaaggcgcugucacccucaccauccugcugggcauuuucuuccucugcuggggccccuucuuccugcaucucacacucaucguccucugccccgagcaccccacgugcggcugcaucuucaagaacuucaaccucuuucucgcccucaucaucugcaaugccaucaucgacccccucaucuacgccuuccacagccaggagcuccgcaggacgcucaaggaggugcugacaugcuccugguga

SEQ ID NO: 828 - RNA, 954 nt, Artificial Sequence
  AHC09641
auggcugugcagggaucccagagaagacuucugggcucccucaacuccacccccacagccaucccccagcuggggcuggcugccaaccagacaggagcccggugccuggagguguccaucucugacgggcucuuccucagccuggggcuggugagcuugguggagaacgcgcuggugguggccaccaucgccaagaaccggaaccugcacucacccauguacugcuucaucugcugccuggccuugucggaccugcuggugagcgggagcaacgugcuggagacggccgucauccuccugcuggaggccggugcacugguggcccgggcugcggugcugcagcagcuggacaaugucauugacgugaucaccugcagcuccaugcuguccagccucugcuuccugggcgccaucgccguggaccgcuacaucuccaucuucuacgcacugcgcuaccacagcaccgugacccugccgcgggcgcggcgagccguugcggccaucuggguggccagugucgucuucagcacgcucuucaucgccuacuacgaccacguggccguccugcugugccucguggucuucuuccuggcuaugcuggugcucauggccgugcuguacguccacaugcuggcccgggccugccagcacgcccagggcaucgcccggcuccacaagaggcagcgcccgguccaccagggcuuuggccuuaaaggcgcugucacccucaccauccugcugggcauuuucuuccucugcuggggccccuucuuccugcaucucacacucaucguccucugccccgagcaccccacgugcggcugcaucuucaagaacuucaaccucuuucucgcccucaucaucugcaaugccaucaucgacccccucaucuacgccuuccacagccaggagcuccgcaggacgcucaaggaggugcugacgugcuccugguga

SEQ ID NO: 829 - RNA, 954 nt, Artificial Sequence
  AHC10044
auggcugugcagggaucccagagaagacuucugggcucccucaacuccacccccacagccaucccccagcuggggcuggcugccaaccagacaggagcccgguaccuggagguguccaucucugacgggcucuuccucagccuggggcuggugagcuugguggagaacgcgcuggugguggccaccaucgccaagaaccggaaccugcacucacccauguacugcuucaucugcugccuggccuugucggaccugcuggugagcgggagcaacgugcuggagacggccgucauccuccugcuggaggccggugcacugguggcccgggcugcggugcugcagcagcuggacaaugucauugacgugaucaccugcagcuccaugcuguccagccucugcuuccugggcgccaucgccguggaccgcuacaucuccaucuucuacgcacugcgcuaccacagcaucgugacccugccgcgggcgcggcgagccguugcggccaucuggguggccagugucgucuucagcacgcucuucaucgccuacuacgaccacguggccguccugcugugccucguggucuucuuccuggcuaugcuggugcucauggccgugcuguacguccacaugcuggcccgggccugccagcacgcccagggcaucgcccggcuccacaagaggcagcgcccgguccaccagggcuuuggccuuaaaggcgcugucacccucaccauccugcugggcauuuucuuccucugcuggggccccuucuuccugcaucucacacucaucguccucugccccgagcaccccacgugcggcugcaucuucaagaacuucaaccucuuucucgcccucaucaucugcaaugccaucaucgacccccucaucuacgccuuccacagccaggagcuccgcaggacgcucaaggaggugcugacaugcuccugguga

SEQ ID NO: 830 - RNA, 954 nt, Artificial Sequence
  AHC09532
auggcugugcagggaucccagagaagacuucugggcucccucaacuccacccccacagccaucccccagcuggggcuggcugccaaccagacaggagcccggugccuggagguguccaucucugacgggcucuuccucagccuggggcuggugagcuugguggagaacgcgcugguguuggccaccaucgccaagaaccggaaccugcacucacccauguacugcuucaucugcugccuggccuugucggaccugcuggugagcgggagcaacgugcuggagacggccgucauccuccugcuggaggccggugcacugguggcccgggcugcggugcugcagcagcuggacaaugucauugacgugaucaccugcagcuccaugcuguccagccucugcuuccugggcgccaucgccguggaccgcuacaucuccaucuucuacgcacugcgcuaccacagcaucgugacccugccgcgggcgcggcgagccguugcggccaucuggguggccagugucgucuucagcacgcucuucaucgccuacuacgaccacguggccguccugcugugccucguggucuucuuccuggcuaugcuggugcucauggccgugcuguacguccacaugcuggcccgggccugccagcacgcccagggcaucgcccggcuccacaagaggcagcgcccgguccaccagggcuuuggccuuaaaggcgcugucacccucaccauccugcugggcauuuucuuccucugcuggggccccuucuuccugcaucucacacucaucguccucugccccgagcaccccacgugcggcugcaucuucaagaacuucaaccucuuucucgcccucaucaucugcaaugccaucaucgacccccucaucuacgccuuccacagccaggagcuccgcaggacgcucaaggaggugcugacaugcuccugguga

SEQ ID NO: 831 - RNA, 954 nt, Artificial Sequence
  AHC11042
auggcugugcagggaucccagagaagacuucugggcucccucaacuccacccccacagccaucccccagcuggggcuggcugccaaccagacaggagcccggugccuggagguguccaucucugacgggcucuuccucagccuggggcuggugagcuugguggagaacgcgcuggugguggccaccaucgccaagaaccggaaccugcacucacccauguacugcuucaucugcugccugcccuugucggaccugcuggugagcgggagcaacgugcuggagacggccgucauccuccugcuggaggccggugcacugguggcccgggcugcggugcugcagcagcuggacaaugucauugacgugaucaccugcagcuccaugcuguccagccucugcuuccugggcgccaucgccguggaccgcuacaucuccaucuucuacgcacugcgcuaccacagcaucgugacccugccgcgggcgcggcgagccguugcggccaucuggguggccagugucgucuucagcacgcucuucaucgccuacuacgaccacguggccguccugcugugccucguggucuucuuccuggcuaugcuggugcucauggccgugcuguacguccacaugcuggcccgggccugccagcacgcccagggcaucgcccggcuccacaagaggcagcgcccgguccaccagggcuuuggccuuaaaggcgcugucacccucaccauccugcugggcauuuucuuccucugcuggggccccuucuuccugcaucucacacucaucguccucugccccgagcaccccacgugcggcugcaucuucaagaacuucaaccucuuucucgcccucaucaucugcaaugccaucaucgacccccucaucuacgccuuccacagccaggagcuccgcaggacgcucaaggaggugcugacaugcuccugguga

SEQ ID NO: 832 - RNA, 954 nt, Artificial Sequence
  AHC10733
auggcugugcagggaucccagagaagacuucugggcucccucaacuccacccccacagccaucccccagcuggggcuggcugccaaccagacaggagcccggugccuggagguguccaucucugacgggcucuuccucagccuggggcuggugagcuugguggagaacgcgcuggugguggccaccaucgccaagaaccggaaccugcacucacccauguacugcuucaucugcugccuggccuugucggaccugcuggugagcgggagcaacgugcuggagacggccgucauccuccugcuggaggccggugcacugguggcccgggcugcggugcugcagcagcuggacaaugucauugacgugaucaccugcagcuccaugcuguccagccucugcuuccugggcgccaucgccguggaccgcuacaucuccaucuucuacgcacugcgcuaccacagcaucgugacccugccgcgggcgcggcgagccguugcggccaucuggguggccagugucgucuucagcacgcucuucaucgccuacuacgaccacguggccguccugcugugccucguggucuucuuccuggcuaugcuggugcucauggccgugcuguacguccacaugcuggcccgggccugccagcacgcccagggcaucgcccggcuccacaagaggcagcgcccgguccaccagggcuuuggccuuaaaggcgcugucacccucaccauccugcugggcauuuucuuccucugcuggggccccuucuuccugcaucucacacucaucguccucugccccgagcaccccacgugcggcugcaucuucaagaacuucagccucuuucucgcccucaucaucugcaaugccaucaucgacccccucaucuacgccuuccacagccaggagcuccgcaggacgcucaaggaggugcugacaugcuccugguga

SEQ ID NO: 833 - RNA, 954 nt, Artificial Sequence
  AHC10696
auggcugugcagggaucccagagaagacuucugggcucccucaacuccacccccacagccaucccccagcuggggcuggcugccaaccagacaggagcccggugccuggagguguccaucucugacgggcucuuccucagccuggggcuggugagcuugguggagaacgcgcuggugguggccaccaucgccaagaaccggaaccugcacucacccauguacugcuucaucugcugccuggccuugucggaccugcuggugagcgggagcaacgugcuggagacggccgucauccuccugcuggaggccggugcacugguggcccgggcugcggugcugcagcagcuggacaaugucauugacgugaucaccugcagcuccaugcuguccagccucugcuuccugggcgccaucgccguggaccgcuacaucuccaucuucuacgcacugcgcuaccacagcaucgugacccugccgcgggcgcggcgagccguugcggccaucuggguggccagugucgucuucagcacgcucuucaucgccuacuacgaccacguggccguccugcugugccucguggucuucuuccuggcuaugcuggugcucauggccgugcuguacguccacaugcuggcccgggccugccagcacgcccagggcaucgcccggcuccacaagaggcagcgcccgguccaccagggcuuuggccuuaaaggcgcugucacccucaccauccugcugggcauuuucuuccucugcuggggccccuucuuccugcaucucacacucaucguccucugccccgagcaccccacgugcggcugcaucuucaagaacuucaaccucuuucucgcccucaucaucugcaaugccaucaucgacccccucauccacgccuuccacagccaggagcuccgcaggacgcucaaggaggugcugacaugcuccugguga

SEQ ID NO: 834 - RNA, 954 nt, Artificial Sequence
  AHC09527
auggcugugcagggaucccagagaagacuucugggcucccucaacuccacccccacagccaucccccagcuggggcuggcugccaaccagacaggagcccggugccuggagguguccaucucugacgggcucuuccucagccuggggcuggugagcuugguggagaacgcgcuggugguggccaccaucgccaagaaccggaaccugcacucacccauguacugcuucaucugcugccuggccuugucggaccugcuggugagcgggagcaacgugcuggagacggccgucauccuccugcuggaggccggugcacugguggcccgggcugcggugcugcagcagcuggacaaugucauugacgugaucaccugcagcuccaugcuguccagccucugcuuccugggcgccaucgccguggaccgcuacaucuccaucuucuacgcacugcgcuaccacagcaucgugacccugccgcgggcgcggcgagccguugcggccaucuggguggccagugucgucuucagcacgcucuucaucgccuacuacgaccacguggccguccugcugugccucguggucuucuuccuggcuaugcuggugcucauggccgugcuguacguccacaugcuggcccgggccugccagcacgcccagggcaucgcccggcuccacaagaggcagcgcccgguccaccagggcuuuggccuuaaaggcgcugucacccucaccauccugcugggcauuuucuuccucugcuggggccccuucuuccugcaucucacacucaucguccucugccccgagcaccccacgugcggcugcaucuucaagaacuucaaccucuuucucgcccucaucaucugcaaugccaucauccacccccucaucuacgccuuccacagccaggagcuccgcaggacgcucaaggaggugcugacaugcuccugguga

SEQ ID NO: 835 - RNA, 954 nt, Artificial Sequence
  AHC10869
auggcugugcagggaucccagagaagacuucugggcucccucaacuccacccccacagccaucccccagcuggggcuggcugccaaccagacaggagcccggugccuggagguguccaucucugacgggcucuuccucagccuggggcuggugagcuugguggagaacgcgcuggugguggccaccaucgccaagaaccggaaccugcacucacccauguacugcuucaucugcugccuggccuugucggaccugcuggugagcgggagcaacgugcuggagacggccgucauccuccugcuggaggccggugcacugguggcccgggcugcggugcugcagcagcuggacaaugucauugacgugaucaccugcagcuccaugcuguccagccucugcuuccugggcgccaucgccguggaccgcuacaucuccaucuucuacgcacugcgcuaccacagcaucgugacccugccgcgggcgcggcgagccguugcggccaucuggguggccagugucgucuucagcacgcucuucaucgccuacuacgaccacguggccguccugcugugccucguggucuucuuccuggcuaugcuggugcucauggccgugcuguacguccacaugcuggcccgggccugccagcacgcccagggcaucgcccggcuccacaagaggcagcacccgguccaccagggcuuuggccuuaaaggcgcugucacccucaccauccugcugggcauuuucuuccucugcuggggccccuucuuccugcaucucacacucaucguccucugccccgagcaccccacgugcggcugcaucuucaagaacuucaaccucuuucucgcccucaucaucugcaaugccaucaucgacccccucaucuacgccuuccacagccaggagcuccgcaggacgcucaaggaggugcugacaugcuccugguga

SEQ ID NO: 836 - RNA, 954 nt, Artificial Sequence
  AHC11615
auggcugugcagggaucccagagaagacuucugggcucccucaacuccacccccacagccaucccccagcuggggcuggcugccaaccagacaggagcccggugccuggagguguccaucucugacgggcucuuccucagccuggggcuggugagcuugguggagaacgcgcuggugguggccaccaucgccaagaaccggaaccugcacucacccauguacugcuucaucugcugccuggccuugucggaccugcuggugagcgggagcaacgugcuggagacggccgucauccuccugcuggaggccggugcacugguggcccgggcugcggugcugcagcagcuggacaaugucauugacgugaucaccugcagcuccaugcuguccagccucugcuuccugggcgccaucgccguggaccgcuacaucuccaucuucuacgcacugcgcuaccacagcaucgugacccugccgcgggcgcggcgagccguugcggccaucuggguggccagugucgucuucagcacgcucuucaucgccuacuacgaccacguggccguccugcugugccucguggucuucuuccuggcuaugcuggugcucauggccgugcuguacguccacaugcuggcccgggccugccagcacgcccagggcaucgcccggcuccacaagaggcagcgcccgguccaccagggcuuuggccuuaaaggcgcugucacccucaccauccugcugggcauuuucuuccucugcuggggccccuucuuccugcaucucacacucaucguccucugccccgagcaccccacgugcggcugcaucuucaagaacuucaaccucuuucucacccucaucaucugcaaugccaucaucgacccccucaucuacgccuuccacagccaggagcuccgcaggacgcucaaggaggugcugacaugcuccugguga

SEQ ID NO: 837 - RNA, 954 nt, Artificial Sequence
  AHC09535
auggcugugcagggaucccagagaagacuucugggcucccucaacuccacccccacagccaucccccagcuggggcuggcugccaaccagacaggagcccggugccuggagguguccaucucugacgggcucuuccucagccuggggcuggugagcuugguggagaacgcgcuggugguggccaccaucgccaagaaccggaaccugcacucacccauguacugcuucaucugcugccuggccuugucggaccugcuggugagcgggagcaacgugcuggagacggccgucauccuccugcuggaggccggugcacugguggcccgggcugcggugcugcagcagcuggacaaugucauugacgugaucaccugcagcuccaugcuguccagccucugcuuccugggcgccaucgccguggaccacuacaucuccaucuucuacgcacugcgcuaccacagcaucgugacccugccgcgggcgcggcgagccguugcggccaucuggguggccagugucgucuucagcacgcucuucaucgccuacuacgaccacguggccguccugcugugccucguggucuucuuccuggcuaugcuggugcucauggccgugcuguacguccacaugcuggcccgggccugccagcacgcccagggcaucgcccggcuccacaagaggcagcgcccgguccaccagggcuuuggccuuaaaggcgcugucacccucaccauccugcugggcauuuucuuccucugcuggggccccuucuuccugcaucucacacucaucguccucugccccgagcaccccacgugcggcugcaucuucaagaacuucaaccucuuucucgcccucaucaucugcaaugccaucaucgacccccucaucuacgccuuccacagccaggagcuccgcaggacgcucaaggaggugcugacaugcuccugguga

SEQ ID NO: 838 - RNA, 954 nt, Artificial Sequence
  AHC11840
auggcugugcagggaucccagagaagacuucugggcucccucaacuccacccccacagccaucccccagcuggggcuggcugccaaccagacaggagcccggugccuggagguguccaucucugacgggcucuuccucagccuggggcuggugagcuugguggagaacgcgcuggugguggccaccaucgccaagaaccggaaccugcacucacccauguacugcuucaucugcugccuggccuugucggaccugcuggugagcgggagcaacgugcuggagacggccgucauccuccugcuggaggccggugcacugguggcccgggcugcggugcugcagcagcuggacaaugucauugacgugaucaccugcagcuccaugcuguccagccucugcuuccugggcgccaucgccguggaccgcuacaucuccaucuucuacgcacugcgcuaccacagcaucgugacccugccgcgggcgcggcgagccguugcggccaucuggguggccagugucgucuucagcacgcucuucaucgccuacuacgaccacguggccguccugcugugccucguggucuucuuccuggcuaugcuggugcucauggccgugcuguacguccacaugcuggcccgggccugccagcacgcccagggcaucgcccggcuccacaagaggcagcgcccgguccaccagggcuuuggccuuaaaggcgcugucacccucaccauccugcugggcauuuucuuccucugcuggggccccuucuuccugcaucucacacucaucguccucugccccgagcaccccacgugcggcugcaucuucaagaacuucaaccucuuucucgcccucaucaucugcaaugccaucaucgacccccucaucuacgccuuccacaaccaggagcuccgcaggacgcucaaggaggugcugacaugcuccugguga

SEQ ID NO: 839 - RNA, 954 nt, Artificial Sequence
  AHC09665
auggcugugcagggaucccagagaagacuucugggcucccucaacuccacccccacagccaucccccagcuggggcuggcugccaaccagacaggagcccggugccuggagguguccaucucugacgggcucuuccucagccuggggcuggugagcuugguggagaacgcgcuggugguggccaccaucgccaagaaccggaaccugcacucacccauguacugcuucaucugcugccuggccuugucggaccugcuggugagcgggagcaacgugcuggagacggccgucauccuccugcuggaggccggugcacugguggcccgggcugcggugcugcagcagcuggacaaugucauugacaugaucaccugcagcuccaugcuguccagccucugcuuccugggcgccaucgccguggaccgcuacaucuccaucuucuacgcacugcgcuaccacagcaucgugacccugccgcgggcgcggcgagccguugcggccaucuggguggccagugucgucuucagcacgcucuucaucgccuacuacgaccacguggccguccugcugugccucguggucuucuuccuggcuaugcuggugcucauggccgugcuguacguccacaugcuggcccgggccugccagcacgcccagggcaucgcccggcuccacaagaggcagcgcccgguccaccagggcuuuggccuuaaaggcgcugucacccucaccauccugcugggcauuuucuuccucugcuggggccccuucuuccugcaucucacacucaucguccucugccccgagcaccccacgugcggcugcaucuucaagaacuucaaccucuuucucgcccucaucaucugcaaugccaucaucgacccccucaucuacgccuuccacagccaggagcuccgcaggacgcucaaggaggugcugacaugcuccugguga

SEQ ID NO: 840 - RNA, 954 nt, Artificial Sequence
  AHC11324
auggcugugcagggaucccagagaagacuucugggcucccucaacuccacccccacagccaucccccagcuggggcuggcugccaaccagacaggagcccggugccuggagguguccaucucugacgggcucuuccucagccuggggcuggugagcuugguggagaacgcgcuggugguggccaccaucgccaagaaccggaaccugcacucacccauguacugcuucaucugcugccuggccuugucggaccugcuggugagcgggagcaacgugcuggagacggccgucauccuccugcuggaggccggugcacugguggcccgggcugcggugcugcagcagcuggacaaugucauugacgugaucaccugcagcuccaugcuguccagccucugcuuccugggcgccaucgccguggaccgcuacaucuccaucuucuacgcacugcgcuaccacagcaucgugacccugccgcgggcgcggcgagccguugcggccaucuggguggccagugucgucuucagcacgcucuucaucgccuacuacgaccacguggccguccugcugugccucguggucuucuuccuggcuaugcuggugcucauggccgugcuguacguccacaugcuggcccgggccugccagcacgcccagggcaucgcccggcuccacaagaggcagcgcccgguccaccagggcuuuggccuuaaaggcgcugucacccucaccauccugcugggcauuuucuuccucugcuggggccccuucuuccugcaucucacacucaucguccucugccccgagcaccccacgugcggcugcaucuucaagaacuucaaccucuuucucgcccucaucauccgcaaugccaucaucgacccccucaucuacgccuuccacagccaggagcuccgcaggacgcucaaggaggugcugacaugcuccugguga

SEQ ID NO: 841 - RNA, 954 nt, Artificial Sequence
  AHC09521
auggcugugcagggaucccagagaagacuucugggcucccucaacuccacccccacagccaucccccagcuggggcuggcugccaaccagacaggagcccggugccuggagguguccaucucugacgggcucuuccucagccuggggcuggugagcuugguggagaacgcgcuggugguggccaccaucgccaagaaccggaaccugcacucacccauguacugcuucaucugcugccuggccuugucggaccugcuggugagcgggagcaacgugcuggagacggccgucauccuccugcuggaggccggugcacugguggcccgggcugcggugcugcagcagcuggacaaugucauugacgugaucaccugcagcuccaugcuguccagccucugcuuccugggcgccaucgccguggaccgcuacaucuccaucuucuacgcacugcgcuaccacagcaucgugacccugccgugggcgcggcgagccguugcggccaucuggguggccagugucgucuucagcacgcucuucaucgccuacuacgaccacguggccguccugcugugccucguggucuucuuccuggcuaugcuggugcucauggccgugcuguacguccacaugcuggcccgggccugccagcacgcccagggcaucgcccggcuccacaagaggcagcgcccgguccaccagggcuuuggccuuaaaggcgcugucacccucaccauccugcugggcauuuucuuccucugcuggggccccuucuuccugcaucucacacucaucguccucugccccgagcaccccacgugcggcugcaucuucaagaacuucaaccucuuucucgcccucaucaucugcaaugccaucaucgacccccucaucuacgccuuccacagccaggagcuccgcaggacgcucaaggaggugcugacaugcuccugguga

SEQ ID NO: 842 - RNA, 954 nt, Artificial Sequence
  AHC11794
auggcugugcagggaucccagagaagacuucugggcucccucaacuccacccccacagccaucccccagcuggggcuggcugccaaccagacaggagcccggugccuggagguguccaucucugacgggcucuuccucagccuggggcuggugagcuugguggagaacgcgcuggugguggccaccaucgccaagaaccggaaccugcacucacccauguacugcuucaucugcugccuggccuugucggaccugcuggugagcgggagcaacgugcuggagacggccgucauccuccugcuggaggccggugcacugguggcccgggcugcggugcugcagcagcuggacaaugucauugacgugaucaccugcagcuccaugcuguccagccucugcuuccugggcgccaucgccguggaccgcuacaucuccaucuucuacgcacugcgcuaccacagcaucgugacccugccgcgggcgcggcgagccguugcggccaucuggguggccagugucgucuucagcacgcucuucaucgccuacuacgaccacguggccguccugcugugccucguggucuucuuccuggcuaugcuggugcucauggccgugcuguacguccacaugcuggcccgggccugccagcacgcccagggcaucgcccggcuccacaagaggcagcgcccgguccaccagggcuuuggccuuaaaggcgcugucacccucaccauccugcugggcauuuucuuccucugcuggggccccuucuuccugcaucucacacucaucguccucugccccgagcaccccgagugcggcugcaucuucaagaacuucaaccucuuucucgcccucaucaucugcaaugccaucaucgacccccucaucuacgccuuccacagccaggagcuccgcaggacgcucaaggaggugcugacaugcuccugguga

SEQ ID NO: 843 - RNA, 954 nt, Artificial Sequence
  AHC10874
auggcugugcagggaucccagagaagacuucugggcucccucaacuccacccccacagccaucccccagcuggggcuggcugccaaccagacaggagcccggugccuggagguguccaucucugacgggcucuuccucagccuggggcuggugagcuugguggagaacgcgcuggugguggccaccaucgccaagaaccggaaccugcacucacccauguacugcuucaucugcugccuggccuugucggaacugcuggugagcgggagcaacgugcuggagacggccgucauccuccugcuggaggccggugcacugguggcccgggcugcggugcugcagcagcuggacaaugucauugacgugaucaccugcagcuccaugcuguccagccucugcuuccugggcgccaucgccguggaccgcuacaucuccaucuucuacgcacugcgcuaccacagcaucgugacccugccgcgggcgcggcgagccguugcggccaucuggguggccagugucgucuucagcacgcucuucaucgccuacuacgaccacguggccguccugcugugccucguggucuucuuccuggcuaugcuggugcucauggccgugcuguacguccacaugcuggcccgggccugccagcacgcccagggcaucgcccggcuccacaagaggcagcgcccgguccaccagggcuuuggccuuaaaggcgcugucacccucaccauccugcugggcauuuucuuccucugcuggggccccuucuuccugcaucucacacucaucguccucugccccgagcaccccacgugcggcugcaucuucaagaacuucaaccucuuucucgcccucaucaucugcaaugccaucaucgacccccucaucuacgccuuccacagccaggagcuccgcaggacgcucaaggaggugcugacaugcuccugguga

SEQ ID NO: 844 - RNA, 954 nt, Artificial Sequence
  AHC09597
auggcugugcagggaucccagagaagacuucugggcucccucaacuccacccccacagccaucccccagcuggggcuggcugccaaccagacaggagcccggugccuggagguguccaucucugacgggcucuuccucagccuggggcuggugagcuugguggagaacgcgcuggugguggccaccaucgccaagaaccggaaccugcacucacccauguacugcuucaucugcugccuggccuugucggaccugcuggugagcgggagcaacgugcuggagacggccgucauccuccugcuggaggccggugcacugguggcccgggcugcggugcugcagcagcuggacaaugucauugacgugaucaccugcagcuccaugcuguccagccucugcuuccugggcgccaucgccguggaccgcuacaucuccaucuucuacgcacugugcuaccacagcaucgugacccugccgcgggcgcggcgagccguugcggccaucuggguggccagugucgucuucagcacgcucuucaucgccuacuacgaccacguggccguccugcugugccucguggucuucuuccuggcuaugcuggugcucauggccgugcuguacguccacaugcuggcccgggccugccagcacgcccagggcaucgcccggcuccacaagaggcagcgcccgguccaccagggcuuuggccuuaaaggcgcugucacccucaccauccugcugggcauuuucuuccucugcuggggccccuucuuccugcaucucacacucaucguccucugccccgagcaccccacgugcggcugcaucuucaagaacuucaaccucuuucucgcccucaucaucugcaaugccaucaucgacccccucaucuacgccuuccacagccaggagcuccgcaggacgcucaaggaggugcugacaugcuccugguga

SEQ ID NO: 845 - RNA, 1665 nt, Artificial Sequence
  CCDS816.1
augaccgcgccgggcgccgccgggcgcugcccucccacgacauggcugggcucccugcuguuguuggucugucuccuggcgagcaggaguaucaccgaggaggugucggaguacuguagccacaugauugggaguggacaccugcagucucugcagcggcugauugacagucagauggagaccucgugccaaauuacauuugaguuuguagaccaggaacaguugaaagauccagugugcuaccuuaagaaggcauuucuccugguacaagacauaauggaggacaccaugcgcuucagagauaacacccccaaugccaucgccauugugcagcugcaggaacucucuuugaggcugaagagcugcuucaccaaggauuaugaagagcaugacaaggccugcguccgaacuuucuaugagacaccucuccaguugcuggagaaggucaagaaugucuuuaaugaaacaaagaaucuccuugacaaggacuggaauauuuucagcaagaacugcaacaacagcuuugcugaaugcuccagccaagauguggugaccaagccugauugcaacugccuguaccccaaagccaucccuagcagugacccggccucugucuccccucaucagccccucgcccccuccauggccccuguggcuggcuugaccugggaggacucugagggaacugagggcagcucccucuugccuggugagcagccccugcacacaguggauccaggcagugccaagcagcggccacccaggagcaccugccagagcuuugagccgccagagaccccaguugucaaggacagcaccaucgguggcucaccacagccucgccccucugucggggccuucaaccccgggauggaggauauucuugacucugcaaugggcacuaauugggucccagaagaagccucuggagaggccagugagauucccguaccccaagggacagagcuuucccccuccaggccaggagggggcagcaugcagacagagcccgccagacccagcaacuuccucucagcaucuucuccacucccugcaucagcaaagggccaacagccggcagauguaacugguaccgccuugcccagggugggccccgugaggcccacuggccaggacuggaaucacaccccccagaagacagaccauccaucugcccugcucagagaccccccggagccaggcucucccaggaucucaucacugcgcccccagggccucagcaaccccuccacccucucugcucagccacagcuuuccagaagccacuccucgggcagcgugcugccccuuggggagcuggagggcaggaggagcaccagggaucggaggagccccgcagagccagaaggaggaccagcaagugaaggggcagccaggccccugccccguuuuaacuccguuccuuugacugacacaggccaugagaggcaguccgagggauccuucagcccgcagcuccaggagucugucuuccaccugcuggugcccagugucauccuggucuugcuggccgucggaggccucuuguucuacagguggaggcggcggagccaucaagagccucagagagcggauucucccuuggagcaaccagagggcagcccccugacucaggaugacagacagguggaacugccaguguag

SEQ ID NO: 846 - RNA, 1893 nt, Artificial Sequence
  EAW85719
auggccuugccaacggcucgaccccuguugggguccugugggacccccgcccucggcagccuccuguuccugcucuucagccucggaugggugcagcccucgaggacccuggcuggagagacagggcaggaggcugcgccccuggacggaguccuggccaacccaccuaacauuuccagccucuccccucgccaacuccuuggcuucccgugugcggagguguccggccugagcacggagcguguccgggagcuggcuguggccuuggcacagaagaaugucaagcucucaacagagcagcugcgcugucuggcucaccggcucucugagccccccgaggaccuggacgcccucccauuggaccugcugcuauuccucaacccagaugcguucucggggccccaggccugcacccguuucuucucccgcaucacgaaggccaauguggaccugcucccgaggggggcucccgagcgacagcggcugcugccugcggcucuggccugcuggggugugcgggggucucugcugagcgaggcugaugugcgggcucugggaggccuggcuugcgaccugccugggcgcuuuguggccgagucggccgaagugcugcuaccccggcuggugagcugcccgggaccccuggaccaggaccagcaggaggcagccagggcggcucugcagggcgggggaccccccuacggccccccgucgacauggucugucuccacgauggacgcucugcggggccugcugcccgugcugggccagcccaucauccgcagcaucccgcagggcaucguggccgcguggcggcaacgcuccucucgggacccauccuggcggcagccugaacggaccauccuccggccgcgguuccggcgggaaguggagaagacagccuguccuucaggcaagaaggcccgcgagauagacgagagccucaucuucuacaagaagugggagcuggaagccugcguggaugcggcccugcuggccacccagauggaccgcgugaacgccauccccuucaccuacgagcagcuggacguccuaaagcauaaacuggaugagcucuacccacaagguuaccccgagucugugauccagcaccugggcuaccucuuccucaagaugagcccugaggacauucgcaaguggaaugugacgucccuggagacccugaaggcuuugcuugaagucaacaaagggcacgaaaugaguccucaggcuccucggcggccccucccacagguggccacccugaucgaccgcuuugugaagggaaggggccagcuagacaaagacacccuagacacccugaccgccuucuacccuggguaccugugcucccucagccccgaggagcugagcuccgugccccccagcagcaucugggcggucaggccccaggaccuggacacgugugacccaaggcagcuggacguccucuaucccaaggcccgccuugcuuuccagaacaugaacggguccgaauacuucgugaagauccaguccuuccuggguggggcccccacggaggauuugaaggcgcucagucagcagaaugugagcauggacuuggccacguucaugaagcugcggacggaugcggugcugccguugacuguggcugaggugcagaaacuucugggaccccacguggagggccugaaggcggaggagcggcaccgcccggugcgggacuggauccuacggcagcggcaggacgaccuggacacgcuggggcuggggcuacagggcggcauccccaacggcuaccugguccuagaccucagcaugcaagaggcccucucggggacgcccugccuccuaggaccuggaccuguucucaccguccuggcacugcuccuagccuccacccuggccuga

SEQ ID NO: 847 - RNA, 1515 nt, Artificial Sequence
  CCDS46865.1
auggaggcgcuuagaguucagauguucaugccaugcuccuuugaaagcuuguaucucaguuccgccgagcauccuggggccuccaagccuccgauaagcuccuccaguaugacaucacgcaucuugcuacgccagcaacucaugcgugagcagaugcaggagcaggagcgcagggagcagcagcagaagcugcaggcggcccaguucaugcaacagagagugcccgugagucagacaccagccauaaacgucagugugcccaccacccuucccucugccacgcaggugccgauggaaguccuuaaggugcagacccaccucgaaaaccccaccaaguaccacauacagcaagcccaacggcagcagguaaagcaguaccuuucuaccacuuuagcaaauaaacaugccaaccaaguccugagcuugccauguccaaaccagccuggcgaucaugucaugccaccggugccggggagcagcgcacccaacagccccauggcuaugcuuacgcuuaacuccaacugugaaaaagagggauuuuauaaguuugaagagcaaaacagggcagagagcgagugcccaggcaugaacacacauucacgagcguccuguaugcagauggaugauguaaucgaugacaucauuagccuagaaucaaguuauaaugaggaaaucuugggcuugauggauccugcuuugcaaauggcaaauacguugccugucucgggaaacuugauugaucuuuauggaaaccaaggucugcccccaccaggccucaccaucagcaacuccuguccagccaaccuucccaacauaaaaagggagcucacagagucugaagcaagagcacuggccaaagagaggcagaaaaaggacaaucacaaccugauugaacgaagaagaagauuuaacauaaaugaccgcauuaaagaacuagguacuuugauucccaagucaaaugauccagacaugcgcuggaacaagggaaccaucuuaaaagcauccguggacuauauccgaaaguugcaacgagaacagcaacgcgcaaaagaacuugaaaaccgacagaagaaacuggagcacgccaaccggcauuuguugcucagaauacaggaacuugaaaugcaggcucgagcucauggacuuucccuuauuccauccacgggucucugcucuccagauuuggugaaucggaucaucaagcaagaacccguucuugagaacugcagccaagaccuccuucagcaucaugcagaccuaaccuguacaacaacucucgaucucacggauggcaccaucaccuucaacaacaaccucggaacugggacugaggccaaccaagccuauaguguccccacaaaaaugggauccaaacuggaagacauccugauggacgacacccuuucucccgucggugucacugauccacuccuuuccucagugucccccggagcuuccaaaacaagcagccggaggagcaguaugagcauggaagagacggagcacacuuguuag

SEQ ID NO: 848 - RNA, 1260 nt, Artificial Sequence
  CCDS2913.1
augcuggaaaugcuagaauauaaucacuaucaggugcagacccaccucgaaaaccccaccaaguaccacauacagcaagcccaacggcagcagguaaagcaguaccuuucuaccacuuuagcaaauaaacaugccaaccaaguccugagcuugccauguccaaaccagccuggcgaucaugucaugccaccggugccggggagcagcgcacccaacagccccauggcuaugcuuacgcuuaacuccaacugugaaaaagagggauuuuauaaguuugaagagcaaaacagggcagagagcgagugcccaggcaugaacacacauucacgagcguccuguaugcagauggaugauguaaucgaugacaucauuagccuagaaucaaguuauaaugaggaaaucuugggcuugauggauccugcuuugcaaauggcaaauacguugccugucucgggaaacuugauugaucuuuauggaaaccaaggucugcccccaccaggccucaccaucagcaacuccuguccagccaaccuucccaacauaaaaagggagcucacagcguguauuuuucccacagagucugaagcaagagcacuggccaaagagaggcagaaaaaggacaaucacaaccugauugaacgaagaagaagauuuaacauaaaugaccgcauuaaagaacuagguacuuugauucccaagucaaaugauccagacaugcgcuggaacaagggaaccaucuuaaaagcauccguggacuauauccgaaaguugcaacgagaacagcaacgcgcaaaagaacuugaaaaccgacagaagaaacuggagcacgccaaccggcauuuguugcucagaauacaggaacuugaaaugcaggcucgagcucauggacuuucccuuauuccauccacgggucucugcucuccagauuuggugaaucggaucaucaagcaagaacccguucuugagaacugcagccaagaccuccuucagcaucaugcagaccuaaccuguacaacaacucucgaucucacggauggcaccaucaccuucaacaacaaccucggaacugggacugaggccaaccaagccuauaguguccccacaaaaaugggauccaaacuggaagacauccugauggacgacacccuuucucccgucggugucacugauccacuccuuuccucagugucccccggagcuuccaaaacaagcagccggaggagcaguaugagcauggaagagacggagcacacuuguuag

SEQ ID NO: 849 - RNA, 1581 nt, Artificial Sequence
  XM_005264754
augcaguccgaaucggggaucgugccggauuucgaagucggggaggaguuucaugaagagcccaaaaccuauuacgaacucaaaagucaaccgcugaagagcagcaguuccgccgagcauccuggggccuccaagccuccgauaagcuccuccaguaugacaucacgcaucuugcuacgccagcaacucaugcgugagcagaugcaggagcaggagcgcagggagcagcagcagaagcugcaggcggcccaguucaugcaacagagagugcccgugagucagacaccagccauaaacgucagugugcccaccacccuucccucugccacgcaggugccgauggaaguccuuaaggugcagacccaccucgaaaaccccaccaaguaccacauacagcaagcccaacggcagcagguaaagcaguaccuuucuaccacuuuagcaaauaaacaugccaaccaaguccugagcuugccauguccaaaccagccuggcgaucaugucaugccaccggugccggggagcagcgcacccaacagccccauggcuaugcuuacgcuuaacuccaacugugaaaaagagggauuuuauaaguuugaagagcaaaacagggcagagagcgagugcccaggcaugaacacacauucacgagcguccuguaugcagauggaugauguaaucgaugacaucauuagccuagaaucaaguuauaaugaggaaaucuugggcuugauggauccugcuuugcaaauggcaaauacguugccugucucgggaaacuugauugaucuuuauggaaaccaaggucugcccccaccaggccucaccaucagcaacuccuguccagccaaccuucccaacauaaaaagggagcucacagcguguauuuuucccacagagucugaagcaagagcacuggccaaagagaggcagaaaaaggacaaucacaaccugauugaacgaagaagaagauuuaacauaaaugaccgcauuaaagaacuagguacuuugauucccaagucaaaugauccagacaugcgcuggaacaagggaaccaucuuaaaagcauccguggacuauauccgaaaguugcaacgagaacagcaacgcgcaaaagaacuugaaaaccgacagaagaaacuggagcacgccaaccggcauuuguugcucagaauacaggaacuugaaaugcaggcucgagcucauggacuuucccuuauuccauccacgggucucugcucuccagauuuggugaaucggaucaucaagcaagaacccguucuugagaacugcagccaagaccuccuucagcaucaugcagaccuaaccuguacaacaacucucgaucucacggauggcaccaucaccuucaacaacaaccucggaacugggacugaggccaaccaagccuauaguguccccacaaaaaugggauccaaacuggaagacauccugauggacgacacccuuucucccgucggugucacugauccacuccuuuccucagugucccccggagcuuccaaaacaagcagccggaggagcaguaugagcauggaagagacggagcacacuuguuag

SEQ ID NO: 850 - RNA, 1065 nt, Artificial Sequence
  BAG52140
auggcuccggccgccuggcuccgcagcgcggccgcgcgcgcccuccugcccccgaugcugcugcugcugcuccagccgccgccgcugcuggcccgggcucugccgccggacguccaccaccuccaugccgagaggagggggccacagcccuggcaugcagcccugcccaguagcccggcaccugccccugccacgcaggaagccccccggccugccagcagccucaggccuccccgcuguggcgugcccgacccaucugaugggcugagugcccgcaaccgacagaagaggauccuucgguucccauggcaguuggugcaggagcaggugcggcagacgauggcagaggcccuaaagguauggagcgaugugacgccacucaccuuuacugaggugcacgagggccgugcugacaucaugaucgacuucgccagguacuggcauggggacgaccugccguuugaugggccugggggcauccuggcccaugccuucuuccccaagacucaccgagaaggggauguccacuucgacuaugaugagaccuggacuaucggggaugaccagggcacagaccugcugcagguggcagcccaugaauuuggccacgugcuggggcugcagcacacaacagcagccaaggcccugauguccgccuucuacaccuuucgcuacccacugagucucagcccagaugacugcaggggcguucaacaccuauauggccagcccuggcccacugucaccuccaggaccccagcccugggcccccaggcugggauagacaccaaugagauugcaccgcuggagccagacgccccgccagaugccugugaggccuccuuugacgcggucuccaccauccgaggcgagcucuuuuucuucaaagcgggcuuuguguggcgccuccgugggggccagcugcagcccggcuacccagcauuggccucucgccacuggcagggacugcccagcccuguggacgcugccuucgaggaugcccagggccacauuugguucuuccaagggacuacuggcguuuccaccccagcacccggcguguag

SEQ ID NO: 851 - RNA, 804 nt, Artificial Sequence
  AAV40839
augcgacucaccgugcugugugcugugugccugcugccuggcagccuggcccugccgcugccucaggaggcgggaggcaugagugagcuacagugggaacaggcucaggacuaucucaagagauuuuaucucuaugacucagaaacaaaaaaugccaacaguuuagaagccaaacucaaggagaugcaaaaauucuuuggccuaccuauaacuggaauguuaaacucccgcgucauagaaauaaugcagaagcccagauguggagugccagauguugcagaauacucacuauuuccaaauagcccaaaauggacuuccaaaguggucaccuacaggaucguaucauauacucgagacuuaccgcauauuacaguggaucgauuagugucaaaggcuuuaaacauguggggcaaagagaucccccugcauuucaggaaaguuguauggggaacugcugacaucaugauuggcuuugcgcgaggagcucauggggacuccuacccauuugaugggccaggaaacacgcuggcucaugccuuugcgccugggacaggucucggaggagaugcucacuucgaugaggaugaacgcuggacggaugguagcagucuagggauuaacuuccuguaugcugcaacucaugaacuuggccauucuuuggguaugggacauuccucugauccuaaugcagugauguauccaaccuauggaaauggagauccccaaaauuuuaaacuuucccaggaugauauuaaaggcauucagaaacuauauggaaagagaaguaauucaagaaagaaauag

SEQ ID NO: 852 - RNA, 3768 nt, Artificial Sequence
  J05582.1
augacaccgggcacccagucuccuuucuuccugcugcugcuccucacagugcuuacaguuguuacagguucuggucaugcaagcucuaccccagguggagaaaaggagacuucggcuacccagagaaguucagugcccagcucuacugagaagaaugcugugaguaugaccagcagcguacucuccagccacagccccgguucaggcuccuccaccacucagggacaggaugucacucuggccccggccacggaaccagcuucagguucagcugccaccuggggacaggaugucaccucggucccagucaccaggccagcccugggcuccaccaccccgccagcccacgaugucaccucagccccggacaacaagccagccccgggcuccaccgcccccccagcccacggugucaccucggccccggacaccaggccggccccgggcuccaccgcccccccagcccacggugucaccucggccccggacaccaggccggccccgggcuccaccgcccccccagcccacggugucaccucggccccggacaccaggccggccccgggcuccaccgcccccccagcccacggugucaccucggccccggacaccaggccggccccgggcuccaccgcccccccagcccacggugucaccucggccccggacaccaggccggccccgggcuccaccgcccccccagcccacggugucaccucggccccggacaccaggccggccccgggcuccaccgcccccccagcccacggugucaccucggccccggacaccaggccggccccgggcuccaccgcccccccagcccacggugucaccucggccccggacaccaggccggccccgggcuccaccgcccccccagcccacggugucaccucggccccggacaccaggccggccccgggcuccaccgcccccccagcccacggugucaccucggccccggacaccaggccggccccgggcuccaccgcccccccagcccacggugucaccucggccccggacaccaggccggccccgggcuccaccgcccccccagcccacggugucaccucggccccggacaccaggccggccccgggcuccaccgcccccccagcccacggugucaccucggccccggacaccaggccggccccgggcuccaccgcccccccagcccacggugucaccucggccccggacaccaggccggccccgggcuccaccgcccccccagcccacggugucaccucggccccggacaccaggccggccccgggcuccaccgcccccccagcccacggugucaccucggccccggacaccaggccggccccgggcuccaccgcccccccagcccacggugucaccucggccccggacaccaggccggccccgggcuccaccgcccccccagcccacggugucaccucggccccggacaccaggccggccccgggcuccaccgcccccccagcccacggugucaccucggccccggacaccaggccggccccgggcuccaccgcccccccagcccacggugucaccucggccccggacaccaggccggccccgggcuccaccgcccccccagcccacggugucaccucggccccggacaccaggccggccccgggcuccaccgcccccccagcccacggugucaccucggccccggacaccaggccggccccgggcuccaccgcccccccagcccacggugucaccucggccccggacaccaggccggccccgggcuccaccgcccccccagcccacggugucaccucggccccggacaccaggccggccccgggcuccaccgcccccccagcccacggugucaccucggccccggacaccaggccggccccgggcuccaccgcccccccagcccacggugucaccucggccccggacaccaggccggccccgggcuccaccgcccccccagcccacggugucaccucggccccggacaccaggccggccccgggcuccaccgcccccccagcccacggugucaccucggccccggacaccaggccggccccgggcuccaccgcccccccagcccacggugucaccucggccccggacaccaggccggccccgggcuccaccgcccccccagcccacggugucaccucggccccggacaccaggccggccccgggcuccaccgcccccccagcccacggugucaccucggccccggacaccaggccggccccgggcuccaccgcccccccagcccacggugucaccucggccccggacaccaggccggccccgggcuccaccgcccccccagcccacggugucaccucggccccggacaccaggccggccccgggcuccaccgcccccccagcccacggugucaccucggccccggacaccaggccggccccgggcuccaccgcccccccagcccacggugucaccucggccccggacaccaggccggccccgggcuccaccgcccccccagcccacggugucaccucggccccggacaccaggccggccccgggcuccaccgcccccccagcccacggugucaccucggccccggacaccaggccggccccgggcuccaccgcccccccagcccacggugucaccucggccccggacaccaggccggccccgggcuccaccgcccccccagcccacggugucaccucggccccggacaccaggccggccccgggcuccaccgcccccccagcccacggugucaccucggccccggacaccaggccggccccgggcuccaccgcccccccagcccauggugucaccucggccccggacaacaggcccgccuugggcuccaccgccccuccaguccacaaugucaccucggccucaggcucugcaucaggcucagcuucuacucuggugcacaacggcaccucugccagggcuaccacaaccccagccagcaagagcacuccauucucaauucccagccaccacucugauacuccuaccacccuugccagccauagcaccaagacugaugccaguagcacucaccauagcucgguaccuccucucaccuccuccaaucacagcacuucuccccaguugucuacuggggucucuuucuuuuuccugucuuuucacauuucaaaccuccaguuuaauuccucucuggaagaucccagcaccgacuacuaccaagagcugcagagagacauuucugaaauguuuuugcagauuuauaaacaaggggguuuucugggccucuccaauauuaaguucaggccaggaucuguggugguacaauugacucuggccuuccgagaagguaccaucaauguccacgacguggagacacaguucaaucaguauaaaacggaagcagccucucgauauaaccugacgaucucagacgucagcgugagugaugugccauuuccuuucucugcccagucuggggcuggggugccaggcuggggcaucgcgcugcuggugcuggucuguguucugguugcgcuggccauugucuaucucauugccuuggcugucugucagugccgccgaaagaacuacgggcagcuggacaucuuuccagcccgggauaccuaccauccuaugagcgaguaccccaccuaccacacccaugggcgcuaugugcccccuagcaguaccgaucguagccccuaugagaagguuucugcagguaacgguggcagcagccucucuuacacaaacccagcaguggcagccgcuucugccaacuuguag

SEQ ID NO: 853 - RNA, 2136 nt, Artificial Sequence
  NM_032853
augauggcggaugccaaguauguccucugccgaugggaaaagcgauuauggccugcgaagguuuuggcccgaaccgcgacuucaacaaaaaauaagagaagaaaggaauauuuucuagcugugcaaauccucucucuagaggaaaaaauuaaggugaaaagcacugaaguugagauccuagagaagucucaaauugaagccauugcuuccucguuagccucacagaaugagguuccugcggcaccccuggaagaacuggccuacagacggucgcuucgcguggcucuggacguucugagcgagggcucgauuuggagucaagaaagcucugcagggacagguagagcugaccggucucugcgagggaagcccauggagcaugucuccucgcccugugauucgaacuccucaucucuuccccgcggagacguguugggcaguuccagaccucacaggaggaggccaugugugcaacaaagccugucaaguucguucacuugugaaaaggaccccgagugcaaaguggaccacaagaaggggcucaggaaaagugaaaacccaagaggcccguugguccucccagcuggagguggugcccaagaugagaguggguccagaauccaccacaaaaauuggacucuugcaaguaagaggggaggaaacucagcgcagaaggcuagcuugugccugaauggaucuucccuuucagaggacgacacggagagagacauggggagcaaaggaggcagcugggcagccccguccuugcccuccggggucagggaggacgaucccugugccaacgcugagggacacgaccccggucugccguugggcagccucacugcgcccccagccccugagcccucggccugcucagagccuggagaaugcccugcgaaaaagaggccgcgccuggauggcagccaaaggccgccugccgugcagcuggagcccauggcagcaggggccgcaccaucccccgggccggggccagggcccagagagucugugaccccgcgcagcaccgccaggcugggcccgccucccucccacgccucugcggaugcaaccagaugucuuccuugcccggauucccagaagcuggagaaagagugccagucuuccgaagaguccauggggucuaauuccaugcguucuauccuggaggaagacgaggaagacgaggagccaccaagaguccuuuuauaccacgaaccacguucguuugaaguaggaaugcuagucuggcauaaacauaaaaaauaccccuucuggccagcaguggucaaaagcgucaggcagagagauaagaaagcaagugugcuauacaucgaaggacacaugaacccgaaaaugaaagguuucacagugucucuuaaaaguuuaaagcacuuugauuguaaagagaaacagacgcuucugaaucaagccagggaggacuucaaccaggacaucggcuggugugucucccucaucaccgacuacaggguccgguuaggcugcgggucuuuugcuggcucuuuccuggaauauuacgcggcugauauaagcuauccuguccgaaaauccauccagcaggacgucuuggggaccaagcuuccucaacugagcaaggggagccccgaggagcccgugguggggugcccccuggggcagaggcagcccugccggaaaaugcuccccgaccgcucgcgggccgcccgggaccgggccaaccagaagcugguggaguacauugugaaggccaagggcgcggagagccaccugcgggccauccuaaagagcaggaagccaucucgcuggcugcagaccuuccugagcuccagccaguacgugaccuguguggagaccuaccuggaggaugaggggcagcuggaccugguggugaaguaccugcagggcgucuaccaggaggugggggccaaggugcuccagcgcaccaacggcgaccggauccgguucauucuggacgugcuucugcccgaggccaucaucugugcgaucucugcgguggacgagguggacuacaagacggcugaggagaaguacaucaaggggccuucgcugagcuaccgggaaaaagaaauauuugacaaccagcuccuugaagagcggaaccggcgccgucgguga

SEQ ID NO: 854 - RNA, 438 nt, Artificial Sequence
  AAD44697
augacuguccacaaccuguaccuguuugaccggaauggagugugucugcacuacagcgaauggcaccgcaagaagcaagcagggauucccaaggaggaggaguauaagcugauguacgggaugcucuucucuauccgcucguuugucagcaagauguccccgcuagacaugaaggauggcuuccuggccuuccaaacuagccguuacaaacuccauuacuacgagacgcccacugggaucaaaguugucaugaauacugacuugggcgugggacccauccgagaugugcugcaccacaucuacagugcgcuguauguggagcugguggugaagaauccccugugcccgcugggccaaacugugcaaagugagcucuuucgcucccgacuggacuccuauguucgcucucugcccuucuucuccgcccgggcuggcuga

SEQ ID NO: 855 - RNA, 1395 nt, Artificial Sequence
  AAH02712
augccgagcugcuccacguccaccaugccgggcaugaucugcaagaacccagaccucgaguuugacucgcuacagcccugcuucuacccggacgaagaugacuucuacuucggcggccccgacucgacccccccgggggaggacaucuggaagaaguuugagcugcugcccacgcccccgcugucgcccagccguggcuucgcggagcacagcuccgagcccccgagcugggucacggagaugcugcuugagaacgagcuguggggcagcccggccgaggaggacgcguucggccuggggggacuggguggccucacccccaacccggucauccuccaggacugcauguggagcggcuucuccgcccgcgagaagcuggagcgcgccgugagcgagaagcugcagcacggccgcgggccgccaaccgccgguuccaccgcccaguccccgggagccggcgccgccagcccugcgggucgcgggcacggcggggcugcgggagccggccgcgccggggccgcccugcccgccgagcucgcccacccggccgccgagugcguggaucccgccguggucuuccccuuucccgugaacaagcgcgagccagcgcccgugcccgcagccccggccagugccccggcggcgggcccugcggucgccucgggggcggguauugccgccccagccggggccccgggggucgccccuccgcgcccaggcggccgccagaccagcggcggcgaccacaaggcccucaguaccuccggagaggacacccugagcgauucagaugaugaagaugaugaagaggaagaugaagaggaagaaaucgacguggucacuguggagaagcggcguuccuccuccaacaccaaggcugucaccacauucaccaucacugugcgucccaagaacgcagcccugggucccgggagggcucaguccagcgagcugauccucaaacgaugccuucccauccaccagcagcacaacuaugccgcccccucucccuacguggagagugaggaugcacccccacagaagaagauaaagagcgaggcguccccacguccgcucaagagugucauccccccaaaggcuaagagcuugagcccccgaaacucugacucggaggacagugagcgucgcagaaaccacaacauccuggagcgccagcgccgcaacgaccuucgguccagcuuucucacgcucagggaccacgugccggaguugguaaagaaugagaaggccgccaagguggucauuuugaaaaaggccacugaguauguccacucccuccaggccgaggagcaccagcuuuugcuggaaaaggaaaaauugcaggcaagacagcagcaguugcuaaagaaaauugaacacgcucggacuugcuag

SEQ ID NO: 856 - RNA, 3132 nt, Artificial Sequence
  AAC78645
augccucuccuggaagguucuguggggguggaggaucuuguccuccuggaacccuugguggaggagucacugcucaagaaucuucagcuucgcuaugaaaacaaggagauuuauaccuacauugggaauguggugaucucagugaaucccuaucaacagcuucccaucuaugggccagaguucauugccaaauaucaagacuauacuuucuaugagcugaagccccauaucuacgcauuggcaaauguggcguaccagucacugagggacagggaccgagaccaguguauccucaucacaggcgagaguggaucagggaagacugaggccagcaagcuggugaugucuuauguggcugccgucugugggaaaggagagcaggugaacucugugaaggagcagcugcuacagucuaacccagugcuggaggcuuuuggcaaugccaagaccauucgcaacaacaauuccucccgauuuggaaaauacauggauauugaauuugacuucaagggauccccccucgguggugucaucacaaacuaucugcuugagaaaucccgauuagugaagcagcucaaaggagaaaggaacuuccacaucuucuaucagcugcuggcuggagcagaugaacagcugcugaaggcccugaagcuugagcgggauacaacuggcuaugccuaucugaaucaugaaguauccagaguggauggcauggacgacgccuccagcuucagggcuguacagagugcaauggcagugauuggguucucggaggaggagauucgacaagugcuagaggugacauccauggugcuaaagcuggggaacguguugguggcugaugaguuccaggccagugggauaccagcaaguggcauccgugaugggagagguguucgggagauuggggagauggugggcuugaauucagaagaaguagagagagcuuugugcucgaggaccauggaaacagccaaggaaaagguggucacugcacugaauguuaugcaggcucaguaugcucgggacgcccuggcuaagaacaucuacagccgccucuuugacuggauagugaaucgaaucaaugagagcaucaaggugggcaucggggaaaagaagaagguaaugggaguccuugauaucuacgguuuugagauauuagaggauaauagcuuugagcaauuugugaucaacuacugcaaugagaagcugcagcagguguucauagagaugacccugaaagaagagcaagaggaauauaagagagaaggcauaccguggacaaagguggacuacuuugauaauggcaucauuuguaagcucauugagcauaaucagcgagguauccuggccauguuggaugaggagugccugcggccugggguggucagugacuccacuuuccuagcaaagcugaaccagcucuucuccaagcauggccacuacgagagcaaagucacccagaaugcccagcgucaguaugaccacaccaugggccucagcugcuuccgcaucugccacuaugcgggcaaggugacauacaacgugaccagcuuuauugacaagaauaaugaccuacucuuccgagaccuguugcaggccauguggaaggcccagcacccccuccuucgguccuuguuuccugagggcaauccuaagcaggcaucucucaaacgccccccgacugcuggggcccaguucaagaguucuguggccauccucaugaagaaucuguauuccaagagccccaacuacaucaggugcauaaagcccaaugagcaucagcagcgaggucaguucucuucagaccugguggcaacccaggcucgguaccugggacugcuggagaacguacgggugcgacgggcaggcuaugcccaccgccaggguuaugggcccuuccuggaaagguaccgauugcugagccggagcaccuggccucacuggaaugggggagaccgggaagguguugagaagguccugggggagcugagcauguccucgggggagcuggccuuuggcaagacaaagaucuucauuagaagccccaagacucuuuucuaccucgaagaacagaggcgccugagacuccagcagcuggccacacucauacagaagauuuaccgaggcuggcgcugccgcacccacuaccaacugaugcgaaagagucagauccucaucuccucuugguuucggggaaacaugcaaaagaaaugcuaugggaagauaaaggcauccguguuauugauccaggcuuuugugagaggguggaaggcccgaaagaauuaucgcaaauauuuccggucagaggcugcccucaccuuggcagauuucaucuacaagagcaugguacagaaauuccuacuggggcugaagaacaauuugccauccacaaacgucuuagacaagacauggccagccgcccccuacaagugccucagcacagcaaaucaggagcugcagcagcucuucuaccaguggaagugcaagagguuccgggaucagcuguccccgaagcagguagagauccugagggaaaagcucugugccagugaacuguucaagggcaagaaggcuucauauccccagaguguccccauuccauucuguggugacuacauugggcugcaagggaaccccaagcugcagaagcugaaaggcggggaggaggggccuguucugauggcagaggccgugaagaaggucaaucguggcaauggcaagacuucuucucggauucuccuccugaccaagggccaugugauucucacagacaccaagaagucccaggccaaaauugucauugggcuagacaauguggcuggggugucagucaccagccucaaggaugggcucuuuagcuugcaucugagugagaugucaucggugggcuccaagggggacuuccugcuggucagcgagcaugugauugaacugcugaccaaaauguaccgggcugugcuggaugccacgcagaggcagcuuacagucaccgugacugagaaguucucagugagguucaaggagaacaguguggcugucaaggucguccagggcccugcagguggugacaacagcaagcuacgcuacaaaaaaaaggggagucauugcuuggaggugacugugcaguga

SEQ ID NO: 857 - RNA, 3411 nt, Artificial Sequence
  AAH53558
auggccaaaauggaggugaaaaccucacuucuggacaauaugauuggaguuggggauaugguucuuuuagaaccucucaaugaggagaccuucaucaacaaccucaagaagcgcuuugaccacagugaaauauacacuuacauuggaagugugguuauaucuguuaacccauaucggucuuuacccauuuauucaccagagaaaguggaagaauacaggaacagaaauuuuuaugaacugagcccucacaucuuugcccuuucggaugaagcauacagaucccuacgagaucaagauaaggaccaauguauucucauuacuggggaaaguggagcaggaaaaacagaggccaguaagcuugucauguccuauguggcagcuguuuguggaaaaggagcagaaguuaaucaaguuaaagaacagcuuuuacaguccaacccgguccuggaagcuuuuggaaaugccaaaacuguaaggaaugacaacuccucuagauuuggcaaauauauggauauugaauuugacuuuaaaggcgauccacuaggaggaguaauaaguaacuaucuuuuagagaaaucucggguuguuaaacagccaagaggugaaagaaacuuccauguguucuaucagcugcucucuggugccucugaagagcuccucaauaaacuuaagcuugagagggauuucagcagguauaacuaccugagucuggauucggccaaagugaauggaguggaugaugcagcaaauuuuagaaccgugcggaaugccaugcagauugugggcuuuauggaucaugaagcugagucugucuuggcggugguggcagcaguguugaaacuggggaacauugaguucaagcccgaaucucgagugaauggucuagaugaaagcaaaaucaaagauaaaaaugaguuaaaagaaauuugugaauugaccggcauugaucaaucaguucuagaacgagcauucaguuuccgaacaguugaggccaaacaggagaaaguuucaacuacacugaauguggcucaggcuuauuaugcccgugaugcucuggcuaaaaaccucuacagcagguuguuuucaugguugguaaaucgaaucaaugaaagcauuaaggcacaaacaaaagugagaaagaaggucauggguguucuggacauuuauggcuuugagauuuucgaggacaacagcuuugagcaguucauuauuaauuauuguaacgaaaagcugcaacaaaucuucauugaacuuacucuuaaagaagagcaggaggaguauauacgggaggauauagaauggacucacauugacuacuucaauaaugcuaucauuugugaccuaauagaaaauaacacaaauggaauccuggccaugcuggaugaagagugccucagaccuggcacagucacugaugagaccuucuuagaaaagcugaaccaaguaugugccacccaccagcauuuugaaagcaggaugagcaagugcucucgguuccucaaugacacgucucugccucacagcugcuucaggauccagcauuaugcuggaaaggugcuguaccagguggaaggauucguugacaaaaacaaugaccuucucuaucgagaccugucccaagccauguggaaggccagccaugcccucaucaagucuuuguuccccgaagggaaucccgccaagaucaaccugaaaaggccuccuacagcaggcucacaguucaaggcauccguggccacucugaugaaaaaccuacagaccaagaacccaaacuauauuagguguaucaaaccgaaugauaaaaaagcagcacacaucuucaacgaggcucuagugugucaucagaucagguaccuggggcuuuuggagaacguccgagugcggagggcaggcuacgccuucaggcaggccuaugaaccuugccuagaaagauacaaaaugcuuuguaaacaaacauggccucauuggaaaggaccagccaggucugguguggagguccuauuuaaugaauuagaaauucccguggaagaauacuccuuugguagaucaaagauauucauccgaaacccaagaacauuauucaaauuagaagaccugaggaagcaacgccuggaggacuuggccacucucauucagaagauauaucggggguggaaaugccgcacacacuuccugcuaaugaaaaaaagccaaauugugauugccgccugguacaggagauaugcgcaacaaaagagguaccagcagacaaagaguuccgccuuaguaauucagucuuauauccgggguuggaaggcucgaaaaauucugcgggaacugaagcaucaaaagcgcuguaaggaagcagucacgaccauugcugcauauuggcaugggacccaggcacgaagggaacugagacggcugaaggaggaggcuaggaauaaacaugcuauugcaguuauuugggcuuacuggcuuggaucuaaggcucgaagggaauugaaacgcuugaaggaggaggcuaggcguaagcaugcaguugcugucauuugggcuuacuggcuuggacugaagguacguagagaauacaggaaauucuucagagccaaugcuggaaagaaaaucuaugaguuuacgcuucagagaauugugcaaaaauacuucuuggaaaugaaaaauaagaugccuuccuuaucuccaauagacaagaauuggcccucaagaccuuacuuauucuuggauucuacucacaaggagcuaaaaaggauuuuccacuuguggagguguaaaaaauacagggaccaauucacagaccagcagaaacuuauuuaugaagagaaacuagaagccagugaacucuucaaagacaagaaggcuuuauacccaucuaguguugggcaaccauuccaaggggcuuaccuggaaaucaacaagaaccccaaguauaagaaacucaaagaugccauugaagaaaagaucaucauugcugaagucgugaacaaaauuaaccgugcuaaugggaagaguacaucucggauuuuccucuuaacaaacaauaaucuccuucuugcugaccaaaagucuggacaaaucaagucagagguuccacugguggaugugaccaagguaucaaugagcucacaaaaugauggcuucuucgccguccaccucaaagagggcucagaagcagcuaguaaaggagacuuucucuucagcagugaucaccugauugaaauggccaccaagcucuaucgcacaacucucagccaaaccaaacagaagcucaauauugagauuuccgaugaguuccugguacaguucagacaggacaaaguaugugugaaguuuauucagggaaaccagaaaaaugggagugucccaacauguaaacgaaaaaacaaccgucuccuugaaguugcugucccuuaa

SEQ ID NO: 858 - RNA, 3192 nt, Artificial Sequence
  CCDS42226.1
auggcgcugcaaguggagcugguacccaccggggagaucauccgcgugguucauccccacaggcccugcaagcuugcccugggcagugacgggguucgggugaccauggagagugcgcucaccgcccgugaccgggugggggugcaggauuucgugcugcuggagaacuucaccagcgaggccgccuucaucgagaaccugcggcggcgauuucgggagaaucucaucuacaccuacauuggccccguccuggucucugucaaucccuaccgggaccugcagaucuacagccggcagcauauggagcguuaccguggcgucagcuucuaugaagugcccccucaccuguuugccguggcggacacuguguaccgagcacugcgcacggagcgucgggaccaggcugugaugaucucuggggagagcggggcaggcaagaccgaggccaccaagaggcugcugcaguucuaugcagagaccugcccagcccccgagcgcggaggugccgugcgggaccggcugcuacagagcaacccggugcuggaggccuuuggaaaugccaagacccuccggaacgauaacuccagcagguucgggaaguacauggaugugcaguuugacuucaagggugcccccguggguggccacauccucaguuaccuccuggaaaagucacgaguggugcaccagaaucauggggagcggaacuuccacaucuucuaccagcugcuggaggggggcgaggaggagacucuucgcaggcugggcuuggaacggaacccccagagcuaccuguaccuggugaagggccagugugccaaagucuccuccaucaacgacaagagugacuggaaggucgucaggaaggcucugacagucauugauuucaccgaggaugaaguggaggaccugcugagcaucguggccagcguccuucauuugggcaacauccacuuugcugccaacgaggagagcaaugcccaggucaccaccgagaaccagcucaaguaucugaccaggcuccucagcguggaaggcucgacgcugcgagaagcccugacacacaggaagaucaucgccaagggggaggagcuccugagcccgcugaaccuggagcaggccgcguacgcacgagacgcccucgccaaggcuguguacagccgcacuuuuaccuggcucgucgggaagaucaacaggucgcuggccuccaaggacguggagagccccagcuggcggagcaccacgguucucgggcuccuggauauuuauggcuuugaaguguuucagcauaacagcuuugagcaguucugcaucaauuacugcaacgagaagcugcagcagcucuucaucgagcucacgcucaagucggagcaggaggaguacgaggcagagggcaucgcgugggagcccguccaguauuucaacaacaaaaucaucugugaucugguggaggagaaguuuaagggcaucaucucgauuuuggaugaggagugucugcgccccggggaggccacagaccugaccuuccuggagaagcuggaggauacugucaagcaccauccacacuuccugacgcacaagcuggcugaccagcggaccaggaaaucucugggccgaggggaauuccgccuucugcacuaugcgggggaggugaccuacagcgugaccggguuucuggacaaaaacaaugaccuucucuuccggaaccuuaaggagaccauguguagcucaaagaaucccauuaugagccagugcuuugaccggagcgagcucagugacaagaagcggccagagacggucgccacccaguucaagaugagccuccugcagcugguggagauccugcagucuaaggagcccgccuacguccgcugcaucaaacccaaugaugccaaacagcccggccgcuuugacgaggugcugauccgccaccaggugaaguaccuggggcuguuggaaaaccugcgcgugcgcagagccggcuuugccuaucgccgcaaauacgaagcuuuccugcaaagguacaagucacugugcccagagacguggcccacgugggcaggacggccgcaggaugggguggcugugcugguccgacaccugggcuacaagccagaagaguacaagaugggcaggaccaagaucuucauccgcuuccccaagacccuguuugccacagaggaugcccuggagguccggcggcagagccuggccacaaagauccaagcugccuggaggggcuuucacuggcggcagaaauuccuccgggugaagagaucagccaucugcauccagucgugguggcguggaacacugggccggaggaaggcagccaagaggaagugggcggcacagaccauccggcggcucauccgaggcuucguccugcgccacgccccccgcugccccgagaacgccuucuuccuggaccaugugcgcaccucuuuuuugcuaaaccugaggcggcagcugccccagaauguccuggacaccucguggcccacgcccccaccugcccugcgugaggccucagagcuucugcgggaguugugcauaaagaacaugguguggaaauacugccggaguaucagcccugaguggaagcagcagcugcagcagaaggccguggcuagugagaucuucaagggcaagaaggauaauuacccucagaguguacccaggcucuucaucagcacucggcuugguacagaugagaucagcccccgagugcugcaggccuugggcucugagcccauucaguaugcggugccuguugugaaauacgaccgcaagggcuacaagccucgcucccggcagcugcugcucacgcccaacgccgucgucaucguggaggacgccaaagucaagcagaggauugauuacgccaaccugaccggaaucucugucagcagccugagcgacagucuuuuugugcuucauguacagcgugcggacaauaagcaaaagggagauguggugcugcagagugaccacgugauugagacgcugaccaagacagcccucagugccaaccgcgugaacagcaucaacaucaaccagggcagcaucacguuugcagggggccccggcagggauggcaccauugacuucacacccggcucggagcugcucaucaccaaggccaagaacgggcaccuggcuguggucgccccacggcugaauucucgguga

SEQ ID NO: 859 - RNA, 3021 nt, Artificial Sequence
  AAI46764
auggcggagcaggagagccuggaauucggcaaggcagacuucgugcugauggacaccgucuccaugcccgaguucauggccaaccucaggcucagauuugaaaaagggcgcaucuauacguucauuggagaagucgucguuucugugaacccuuacaaguuguugaacaucuauggaagagacacaauugagcaguauaaaggccgugagcuguaugagagaccgccucaccuuuuugcuauugcggaugcugcuuacaaggcuaugaagaggcgaucaaaagacacuuguauugugauaucaggggaaaguggagcugguaaaacggaagccaguaaguacauuaugcaguauauugcggccaucaccaaccccagucagagagcagagguugaaagagugaagaauauguugcuuaaguccaacuguguuuuggaagcuuuuggaaaugccaaaaccaaccguaaugacaacucaagcagguuuggaaaauacauggauaucaacuuugacuucaagggugacccuauuggugggcauaucaauaacuacuuacuagaaaagucucgagugauugugcaacagccaggagaaagaagcuuucauucuuucuaucagcuacuccaaggagguucagaacaaaugcuacgcucucuacaucuccagaaaucccuuucauccuacaacuauauucaugugggagcucaauuaaagucuucuaucaaugaugcugccgaauucagaguuguugcugaugccaugaaagucauuggcuucaaaccugaggagauccaaacaguguauaagauuuuggcugcuauucugcacuugggaaauuuaaaauuuguaguagauggugacacgccucuuauugagaauggcaaaguaguaucuaucauagcagaauugcucucuacuaagacagauaugguugagaaagcccuucuuuaccggacuguggccacaggccgugacaucauugacaagcagcacacagaacaagaggccagcuacggcagagacgccuuugccaaggcaauauaugagcgccuuuuuuguuggaucguuacucgcaucaaugauauuauugaggucaagaacuaugacaccacaauccaugggaaaaacacuguuauuggugucuuggauaucuauggcuuugaaaucuucgacaacaacaguuuugaacaauucuguaucaauuacugcaaugagaaacugcagcagcuauuuauucagcugguucugaagcaagaacaagaggaauaccagcgggaagggauccccuggaaacauauugacuacuucaacaaucagaucauuguugaccucguggagcaacagcacaaagggaucauugcaauccuugaugaugcuugcaugaaugucggcaaagucaccgaugaaauguuucuugaagcacuuaacaguaaauugggcaaacacgcccauuuuuccagccgaaagcucugugccucagacaaaauucuggaguuugaucgagauuuucgaauucgacauuaugcaggcgauguagucuauucugucauugguuuuauugacaaaaauaaagauacuuuauuucaagauuucaagcgccuuauguauaacaguucaaauccugugcucaagaauauguggccugaaggcaaacugagcauuacagaggugaccaagcgaccucugacugcugcuaccuuguuuaagaauucuaugauugcucuaguagacaaccuugcaucaaaggaaccauauuacguucguugcaucaaacccaaugacaagaaaucuccacagauauuugaugaugaacgcugccggcaccaaguagaauaucuuggacuacuggaaaaugugagagugcgucgggcaggauuugccuuccgccagacauacgagaaguuucuucacagguauaagaugaucucugaauucaccuggcccaaccaugaccuuccuucagacaaagaggcugucaagaaacuaauugaacggugugguuuucaggaugauguagcuuaugggaagaccaaaauuuucauucgaacaccccgaacauuguuuaccuuggaagaacuccgugcccagaugcucauaaggauuguccucuuucuacaaaagguguggcggggcacccuggcccgcaugcgguacaaaagaaccaaggcagcucugacaauaaucagguacuaccggcgcuacaaagugaagucguacauccacgagguggccagacgcuuccauggcgucaagaccaugcgagacuacgggaagcacgugaaguggccaagcccuccuaaaguucuucgccguuuugaggaggcccugcagacgauuuucaauagauggagagcaucccagcucaucaagagcauuccggccucagaccugccccaggucagggcaaagguugcagccguggaaauguugaagggucaaagggcugaccucgggcuccagagggccugggagggcaacuaucuugcuucaaagccagauacaccucagaccucaggcacuuuugucccuguugcuaaugaauugaaacggaaggacaaauacaugaauguccucuuuuccugucacguccguaagguaaaucgauuuaguaagguggaagacagagcaauuuuugucacugaccgucaccuguauaaaauggaucccacuaaacaguacaaggugaugaagacuaucccucuauacaauuugacuggucugagugucuccaauggaaaggaccaacuuguaguguuccauacgaaagacaacaaagaccucauugucugccucuucagcaaacagccaacccaugagagucgaauuggagaacuuguuggagugcuggugaaucauuucaagagugagaagcgccaccuucaagugaacgucaccaacccaguacagugcagccugcacgggaagaagugcaccgucuccguggagacgcggcucaaccagccccagcccgacuucaccaagaaucgcucgggcuucauccucagcgugcccgggaacuga

SEQ ID NO: 860 - RNA, 3327 nt, Artificial Sequence
  CCDS32254.1
augggaagcaaaggugucuaccaguaccacuggcaaagccacaaugucaagcacagugguguggacgacauggugcuacuguccaagaucacagagaacuccaucguggagaaucugaagaagagauacauggaugacuacauuuuuacauauauaggaucuguauuaaucucagucaacccuuucaagcagaugccauauuuuggggaaaaggaaauugaaauguaccaaggagcggcacaguaugaaaacccaccacauaucuaugcccuugcagauaauauguacagaaacaugaucauugacagagagaaccagugcgucauuaucaguggugaaaguggugcuggaaaaacaguggcugccaaauauaucaugagcuacaucuccagagugucuggaggagggaccaaaguccagcacgugaaggacauuauccugcaguccaacccgcugcuggaggccuucgggaacgccaagaccguccggaacaacaacuccagccgauuuggaaaauacuuugaaauccaguucaguccagguggggaaccagaugguggaaagaucuccaacuuccuucuggaaaaaucuaggguggugaugaggaacccaggagagcggaguuuucacauauuuuaccagcucaucgagggcgccucugcagagcagaaacacagccuuggcaucaccagcauggacuauuauuacuaccugagccucucgggcucauacaagguugaugacauugacgacaggcgggaguuucaggaaacucugcacgccaugaaugugauugggaucuuugcagaagagcaaacgcugguguugcagauaguggcggguauucuccaccugggaaacaucagcuucaaagaaguuggcaacuacgcggcuguggagagugaagaguuuuuagcuuuuccugcauaucugcuagggauaaaccaggaccgguugaaagaaaagcuaacaagccggcagauggauagcaaguggggaggcaaauccgaauccauccacgugacccucaacguagagcaggccuguuacacccgggaugcgcucgccaaggcccugcacgcccgggucuuugauuucuugguagauuccaucaauaaagccauggagaaagaccaugaagaauacaacauuggcguccuagacaucuauggcuuugaaauauuccagaaaaauggcuuugaacaguuuuguaucaauuuuguuaaugaaaaacugcagcagauuuuuauugaacugacauuaaaggcagaacaggaagaauauguucaagagggaauaagauggacacccauugaguacuuuaauaauaaaaucguaugugaccucauagagaacaaagugaacccuccuggcaucaugagcauccuggaugacgugugcgccacgaugcaugcggugggugagggggcagaucagacgcugcuccagaaacuucagaugcagauugggagucaugagcacuucaacaguuggaaccaaggcuucaucauucaucauuaugcugggaagguauccuaugacauggauggcuuuugugaaaggaaccgggaugugcuuuuuauggaucucaucgagcuuaugcagagcagcgagcugccuuucauaaagucuuuauuuccggaaaaucugcaggcugacaagaaagggcgcccaacuacugccggaagcaaaauaaagaaacaagccaaugaccuugugagcacccugaugaaauguacgccccacuacauucgcugcaucaagccaaacgaaaccaagaagcccagagacugggaggaaagcaggguaaagcaucaagucgaauauuugggucugaaagagaacauucgagugagaagagcuggcuaugccuaucggcgcaucuuccaaaaauuccuacagagguaugccauucugaccaaagccaccuggccuucuuggcagggagaggagaagcaaggcguccugcaccugcugcagucggucaacauggacagcgaccaguuccagcuggggaggaguaaaguguucaucaaagcccccgagucucuauuucuuuuagaagagaugagagagagaaaguaugauggguaugcucgagugauacagaaaucauggaggaaauucguggcccggaagaaauacguucaaaugagagaagaagccucagaccucuuauugaacaagaaggagagaaggagaaacaguauuaacaggaacuuuauaggggauuauauugggauggaagagcacccagaacuccagcaguucgugggcaagagggagaagauugauuucgcagacacagucaccaaguaugacaggagguucaaggguguaaagcgagaccugcuccuuaccccaaagugcuuguacuuaaucggacgagaaaaagucaaacagggcccagacaagggccuggugaaagaaguccugaagcggaaaaucgagauagaacggaucuugucugugucccucaguacuaugcaggaugacauuuuuauucuccaugagcaagaguaugacaguuugcuugaaucugucuucaaaacugaauuccuaagccucuuagcaaagcguuacgaggagaagacccagaagcaacuaccucugaaauucagcaauacgcuugaacugaaguugaaaaaggaaaacuggggccccuggagugcagggggcucccggcaagugcaguuccaccaaggguuuggggaccuggcuguccucaagcccaguaacaaagugcugcaggucagcaucggaccuggacugcccaagaacucccguccuaccagaaggaacacuacccaaaauacagguuauuccagugggacucaaaaugccaacuacccagugagagcugccccuccucccccaggauaccaucagaacggagucaucagaaaccaguaugugccauauccccaugcuccuggaagccagagguccaaucagaaaagccuguacaccuccauggcccgcccgcccuugccucggcagcagucuaccaguucagaccgagugucacagacgccagagagccuggauuuccucaaggucccggaccagggagcugcaggggucaggagacaaacaaccagucggccucccccagcagggggcagacccaagccccagcccaagcccaagccucaggugccacagugcaaggcuuuguaugccuaugacgcucaggacacagacgaacucagcuuuaaugccaaugacauuauugauauuaucaaagaagauccuucuggcugguggacgggucgacuacgaggcaagcagggccuguuccccaacaacuaugugaccaagaucuga

SEQ ID NO: 861 - RNA, 3297 nt, Artificial Sequence
  AAH28071
augggcagcaaggagcgcuuccacuggcagagccacaacgugaagcagagcggcguggaugacauggugcuucuuccccagaucaccgaagacgccauugccgccaaccuccggaagcgcuucauggacgacuacaucuucaccuacaucggcucugugcucaucucuguaaaccccuucaagcagaugcccuacuucaccgaccgugagaucgaccucuaucagggcgcggcccaguaugagaaucccccgcacaucuacgcccucacggacaacauguaccggaacaugcuuaucgacugugagaaccagugugucaucauuaguggagagaguggagcugggaagacaguggcagccaaauauaucaugggcuacaucuccaaggugucuggcggaggcgagaagguccagcacgucaaagauaucauccugcaguccaacccgcugcucgaggccuucggcaacgccaagacugugcgcaacaacaauuccagccgcuuuggcaaguacuuugagauccaguucagccgagguggggagccagaugggggcaagaucuccaacuucuugcuggagaagucccgcguggucaugcaaaaugaaaaugagaggaacuuccacaucuacuaccagcugcuggaaggggccucccaggagcaaaggcagaaccugggccucaugacaccggacuacuauuacuaccucaaccaaucggacaccuaccagguggacggcacggacgacagaagcgacuuuggugagacucugagugcuaugcagguuauugggaucccgcccagcauccagcagcugguccugcagcucguggcggggaucuugcaccuggggaacaucaguuucugugaagacgggaauuacgcccgaguggagaguguggaccuccuggccuuucccgccuaccugcugggcauugacagcgggcgacugcaggagaagcugaccagccgcaagauggacagccgcuggggcgggcgcagcgaguccaucaaugugacccucaacguggagcaggcagccuacacccgugaugcccuggccaaggggcucuaugcccgccucuucgacuuccucguggaggccaucaaccgugcuaugcagaaaccccaggaagaguacagcaucggugugcuggacauuuacggcuucgagaucuuccagaaaaauggcuucgagcaguuuugcaucaacuucgucaaugagaagcugcagcaaaucuuuaucgaacuuacccugaaggccgagcaggaggaguaugugcaggaaggcauccgcuggacuccaauccaguacuucaacaacaaggucgucugugaccucaucgaaaacaagcugagccccccaggcaucaugagcgucuuggacgacgugugcgccaccaugcacgccacgggcgggggagcagaccagacacugcugcagaagcugcaggcggcuguggggacccacgagcauuucaacagcuggagcgccggcuucgucauccaccacuacgcuggcaaggucuccuacgacgucagcggcuucugcgagaggaaccgagacguucucuucuccgaccucauagagcugaugcagaccagugagcaggccuuccuccggaugcucuuccccgagaagcuggauggagacaagaaggggcgccccagcaccgccggcuccaagaucaagaaacaagccaacgaccugguggccacacugaugaggugcacaccccacuacauccgcugcaucaaacccaacgagaccaagaggccccgagacugggaggagaacagagucaagcaccagguggaauaccugggccugaaggagaacaucagggugcgcagagccggcuucgccuaccgccgccaguucgccaaauuccugcagagguaugccauucugacccccgagacguggccgcgguggcguggggacgaacgccagggcguccagcaccugcuucgggcggucaacauggagcccgaccaguaccagauggggagcaccaaggucuuugucaagaacccagagucgcuuuuccuccuggaggaggugcgagagcgaaaguucgauggcuuugcccgaaccauccagaaggccuggcggcgccacguggcuguccggaaguacgaggagaugcgggaggaagcuuccaacauccugcugaacaagaaggagcggaggcgcaacagcaucaaucggaacuucgucggggacuaccuggggcuggaggagcggcccgagcugcgucaguuccugggcaagagggagcggguggacuucgccgauucggucaccaaguacgaccgccgcuucaagcccaucaagcgggacuugauccugacgcccaaguguguguaugugauugggcgagagaaagugaagaagggaccugagaagggccaggugugugaagucuugaagaagaaaguggacauccaggcucugcggggagucucccucagcacgcgacaggacgacuucuucauccuccaagaggaugccgccgacagcuuccuggagagcgucuucaagaccgaguuugucagccuucugugcaagcgcuucgaggaggcgacgcggaggccccugccccucaccuucagcgacacacuacaguuucgggugaagaaggagggcuggggcgguggcggcacccgcagcgucaccuucucccgcggcuucggcgacuuggcagugcucaagguuggcggucggacccucacggucagcgugggcgaugggcugcccaagagcuccaagccuacgcggaagggaauggccaagggaaaaccucggaggucgucccaagccccuacccgggcggccccugcgccccccagaggcauggaucgcaauggggugccccccucugccagagggggcccccugccccuggagaucaugucuggagggggcacccacaggccuccccggggcccuccguccacaucccugggagccagcagacgaccccgggcacguccgcccucagagcacaacacagaauuccucaacgugccugaccagggcauggccggcaugcagaggaagcgcagcguggggcaacggccagugccuggugugggccgacccaagccccagccucggacacauggucccaggugccgggcccuauaccaguacgugggccaagauguggacgagcugagcuucaacgugaacgaggucauugagauccucauggaagaucccucgggcugguggaagggccggcuucacggccaggagggccuuuucccaggaaacuacguggagaagaucuga

SEQ ID NO: 862 - RNA, 3057 nt, Artificial Sequence
  CCDS34629.1
auggaggacgaggaaggcccugaguauggcaaaccugacuuugugcuuuuggaccaagugaccauggaggacuucaugaggaaccugcagcucagguucgagaagggccgcaucuacaccuacaucggugaggugcugguguccgugaaccccuaccaggagcugccccuguaugggccugaggccaucgccagguaccagggccgugagcucuaugagcggccaccccaucucuaugcuguggccaacgccgccuacaaggcaaugaagcaccgguccagggacaccugcaucgucaucucaggggagaguggggcagggaagacagaagccaguaagcacaucaugcaguacaucgcugcugucaccaauccaagccagagggcugagguggagagggucaaggacgugcugcucaaguccaccugugugcuggaggccuuuggcaaugcccgcaccaaccgcaaucacaacuccagccgcuuuggcaaguacauggacaucaacuuugacuucaagggggacccgaucggaggacacauccacagcuaccuacuggagaagucucggguccucaagcagcacgugggugaaagaaacuuccacgccuucuaccaauugcugagaggcagugaggacaagcagcugcaugaacugcacuuggagagaaacccugcuguauacaauuucacacaccagggagcaggacucaacaugacugugcacagugccuuggacagugaugagcagagccaccaggcagugaccgaggccaugagggucaucggcuucaguccugaagagguggagucugugcaucgcauccuggcugccauauugcaccugggaaacaucgaguuuguggagacggaggagggugggcugcagaaggagggccuggcaguggccgaggaggcacugguggaccauguggcugagcugacggccacaccccgggaccucgugcuccgcucccugcuggcucgcacaguugccucgggaggcagggaacucauagagaagggccacacugcagcugaggccagcuaugcccgggaugccugugccaaggcaguguaccagcggcuguuugaguggguggugaacaggaucaacagugucauggaaccccggggccgggauccucggcgugauggcaaggacacagucauuggcgugcuggacaucuauggcuucgagguguuucccgucaacaguuucgagcaguucugcaucaacuacugcaacgagaagcugcagcagcuauucauccagcucauccugaagcaggaacaggaagaguacgagcgcgagggcaucaccuggcagagcguugaguauuucaacaacgccaccauuguggaucugguggagcggccccaccguggcauccuggccgugcuggacgaggccugcagcucugcuggcaccaucacugaccgaaucuuccugcagacccuggacaugcaccaccgccaucaccuacacuacaccagccgccagcucugccccacagacaagaccauggaguuuggccgagacuuccggaucaagcacuaugcaggggacgucacguacuccguggaaggcuucaucgacaagaacagagauuuccucuuccaggacuucaagcggcugcuguacaacagcacggaccccacucuacgggccauguggccggacgggcagcaggacaucacagaggugaccaagcgcccccugacggcuggcacacucuucaagaacuccaugguggcccugguggagaaccuugccuccaaggagcccuucuacguccgcugcaucaagcccaaugaggacaagguagcugggaagcuggaugagaaccacugucgccaccaggucgcauaccuggggcugcuggagaaugugaggguccgcagggcuggcuucgcuucccgccagcccuacucucgauuccugcucagguacaagaugaccugugaauacacauggcccaaccaccugcugggcuccgacaaggcagccgugagcgcucuccuggagcagcacgggcugcagggggacguggccuuuggccacagcaagcuguucauccgcucaccccggacacuggucacacuggagcagagccgagcccgccucauccccaucauugugcugcuauugcagaaggcauggcggggcaccuuggcgagguggcgcugccggaggcugagggcuaucuacaccaucaugcgcugguuccggagacacaaggugcgggcucaccuggcugagcugcagcggcgauuccaggcugcaaggcagccgccacucuacgggcgugaccuuguguggccgcugcccccugcugugcugcagcccuuccaggacaccugccacgcacucuucugcagguggcgggcccggcagcuggugaagaacauccccccuucagacaugccccagaucaaggccaagguggccgccaugggggcccugcaagggcuucgucaggacuggggcugccgacgggccugggcccgagacuaccuguccucugccacugacaaucccacagcaucaagccuguuugcucagcgacuaaagacacuucaggacaaagauggcuucggggcugugcucuuuucaagccauguccgcaaggugaaccgcuuccacaagauccggaaccgggcccuccugcucacagaccagcaccucuacaagcuggacccugaccggcaguaccgggugaugcgggccgugccccuugaggcggugacggggcugagcgugaccagcggaggagaccagcugguggugcugcacgcccgcggccaggacgaccucguggugugccugcaccgcucccggccgccauuggacaaccgcguuggggagcuggugggcgugcuggccgcacacugccagggggagggccgcacccuggagguucgcgucuccgacugcaucccacuaagccaucgcgggguccggcgccucaucuccguggagcccaggccggagcagccagagcccgauuuccgcugcgcucgcggcuccuucacccugcucuggcccagccgcuga

SEQ ID NO: 863 - RNA, 3069 nt, Artificial Sequence
  CCDS53826.1
auggaaggggcgcugacugcccgggacaaggucgggguucaggauuuugugcuauuggacgcguacaccagcgaaucugccuuugucgacaaccuccgcaagcguuucagcgagaaccucauauacacauauauuggcacccuccuugugucugugaauccauaccaggagcucggaaucuacacugugagccagauggaacuuuaucaaggggucaauuucuuugaacugccaccacaugucuacgcuauagccgacaacgcuuaccgaaugaugugugcugaacuaaauaaccauuucauccucauuucuggagagaguggggcagggaaaacagaggccuccaagaaaauucucgaguauuuugcagugaccugcccaaugacccagucacuacaaauagcccgugacagacugcuguucuccaacccagugcuggaggcuuuuggaaaugccagaacgcuccggaaugacaacuccagcagauuugggaaauacauggauauacaauuugauuuucagggcauucccguaggugggcauaucaucaguuacuugauagagaagucccgaguugucuaccaaaacgaaggcgagcggaauuuccacaucuucuaccagcugcuggcagguggcgaagaggagcgccugucuuaccugggacucgagcgagacccccagcuguauaaauaccucucacagggucauugugccaaagagucauccauuagugacaagaaugacuggaaaacuguuuccaacgccuuuucugucauugauuuuacugaagcugaccucgagaaucucuuuggaauuauugccagugucuuacaccuggggaacauugguuuugaagaagacgaccaaggcugugccacuaucccagacacccaugagaucaaguggauagccaagcuccuggggguccacccaucaguccuucuggaagcucucacccacagaaaaauugaagccaaaacugaggaggugaucugcccguugacacuagaacucucugucuacgcuagagaugcaauggcaaaggcuguuuauggacgaacguuuacuuggcuggucaacaaaaucaauuccuccuuaguuaacaaggauuucaccaggaaaacuguaauuggauuacuggacaucuauggguuugaagucuuugacaagaaugguuuugaacaguucuguauaaauuacugcaaugagaaacuccagcaacuguuaauugagaggacucuaaaagcagaacaggcagaauaugaaauggaaggcauagagugggagccaauuaaauauuucaacaacaagaucaucugugauuugguagaagagagacauaaaggaaucauaucuauucuggaugaagaaugcauucggccugguccugcuacagacuugaguuuccuggagaaauuggaagagaaagugggcaaacaugcacacuucgaaacccguaagcuggcugguccaaagggccgaaagaggauuggcuggauggaguuccgacuccuccacuaugcaggagaggucacauacugcaccaagggauucuuggaaaaaaacaaugaucuucuuuacagacaucugaaagaagugcugugcaaguccaagaacauuauccugagggaaugcuuccugcuggccgaguuagaaaaccggaggaggcccccaacaguggggacucaguuuaaaaacagucugagcagccuucuagaaacccucaucucuaaggagcccuccuacauccguugcaucaagcccaacgacaggaaagaacccagcaaauuugaugacuuccucauaaggcaucagaucaaauaccuggggcugauggagcaccugcgggugagacgggcugguuuugcauaccgaaggaaauacgagcauuucuugcaaagguacaaguccuuaugcccagacaccuggccgcacuggcacgggccuccagcagagggcguggaacggcugaucaaguacaucggcuacaaacccgaggaauacaaguuaggcaaaaccaaaauauucauucguuuccccagaacucuguuugcuaccgaagaugccuuugaauuuaguaaacaucaacuaguugcaagaauccaagccacuuacaaacgcugccuaggaaggagagaauacgugaaaaaaagacaagcagccaucaaacuggaagcccacuggcguggggcccuggcucggaaggcaauccaaaggagaaagugggccgugcggauuaucagaaaguucauuaaaggauucaucagucgcaacaaaccccucuguccugacaacgaggaauuuaucguguuugugcggaagaauuacaucuugaaucuccgguaucaccuuccaaagacuguccuggacaagagcuggcugaggccuccuggcaucuuggaaaaugcaucagaucugcucaggaaaaugugcgugaggaaccuggugcagaaguacugccgcgggaucacagcugagcggaaagcaaugaugcagcaaaagguaguuacaagugaaaucuucaggggaaggaaagacggcuacacagaaaguuuaaaucaacccuuugucaacagucggauagaugaaggagacauuaauccgaaagugcuucagcuaauuagccaugagaaaauccaguauggugucccggucauuaaauaugacagaaaaggcuucaaagcacggcagcggcaacucauucuuacucagaaagcagcuuacgugguggaacuugccaaaaucaagcagaaaauagaguacucagcucucaaaggugucuccacuagcaaucugagugauggaaucuuagucauucauguuucaccagaggacagcaagcaaaagggggaugccguuuugcaguguggacacguguuugaagcaguuacuaaacucgucaugcugguuaagaaggagaacauugucaauguuguucaaggaaguuuacaguuuuuuauuaguccgggaaaagaaggcacaauaguuuucgacacuggacuggaagaacaagucuauaaaaauaaaaauggacaauuaacaguggugucaguccggaggaaguccuga

SEQ ID NO: 864 - RNA, 2379 nt, Artificial Sequence
  BAC84969
augaucaccgucaaccccgaugggaagauaauggucagaagaugccuggucacccugagacccuuucggcuuuuuguccugggcaucggcuucuucacucucugcuuccugaugacgucucugggaggccaguucucggcccggcgccugggggacucgccauucaccauccgcacagaagugauggggggccccgagucccgcggcguccugcgcaagaugagcgaccugcuggagcugauggugaagcgcauggacgcacuggccaggcuggagaacagcagugagcugcaccgggccggcggcgaccugcacuuucccgcagacaggaugcccccuggggccggccucauggagcggauccaggcuauugcccagaacgucuccgacaucgcugugaagguggaccagauccugcgccacagucugcuccugcacagcaaggugucagaaggccggcgggaccagugugaggcacccagugaccccaaguucccugacugcucagggaagguggaguggaugcgugcccgcuggaccucugaccccugcuacgccuucuuugggguggacggcaccgagugcuccuuccucaucuaccucagugaggucgagugguucugccccccgcugcccuggaggaaccagacggcugcccagagggcacccaagccccuccccaaaguccaggcaguuuuccgaagcaaccugucccaccuucuggaccugaugggcagcgggaaggagucccugaucuucaugaagaagcggaccaagaggcucacagcccagugggcgcuggcugcccagcgccuggcacagaagcugggggccacccagagggaccagaagcagauccugguccacaucggcuuccugacggaggaguccggggacguguucagcccucggguccugaagggcgggccccuaggggagauggugcagugggcggacauucugacugcacucuauguccugggccauggccugcgggucacagucucccugaaggagcugcagaguaacuuagggguaccgccaggccggggaagcugcccgcucaccaugccccugcccuucgaccucaucuacaccgacuaccacggccugcagcagaugaagcggcacaugggacucuccuucaagaaguaccggugccgaaucagggucaucgacaccuucgggacggaaccugcguacaaccacgaggaguacgccacgcugcacggcuaccggaccaacuggggcuacuggaaccucaaccccaagcaguucaugaccauguuuccucauacccccgacaacuccuucaugggcuucguguccgaggagcucaacgagacggagaagcggcucaucaaaggcggcaaggccagcaacauggccgugguguacggcaaggaggcgagcaucuggaagcuccaggggaaggagaaguuccugggcauccugaacaaauacauggagauccauggcaccguguacuacgagagccagcggccccccgaggugccagccuuugugaagaaccacggccucuuaccgcagccugaguuucagcagcugcugcgcaaggccaaacucuucaucggguuuggcuuccccuacgagggccccgccccccuggaggccaucgccaaugguugcaucuuccugcagucccgcuucagcccgccccacagcucccucaaccacgaguucuuccgaggcaagcccaccuccagagagguguucucccagcaucccuacgcggagaacuucaucggcaagccccacguguggacagucgacuacaacaacucagaggaguuugaagcagccaucaaggccauuaugagaacucagguagaccccuaccuacccuaugaguacaccugcgaggggaugcuggagcggauccacgccuacauccagcaccaggacuucugcagagcuccagacccugcccuaccagaggcccacgccccgcagagccccuuuguccuggcccccaaugccacccaccucgagugggcucggaacaccagcuuggcuccuggggccuggccccccgcgcacgcccugcgggccuggcuggccgugccugggagggccugcaccgacaccugccuggaccacgggcuaaucugugagcccuccuucuuccccuuccugaacagccaggacgccuuccucaagcugcaggugcccugugacagcaccgagucggagaugaaccaccuguacccggcguucgcccagccuggccaggagugcuaccugcagaaggagccucugcucuucagcugcgccggcuccaacaccaaguaccgccggcucugccccugccgcgacuuccgcaagggccagguggccuugugccagggcugucuguga

SEQ ID NO: 865 - RNA, 36 nt, Artificial Sequence
  AF164963.1
augacucaaggacagcacuuccugcagaaagucuag

SEQ ID NO: 866 - RNA, 2211 nt, Artificial Sequence
  AAI11702
augaaagagaugucugcaaacaccgugcuggacagccagcgucaacaaaagcauuauggaauuaccuccccaauuaguuuggcaucuccuaaagaaauugaucauauuuacacacagaaauuaauugacgccaugaaaccauuuggaguguuugaagaugaggaagaauugaaccacaggcuggugguucuugguaaauugaacaauuuaguaaaagaauggauuucugaugucagcgagaguaagaaccucccaccuucuguuguggcuacuguuggugguaaaauuuucacauuuggauccuauaggcuuggaguacacaccaaaggagcugacauugaugcacuuuguguagcuccaagacauguggaaagaucugauuuuuuucagucuuuuuuugaaaaauugaaacaucaagauggcauuagaaacuuaagagcuguagaagaugccuuuguaccuguuauaaaauuugaauuugaugguauugaaauugaucuagucuuugcaagacuggcaauacaaaccauaucagauaauuuagaucuaagagacgacucucgccugagaagccuugauauaagguguauucgcagcuuaaaugguuguagaguuacugaugaaauuuugcauuuagugccaaauaaagaaacuuuuagacucacccuaagagcugucaaauuaugggcaaaacgacgugguauuuauuccaacaugcuaggauuccuugguggugucuccugggcaaugcuaguugcaagaacuugccaauuguauccaaaugcagcagcaucuacuuuaguucauaaguucuuuuuaguuuuuuccaagugggaauggccaaauccugugcugcugaagcaaccagaagaaagcaauuugaauuugccugucugggauccucggguaaauccaucagauagguaucaucucaugcccauaaucaccccugccuacccacaacagaauucuacguauaauguguccacaucaacucgaacaguaaugguagaagaauuuaaacaaggucuugcagucacagaugaaauucuucaaggaaagucagauugguccaaacuacuugagccaccgaauuucuuucaaaaguauagacauuauauaguauugacugccagcgcaucaacagaagaaaaccaucuagaguggguuggauuaguagaaucuaaaauccguguacuuguuggaaacuuggaacggaaugaauuuauuacucuugcccaugugaauccccagucauucccagggaauaaggaacaucauaaagacaacaauuacguaucaaugugguuccuugggauaauuuuucggagaguagaaaaugcagaaagugucaacauagacuugacauaugauauacagucauuuacugauacaguguacagacaggcaaacaauauaaauaugcuaaaggagggaaugaaaauugaagcaacucauguaaagaaaaaacaacuucaccacuaccuuccugcagaaauucuucaaaagaagaaaaagcaaagucucucugaugucaaucgaagcucgggcggacuucaauccaaaagauugucucuggauagcaguugucuggauagcuccagagacacugauaauggaacaccuuuuaauucuccagcguccaagucugauagcccuucuguaggagaaacagaaaggaauagugcugagccugcugcuguaauuguggagaagccacugaguguaccaccagcccaaggacuuuccauuccagugauuggcgcaaaaguugacucuacaguaaaaacuguaucaccccccacuguguguaccauuccuaccguaguaggacgaaaugucauuccuagaaucacaacaccucacaacccugcccagggacaaccgcaucugaauggaaugucaaauauaacuaagacuguuacaccuaagagaucccauuccccauccauagaugggacuccuaagagguugaaagacguagaaaaguuuauucgacuugaaucaacauuuaaggacccccgcacugcugaagaaagaaaaagaaaaucaguggaugccauuggaggagaaucuaugccuauuccaacuauugauacaucacgcaaaaagagacuacccaguaaagaacuaccagauucaucaucuccaguuccagcaaacaacauccgugucaucaaaaauuccauucgacugacccuuaaucgguaa

SEQ ID NO: 867 - RNA, 1377 nt, Artificial Sequence
  AAG28389
auguccacagaaggaggauuuggugguacuagcagcagugaugcccagcaaagucuacagucguucuggccucgggucauggaagaaauccggaauuuaacagugaaagacuuccgagugcaggaacucccacuggcucguauuaagaagauuaugaaacuggaugaagaugugaagaugaucagugcagaagcgccuguacucuuugccaaggcagcccagauuuuuaucacagaguugacucuucgagccuggauucacacagaagauaacaagcgccggacucuacagagaaaugauaucgccauggcaauuacaaaauuugaucaguuugauuuucucaucgauauuguuccaagagaugaacugaaaccuccaaagcgucaggaggaggugcgccagucuguaacuccugccgagccaguccaguacuauuucacgcuggcucagcaacccaccgcuguccaaguccagggccagcagcaaggccagcagaccaccagcuccacgaccaccauccagccugggcagaucaucaucgcacagccucagcagggccagaccacaccugugacaaugcagguuggagaaggucagcaggugcagauuguccaggcucagccacagggucaagcccaacaggcccagaguggcacuggacagaccaugcaggugaugcagcagaucaucacuaacacaggagagauccagcagaucccggugcagcugaaugccggccagcugcaguauauccgcuuagcccagccuguaucaggcacucaaguugugcagggacagauccagacacuugccaccaaugcucaacaggggcaaagaaaugcaagucaggggaagccucgaaggugccugaaagaaaccuuacagauuacacagacagagguccagcaaggacagcagcaguucagccaguucacagauggacagaggaacagcgugcagcaagcucgagucucugagcuaacgggagaggcagagcccagagaagugaaagccacaggaaauucaacucccugcaccucuucccugcccaccacacacccccccucacaccgggcuggugccuccugugucugcugcucccaaccccagcagagcuccacuuccccuccuccuucugacgccuugcaguggguggugguugagguaucugggacccccaaccagcucgagacccauagggagcugcaugccccucucccagggaugaccucacucucuccucuccaccccucgcagcagcucuaccagauccagcaagucaccaugccugcgggccaggaccucgcccagcccauguucauccagucagccaaccagcccuccgacgggcaggccccccaggugaccggcgacuga

SEQ ID NO: 868 - RNA, 2802 nt, Artificial Sequence
  CCDS33423.1
augcgaauggcugccacugccugggcggggcuccaagggccaccccuccccacccucugucccgcagugaggacgggacucuacugccgagaccaggcucacgcugagaggugggccaugaccuccgagaccucuuccggaagccacugugccaggagcaggaugcugcggcgacgggcccaggaagaggacagcaccguccugaucgaugugagccccccugaggcagagaagaggggcucuuacgggagcacagcccacgccucggagccagguggacagcaagcggccgccugcagagcugggaguccugccaagccccggaucgcagacuucguccucguuugggaggaggaccugaagcuagacaggcagcaggacagugccgcccgggacagaacagacaugcacaggaccuggcgggagacuuuucuggauaaucuucgugcggcugggcuguguguagaccagcaggacguccaggacgggaacaccacagugcacuacgcccuccucagcgccuccugggcugugcucugcuacuacgccgaagaccugcgccugaagcugcccuugcaggaguuacccaaccaggccuccaacuggucggccggccugcuggcauggcugggcauccccaacguccugcuggagguugugccagacguaccccccgaguacuacuccugccgguucagagugaacaagcugccacgcuuccucgggagugacaaccaggacaccuucuucacaagcaccaagaggcaccaaauucuguuugagauccuggccaagaccccguauggccacgagaagaaaaaccugcuugggauccaccagcugcuggcagaggguguccucagugccgccuucccccugcaugacggccccuucaagacgcccccagagggcccgcaggcuccacgccucaaccagcgccaaguccuuuuccagcacugggcgcgcuggggcaaguggaacaaguaccagccccuggaccacgugcgcagguacuucggggagaagguggcccucuacuucgccuggcucggguuuuacacaggcuggcuccugccagcggcaguggugggcacacugguguuccuggugggcugcuuccugguguucucagacauacccacgcaggaacuguguggcagcaaggacagcuucgagaugugcccacuuugccucgacugcccuuucuggcugcucuccagcgccugugcccuggcccaggccggccggcuguucgaccacggcggcaccguguucuucagcuuguucauggcacugugggccgugcugcugcuggaguacuggaagcggaagagcgccacgcuggccuaccgcugggacugcucugacuacgaggacacugaggagaggccucggccccaguuugccgccucagcccccaugacagccccgaaccccaucacgggugaggacgagcccuacuucccugagaggagccgcgcgcgccgcaugcuggccggcucuguggugaucguggugaugguggccgugguggucaugugccucgugucuaucauccuguaccgugccaucauggccaucgugguguccaggucgggcaacacccuucucgcagccugggccucucgcaucgccagccucacggggucuguagugaaccucgucuucauccucauccucuccaagaucuauguaucccuggcccacguccugacacgaugggaaaugcaccgcacccagaccaaguucgaggacgccuucacccucaagguguucaucuuccaguucgucaacuucuacuccucacccgucuacauugccuucuucaagggcagguuugugggauacccaggcaacuaccacaccuuguuuggaguccgcaaugaggagugcgcggcuggaggcugccugaucgagcuggcacaggagcuccuggucaucauggugggcaagcaggucaucaacaacaugcaggagguccucaucccgaagcuaaagggcugguggcagaaguuccggcuucgcuccaagaagaggaaggcgggagcuucugcaggggcuagccaggggcccugggaggacgacuaugagcuugugcccugugagggucuguuugacgaguaccuggaaauggugcugcaguucggcuucgucaccaucuucguggccgccuguccgcucgcgccgcucuucgcccugcucaacaacuggguggagauccgcuuggacgcgcgcaaguucgucugcgaguaccggcgcccgguggccgagcgcgcccaggacaucggcaucugguuccacauccuggcgggccucacgcaccuggcggucaucagcaacgccuuccuccuggccuucucguccgacuuccugccgcgcgccuacuaccgguggacccgcgcccacgaccugcgcggcuuccucaacuucacgcuggcgcgagccccguccuccuucgccgccgcgcacaaccgcacgugcagguaucgggcuuuccgggaugacgauggacauuauucccagaccuacuggaaucuucuugccauccgccuggccuucgucauuguguuugagcaugugguuuucuccguuggccgccuccuggaccuccuggugccugacaucccagagucuguggagaucaaagugaagcgggaguacuaccuggcuaagcaggcacuggcugagaaugagguucuuuuuggaacgaacggaacaaaggaugagcagcccgagggcucagagcucagcucccacuggacacccuucacgguucccaaggccagccagcugcagcaguga

SEQ ID NO: 869 - RNA, 885 nt, Artificial Sequence
  AAA36380
auggaagauucgauggacauggacaugagcccccugaggccccagaacuaucuuuucgguugugaacuaaaggccgacaaagauuaucacuuuaagguggauaaugaugaaaaugagcaccaguuaucuuuaagaacggucaguuuaggggcuggugcaaaggaugaguugcacauuguugaagcagaggcaaugaauuacgaaggcaguccaauuaaaguaacacuggcaacuuugaaaaugucuguacagccaacgguuucccuugggggcuuugaaauaacaccaccaguggucuuaagguugaagugugguucagggccagugcauauuaguggacagcacuuaguagcuguggaggaagaugcagagucagaagaugaagaggaggaggaugugaaacucuuaaguauaucuggaaagcggucugccccuggaggugguagcaagguuccacagaaaaaaguaaaacuugcugcugaugaagaugaugacgaugaugaugaagaggaugaugaugaagaugaugaugaugaugauuuugaugaugaggaagcugaagaaaaagcgccagugaagaaaucuauacgagauacuccagccaaaaaugcacaaaagucaaaucagaauggaaaagacucaaaaccaucaucaacaccaagaucaaaaggacaagaauccuucaagaaacaggaaaaaacuccuaaaacaccaaaaggaccuaguucuguagaagacauuaaagcaaaaaugcaagcaaguauagaaaaaggugguucucuucccaaaguggaagccaaauucaucaauuaugugaagaauugcuuccggaugacugaccaagaggcuauucaagaucucuggcaguggaggaagucucuuuaa

SEQ ID NO: 870 - RNA, 3915 nt, Artificial Sequence
  CCDS47686.1
augcagcuuaaaauaaugccgaaaaagaagcgcuuaucugcgggcagagugccccugauucucuuccugugccagaugauuagugcacuggaaguaccucuugauccaaaacuucuugaagacuugguacagccuccaaccaucacccaacagucuccaaaagauuacauuauugacccucgggagaauauuguaauccagugugaagccaaagggaaaccgcccccaagcuuuuccuggacccguaaugggacucauuuugacaucgauaaagacccucuggucaccaugaagccuggcacaggaacgcucauaauuaacaucaugagcgaagggaaagcugagaccuaugaaggagucuaucaguguacagcaaggaacgaacgcggagcugcaguuucuaauaacauuguuguccgcccauccagaucaccauuguggaccaaagaaaaacuugaaccaaucacacuucaaaguggucagucuuuaguacuucccugcagacccccaauuggauuaccaccaccuauaauauuuuggauggauaauuccuuucaaagacuuccacaaagugagagaguuucucaagguuugaauggggaccuuuauuuuuccaauguccucccagaggacacccgcgaagacuauaucuguuaugcuagauuuaaucauacucaaaccauacagcagaagcaaccuauuucugugaaggugauuucaguggaugaauugaaugacacuauagcugcuaauuugagugacacugaguuuuauggugcuaaaucaaguagagagaggccaccaacauuuuuaacuccagaaggcaaugcaaguaacaaagaggaauuaagaggaaaugugcuuucacuggagugcauugcagaaggacugccuaccccaauuauuuacugggcaaaggaagauggaaugcuacccaaaaacaggacaguuuauaagaacuuugagaaaaccuugcagaucauucauguuucagaagcagacucuggaaauuaccaauguauagcaaaaaacgcauuaggagccauccaccauaccauuucuguuagaguuaaagcggcuccauacuggaucacagccccucaaaaucuugugcuguccccaggagaggaugggaccuugaucugcagagcuaauggcaaccccaaacccagaauuagcugguuaacaaauggagucccaauagaaauugccccugaugaccccagcagaaaaauagauggcgauaccauuauuuuuucaaauguucaagaaagaucaagugcagucuaucagugcaaugccucuaaugaauauggauauuuacuggcaaacgcauuuguaaaugugcuggcugagccaccacgaauccucacaccugcaaacacacucuaccaggucauugcaaacaggccugcuuuacuagacugugccuucuuugggucuccucucccaaccaucgagugguuuaaaggagcuaaaggaagugcucuucaugaagauauuuauguuuuacaugaaaauggaacuuuggaaauuccuguggcccaaaaggacaguacaggaacuuauacguguguugcaaggaauaaauuagggauggcgaagaaugaaguucacuuagaaaucaaagauccuacauggaucguuaaacagcccgaauaugcaguugugcaaagagggagcaugguguccuuugaaugcaaagugaaacaugaucacaccuuaucccucacuguccuguggcugaaggacaacagggaacugcccagugaugaaagguucacuguugacaaggaucaucuagugguagcugaugucagugacgaugacagcgggaccuacacguguguggccaacaccacucuggacagcgucuccgccagcgcugugcuuagcguuguugcuccuacuccaacuccagcucccguuuacgaugucccaaauccucccuuugacuuagaacugacagaucaacuugacaaaaguguucagcugucauggaccccaggcgaugacaacaauagccccauuacaaaauucaucaucgaauaugaagaugcaaugcacaagccagggcuguggcaccaccaaacugaaguuucuggaacacagaccacagcccagcugaagcugucuccuuacgugaacuacuccuuccgcgugauggcagugaacagcauugggaagagcuugcccagcgaggcgucugagcaguauuugacgaaagccucagaaccagauaaaaaccccacagcuguggaaggacugggaucagagccugauaauuuggugauuacguggaagcccuugaaugguuucgaaucuaaugggccaggccuucaguacaaaguuagcuggcgccagaaagauggugaugaugaauggacaucugugguuguggcaaauguauccaaauauauugucucaggcacgccaaccuuuguuccauaccugaucaaaguucaggcccugaaugacaugggguuugcccccgagccagcuguagucaugggacauucuggagaagaccucccaaugguggcuccugggaacgugcgugugaauguggugaacaguaccuuagccgaggugcacugggacccaguaccucugaaaagcauccgaggacaccuacaaggcuaucggauuuacuauuggaagacccagaguucaucuaaaagaaacagacgucacauugagaaaaagauccucaccuuccaaggcagcaagacucauggcauguugccggggcuagagcccuuuagccacuacacacugaauguccgaguggucaaugggaaaggggagggcccagccagcccugacagagucuuuaauacuccagaaggaguccccagugcucccucgucuuugaagauugugaauccaacacuggacucucucacuuuggaaugggauccaccgagccacccgaauggcauuuugacagaguacaccuuaaaguaucagccaauuaacagcacacaugaauuaggcccucugguagauuugaaaauuccugccaacaagacacgguggacuuuaaaaaauuuaaauuucagcacucgauauaaguuuuauuucuaugcacaaacaucagcaggaucaggaagucaaauuacagaggaagcaguaacaacuguggaugaagcugguauucuuccaccugauguaggugcaggcaaaguucaagcaguaaaucccaggaucagcaaucuuacugcugcagcugcugagaccuaugccaauaucaguugggaauaugagggaccagagcaugugaacuuuuauguugaauaugguguagcaggcagcaaagaagaauggagaaaagaaauuguaaaugguucucggagcuucuuuggguuaaagggucuaaugccaggaacagcauacaaaguucgaguuggugcugugggggacucugguuuugugaguucagaggauguguuugagacaggcccagcgauggcaagccggcagguggauauugcaacucagggcugguucauuggucugaugugugcuguugcucuccuuaucuuaauuuugcugauuguuugcuucaucagaagaaacaagggugguaaauauccaguuaaagaaaaggaagaugcccaugcugacccugaaauccagccuaugaaggaagaugaugggacauuuggagaauacagugaugcagaagaccacaagccuuugaaaaaaggaagucgaacuccuucagacaggacugugaaaaaagaagauagugacgacagccuaguugacuauggagaagggguuaauggccaguucaaugaggauggcuccuuuauuggacaauacagugguaagaaagagaaagagccggcugaaggaaacgaaagcucagaggcaccuucuccugucaacgccaugaauuccuuuguuuaa

SEQ ID NO: 871 - RNA, 1305 nt, Artificial Sequence
  AAB51320
auguccauagagaagaucugggcccgggagauccuggacucccgcgggaaccccacaguggagguggaucucuauacugccaaaggucuuuuccgggcugcagugcccaguggagccucuacgggcaucuaugaggcccuggagcugagggauggagacaaacagcguuacuuaggcaaagguguccugaaggcaguggaccacaucaacuccaccaucgcgccagcccucaucagcucaggucucucugugguggagcaagagaaacuggacaaccugaugcuggaguuggaugggacugagaacaaauccaaguuuggggccaaugccauccugggugugucucuggccguguguaaggcaggggcagcugagcgggaacugccccuguaucgccacauugcucagcuggccgggaacucagaccucauccugccugugccggccuucaacgugaucaaugguggcucucaugcuggcaacaagcuggccaugcaggaguucaugauccucccagugggagcugagagcuuucgggaugccaugcgacuaggugcagaggucuaccauacacucaagggagucaucaaggacaaauacggcaaggaugccaccaaugugggggaugaagguggcuuugcccccaauauccuggagaacagugaagccuuggagcuggugaaggaagccaucgacaaggcuggcuacacggaaaagaucguuauuggcauggauguugcugccucagaguuuuaucgugauggcaaauaugacuuggacuucaagucucccacugauccuucccgauacaucacuggggaccagcugggggcacucuaccaggacuuugucagggacuauccuguggucuccauugaggacccauuugaccaggaugauugggcugccugguccaaguucacagccaauguagggauccagauugugggugaugaccugacagugaccaacccaaaacguauugagcgggcaguggaagaaaaggccugcaacugucugcugcucaaggucaaccagaucggcucggucacugaagccauccaagcgugcaagcuggcccaggagaauggcuggggggucauggugagucaucgcucaggagagacugaggacacauucauugcugaccuggugguggggcugugcacaggccagaucaagacuggugccccgugccguucugaacgucuggcuaaauacaaccagcucaugagaauugaggaagagcugggggaugaagcucgcuuugccggacauaacuuccguaaucccagugugcuguga

SEQ ID NO: 872 - RNA, 1395 nt, Artificial Sequence
  AAH08489
auggaaacuuugucuuuccccagauauaauguagcugagauugugauucauauucgcaauaagaucuuaacaggagcugaugguaaaaaccucaccaagaaugaucuuuauccaaauccaaagccugaagucuugcacaugaucuacaugagagccuuacaaauaguauauggaauucgacuggaacauuuuuacaugaugccagugaacucugaagucauguauccacauuuaauggaaggcuucuuaccauucagcaauuuaguuacucaucuggacucauuuuugccuaucugccgggugaaugacuuugagacugcugauauucuauguccaaaagcaaaacggacaagucgguuuuuaaguggcauuaucaacuuuauucacuucagagaagcaugccgugaaacguauauggaauuucuuuggcaauauaaauccucugcggacaaaaugcaacaguuaaacgccgcacaccaggaggcauuaaugaaacuggagagacuugauucuguuccaguugaagagcaagaagaguucaagcagcuuucagauggaauucaggagcuacaacaaucacuaaaucaggauuuucaucaaaaaacgauagugcugcaagagggaaauucccaaaagaagucaaauauuucagagaaaaccaagcguuugaaugaacuaaaauugucggugguuucuuugaaagaaauacaagagaguuugaaaacaaaaauuguggauucuccagagaaguuaaagaauuauaaagaaaaaaugaaagauacgguccagaagcuuaaaaaugccagacaagaagugguggagaaauaugaaaucuauggagacucaguugacugccugccuucaugucaguuggaagugcaguuauaucaaaagaaaauacaggaccuuucagauaauagggaaaaauuagccaguaucuuaaaggagagccugaacuuggaggaccaaauugagagugaugagucagaacugaagaaauugaagacugaagaaaauucguucaaaagacugaugauugugaagaaggaaaaacuugccacagcacaauucaaaauaaauaagaagcaugaagauguuaagcaauacaaacgcacaguaauugaggauugcaauaaaguucaagaaaaaagaggugcugucuaugaacgaguaaccacaauuaaucaagaaauccaaaaaauuaaacuuggaauucaacaacuaaaagaugcugcugaaagggagaaacugaagucccaggaaauauuucuaaacuugaaaacugcuuuggagaaauaccacgacgguauugaaaaggcagcagaggacuccuaugcuaagauagaugagaagacagcugaacugaagaggaagauguucaaaaugucaaccuga

SEQ ID NO: 873 - RNA, 543 nt, Artificial Sequence
  AAB49693
augcaggccgaaggccggggcacaggggguucgacgggcgaugcugauggcccaggaggcccuggcauuccugauggcccagggggcaaugcuggcggcccaggagaggcgggugccacgggcggcagagguccccggggcgcaggggcagcaagggccucggggccgggaggaggcgccccgcgggguccgcauggcggcgcggcuucagggcugaauggaugcugcagaugcggggccagggggccggagagccgccugcuugaguucuaccucgccaugccuuucgcgacacccauggaagcagagcuggcccgcaggagccuggcccaggaugccccaccgcuucccgugccaggggugcuucugaaggaguucacuguguccggcaacauacugacuauccgacugacugcugcagaccaccgccaacugcagcucuccaucagcuccugucuccagcagcuuucccuguugauguggaucacgcagugcuuucugcccguguuuuuggcucagccucccucagggcagaggcgcuaa

SEQ ID NO: 874 - RNA, 1215 nt, Artificial Sequence
  CCDS14134.2
auggccuccccgcgccuagggaccuucugcugccccacgcgggacgcagccacgcagcucgugcugagcuuccagccgcgggccuuccacgcgcucugccugggcagcggcgggcuccgcuuggcgcugggccuucugcagcugcugcccggccgccggcccgcgggccccgggucccccgcgacguccccgccggccucgguccgcauccugcgcgcugccgcugccugcgaccuucucggcugccuggguauggugauccgguccaccgugugguuaggauucccaaauuuuguugacagcgucucggauaugaaccacacggaaauuuggccugcugcuuucugcguggggagugcgauguggauccagcuguuguacagugccugcuucugguggcuguuuugcuaugcaguggaugcuuaucuggugauccggagaucggcaggacugagcaccauccugcuguaucacaucauggcguggggccuggccacccugcucuguguggagggagccgccaugcucuacuacccuuccguguccaggugugagcggggccuggaccacgccaucccccacuaugucaccauguaccugccccugcugcugguucucguggcgaaccccauccuguuccaaaagacagugacugcaguggccucuuuacuuaaaggaagacaaggcauuuacacggagaacgagaggaggaugggagccgugaucaagauccgauuuuucaaaaucaugcugguuuuaauuauuuguugguugucgaauaucaucaaugaaagccuuuuauucuaucuugagaugcaaacagauaucaauggagguucuuugaaaccugucagaacugcagccaagaccacaugguuuauuaugggaauccugaauccagcccagggauuucucuugucuuuggccuucuacggcuggacaggaugcagccuggguuuucagucucccaggaaggagauccagugggaaucacugaccaccucggcugcugagggggcucacccauccccacugaugccccaugaaaacccugcuuccgggaaggugucucaagugggugggcagacuucugacgaagcccugagcaugcugucugaagguucugaugccagcacaauugaaauucacacugcaagugaauccugcaacaaaaaugagggugacccugcucucccaacccauggagaccuauga

SEQ ID NO: 875 - RNA, 3141 nt, Artificial Sequence
  AAH38180
auggcgucuuccgugggcaacguggccgacagcacagaaccaacgaaacguaugcuuuccuuccaaggguuagcugaguuggcacaucgagaauaucaggcaggagauuuugaggcagcugagagacacugcaugcagcucuggagacaagagccagacaauacuggugugcuuuuauuacuuucaucuauacacuuccagugucgaaggcuggacagaucugcucacuuuagcacucuggcaauuaaacagaacccccuucuggcagaagcuuauucgaauuuggggaauguguacaaggaaagagggcaguugcaggaggcaauugagcauuaucgacaugcauugcgucucaaaccugauuucaucgaugguuauauuaaccuggcagccgccuugguagcagcgggugacauggaaggggcaguacaagcuuacgucucugcucuucaguacaauccugauuuguacuguguucgcagugaccuggggaaccugcucaaagcccugggucgcuuggaagaagccaaggcauguuauuugaaagcaauugagacgcaaccgaacuuugcaguagcuuggaguaaucuuggcuguguuuucaaugcacaaggggaaauuuggcuugcaauucaucacuuugaaaaggcugucacccuugacccaaacuuucuggaugcuuauaucaauuuaggaaaugucuugaaagaggcacgcauuuuugacagagcuguggcagcuuaucuucgugcccuaaguuugaguccaaaucacgcaguggugcacggcaaccuggcuuguguauacuaugagcaaggccugauagaucuggcaauagacaccuacaggcgggcuaucgaacuacaaccacauuucccugaugcuuacugcaaccuagccaaugcucucaaagagaagggcaguguugcugaagcagaagauuguuauaauacagcucuccgucugugucccacccaugcagacucucugaauaaccuagccaauaucaaacgagaacagggaaacauugaagaggcaguucgcuuguaucguaaagcauuagaagucuucccagaguuugcugcugcccauucaaauuuagcaaguguacugcagcagcagggaaaacugcaggaagcucugaugcauuauaaggaggcuauucgaaucaguccuaccuuugcugaugccuacucuaauaugggaaacacucuaaaggagaugcaggauguucagggagccuugcaguguuauacgcgugccauccaaauuaauccugcauuugcagaugcacauagcaaucuggcuuccauucauaaggauucagggaauauuccagaagccauagcuucuuaccgcacggcucugaaacuuaagccugauuuuccugaugcuuauuguaacuuggcucauugccugcagauugucugugauuggacagacuaugaugagcgaaugaagaaguuggucaguauuguggcugaccaguuagagaagaauagguugccuucugugcauccucaucauaguaugcuauauccucuuucucauggcuucaggaaggcuauugcugagaggcacggcaaccugugcuuagauaagauuaauguucuucauaaaccaccauaugaacauccaaaagacuugaagcucagugauggucggcugcguguaggauaugugaguuccgacuuugggaaucauccuacuucucaccuuaugcagucuauuccaggcaugcacaauccugauaaauuugagguguucuguuaugcccugagcccagacgauggcacaaacuuccgagugaaggugauggcagaagccaaucauuucauugaucuuucucagauuccaugcaauggaaaagcagcugaucgcauccaucaggauggaauucauauccuuguaaauaugaauggcuauacuaagggcgcucgaaaugagcuuuuugcucucaggccagcuccuauucaggcaauguggcugggauacccugggacgaguggugcgcuuuucauggauuauauuaucacugaucaggaaacuucgccagcugaaguugcugagcaguauuccgagaaauuggcuuauaugccccacacuuuuuuuauuggugaucaugcuaauauguucccucaccugaagaaaaaagcagucaucgauuuuaaguccaaugggcacauuuaugacaaucggauaguucugaauggcaucgaccucaaagcauuucuugauagucuaccagaugugaaaauugucaagaugaaguguccugauggaggagacaaugcagauagcaguaacacagcucuuaauaugccuguuauuccuaugaauacuauugcagaagcaguuauugaaaugauuaaccgaggacagauucaaauaacaauuaauggauucaguauuagcaauggacuggcaacuacucagaucaacaauaaggcugcaacuggagaggagguuccccguaccauuauuguaaccacccguucucaguacggguuaccagaagaugccaucguauacuguaacuuuaaucaguuguauaaaauugacccuucuacuuugcagaugugggcaaacauucugaagcguguucccaauaguguacucuggcuguugcguuuuccagcaguaggagaaccuaauauucaacaguaugcacaaaacaugggccugccccagaaccguaucauuuuuucaccuguugcuccuaaagaggaacacgucaggagaggccagcuggcugaugucugcuuggacacuccacucuguaaugggcacaccacagggauggauguccucugggcagggacccccauggugacuaugccaggagagacucuugcuucucgaguugcagcaucccagcucacuugcuuagguugucuugagcuuauugcuaaaaacagacaagaauaugaagacauagcugugaagcugggaacugaucuagaauaccugaagaaaguucguggcaaagucuggaagcaaagaauaucuagcccucuguucaacaccaaacaauacacaauggaacuagagcggcucuaucuacagaugugggagcauuaugcagcuggcaacaaaccugaccacaugauuaagccuguugaagucacugagucagcauaa

SEQ ID NO: 876 - RNA, 441 nt, Artificial Sequence
  BAG57972
auggcggcggaaacgcugcuguccaguuuguuaggacugcugcuucugggacuccuguuacccgcaagucugaccggcggugucgggagucugaaccuggaggagcugagugagaugcguuaugggaucgagauccugccguugccugucaugggagggcagagccaaucuucggacguggugauugucuccucuaaguacaaacagcgcuaugagugucgccugccaguuggagcuauucacuuccagcgugaaagggaggaggaaacaccugcuuaccaagggccugggaucccugaguuguugagcccaaugagagaugcucccugcuugcugaagacaaaggacugguggacauaugaauucuguuauggacgccacauccagcaauaccacauggaagauucagagaucaaaggccuccaagcagcaucgucuuaa

SEQ ID NO: 877 - RNA, 1221 nt, Artificial Sequence
  BAG65333
auggcggcggaaacgcugcuguccaguuuguuaggacugcugcuucugggacuccuguuacccgcaagucugaccggcggugucgggagccugaaccuggaggagcugagugagaugcguuaugggaucgagauccugccguugccugucaugggagggcagagccaaucuucggacguggugauugucuccucuaaguacaaacagcgcuaugagugucgccugccagcuggagcuauucacuuccagcgugaaagggaggaggaaacaccugcuuaccaagggccugggaucccugaguuguugagcccaaugagagaugcucccugcuugcugaagacaaaggacugguggacauaugaauucuguuauggacgccacauccagcaauaccacauggaagauucagcuucuggugcucccaaugauuuucagaacaacgugcaggucaaagucauucgaagcccugcggauuugauucgauucauagaggagcugaaagguggaacaaaaaaggggaagccaaauauaggccaagagcagccuguggaugaugcugcagaagucccucagagggaaccagagaaggaaaggggugauccagaacggcagagagagauggaagaagaggaggaugaggaugaggaugaggaugaagaugaggaugaacggcaguuacugggagaauuugagaaggaacuggaagggauccugcuuccgucagaccgagaccggcuccguucggaggugaaggcuggcauggagcgggaacuggaaaacaucauccaggagacagagaaagagcuggacccagaugggcugaagaaggagucagagcgggaucgggcaaugcuggcucucacauccacucucaacaaacucaucaaaagacuggaggaaaaacagaguccagagcuggugaagaagcacaagaaaaagaggguuguccccaaaaagccucccccaucaccccaaccuacagggaaaauugagaucaaaauuguccgcccaugggcugaagggacugaagagggugcacguuggcugacugaugaggacacgagaaaccucaaggagaucuucuucaauaucuuggugccgggagcugaagaggcccagaaggaacgccagcggcagaaagagcuggagagcaauuaccgccggguguggggcucuccagguggggagggcacaggggaccuggacgaauuugacuucuga

SEQ ID NO: 878 - RNA, 2223 nt, Artificial Sequence
  BAH13933
auggcgguggaaacgcugcuguccaguuuguuaggacugcugcuucugggacuccuguuacccgcaagucugaccggcggugucgggagccugaaccuggaggagcugagugagaugcguuaugggaucgagauccugccguugccugucaugggagggcagagccaaucuucggacguggugauugucuccucuaaguacaaacagcgcuaugagugucgccugccagcuggagcuauucacuuccagcgugaaagggaggaggaaacaccugcuuaccaagggccugggaucccugaguuguugagcccaaugagagaugcucccugcuugcugaagacaaaggacugguggacauaugaauucuguuauggacgccacauccagcaauaccacauggaagauucagagaucaaaggugaaguccucuaucucggcuacuaccaaucagccuucgacugggaugaugaaacagccaaggccuccaagcagcaucgucuuaaacgcuaccacagccagaccuauggcaauggguccaagugcgaccuuaaugggaggccccgggaggccgagguucgguuccucugugacgagggugcagguaucucuggggacuacaucgaucgcguggacgagcccuuguccugcucuuaugugcugaccauucgcacuccucggcucugcccccacccucuccuccggcccccacccagugcugcaccgcaggccauccucugucacccuucccuacagccugaggaguacauggccuacguucagaggcaagccgacucaaagcaguauggagauaaaaucauagaggagcugcaagaucuaggcccccaaguguggagugagaccaagucugggguggcaccccaaaagauggcagguaggaccuuguuucaccuguuccgugaaauucacuuccauuucuucccuuccccugaucuuacuguccugacugacugguggggugggggggggguggaaaaguaccaugggcccuccucccuuggugauagaggaggggaagggaccccauccuauuugcucccuucugucucaccccuccugucagaucagucucucccuguucucuguacccuaggugcgagcccgaccaaggaugacaguaaggacucagauuucuggaagaugcuuaaugagccagaggaccaggccccaggaggggaggaggugccggcugaggagcaggacccaagcccugaggcagcagauucagcuucuggugcucccaaugauuuucagaacaacgugcaggucaaagucauucgaagcccugcggauuugauucgauucauagaggagcugaaagguggaacaaaaaaggggaagccaaauauaggccaagagcagccuguggaugaugcugcagaagucccucagagggaaccagagaaggaaaggggugauccagaacggcagagagagauggaagaagaggaggaugaggaugaggaugaggaugaagaugaggaugaacggcaguuacugggagaauuugagaaggaacuggaagggauccugcuuccgucagaccgagaccggcuccguucggaggugaaggcuggcauggagcgggaacuggagaacaucauccaggagacagagaaagagcuggacccagaugggcugaagaaggagucagagcgggaucgggcaaugcuggcucucacauccacucucaacaaacucaucaaaagacuggaggaaaaacagaguccagagcuggugaagaagcacaagaaaaagaggguuguccccaaaaagccucccccaucaccccaaccuacagaggaggauccugagcacagaguccggguccgggucaccaagcuccgucucggaggcccuaaucaggaucugacuguccucgagaugaaacgggaaaacccacagcugaaacaaaucgaggggcuggugaaggagcugcuggagagggagggacucacagcugcagggaaaauugagaucaaaauuguccgcccaugggcugaagggacugaagagggugcacguuggcugacugaugaggacacgagaaaccucaaggagaucuucuucaauaucuuggugccgggagcugaagaggcccagaaggaacgccagcggcagaaagagcuggagagcaauuaccgccggguguggggcucuccagguggggagggcacaggggaccuggacgaauuugacuucuga

SEQ ID NO: 879 - RNA, 2004 nt, Artificial Sequence
  AAB06495
auggcggcggaaacgcugcuguccaguuuguuaggacugcugcuucugggacuccuguuacccgcaagucugaccggcggugucgggagccugaaccuggaggagcugagugagaugcguuaugggaucgagauccugccguugccugucaugggagggcagagccaaucuucggacguggugauugucuccucuaaguacaaacagcgcuaugagugucgccugccagcuggagcuauucacuuccagcgugaaagggaggaggaaacaccugcuuaccaagggccugggaucccugaguuguugagcccaaugagagaugcucccugcuugcugaagacaaaggacugguggacauaugaauucuguuauggacgccacauccagcaauaccacauggaagauucagagaucaaaggugaaguccucuaucucggcuacuaccaaucagccuucgacugggaugaugaaacagccaaggccuccaagcagcaucgucuuaaacgcuaccacagccagaccuauggcaauggguccaagugcgaccuuaaugggaggccccgggaggccgagguucgguuccucugugacgagggugcagguaucucuggggacuacaucgaucgcguggacgagcccuuguccugcucuuaugugcugaccauucgcacuccucggcucugcccccacccucuccuccggcccccacccagugcugcaccacaggccauccucugucacccuucccuacagccugaggaguacauggccuacguucagaggcaagccgacucaaagcaguauggagauaaaaucauagaggagcugcaagaucuaggcccccaaguguggagugagaccaagucugggguggcaccccaaaagauggcaggugcgagcccgaccaaggaugacaguaaggacucagauuucuggaagaugcuuaaugagccagaggaccaggccccaggaggggaggaggugccggcugaggagcaggacccaagcccugaggcagcagauucagcuucuggugcucccaaugauuuucagaacaacgugcaggucaaagucauucgaagcccugcggauuugauucgauucauagaggagcugaaagguggaacaaaaaaggggaagccaaauauaggccaagagcagccuguggaugaugcugcagaagucccucagagggaaccagagaaggaaaggggugauccagaacggcagagagagauggaagaagaggaggaugaggaugaggaugaggaugaagaugaggaugaacggcaguuacugggagaauuugagaaggaacuggaagggauccugcuuccgucagaccgagaccggcuccguucggaggugaaggcuggcauggagcgggaacuggagaacaucauccaggagacagagaaagagcuggacccagaugggcugaagaaggagucagagcgggaucgggcaaugcuggcucucacauccacucucaacaaacucaucaaaagacuggaggaaaaacagaguccagagcuggugaagaagcacaagaaaaagaggguuguccccaaaaagccucccccaucaccccaaccuacagaggaggauccugagcacagaguccggguccgggucaccaagcuccgucucggaggcccuaaucaggaucugacuguccucgagaugaaacgggaaaacccacagcugaaacaaaucgaggggcuggugaaggagcugcuggagagggagggacucacagcugcagggaaaauugagaucaaaauuguccgcccaugggcugaagggacugaagagggugcacguuggcugacugaugaggacacgagaaaccucaaggagaucuucuucaauaucuuggugccgggagcugaagaggcccagaaggaacgccagcggcagaaagagcuggagagcaauuaccgccggguguggggcucuccagguggggagggcacaggggaccuggacgaauuugacuucuga

SEQ ID NO: 880 - RNA, 303 nt, Artificial Sequence
  AAI13433
augagagcccucacacuccucgcccuauuggcccuggccgcacuuugcaucgcuggccaggcaggugcgaagcccagcggugcagaguccagcaaaggugcagccuuuguguccaagcaggagggcagcgagguagugaagagacccaggcgcuaccuguaucaauggcugggagccccaguccccuacccggauccccuggagcccaggagggaggugugugagcucaauccggacugugacgaguuggcugaccacaucggcuuucaggaggccuaucggcgcuucuacggcccggucuag

SEQ ID NO: 881 - RNA, 945 nt, Artificial Sequence
  EAX06008
augagaauugcagugauuugcuuuugccuccuaggcaucaccugugccauaccaguuaaacaggcugauucuggaaguucugaggaaaagcagcuuuacaacaaauacccagaugcuguggccacauggcuaaacccugacccaucucagaagcagaaucuccuagccccacagaaugcuguguccucugaagaaaccaaugacuuuaaacaagagacccuuccaaguaaguccaacgaaagccaugaccacauggaugauauggaugaugaagaugaugaugaccauguggacagccaggacuccauugacucgaacgacucugaugauguagaugacacugaugauucucaccagucugaugagucucaccauucugaugaaucugaugaacuggucacugauuuucccacggaccugccagcaaccgaaguuuucacuccaguuguccccacaguagacacauaugauggccgaggugauagugugguuuauggacugaggucaaaaucuaagaaguuucgcagaccugacauccaguacccugaugcuacagacgaggacaucaccucacacauggaaagcgaggaguugaauggugcauacaaggccauccccguugcccaggaccugaacgcgccuucugauugggacagccgugggaaggacaguuaugaaacgagucagcuggaugaccagagugcugaaacccacagccacaagcaguccagauuauauaagcggaaagccaaugaugagagcaaugagcauuccgaugugauugauagucaggaacuuuccaaagucagccgugaauuccacagccaugaauuucacagccaugaagauaugcugguuguagaccccaaaaguaaggaagaagauaaacaccugaaauuucguauuucucaugaauuagauagugcaucuucugaggucaauuaa

SEQ ID NO: 882 - RNA, 903 nt, Artificial Sequence
  EAX06009
augagaauugcagugauuugcuuuugccuccuaggcaucaccugugccauaccaguuaaacaggcugauucuggaaguucugaggaaaagcagcuuuacaacaaauacccagaugcuguggccacauggcuaaacccugacccaucucagaagcagaaucuccuagccccacagacccuuccaaguaaguccaacgaaagccaugaccacauggaugauauggaugaugaagaugaugaugaccauguggacagccaggacuccauugacucgaacgacucugaugauguagaugacacugaugauucucaccagucugaugagucucaccauucugaugaaucugaugaacuggucacugauuuucccacggaccugccagcaaccgaaguuuucacuccaguuguccccacaguagacacauaugauggccgaggugauagugugguuuauggacugaggucaaaaucuaagaaguuucgcagaccugacauccaguacccugaugcuacagacgaggacaucaccucacacauggaaagcgaggaguugaauggugcauacaaggccauccccguugcccaggaccugaacgcgccuucugauugggacagccgugggaaggacaguuaugaaacgagucagcuggaugaccagagugcugaaacccacagccacaagcaguccagauuauauaagcggaaagccaaugaugagagcaaugagcauuccgaugugauugauagucaggaacuuuccaaagucagccgugaauuccacagccaugaauuucacagccaugaagauaugcugguuguagaccccaaaaguaaggaagaagauaaacaccugaaauuucguauuucucaugaauuagauagugcaucuucugaggucaauuaa

SEQ ID NO: 883 - RNA, 864 nt, Artificial Sequence
  EAX06010
augagaauugcagugauuugcuuuugccuccuaggcaucaccugugccauaccaguuaaacaggcugauucuggaaguucugaggaaaagcagaaugcuguguccucugaagaaaccaaugacuuuaaacaagagacccuuccaaguaaguccaacgaaagccaugaccacauggaugauauggaugaugaagaugaugaugaccauguggacagccaggacuccauugacucgaacgacucugaugauguagaugacacugaugauucucaccagucugaugagucucaccauucugaugaaucugaugaacuggucacugauuuucccacggaccugccagcaaccgaaguuuucacuccaguuguccccacaguagacacauaugauggccgaggugauagugugguuuauggacugaggucaaaaucuaagaaguuucgcagaccugacauccaguacccugaugcuacagacgaggacaucaccucacacauggaaagcgaggaguugaauggugcauacaaggccauccccguugcccaggaccugaacgcgccuucugauugggacagccgugggaaggacaguuaugaaacgagucagcuggaugaccagagugcugaaacccacagccacaagcaguccagauuauauaagcggaaagccaaugaugagagcaaugagcauuccgaugugauugauagucaggaacuuuccaaagucagccgugaauuccacagccaugaauuucacagccaugaagauaugcugguuguagaccccaaaaguaaggaagaagauaaacaccugaaauuucguauuucucaugaauuagauagugcaucuucugaggucaauuaa

SEQ ID NO: 884 - RNA, 984 nt, Artificial Sequence
  BAH12087
augggcauuguccccagaagcuuggacaaaaaggcacacagaguucaauuccaguugaacagaauaaaggccaaaauagagcugccuugggggucacugcaauuagacugcuugaugaagacauuaaaagaacuuuacaacaaauacccagaugcuguggccacauggcuaaacccugacccaucucagaagcagaaucuccuagccccacagaaugcuguguccucugaagaaaccaaugacuuuaaacaagagacccuuccaaguaaguccaacgaaagccaugaccacauggaugauauggaugaugaagaugaugaugaccauguggacagccaggacuccauugacucgaacgacucugaugauguagaugacacugaugauucucaccagucugaugagucucaccauucugaugaaucugaugaacuggucacugauuuucccacggaccugccagcaaccgaaguuuucacuccaguuguccccacaguagacacauaugauggccgaggugauagugugguuuauggacugaggucaaaaucuaagaaguuucgcagaccugacauccaguacccugaugcuacagacgaggacaucaccucacacauggaaagcgaggaguugaauggugcauacaaggccauccccguugcccaggaccugaacgcgccuucugauugggacagccgugggaaggacaguuaugaaacgagucagcuggaugaccagagugcugaaacccacagccacaagcaguccagauuauauaagcggaaagccaaugaugagagcaaugagcauuccgaugugauugauagucaggaacuuuccaaagucagccgugaauuccacagccaugaauuucacagccaugaagauaugcugguuguagaccccaaaaguaaggaagaagauaaacaccugaaauuucguauuucucaugaauuagauagugcaucuucugaggucaauuaa

SEQ ID NO: 885 - RNA, 879 nt, Artificial Sequence
  AEA49030
augagaauugcagugauuugcuuuugccuccuaggcaucaccugugccauaccaguuaaacaggcugauucuggaaguucugaggaaaagcagcuuuacaacaaauacccagaugcuguggccacauggcuaaacccugacccaucucagaagcagaaucuccuagccccacagaaugcuguguccucugaagaaaccaaugacuuuaaacaagagacccuuccaaguaaguccaacgaaagccaugaccacauggaugauauggaugaugaagaugaugauucucaccagucugaugagucucaccauucugaugaaucugaugaacuggucacugauuuucccacggaccugccagcaaccgaaguuuucacuccaguuguccccacaguagacacauaugauggccgaggugauagugugguuuauggacugaggucaaaaucuaagaaguuucgcagaccugacauccaguacccugaugcuacagacgaggacaucaccucacacauggaaagcgaggaguugaauggugcauacaaggccauccccguugcccaggaccugaacgcgccuucugauugggacagccgugggaaggacaguuaugaaacgagucagcuggaugaccagagugcugaaacccacagccacaagcaguccagauuauauaagcggaaagcuaaugaugagagcaaugagcauuccgaugugauugauagucaggaacuuuccaaagucagccgugaauuccacagccaugaauuucacagccaugaagauaugcugguuguagaccccaaaaguaaggaagaagauaaacaccugaaauuucguauuucucaugaauuagauagugcaucuucugaggucaauuaa

SEQ ID NO: 886 - RNA, 945 nt, Artificial Sequence; identical to SEQ ID NO: 881
  AAA86886

SEQ ID NO: 887 - RNA, 1182 nt, Artificial Sequence
  AAA59988
auggaggagccgcagucagauccuagcgucgagcccccucugagucaggaaacauuuucagaccuauggaaacuacuuccugaaaacaacguucugucccccuugccgucccaagcaauggaugauuugaugcuguccccggacgauauugaacaaugguucacugaagacccagguccagaugaagcucccagaaugccagaggcugcuccccccguggccccugcaccagcagcuccuacaccggcggccccugcaccagcccccuccuggccccugucaucuucugucccuucccagaaaaccuaccagggcagcuacgguuuccgucugggcuucuugcauucugggacagccaagucugugacuugcacguacuccccugcccucaacaagauguuuugccaacuggccaagaccugcccugugcagcuguggguugauuccacacccccgcccggcacccgcguccgcgccauggccaucuacaagcagucacagcacaugacggagguugugaggcgcugcccccaccaugagcgcugcucagauagcgauggucuggccccuccucagcaucuuauccgaguggaaggaaauuugcguguggaguauuuggaugacagaaacacuuuucgacauagugugguggugcccuaugagccgccugagguuggcucugacuguaccaccauccacuacaacuacauguguaacaguuccugcaugggcggcaugaaccggaggcccauccucaccaucaucacacuggaagacuccagugguaaucuacugggacggaacagcuuugaggugcguguuugugccuguccugggagagaccggcgcacagaggaagagaaucuccgcaagaaaggggagccucaccacgagcugcccccagggagcacuaagcgagcacugcccaacaacaccagcuccucuccccagccaaagaagaaaccacuggauggagaauauuucacccuucagauccgugggcgugagcgcuucgagauguuccgagagcugaaugaggccuuggaacucaaggaugcccaggcugggaaggagccaggggggagcagggcucacuccagccaccugaaguccaaaaagggucagucuaccucccgccauaaaaaacucauguucaagacagaagggccugacucagacuga

SEQ ID NO: 888 - RNA, 309 nt, Artificial Sequence
  AAF88037
augagugcacgagugagaucaagauccagaggaagaggagauggucaggaggcucccgaugugguugcauucguggcucccggugaaucucagcaagaggaaccaccaacugacaaucaggauauugaaccuggacaagagagagaaggaacaccuccgaucgaagaacguaaaguagaaggugauugccaggaaauggaucuggaaaagacucggagugagcguggagauggcucugauguaaaagagaagacuccaccuaauccuaagcaugcuaagacuaaagaagcaggagaugggcagccauaa

SEQ ID NO: 889 - RNA, 1209 nt, Artificial Sequence
  AAA60003
augcagaugucuccagcccucaccugccuaguccugggccuggcccuugucuuuggugaagggucugcugugcaccaucccccauccuacguggcccaccuggccucagacuucggggugaggguguuucagcagguggcgcaggccuccaaggaccgcaacgugguuuucucacccuaugggguggccucgguguuggccaugcuccagcugacaacaggaggagaaacccagcagcagauucaagcagcuaugggauucaagauugaugacaagggcauggcccccgcccuccggcaucuguacaaggagcucauggggccauggaacaaggaugagaucagcaccacagacgcgaucuucguccagcgggaucugaagcugguccagggcuucaugccccacuucuucaggcuguuccggagcacggucaagcaaguggacuuuucagagguggagagagccagauucaucaucaaugacugggugaagacacacacaaaagguaugaucagcaacuugcuugggaaaggagccguggaccagcugacacggcuggugcuggugaaugcccucuacuucaacggccaguggaagacucccuuccccgacuccagcacccaccgccgccucuuccacaaaucagacggcagcacugucucugugcccaugauggcucagaccaacaaguucaacuauacugaguucaccacgcccgauggccauuacuacgacauccuggaacugcccuaccacggggacacccucagcauguucauugcugccccuuaugaaaaagaggugccucucucugcccucaccaacauucugagugcccagcucaucagccacuggaaaggcaacaugaccaggcugccccgccuccugguucugcccaaguucucccuggagacugaagucgaccucaggaagccccuagagaaccugggaaugaccgacauguucagacaguuucaggcugacuucacgagucuuucagaccaagagccucuccacgucgcgcaggcgcugcagaaagugaagaucgaggugaacgagaguggcacgguggccuccucauccacagcugucauagucucagcccgcauggcccccgaggagaucaucauggacagacccuuccucuuugugguccggcacaaccccacaggaacaguccuuuucaugggccaagugauggaacccuga

SEQ ID NO: 890 - RNA, 1248 nt, Artificial Sequence
  AAA36797
auggaggaucuuuguguggcaaacacacucuuugcccucaauuuauucaagcaucuggcaaaagcaagccccacccagaaccucuuccucuccccauggagcaucucguccaccauggccauggucuacaugggcuccaggggcagcaccgaagaccagauggccaaggugcuucaguuuaaugaagugggagccaaugcaguuacccccaugacuccagagaacuuuaccagcuguggguucaugcagcagauccagaaggguaguuauccugaugcgauuuugcaggcacaagcugcagauaaaauccauucauccuuccgcucucucagcucugcaaucaaugcauccacagggaauuauuuacuggaaagugucaauaagcuguuuggugagaagucugcgagcuuccgggaagaauauauucgacucugucagaaauauuacuccucagaaccccaggcaguagacuuccuagaaugugcagaagaagcuagaaaaaagauuaauuccugggucaagacucaaaccaaaggcaaaaucccaaacuuguuaccugaagguucuguagauggggauaccaggaugguccuggugaaugcugucuacuucaaaggaaaguggaaaacuccauuugagaagaaacuaaaugggcuuuauccuuuccguguaaacucggcucagcgcacaccuguacagaugauguacuugcgugaaaagcuaaacauuggauacauagaagaccuaaaggcucagauucuagaacucccauaugcuggagauguuagcauguucuuguugcuuccagaugaaauugccgauguguccacuggcuuggagcugcuggaaagugaaauaaccuaugacaaacucaacaaguggaccagcaaagacaaaauggcugaagaugaaguugagguauacauaccccaguucaaauuagaagagcauuaugaacucagauccauucugagaagcaugggcauggaggacgccuucaacaagggacgggccaauuucucagggaugucggagaggaaugaccuguuucuuucugaaguguuccaccaagccaugguggaugugaaugaggagggcacugaagcagccgcuggcacaggagguguuaugacagggagaacuggacauggaggcccacaguuuguggcagaucauccuuuucuuuuucuuauuaugcauaagauaaccaacugcauuuuauuuuucggcagauuuuccucacccuaa

SEQ ID NO: 891 - RNA, 528 nt, Artificial Sequence
  AAA60020
augcugccucccauggcccugcccaguguaucuuggaugcugcuuuccugccucaugcugcugucucagguucaaggugaagaaccccagagggaacugcccucugcacggauccgcugucccaaaggcuccaaggccuauggcucccacugcuaugccuuguuuuugucaccaaaauccuggacagaugcagaucuggccugccagaagcggcccucuggaaaccuggugucugugcucaguggggcugagggauccuucguguccucccuggugaagagcauugguaacagcuacucauacgucuggauugggcuccaugaccccacacagggcaccgagcccaauggagaagguugggaguggaguagcagugaugugaugaauuacuuugcaugggagagaaaucccuccaccaucucaagccccggccacugugcgagccugucgagaagcacagcauuucugagguggaaagauuauaacuguaaugugagguuacccuaugucugcaaguucacugacuag

SEQ ID NO: 892 - RNA, 528 nt, Artificial Sequence; identical to SEQ ID NO: 891
  AAT11159

SEQ ID NO: 893 - RNA, 381 nt, Artificial Sequence
  AAH39863
auggacaagucccucuugcuggaacuccccauccugcucugcugcuuuagggcauuaucuggaucacuuucaaugagaaaugaugcagucaaugaaauaguugcugugaaaaacaauuuuccugugauagaaauuguucaguguaggaugugccaccuccaguucccaggagaaaagugcuccagaggaagaggaauaugcacagcaacaacagaagaggccugcaugguuggaaggauguucaaaagggaugguaaucccugguuaaccuucaugggcugccuaaagaacugugcugaugugaaaggcauaagguggagugucuauuuggugaacuucaggugcugcaggagccaugaccugugcaaugaagaccuuuag

SEQ ID NO: 894 - RNA, 1440 nt, Artificial Sequence
  CCDS42826.1
augaccacgcuggccggcgcugugcccaggaugaugcggccgggcccggggcagaacuacccgcguagcggguucccgcuggaaguguccacuccccucggccagggccgcgucaaccagcucggcgguguuuuuaucaacggcaggccgcugcccaaccacauccgccacaagaucguggagauggcccaccacggcauccggcccugcgucaucucgcgccagcugcgcgugucccacggcugcgucuccaagauccugugcagguaccaggagacuggcuccauacguccuggugccaucggcggcagcaagcccaagcaggugacaacgccugacguggagaagaaaauugaggaauacaaaagagagaacccgggcauguucagcugggaaauccgagacaaauuacucaaggacgcggucugugaucgaaacaccgugccgucagugaguuccaucagccgcauccugagaaguaaauucgggaaaggugaagaggaggaggccgacuuggagaggaaggaggcagaggaaagcgagaagaaggccaaacacagcaucgacggcauccugagcgagcgagccucagcaccccaaucagaugaaggcucugauauugacucugaaccagauuuaccacuaaagaggaaacagcgcagaagccgaaccaccuucacagcagaacagcuggaggaacuggagcgugcuuuugagagaacucauuacccugacauuuauacuagggaggaacuggcccagagggcgaagcucaccgaggcccgaguacaggucugguuuagcaaccgccgugcaagauggaggaagcaagcuggggccaaucaacugauggcuuucaaccaucucauucccgggggguucccucccacugccaugccgaccuugccaacguaccagcugucggagaccucuuaccagcccacaucuauuccacaagcugugucagaucccagcagcaccguucacagaccucaaccgcuuccuccaagcacuguacaccaaagcacgauuccuuccaacccagacagcagcucugccuacugccuccccagcaccaggcauggauuuuccagcuauacagacagcuuugugccuccgucggggcccuccaaccccaugaaccccaccauuggcaauggccucucaccucagguaaugggacuccugaccaaccacggugggguaccucaucagccccagacugauuacgcgcucuccccucucaccgggggucuggaaccuaccaccacggugucggccagcugcagucagagacuagaccauaugaagagcuuggacagucugccaacaucucaguccuacuguccacccaccuauagcaccacaggcuacaguauggacccugucacaggcuaccaauaugggcaguauggacaaaguaagccuuggacuuuuuag

SEQ ID NO: 895 - RNA, 1176 nt, Artificial Sequence
  AAA58397
auggauuuagagaaaaauuauccgacuccucggaccagcaggacaggacauggaggagugaaucagcuuggggggguuuuugugaauggacggccacucccggauguaguccgccagaggauaguggaacuugcucaucaaggugucaggcccugcgacaucuccaggcagcuucgggucagccaugguugugucagcaaaauucuuggcagguauuaugagacaggaagcaucaagccugggguaauuggaggauccaaaccaaaggucgccacacccaaagugguggaaaaaaucgcugaauauaaacgccaaaaucccaccauguuugccugggagaucagggaccggcugcuggcagagcgggugugugacaaugacaccgugccuagcgucaguuccaucaacaggaucauccggacaaaaguacagcagccacccaaccaaccagucccagcuuccagucacagcauaguguccacuggcuccgugacgcagguguccucggugagcacggauucggccggcucgucguacuccaucagcggcauccugggcaucacgucccccagcgccgacaccaacaagcgcaagagagacgaagguauucaggagucuccggugccgaacggccacucgcuuccgggcagagacuuccuccggaagcagaugcggggagacuuguucacacagcagcagcuggaggugcuggaccgcguguuugagaggcagcacuacucagacaucuucaccaccacagagcccaucaagcccgagcagaccacagaguauucagccauggccucgcuggcuggugggcuggacgacaugaaggccaaucuggccagccccaccccugcugacaucgggagcagugugccaggcccgcaguccuaccccauugugacaggccgugacuuggcgagcacgacccuccccggguacccuccacacgucccccccgcuggacagggcagcuacucagcaccgacgcugacagggauggugccugggagugaguuuuccgggagucccuacagccacccucaguauuccucguacaacgacuccuggagguuccccaacccggggcugcuuggcucccccuacuauuauagcgcugccgcccgaggagccgccccaccugcagccgccacugccuaugaccgucacuga

SEQ ID NO: 896 - RNA, 873 nt, Artificial Sequence
  AAF25807
augaggauauuugcugucuuuauauucaugaccuacuggcauuugcugaacgcauuuacugucacgguucccaaggaccuauaugugguagaguaugguagcaauaugacaauugaaugcaaauucccaguagaaaaacaauuagaccuggcugcacuaauugucuauugggaaauggaggauaagaacauuauucaauuugugcauggagaggaagaccugaagguucagcauaguagcuacagacagagggcccggcuguugaaggaccagcucucccugggaaaugcugcacuucagaucacagaugugaaauugcaggaugcagggguguaccgcugcaugaucagcuaugguggugccgacuacaagcgaauuacugugaaagucaaugccccauacaacaaaaucaaccaaagaauuuugguuguggauccagucaccucugaacaugaacugacaugucaggcugagggcuaccccaaggccgaagucaucuggacaagcagugaccaucaaguccugagugguaagaccaccaccaccaauuccaagagagaggagaagcuuuucaaugugaccagcacacugagaaucaacacaacaacuaaugagauuuucuacugcacuuuuaggagauuagauccugaggaaaaccauacagcugaauuggucaucccagaacuaccucuggcacauccuccaaaugaaaggacucacuugguaauucugggagccaucuuauuaugccuugguguagcacugacauucaucuuccguuuaagaaaagggagaaugauggaugugaaaaaauguggcauccaagauacaaacucaaagaagcaaagugauacacauuuggaggagacguaa

SEQ ID NO: 897 - RNA, 867 nt, Artificial Sequence
  AAH74740
augcagaucccacaggcgcccuggccagucgucugggcggugcuacaacugggcuggcggccaggaugguucuuagacuccccagacaggcccuggaacccccccaccuucuccccagcccugcucguggugaccgaaggggacaacgccaccuucaccugcagcuucuccaacacaucggagagcuucgugcuaaacugguaccgcaugagccccagcaaccagacggacaagcuggccgcuuuccccgaggaccgcagccagcccggccaggacugccgcuuccgugucacacaacugcccaacgggcgugacuuccacaugagcguggucagggcccggcgcaaugacagcggcaccuaccucuguggggccaucucccuggcccccaaggcgcagaucaaagagagccugcgggcagagcucagggugacagagagaagggcagaagugcccacagcccaccccagccccucacccaggccagccggccaguuccaaacccuggugguuggugucgugggcggccugcugggcagccuggugcugcuagucuggguccuggccgucaucugcucccgggccgcacgagggacaauaggagccaggcgcaccggccagccccugaaggaggaccccucagccgugccuguguucucuguggacuauggggagcuggauuuccaguggcgagagaagaccccggagccccccgugcccugugucccugagcagacggaguaugccaccauugucuuuccuagcggaaugggcaccucaucccccgcccgcaggggcucagccgacggcccucggagugcccagccacugaggccugaggauggacacugcucuuggccccucuga

SEQ ID NO: 898 - RNA, 1008 nt, Artificial Sequence
  AAC95296
augggcagcgccagcccgggucugagcagcguaucccccagccaccuccugcugccccccgacacggugucgcggacaggcuuggagaaggcggcagcgggggcagugggucucgagagacgggacuggagucccaguccacccgccacgcccgagcagggccuguccgccuucuaccucuccuacuuugacaugcuguacccugaggacagcagcugggcagccaaggccccuggggccagcagucgggaggagccaccugaggagccugagcagugcccggucauugacagccaagccccagcgggcagccuggacuuggugcccggcgggcugaccuuggaggagcacucgcuggagcaggugcaguccaugguggugggcgaagugcucaaggacaucgagacggccugcaagcugcucaacaucaccgcagaucccauggacuggagccccagcaaugugcagaaguggcuccuguggacagagcaccaauaccggcugccccccaugggcaaggccuuccaggagcuggcgggcaaggagcugugcgccaugucggaggagcaguuccgccagcgcucgccccuggguggggaugugcugcacgcccaccuggacaucuggaagucagcggccuggaugaaagagcggacuucaccuggggcgauucacuacugugccucgaccagugaggagagcuggaccgacagcgagguggacucaucaugcuccgggcagcccauccaccuguggcaguuccucaaggaguugcuacucaagccccacagcuauggccgcuucauuagguggcucaacaaggagaagggcaucuucaaaauugaggacucagcccagguggcccggcuguggggcauccgcaagaaccgucccgccaugaacuacgacaagcugagccgcuccauccgccaguauuacaagaagggcaucauccggaagccagacaucucccagcgccucgucuaccaguucgugcaccccaucuga

SEQ ID NO: 899 - RNA, 2217 nt, Artificial Sequence
  AAA36429
augcagccgaggugggcccaaggggccacgauguggcuuggaguccugcugacccuucugcucuguucaagccuugagggucaagaaaacucuuucacaaucaacaguguugacaugaagagccugccggacuggacggugcaaaaugggaagaaccugacccugcagugcuucgcggaugucagcaccaccucucacgucaagccucagcaccagaugcuguucuauaaggaugacgugcuguuuuacaacaucuccuccaugaagagcacagagaguuauuuuauuccugaaguccggaucuaugacucagggacauauaaauguacugugauugugaacaacaaagagaaaaccacugcagaguaccagcuguugguggaaggagugcccagucccagggugacacuggacaagaaagaggccauccaaggugggaucgugagggucaacuguucugucccagaggaaaaggccccaauacacuucacaauugaaaaacuugaacuaaaugaaaaaauggucaagcugaaaagagagaagaauucucgagaccagaauuuugugauacuggaauuccccguugaggaacaggaccgcguuuuauccuuccgaugucaagcuaggaucauuucugggauccauaugcagaccucagaaucuaccaagagugaacuggucaccgugacggaauccuucucuacacccaaguuccacaucagccccaccggaaugaucauggaaggagcucagcuccacauuaagugcaccauucaagugacucaccuggcccaggaguuuccagaaaucauaauucagaaggacaaggcgauuguggcccacaacagacauggcaacaaggcuguguacucagucauggccaugguggagcacaguggcaacuacacgugcaaaguggaguccagccgcauauccaaggucagcagcaucguggucaacauaacagaacuauuuuccaagcccgaacuggaaucuuccuucacacaucuggaccaaggugaaagacugaaccuguccugcuccaucccaggagcaccuccagccaacuucaccauccagaaggaagauacgauugugucacagacucaagauuucaccaagauagccucaaagucggacagugggacguauaucugcacugcagguauugacaaaguggucaagaaaagcaacacaguccagauagucguaugugaaaugcucucccagcccaggauuucuuaugaugcccaguuugaggucauaaaaggacagaccaucgaaguccguugcgaaucgaucaguggaacuuugccuauuucuuaccaacuuuuaaaaacaaguaaaguuuuggagaauaguaccaagaacucaaaugauccugcgguauucaaagacaaccccacugaagacgucgaauaccaguguguugcagauaauugccauucccaugccaaaauguuaagugagguucugagggugaaggugauagccccgguggaugagguccagauuucuauccugucaaguaaggugguggagucuggagaggacauugugcugcaaugugcugugaaugaaggaucuggucccaucaccuauaaguuuuacagagaaaaagagggcaaacccuucuaucaaaugaccucaaaugccacccaggcauuuuggaccaagcagaaggcuagcaaggaacaggagggagaguauuacugcacagccuucaacagagccaaccacgccuccaguguccccagaagcaaaauacugacagucagagucauucuugccccauggaagaaaggacuuauugcagugguuaucaucggagugaucauugcucucuugaucauugcggccaaauguuauuuucugaggaaagccaaggccaagcagaugccaguggaaauguccaggccagcaguaccacuucugaacuccaacaacgagaaaaugucagaucccaauauggaagcuaacagucauuacggucacaaugacgaugucagaaaccaugcaaugaaaccaauaaaugauaauaaagagccucugaacucagacgugcaguacacggaaguucaaguguccucagcugagucucacaaagaucuaggaaagaaggacacagagacaguguacagugaaguccggaaagcugucccugaugccguggaaagcagauacucuagaacggaaggcucccuugauggaacuuag

SEQ ID NO: 900 - RNA, 2736 nt, Artificial Sequence
  AAG23134
auggcccagcuguuccugccccugcuggcagcccugguccuggcccaggcuccugcagcuuuagcagauguucuggaaggagacagcucagaggaccgcgcuuuucgcgugcgcaucgcgggcgacgcgccacugcagggcgugcucggcggcgcccucaccaucccuugccacguccacuaccugcggccaccgccgagccgccgggcugugcugggcucuccgcgggucaaguggacuuuccugucccggggccgggaggcagaggugcugguggcgcggggagugcgcgucaaggugaacgaggccuaccgguuccgcguggcacugccugcguacccagcgucgcucaccgacgucucccuggcgcugagcgagcugcgccccaacgacucagguaucuaucgcugugagguccagcacggcaucgaugacagcagcgacgcuguggaggucaaggucaaaggggucgucuuucucuaccgagagggcucugcccgcuaugcuuucuccuuuucuggggcccaggaggccugugcccgcauuggagcccacaucgccaccccggagcagcucuaugccgccuaccuugggggcuaugagcaaugugaugcuggcuggcugucggaucagaccgugagguaucccauccagaccccacgagaggccuguuacggagacauggauggcuuccccgggguccggaacuauggugugguggacccggaugaccucuaugauguguacuguuaugcugaagaccuaaauggagaauuguuccugggugacccuccagagaagcugacauuggaggaagcacgggcguacugccaggagcggggugcagagauugccaccacgggccaacuguaugcagccugggaugguggccuggaccacugcagcccaggguggcuagcugauggcagugugcgcuaccccaucgucacacccagccagcgcuguggugggggcuugccuggugucaagacucucuuccucuuccccaaccagacuggcuuccccaauaagcacagccgcuucaacgucuacugcuuccgagacucggcccagccuucugccaucccugaggccuccaacccagccuccaacccagccucugauggacuagaggcuaucgucacagugacagagacccuggaggaacugcagcugccucaggaagccacagagagugaaucccguggggccaucuacuccauccccaucauggaggacggaggagguggaagcuccacuccagaagacccagcagaggccccuaggacgcuccuagaauuugaaacacaauccaugguaccgcccacgggguucucagaagaggaagguaaggcauuggaggaagaagagaaauaugaagaugaagaagagaaagaggaggaagaagaagaggaggagguggaggaugaggcucugugggcauggcccagcgagcucagcagcccgggcccugaggccucucuccccacugagccagcagcccaggaggagucacucucccaggcgccagcaagggcaguccugcagccuggugcaucaccacuuccugauggagagucagaagcuuccaggccuccaaggguccauggaccaccuacugagacucugcccacucccagggagaggaaccuagcauccccaucaccuuccacucugguugaggcaagagaggugggggaggcaacuggugguccugagcuaucuggggucccucgaggagagagcgaggagacaggaagcuccgagggugccccuucccugcuuccagccacacgggccccugaggguaccagggagcuggaggcccccucugaagauaauucuggaagaacugccccagcagggaccucagugcaggcccagccagugcugcccacugacagcgccagccgagguggaguggccgugguccccgcaucaggugacuguguccccagccccugccacaauggugggacaugcuuggaggaggaggaagggguccgcugccuaugucugccuggcuaugggggggaccugugcgauguuggccuccgcuucugcaaccccggcugggacgccuuccagggcgccugcuacaagcacuuuuccacacgaaggagcugggaggaggcagagacccagugccggauguacggcgcgcaucuggccagcaucagcacacccgaggaacaggacuucaucaacaaccgguaccgggaguaccaguggaucggacucaacgacaggaccaucgaaggcgacuucuuguggucggauggcgucccccugcucuaugagaacuggaacccugggcagccugacagcuacuuccugucuggagagaacugcguggucaugguguggcaugaucagggacaauggagugacgugcccugcaacuaccaccuguccuacaccugcaagauggggcugguguccugugggccgccaccggagcugccccuggcucaaguguucggccgcccacggcugcgcuaugagguggacacugugcuucgcuaccggugccgggaaggacuggcccagcgcaaucugccgcugauccgaugccaagagaacggucguugggaggccccccagaucuccugugugcccagaagaccugcccgagcucugcacccagaggaggacccagaaggacgucaggggaggcuacugggacgcuggaaggcgcuguugauccccccuuccagccccaugccaggucccuag

SEQ ID NO: 901 - RNA, 3321 nt, Artificial Sequence
  AAA60049
augcggcuuccgggugcgaugccagcucuggcccucaaaggcgagcugcuguugcugucucuccuguuacuucuggaaccacagaucucucagggccuggucgucacacccccggggccagagcuuguccucaaugucuccagcaccuucguucugaccugcucggguucagcuccgguggugugggaacggaugucccaggagcccccacaggaaauggccaaggcccaggauggcaccuucuccagcgugcucacacugaccaaccucacugggcuagacacgggagaauacuuuugcacccacaaugacucccguggacuggagaccgaugagcggaaacggcucuacaucuuugugccagaucccaccgugggcuuccucccuaaugaugccgaggaacuauucaucuuucucacggaaauaacugagaucaccauuccaugccgaguaacagacccacagcugguggugacacugcacgagaagaaaggggacguugcacugccuguccccuaugaucaccaacguggcuuuucugguaucuuugaggacagaagcuacaucugcaaaaccaccauuggggacagggagguggauucugaugccuacuaugucuacagacuccaggugucauccaucaacgucucugugaacgcagugcagacugugguccgccagggugagaacaucacccucaugugcauugugaucgggaaugagguggucaacuucgaguggacauacccccgcaaagaaagugggcggcugguggagccggugacugacuuccucuuggauaugccuuaccacauccgcuccauccugcacauccccagugccgaguuagaagacucggggaccuacaccugcaaugugacggagagugugaaugaccaucaggaugaaaaggccaucaacaucaccgugguugagagcggcuacgugcggcuccugggagaggugggcacacuacaauuugcugagcugcaucggagccggacacugcagguaguguucgaggccuacccaccgcccacuguccugugguucaaagacaaccgcacccugggcgacuccagcgcuggcgaaaucgcccuguccacgcgcaacgugucggagacccgguaugugucagagcugacacugguucgcgugaagguggcagaggcuggccacuacaccaugcgggccuuccaugaggaugcugagguccagcucuccuuccagcuacagaucaaugucccuguccgagugcuggagcuaagugagagccacccugacaguggggaacagacaguccgcugucguggccggggcaugccccagccgaacaucaucuggucugccugcagagaccucaaaagguguccacgugagcugccgcccacgcugcuggggaacaguuccgaagaggagagccagcuggagacuaacgugacguacugggaggaggagcaggaguuugagguggugagcacacugcgucugcagcacguggaucggccacugucggugcgcugcacgcugcgcaacgcugugggccaggacacgcaggaggucaucguggugccacacuccuugcccuuuaaggugguggugaucucagccauccuggcccugguggugcucaccaucaucucccuuaucauccucaucaugcuuuggcagaagaagccacguuacgagauccgauggaaggugauugagucugugagcucugacggccaugaguacaucuacguggaccccaugcagcugcccuaugacuccacgugggagcugccgcgggaccagcuugugcugggacgcacccucggcucuggggccuuugggcaggugguggaggccacggcucauggccugagccauucucaggccacgaugaaaguggccgucaagaugcuuaaauccacagcccgcagcagugagaagcaagcccuuaugucggagcugaagaucaugagucaccuugggccccaccugaacguggucaaccuguugggggccugcaccaaaggaggacccaucuauaucaucacugaguacugccgcuacggagaccugguggacuaccugcaccgcaacaaacacaccuuccugcagcaccacuccgacaagcgccgcccgcccagcgcggagcucuacagcaaugcucugcccguugggcucccccugcccagccauguguccuugaccggggagagcgacgguggcuacauggacaugagcaaggacgagucgguggacuaugugcccaugcuggacaugaaaggagacgucaaauaugcagacaucgaguccuccaacuacauggccccuuacgauaacuacguucccucugccccugagaggaccugccgagcaacuuugaucaacgagucuccagugcuaagcuacauggaccucgugggcuucagcuaccagguggccaauggcauggaguuucuggccuccaagaacugcguccacagagaccuggcggcuaggaacgugcucaucugugaaggcaagcuggucaagaucugugacuuuggccuggcucgagacaucaugcgggacucgaauuacaucuccaaaggcagcaccuuuuugccuuuaaaguggauggcuccggagagcaucuucaacagccucuacaccacccugagcgacgugugguccuucgggauccugcucugggagaucuucaccuuggguggcaccccuuacccagagcugcccaugaacgagcaguucuacaaugccaucaaacgggguuaccgcauggcccagccugcccaugccuccgacgagaucuaugagaucaugcagaagugcugggaagagaaguuugagauucggccccccuucucccagcuggugcugcuucucgagagacuguugggcgaagguuacaaaaagaaguaccagcagguggaugaggaguuucugaggagugaccacccagccauccuucggucccaggcccgcuugccuggguuccauggccuccgaucuccccuggacaccagcuccguccucuauacugccgugcagcccaaugagggugacaacgacuauaucaucccccugccugaccccaaacccgagguugcugacgagggcccacuggaggguucccccagccuagccagcuccacccugaaugaagucaacaccuccucaaccaucuccugugacagcccccuggagccccaggacgaaccagagccagagccccagcuugagcuccagguggagccggagccagagcuggaacaguugccggauucggggugcccugcgccucgggcggaagcagaggauagcuuccuguag

SEQ ID NO: 902 - RNA, 942 nt, Artificial Sequence
  EAX03935
augcucuuguccaaaaucaacucgcuugcccaccugcgcgccgcgcccugcaacgaccugcacgccaccaagcuggcgcccggcaaggagaaggagccccuggagucgcaguaccaggugggcccgcuacugggcagcggcggcuucggcucggucuacucaggcauccgcgucuccgacaacuugccgguggccaucaaacacguggagaaggaccggauuuccgacuggggagagcugccuaauggcacucgagugcccauggaagugguccugcugaagaaggugagcucggguuucuccggcgucauuaggcuccuggacugguucgagaggcccgacaguuucguccugauccuggagaggcccgagccggugcaagaucucuucgacuucaucacggaaaggggagcccugcaagaggagcuggcccgcagcuucuucuggcaggugcuggaggccgugcggcacugccacaacugcggggugcuccaccgcgacaucaaggacgaaaacauccuuaucgaccucaaucgcggcgagcucaagcucaucgacuucgggucgggggcgcugcucaaggacaccgucuacacggacuucgaugggacccgaguguauagcccuccagaguggauccgcuaccaucgcuaccauggcaggucggcggcagucuggucccuggggauccugcuguaugauaugguguguggagauauuccuuucgagcaugacgaagagaucaucaggggccagguuuucuucaggcagagggucucuucagaaugucagcaucucauuagauggugcuuggcccugagaccaucagauaggccaaccuucgaagaaauccagaaccauccauggaugcaagauguucuccugccccaggaaacugcugagauccaccuccacagccugucgccggggcccagcaaauag

SEQ ID NO: 903 - RNA, 303 nt, Artificial Sequence
  AAB81333
auggcggacgaggagaaacugccgccuggcugggaaaagcgcaugagccgccccucaggccgaggguacuacuucaaccacaucacuaaccccagccagugggagcggcccagcgggaacagcagcaguggcggcaaaaucuggcagggggagcccgccaggguccgccgcucgcaccugcuagugaagccagucaaggcggcccucgaccuggcggcaggaaaucacccggaccaaggaggaggcccuggagcugaucagcggcuacauccagaagaucaaggcaggagagaaggacuuuga

SEQ ID NO: 904 - RNA, 492 nt, Artificial Sequence
  AAC50492
auggcggacgaggagaagcugccgcccggcugggagaagcgcaugagccgcagcucaggccgaguguacuacuucaaccacaucacuaacgccagccagugggagcggcccagcggcaacagcagcagugguggcaaaaacgggcagggggagccugccaggguccgcugcucgcaccugcuggugaagcacagccagucacggcggcccucguccuggcggcaggagaagaucacccggaccaaggaggaggcccuggagcugaucaacggcuacauccagaagaucaagucgggagaggaggacuuugagucucuggccucacaguucagcgacugcagcucagccaaggccaggggagaccugggugccuucagcagaggucagaugcagaagccauuugaagacgccucguuugcgcugcggacgggggagaugagcgggcccguguucacggauuccggcauccacaucauccuccgcacugaguga

SEQ ID NO: 905 - RNA, 138 nt, Artificial Sequence
  AAH31971
augcagaagccauuugaagacgccucguuugcgcugcggacgggggagaugagcgggcccguguucacggauuccggcauccacaucauccuccgcacugagugcuggaggcagacucgagggccgaauuguuucuag

SEQ ID NO: 906 - RNA, 639 nt, Artificial Sequence
  AAG22596
augaaaguuuuuaaguucauaggacugaugauccuccucaccucugcguuuucagccgguucaggacaaaguccaaugacugugcugugcuccauagacugguucauggucacagugcaccccuucaugcuaaacaacgauguguguguacacuuucaugaacuacacuugggccuggguugccccccaaaccauguucagccacacgccuaccaguucaccuaccguguuacugaauguggcaucagggccaaagcugucucucaggacaugguuaucuacagcacugagauacacuacucuucuaagggcacgccaucuaaguuugugaucccagugucaugugcugccccccaaaaguccccauggcucaccaagcccugcuccaugagaguagccagcaagagcagggccacagcccagaaggaugagaaaugcuacgagguguucagcuugucacaguccagucaaaggcccaacugcgauuguccaccuugugucuucagugaagaagagcauacccaggucccuugucaccaagcaggggcucaggaggcucaaccucugcagccaucucacuuucuugauauuucugaggauuggucucuucacacagaugauaugauuggguccauguga

SEQ ID NO: 907 - RNA, 1986 nt, Artificial Sequence
  AAB00386
auggaucuggugcuaaaaagaugccuucuucauuuggcugugauaggugcuuugcuggcugugggggcuacaaaaguacccagaaaccaggacuggcuuggugucucaaggcaacucagaaccaaagccuggaacaggcagcuguauccagaguggacagaagcccagagacuugacugcuggagagguggucaagugucccucaaggucaguaaugaugggccuacacugauuggugcaaaugccuccuucucuauugccuugaacuucccuggaagccaaaagguauugccagaugggcagguuaucugggucaacaauaccaucaucaaugggagccagguguggggaggacagccaguguauccccaggaaacugacgaugccugcaucuucccugaugguggaccuugcccaucuggcucuuggucucagaagagaagcuuuguuuaugucuggaagaccuggggccaauacuggcaaguucuagggggcccagugucugggcugagcauugggacaggcagggcaaugcugggcacacacaccauggaagugacugucuaccaucgccggggaucccggagcuaugugccucuugcucauuccagcucagccuucaccauuacugaccaggugccuuucuccgugagcgugucccaguugcgggccuuggauggagggaacaagcacuuccugagaaaucagccucugaccuuugcccuccagcuccaugaccccaguggcuaucuggcugaagcugaccucuccuacaccugggacuuuggagacaguaguggaacccugaucucucgggcacuuguggucacucauacuuaccuggagccuggcccagucacugcccaggugguccugcaggcugccauuccucucaccuccuguggcuccuccccaguuccaggcaccacagaugggcacaggccaacugcagaggccccuaacaccacagcuggccaagugccuacuacagaaguuguggguacuacaccuggucaggcgccaacugcagagcccucuggaaccacaucugugcaggugccaaccacugaagucauaagcacugcaccugugcagaugccaacugcagagagcacagguaugacaccugagaaggugccaguuucagaggucauggguaccacacuggcagagaugucaacuccagaggcuacagguaugacaccugcagagguaucaauuguggugcuuucuggaaccacagcugcacagguaacaacuacagaguggguggagaccacagcuagagagcuaccuaucccugagccugaagguccagaugccagcucaaucaugucuacggaaaguauuacagguucccugggcccccugcuggaugguacagccaccuuaaggcuggugaagagacaagucccccuggauuguguucuguaucgauaugguuccuuuuccgucacccuggacauuguccaggguauugaaagugccgagauccugcaggcugugccguccggugagggggaugcauuugagcugacuguguccugccaaggcgggcugcccaaggaagccugcauggagaucucaucgccagggugccagcccccugcccagcggcugugccagccugugcuacccagcccagccugccagcugguucugcaccagauacugaaggguggcucggggacauacugccucaaugugucucuggcugauaccaacagccuggcaguggucagcacccagcuuaucaugccuggucaagaagcaggccuugggcagguuccgcugaucgugggcaucuugcugguguugauggcugugguccuugcaucucugauauauaggcgcagacuuaugaagcaagacuucuccguaccccaguugccacauagcagcagucacuggcugcgucuaccccgcaucuucugcucuugucccauuggugagaauagcccccuccucagugggcagcaggucuga

SEQ ID NO: 908 - RNA, 2649 nt, Artificial Sequence
  CCDS10255.1
auggagccugcacccgcccgaucuccgaggccccagcaggaccccgcccggccccaggagcccaccaugccuccccccgagacccccucugaaggccgccagcccagccccagccccagcccuacagagcgagcccccgcuucggaggaggaguuccaguuucugcgcugccagcaaugccaggcggaagccaagugcccgaagcugcugccuugucugcacacgcugugcucaggaugccuggaggcgucgggcaugcagugccccaucugccaggcgcccuggccccuaggugcagacacacccgcccuggauaacgucuuuuucgagagucugcagcggcgccugucgguguaccggcagauuguggaugcgcaggcugugugcacccgcugcaaagagucggccgacuucuggugcuuugagugcgagcagcuccucugcgccaagugcuucgaggcacaccagugguuccucaagcacgaggcccggccccuagcagagcugcgcaaccagucggugcgugaguuccuggacggcacccgcaagaccaacaacaucuucugcuccaaccccaaccaccgcaccccuacgcugaccagcaucuacugccgaggauguuccaagccgcugugcugcucgugcgcgcuccuugacagcagccacagugagcucaagugcgacaucagcgcagagauccagcagcgacaggaggagcuggacgccaugacgcaggcgcugcaggagcaggauagugccuuuggcgcgguucacgcgcagaugcacgcggccgucggccagcugggccgcgcgcgugccgagaccgaggagcugauccgcgagcgcgugcgccaggugguagcucacgugcgggcucaggagcgcgagcugcuggaggcuguggacgcgcgguaccagcgcgacuacgaggagauggccagucggcugggccgccuggaugcugugcugcagcgcauccgcacgggcagcgcgcuggugcagaggaugaagugcuacgccucggaccaggaggugcuggacaugcacgguuuccugcgccaggcgcucugccgccugcgccaggaggagccccagagccugcaagcugccgugcgcaccgauggcuucgacgaguucaaggugcgccugcaggaccucagcucuugcaucacccaggggaaagaugcagcuguauccaagaaagccagcccagaggcugccagcacucccagggacccuauugacguugaccugcccgaggaggcagagagagugaaggcccagguucaggcccuggggcuggcugaagcccagccuauggcugugguacagucagugcccggggcacaccccgugccaguguacgccuucuccaucaaaggcccuuccuauggagaggaugucuccaauacaacgacagcccagaagaggaagugcagccagacccagugccccaggaaggucaucaagauggagucugaggaggggaaggaggcaagguuggcucggagcuccccggagcagcccaggcccagcaccuccaaggcagucucaccaccccaccuggauggaccgccuagccccaggagccccgucauaggaagugaggucuuccugcccaacagcaaccacguggccaguggcgccggggaggcagaggaacgcguuguggugaucagcagcucggaagacucagaugccgaaaacucguccucccgagagcuggaugacagcagcagugaguccagugaccuccagcuggaaggccccagcacccucaggguccuggacgagaaccuugcugacccccaagcagaagacagaccucugguuuucuuugaccucaagauugacaaugaaacccagaagauuagccagcuggcugcggugaaccgggaaagcaaguuccgcguggucauccagccugaagccuucuucagcaucuacuccaaggccgugucccuggagguggggcugcagcacuuccucagcuuucugagcuccaugcgccgcccuaucuuggccugcuacaagcugugggggccuggccucccaaacuucuuccgggcccuggaggacauuaacaggcugugggaauuccaggaggccaucucgggcuuccuggcugcccugccucucauccgggagcgugugcccggggccagcagcuucaaacucaagaaccuggcccagaccuaccuggcgagaaacaugagcgagcgcagcgccauggcugccgugcuggccaugcgugaccugugccgccuccucgaggucuccccgggcccccagcuggcccagcaugucuaccccuucaguagccugcagugcuuugccucccugcagccccuggugcaggcagcugugcugccccgggcugaggcccgccuccuggcccuacacaacgugagcuucauggagcugcugagugcacaccgccgugaccggcaggggggccugaagaaguacagccgcuaucuaagccugcagaccaccacguugcccccugcccagccugcuuucaaccugcaggcucugggcaccuacuuugaaggccuguuggaggguccggcgcuggcacgggcagaaggagucuccaccccacuugcuggccguggcuuggcagagagggccucccagcagagcuga

SEQ ID NO: 909 - RNA, 3228 nt, Artificial Sequence
  CCDS46409.1
auggugguugagguugauuccaugccggcugccucuucugugaagaagccauuuggucucaggagcaagaugggcaaguggugcugccguugcuuccccugcugcagggagagcggcaagagcaacgugggcacuucuggagaccacgacgacucugcuaugaagacacucaggagcaagaugggcaaguggugccgccacugcuuccccugcugcagggggaguggcaagagcaacgugggcgcuucuggagaccacgacgacucugcuaugaagacacucaggaacaagaugggcaaguggugcugccacugcuuccccugcugcagggggagcagcaagagcaaggugggcgcuuggggagacuacgaugacagugccuucauggagcccagguaccacguccguggagaagaucuggacaagcuccacagagcugccuggugggguaaaguccccagaaaggaucucaucgucaugcucagggacacugacgugaacaagcaggacaagcaaaagaggacugcucuacaucuggccucugccaaugggaauucagaaguaguaaaacuccugcuggacagacgaugucaacuuaauguccuugacaacaaaaagaggacagcucugauaaaggccguacaaugccaggaagaugaaugugcguuaauguugcuggaacauggcacugauccaaauauuccagaugaguauggaaauaccacucugcacuacgcuaucuauaaugaagauaaauuaauggccaaagcacugcucuuauauggugcugauaucgaaucaaaaaacaagcauggccucacaccacuguuacuugguguacaugagcaaaaacagcaagucgugaaauuuuuaauuaagaaaaaagcgaauuuaaaugcacuggauagauauggaagaacugcucucauacuugcuguauguuguggaucagcaaguauagucagccuucuacuugagcaaaauauugauguaucuucucaagaucuaucuggacagacggccagagaguaugcuguuucuagucaucaucauguaauuugccaguuacuuucugacuacaaagaaaaacagaugcuaaaaaucucuucugaaaacagcaauccagaacaagacuuaaagcugacaucagaggaagagucacaaagguucaaaggcagugaaaauagccagccagagaaaaugucucaagaaccagaaauaaauaaggauggugauagagagguugaagaagaaaugaagaagcaugaaaguaauaaugugggauuacuagaaaaccugacuaauggugucacugcuggcaauggugauaauggauuaauuccucaaaggaagagcagaacaccugaaaaucagcaauuuccugacaacgaaagugaagaguaucacagaauuugugaauuacuuucugacuacaaagaaaagcagaugccaaaauacucuucugaaaacagcaacccagaacaagacuuaaagcugacaucagaggaagagucacaaaggcuuaaaggcagugaaaauggccagccagagaaaagaucucaagaaccagaaauaaauaaggauggugauagagagcuagaaaauuuuauggcuaucgaagaaaugaagaagcacagaaguacucaugucggauucccagaaaaccugacuaauggugccacugcuggcaauggugaugauggauuaauuccuccaaggaagagcagaacaccugaaagccagcaauuuccugacacugagaaugaagaguaucacagugacgaacaaaaugauacucagaagcaauuuugugaagaacagaacacuggaauauuacacgaugagauucugauucaugaagaaaagcagauagaagugguugaaaaaaugaauucugagcuuucucuuaguuguaagaaagaaaaagacaucuugcaugaaaauaguacguugcgggaagaaauugccaugcuaagacuggagcuagacacaaugaaacaucagagccagcuaagagaaaagaaauauuuggaggauauugaaagugugaaaaaaaggaaugauaaucuuuuaaaggcucuacaauugaaugagcucaccauggaugaugauaccgcugugcucgucauugacaacggcucuggcaugugcaaggccggcuuugcgggcgacgaugccccccgggcugucuucccuuccaucguggggcgccccaggcagcagggcaugauggggggcaugcaucagaaagaguccuaugugggcaaggaggcccagagcaaaagaggcauccugacccugaaguaccccauggaacacggcaucaucaccaacugggaugacauggagaagaucuggcaccacaccuucuacaacgagcugcguguggcucccgaggagcaccccguccugcugaccgaggccacccugaacccuaaggccaaccgcgagaagaugacccagaucauguuugagaccuucaacaccccagccauguacguggccauccaggcugugcugucccuguacaccucuggccguacuacuggcaucgugauggacucuggugacggggucacccacacugugcccaucuaugaggggaaugcccucccccaugccacccugcgccuagaccuggcugggcgggaacugccugacuaccucaugaagauccucaccgagcauggcuauagguucaccaccauggccgagcgggaaaucgugcgugacaucaaagagaagcugugcuauguugcccuggacuucgagcaggagauggccacgguggccuccagcuccucccuagagaagagcuacgagcugcccgauggccaggucaucaccaucggcaacgagcgguuccgcugccccgaggcgcucuuccagccuugcuuccugggcauggaauccuguggcauccaugaaacuaccuucaacuccaucaugaagucugauguggacauccgcaaagaccuguacaccaacacagugcugucuggcggcaccaccauguacccuggcauggcccacagaaugcagaaggagaucgcugcccuggcgccuagcaugaugaagaucaggaucauugcuccucccaagcgcaaguacuccgugugggucgguggcuccauccuggccucgcuguccaccuuccagcagauguggaucagcaagcaggaguaugaugagucaggccccuccauuguccaccgcaaaugcuuguag

SEQ ID NO: 910 - RNA, 1755 nt, Artificial Sequence
  CCDS13562.1
augguggcugagguuuguucaaugcccacugccucuacugugaagaagccauuugaucucaggagcaagaugggcaaguggugccaccaccgcuuccccugcugcagggggagcggcaagagcaacaugggcacuucuggagaccacgacgacuccuuuaugaagaugcucaggagcaagaugggcaaguguugccgccacugcuuccccugcugcagggggagcggcacgagcaacgugggcacuucuggagaccaugaaaacuccuuuaugaagaugcucaggagcaagaugggcaaguggugcugucacugcuuccccugcugcagggggagcggcaagagcaacgugggcgcuuggggagacuacgaccacagcgccuucauggagccgagguaccacauccgucgagaagaucuggacaagcuccacagagcugccuggugggguaaaguccccagaaaggaucucaucgucaugcucagggacacugacaugaacaagagggacaaggaaaagaggacugcucuacauuuggccucugccaauggaaauucagaaguaguacaacuccugcuggacagacgaugucaacuuaauguccuugacaacaaaaaaaggacagcucugauaaaggccauacaaugccaggaagaugaauguguguuaauguugcuggaacauggcgcugaucgaaauauuccagaugaguauggaaauaccgcucuacacuaugcuaucuacaaugaagauaaauuaauggccaaagcacugcucuuauauggugcugauauugaaucaaaaaacaaguguggccucacaccacuuuugcuuggcguacaugaacaaaaacagcaaguggugaaauuuuuaaucaagaaaaaagcuaauuuaaauguacuugauagauauggaagaacugcccucauacuugcuguauguuguggaucagcaaguauagucaaucuucuacuugagcaaaauguugauguaucuucucaagaucuaucuggacagacggccagagaguaugcuguuucuagucaucaucauguaauuugugaauuacuuucugacuauaaagaaaaacagaugcuaaaaaucucuucugaaaacagcaauccagaacaagacuuaaagcugacaucagaggaagagucacaaaggcuuaaagucagugaaaauagccagccagagaaaaugucucaagaaccagaaauaaauaaggacugugauagagagguugaagaagaaauaaagaagcauggaaguaauccugugggauuaccagaaaaccugacuaauggugccagugcuggcaauggugaugauggauuaauuccacaaaggaggagcagaaaaccugaaaaucagcaauuuccugacacugagaaugaagaguaucacagugaugaacaaaaugauacccggaaacaacuuucugaagaacagaacacuggaauaucacaagaugagauucugacuaauaaacaaaagcagauagaaguggcugaacagaaaaugaauucugagcuuucucuuagucauaagaaagaagaagaucucuugcgugaaaacagcguguugcaggaagaaauugccaugcuaagacuggaacuagaugaaacaaaacaucagaaccagcuaagggaaaauaaaauuuuggaggaaauugaaagugugaaagaaaagacugauaaacuucuaagggcuaugcaauugaaugaagaagcauuaacgaaaaccaauauuuaa

SEQ ID NO: 911 - RNA, 1530 nt, Artificial Sequence
  EAW59519
auggaacgaaggcguuugugggguuccauucagagccgauacaucagcaugaguguguggacaagcccacggagacuuguggagcuggcagggcagagccugcugaaggaugaggcccuggccauugccgcccuggaguugcugcccagggagcucuucccgccacucuucauggcagccuuugacgggagacacagccagacccugaaggcaauggugcaggccuggcccuucaccugccucccucugggagugcugaugaagggacaacaucuucaccuggagaccuucaaagcugugcuugauggacuugaugugcuccuugcccaggagguucgccccaggagguggaaacuucaagugcuggauuuacggaagaacucucaucaggacuucuggacuguauggucuggaaacagggccagucuguacucauuuccagagccagaagcagcucagcccaugacaaagaagcgaaaaguagaugguuugagcacagaggcagagcagcccuucauuccaguagaggugcucguagaccuguuccucaaggaaggugccugugaugaauuguucuccuaccucauugagaaagugaagcgaaagaaaaauguacuacgccugugcuguaagaagcugaagauuuuugcaaugcccaugcaggauaucaagaugauccugaaaauggugcagcuggacucuauugaagauuuggaagugacuuguaccuggaagcuacccaccuuggcgaaauuuucuccuuaccugggccagaugauuaaucugcguagacuccuccucucccacauccaugcaucuuccuacauuuccccggagaaggaagagcaguauaucgcccaguucaccucucaguuccucagucugcagugccugcaggcucucuauguggacucuuuauuuuuccuuagaggccgccuggaucaguugcucaggcacgugaugaaccccuuggaaacccucucaauaacuaacugccggcuuucggaaggggaugugaugcaucugucccagagucccagcgucagucagcuaaguguccugagucuaaguggggucaugcugaccgauguaagucccgagccccuccaagcucugcuggagagagccucugccacccuccaggaccuggucuuugaugagugugggaucacggaugaucagcuccuugcccuccugccuucccugagccacugcucccagcuuacaaccuuaagcuucuacgggaauuccaucuccauaucugccuugcagagucuccugcagcaccucaucgggcugagcaaucugacccacgugcuguauccugucccccuggagaguuaugaggacauccaugguacccuccaccuggagaggcuugccuaucugcaugccaggcucagggaguugcugugugaguuggggcggcccagcauggucuggcuuagugccaaccccuguccucacuguggggacagaaccuucuaugacccggagcccauccugugccccuguuucaugccuaacuag

SEQ ID NO: 912 - RNA, 1530 nt, Artificial Sequence; identical to SEQ ID NO: 911
  AAC51160

SEQ ID NO: 913 - RNA, 645 nt, Artificial Sequence
  CCDS8069.1
augggacuagcuggcgugugcgcccugagacgcucagcgggcuauauacucgucgguggggccggcggucagucugcggcagcggcagcaagacgguacagugaaggagagugggcgucuggcgggguccgcaguuucagcagagccgcugcagccauggccccaaucaaggugggagaugccaucccagcaguggagguguuugaaggggagccagggaacaaggugaaccuggcagagcuguucaagggcaagaagggugugcuguuuggaguuccuggggccuucaccccuggauguuccaagacacaccugccaggguuuguggagcaggcugaggcucugaaggccaagggaguccaggugguggccugucugaguguuaaugaugccuuugugacuggcgaguggggccgagcccacaaggcggaaggcaagguucggcuccuggcugaucccacuggggccuuugggaaggagacagacuuauuacuagaugauucgcugguguccaucuuugggaaucgacgucucaagagguucuccauggugguacaggauggcauagugaaggcccugaauguggaaccagauggcacaggccucaccugcagccuggcacccaauaucaucucacagcucuga

SEQ ID NO: 914 - RNA, 309 nt, Artificial Sequence
  AAA63250
augguccgauaccgcgugaggagccugagcgaacgcucgcacgagguguacaggcagcaguugcaugggcaagagcaaggacaccacggccaagaggagcaagggcugagcccggagcacgucgaggucuacgagaggacccauggccagucucacuauaggcgcagacacugcucucgaaggaggcugcaccggauccacaggcggcagcaucgcuccugcagaaggcgcaaaagacgcuccugcaggcaccggaggaggcaucgcagaggcugcagaaccaggaagagaacaugcagaaggcacuaa

SEQ ID NO: 915 - RNA, 1662 nt, Artificial Sequence
  AAH50416
augguccagaggcugugggugagccgccugcugcggcaccggaaagcccagcucuugcuggucaaccugcuaaccuuuggccuggagguguguuuggccgcaggcaucaccuaugugccgccucugcugcuggaaguggggguagaggagaaguucaugaccauggugcugggcauugguccagugcugggccuggucugugucccgcuccuaggcucagccagugaccacuggcguggacgcuauggccgccgccggcccuucaucugggcacuguccuugggcauccugcugagccucuuucucaucccaagggccggcuggcuagcagggcugcugugcccggaucccaggccccuggagcuggcacugcucauccugggcguggggcugcuggacuucuguggccaggugugcuucacuccacuggaggcccugcucucugaccucuuccgggacccggaccacugucgccaggccuacucugucuaugccuucaugaucagucuugggggcugccugggcuaccuccugccugccauugacugggacaccagugcccuggcccccuaccugggcacccaggaggagugccucuuuggccugcucacccucaucuuccucaccugcguagcagccacacugcugguggcugaggaggcagcgcugggccccaccgagccagcagaagggcugucggcccccuccuugucgccccacugcuguccaugccgggcccgcuuggcuuuccggaaccugggcgcccugcuuccccggcugcaccagcugugcugccgcaugccccgcacccugcgccggcucuucguggcugagcugugcagcuggauggcacucaugaccuucacgcuguuuuacacggauuucgugggcgaggggcuguaccagggcgugcccagagcugagccgggcaccgaggcccggagacacuaugaugaaggcguucggaugggcagccuggggcuguuccugcagugcgccaucucccuggucuucucucuggucauggaccggcuggugcagcgauucggcacucgagcagucuauuuggccaguguggcagcuuucccuguggcugccggugccacaugccugucccacaguguggccguggugacagcuucagccgcccucaccggguucaccuucucagcccugcagauccugcccuacacacuggccucccucuaccaccgggagaagcagguguuccugcccaaauaccgaggggacacuggaggugcuagcagugaggacagccugaugaccagcuuccugccaggcccuaagccuggagcucccuucccuaauggacacgugggugcuggaggcaguggccugcucccaccuccacccgcgcucugcggggccucugccugugaugucuccguacgugugguggugggugagcccaccgaggccagggugguuccgggccggggcaucugccuggaccucgccauccuggauagugccuuccugcugucccagguggccccaucccuguuuaugggcuccauuguccagcucagccagucugucacugccuauauggugucugccgcaggccugggucuggucgccauuuacuuugcuacacagguaguauuugacaagagcgacuuggccaaauacucagcguag

SEQ ID NO: 916 - RNA, 648 nt, Artificial Sequence
  CBI83574
auggccucccugcagaugcgggggaacccgggcagccacuucugcggaggcaccuugauccaccccagcuucgugcugacggccgcgcacugccugcgggacauaccccagcgccuggugaacguggugcucggagcccacaacgugcggacgcaggagcccacccagcagcacuucucgguggcucagguguuucugaacaacuacgacgcggagaacaaacugaacgacauucuccucauccagcugagcagcccagccaaccucagugccuccgucgccacaguccagcugccacagcaggaccagccagugccccacggcacccagugccuggccaugggcuggggccgcgugggugcccacgaccccccagcccagguccugcaggagcucaaugucaccguggugaccuucuucugccggccacauaacauuugcacuuucgucccucgccgcaaggccggcaucugcuucggagacucagguggcccccugaucugugauggcaucauccaaggaauagacuccuucgugaucuggggaugugccacccgccuuuucccugacuucuucacgcggguagcccucuacguggacuggauccguuccacgcugcgccguguggaggccaagggccgccccuga

SEQ ID NO: 917 - RNA, 771 nt, Artificial Sequence
  AAH96183
auggcucaccggccccccagcccugcccuggcguccgugcugcuggccuugcugcugagcggugcugcccgagcugcggagaucgugggcgggcacgaggcgcagccacacucccggcccuacauggccucccugcagaugcgggggaacccgggcagccacuucugcggaggcaccuugauccaccccagcuucgugcugacggccgcgcacugccugcgggacauaccccagcgccuggugaacguggugcucggagcccacaacgugcggacgcaggagcccacccagcagcacuucucgguggcucagguguuucugaacaacuacgacgcggagaacaaacugaacgacguucuccucauccagcugagcagcccagccaaccucagugccuccgucgccacaguccagcugccacagcaggaccagccagugccccacggcacccagugccuggccaugggcuggggccgcgugggugcccacgaccccccagcccagguccugcaggagcucaaugucaccguggucaccuucuucugccggccacauaacauuugcacuuucgucccucgccgcaaggccggcaucugcuucggagacucagguggcccccugaucugugauggcaucauccaaggaauagacuccuucgugaucuggggaugugccacccgccuuuucccugacuucuucacgcggguagcccucuacguggacuggauccguuccacgcugcgccguguggaggccaagggccgccccuga

SEQ ID NO: 918 - RNA, 2760 nt, Artificial Sequence
  CCDS45721.1
auguggcuggcagcugccgcccccucccucgcucgccgccugcucuuccucggcccuccgccuccuccccuccuccuucucgucuucagccgcuccucucgccgccgccuccacagccugggccucgccgcgaugccggagaagaggcccuucgagcggcugccugccgaugucucccccaucaacuacagccuuugccucaagcccgacuugcuggacuucaccuucgagggcaagcuggaggccgccgcccaggugaggcaggcgacuaaucagauugugaugaauugugcugauauugauauuauuacagcuucauaugcaccagaaggagaugaagaaauacaugcuacaggauuuaacuaucagaaugaagaugaaaaagucaccuugucuuucccuaguacucugcaaacagguacgggaaccuuaaagauagauuuuguuggagagcugaaugacaaaaugaaagguuucuauagaaguaaauauacuaccccuucuggagaggugcgcuaugcugcuguaacacaguuugaggcuacugaugcccgaagggcuuuuccuugcugggaugagccugcuaucaaagcaacuuuugauaucucauugguuguuccuaaagacagaguagcuuuaucaaacaugaauguaauugaccggaaaccauacccugaugaugaaaauuuaguggaagugaaguuugcccgcacaccuguuaugucuacauaucugguggcauuuguugugggugaauaugacuuuguagaaacaaggucaaaagaugguguguguguccguguuuacacuccuguuggcaaagcagagcaaggaaaauuugcguuagagguugcugcuaaaaccuugccuuuuuauaaggacuacuucaauguuccuuauccucuaccuaaaauugaucucauugcuauugcagacuuugcagcuggugccauggagaacuggggccuuguuacuuauagggagacugcauugcuuauugauccaaaaaauuccuguucuucaucccgccaguggguugcucugguugugggacaugaacucgcccaucaaugguuuggaaaucuuguuacuauggaaugguggacucaucuuugguuaaaugaagguuuugcauccuggauugaauaucuguguguagaccacugcuucccagaguaugauauuuggacucaguuuguuucugcugauuacacccgugcccaggagcuugacgccuuagauaacagccauccuauugaagucagugugggccauccaucugagguugaugagauauuugaugcuauaucauauagcaaaggugcaucugucauccgaaugcugcaugacuacauuggggauaaggacuuuaagaaaggaaugaacauguauuuaaccaaguuccaacaaaagaaugcugccacagaggaucucugggaaaguuuagaaaaugcuagugguaaaccuauagcagcugugaugaauaccuggaccaaacaaaugggauuuccccucauuuauguggaagcugaacagguagaagaugacagauuauugagguugucccaaaagaaguucugugcuggugggucauauguuggugaagauuguccccaguggauggucccuaucacaaucucuacuagugaagaccccaaccaggccaaacuaaaaauucuaauggacaagccagagaugaaugugguuuugaaaaaugucaaaccagaccaaugggugaaguuaaacuuaggaacaguuggguuuuaucggacccaguacagcucugccaugcuggaaaguuuauuaccaggcauucgugaccuuucucugcccccuguggaucgacuuggauuacagaaugaccucuucuccuuggcucgagcuggaaucauuagcacuguagagguucuaaaagucauggaggcuuuugugaaugagcccaauuauacuguauggagcgaccugagcuguaaccuggggauucucucaacucucuugucccacacagacuucuaugaggaaauccaggaguuugugaaagaugucuuuucaccuauaggggagagacugggcugggaccccaaaccuggagaaggucaucucgaugcacuccugaggggcuugguucugggaaaacuaggaaaagcaggacauaaggcaacguuagaagaagcccgucgucgguuuaaggaccacguggaaggaaaacagauucucuccgcugaucugaggaguccugucuaucugacuguuuugaagcauggugauggcacuacuuuagauauuauguuaaaacuucauaaacaagcagauaugcaagaagagaaaaaccgaaucgaaagaguccuuggcgcuacucuuuugccugaccugauucaaaaaguccucacguuugcacuuucagaagagguacguccacaggacacuguaucgguaauugguggaguagcuggaggcagcaagcaugguaggaaagcugcuuggaaauucauaaaggacaacugggaagaacuuuauaaccgauaccagggaggauucuuaauauccagacuaauaaagcuaucaguugagggauuugcaguugauaaaauggcuggagagguuaaggcuuucuucgagagucacccagcuccuucagcugagcguaccauccagcaguguugugaaaauauucugcugaaugcugccuggcuaaagcgagaugcugagagcauccaccaguaccuccuucagcggaaggccucaccacccacaguguga

SEQ ID NO: 919 - RNA, 660 nt, Artificial Sequence
  AAH65513
augcugcgggcgggagcaccaaccggggacuuaccccgggcgggagaaguccacaccgggaccaccaucauggcaguggaguuugacgggggcguugugauggguucugauucccgagugucugcaggcgaggcgguggugaaccgaguguuugacaagcuguccccgcugcacgagcgcaucuacugugcacucucugguucagcugcugaugcccaagccguggccgacauggccgccuaccagcuggagcuccaugggauagaacuggaggaaccuccacuuguuuuggcugcugcaaauguggugagaaauaucagcuauaaauaucgagaggacuugucugcacaucucaugguagcuggcugggaccaacgugaaggaggucagguauauggaacccugggaggaaugcugacucgacagccuuuugccauugguggcuccggcagcaccuuuaucuaugguuauguggaugcagcauauaagccaggcaugucucccgaggagugcaggcgcuucaccacagacgcuauugcucuggccaugagccgggauggcucaagcgggggugucaucuaccuggucacuauuacagcugccgguguggaccaucgagucaucuugggcaaugaacugccaaaauucuaugaugaguga

SEQ ID NO: 920 - RNA, 345 nt, Artificial Sequence
  EAW82312
auggcaggcuuggcccugcagccaggcacugcccugcugugcuacuccugcaaagcccaggugagcaacgaggacugccugcagguggagaacugcacccagcugggggagcagugcuggaccgcgcgcauccgcgcaguuggccuccugaccgucaucagcaaaggcugcagcuugaacugcguggaugacucacaggacuacuacgugggcaagaagaacaucacgugcugugacaccgacuugugcaacgccagcggggcccaugcccugcagccggcugcugccauccuugcgcugcucccugcacucggccugcugcucuggggacccggccagcucuag

SEQ ID NO: 921 - RNA, 372 nt, Artificial Sequence
  AAC39607
augaaggcugugcugcuugcccuguugauggcaggcuuggcccugcagccaggcacugcccugcugugcuacuccugcaaagcccaggugagcaacgaggacugccugcagguggagaacugcacccagcugggggagcagugcuggaccgcgcgcauccgcgcaguuggccuccugaccgucaucagcaaaggcugcagcuugaacugcguggaugacucacaggacuacuacgugggcaagaagaacaucacgugcugugacaccgacuugugcaacgccagcggggcccaugcccugcagccggcugccgccauccuugcgcugcucccugcacucggccugcugcucuggggacccggccagcuauag

SEQ ID NO: 922 - RNA, 963 nt, Artificial Sequence
  AAG40776
augaguuccugcaacuucacacaugccaccuuugugcuuauugguaucccaggauuagagaaagcccauuucuggguuggcuucccccuccuuuccauguauguaguggcaauguuuggaaacugcaucguggucuucaucguaaggacggaacgcagccugcacgcuccgauguaccucuuucucugcaugcuugcagccauugaccuggccuuauccacauccaccaugccuaagauccuugcccuuuucugguuugauucccgagagauuagcuuugaggccugucuuacccagauguucuuuauucaugcccucucagccauugaauccaccauccugcuggccauggccuuugaccguuauguggccaucugccacccacugcgccaugcugcagugcucaacaauacaguaacagcccagauuggcaucguggcugugguccgcggaucccucuuuuuuuucccacugccucugcugaucaagcggcuggccuucugccacuccaauguccucucgcacuccuauuguguccaccaggauguaaugaaguuggccuaugcagacacuuugcccaaugugguauauggucuuacugccauucugcuggucaugggcguggacguaauguucaucuccuuguccuauuuucugauaauacgaacgguucugcaacugccuuccaagucagagcgggccaaggccuuuggaaccugugugucacacauuggugugguacucgccuucuaugugccacuuauuggccucucaguuguacaccgcuuuggaaacagccuucaucccauugugcguguugucaugggugacaucuaccugcugcugccuccugucaucaaucccaucaucuauggugccaaaaccaaacagaucagaacacgggugcuggcuauguucaagaucagcugugacaaggacuugcaggcugugggaggcaaguga

SEQ ID NO: 923 - RNA, 2253 nt, Artificial Sequence
  AAA60209
auguggaaucuccuucacgaaaccgacucggcuguggccaccgcgcgccgcccgcgcuggcugugcgcuggggcgcuggugcuggcggguggcuucuuucuccucggcuuccucuucgggugguuuauaaaauccuccaaugaagcuacuaacauuacuccaaagcauaauaugaaagcauuuuuggaugaauugaaagcugagaacaucaagaaguucuuauauaauuuuacacagauaccacauuuagcaggaacagaacaaaacuuucagcuugcaaagcaaauucaaucccaguggaaagaauuuggccuggauucuguugagcuagcacauuaugauguccuguuguccuacccaaauaagacucaucccaacuacaucucaauaauuaaugaagauggaaaugagauuuucaacacaucauuauuugaaccaccuccuccaggauaugaaaauguuucggauauuguaccaccuuucagugcuuucucuccucaaggaaugccagagggcgaucuaguguauguuaacuaugcacgaacugaagacuucuuuaaauuggaacgggacaugaaaaucaauugcucugggaaaauuguaauugccagauaugggaaaguuuucagaggaaauaagguuaaaaaugcccagcuggcaggggccaaaggagucauucucuacuccgacccugcugacuacuuugcuccuggggugaaguccuauccagaugguuggaaucuuccuggaggugguguccagcguggaaauauccuaaaucugaauggugcaggagacccucucacaccagguuacccagcaaaugaauaugcuuauaggcguggaauugcagaggcuguuggucuuccaaguauuccuguucauccaauuggauacuaugaugcacagaagcuccuagaaaaaauggguggcucagcaccaccagauagcagcuggagaggaagucucaaagugcccuacaauguuggaccuggcuuuacuggaaacuuuucuacacaaaaagucaagaugcacauccacucuaccaaugaagugacaagaauuuacaaugugauagguacucucagaggagcaguggaaccagacagauaugucauucugggaggucaccgggacucauggguguuuggugguauugacccucagaguggagcagcuguuguucaugaaauugugaggagcuuuggaacacugaaaaaggaaggguggagaccuagaagaacaauuuuguuugcaagcugggaugcagaagaauuuggucuucuugguucuacugagugggcagaggagaauucaagacuccuucaagagcguggcguggcuuauauuaaugcugacucaucuauagaaggaaacuacacucugagaguugauuguacaccgcugauguacagcuugguacacaaccuaacaaaagagcugaaaagcccugaugaaggcuuugaaggcaaaucucuuuaugaaaguuggacuaaaaaaaguccuuccccagaguucaguggcaugcccaggauaagcaaauugggaucuggaaaugauuuugagguguucuuccaacgacuuggaauugcuucaggcagagcacgguauacuaaaaauugggaaacaaacaaauucagcggcuauccacuguaucacagugucuaugaaacauaugaguugguggaaaaguuuuaugauccaauguuuaaauaucaccucacuguggcccagguucgaggagggaugguguuugagcuagccaauuccauagugcucccuuuugauugucgagauuaugcuguaguuuuaagaaaguaugcugacaaaaucuacaguauuucuaugaaacauccacaggaaaugaagacauacaguguaucauuugauucacuuuuuucugcaguaaagaauuuuacagaaauugcuuccaaguucagugagagacuccaggacuuugacaaaagcaacccaauaguauuaagaaugaugaaugaucaacucauguuucuggaaagagcauuuauugauccauuaggguuaccagacaggccuuuuuauaggcaugucaucuaugcuccaagcagccacaacaaguaugcaggggagucauucccaggaauuuaugaugcucuguuugauauugaaagcaaaguggacccuuccaaggccuggggagaagugaagagacagauuuauguugcagccuucacagugcaggcagcugcagagacuuugagugaaguagccuaa

SEQ ID NO: 924 - RNA, 3921 nt, Artificial Sequence
  CCDS1397.2
augaccauguauuuguggcuuaaacucuuggcauuuggcuuugccuuucuggacacagaaguauuugugacagggcaaagcccaacaccuucccccacuggauugacuacagcaaagaugcccaguguuccacuuucaagugaccccuuaccuacucacaccacugcauucucacccgcaagcaccuuugaaagagaaaaugacuucucagagaccacaacuucucuuaguccagacaauacuuccacccaaguauccccggacucuuuggauaaugcuagugcuuuuaauaccacagguguuucaucaguacagacgccucaccuucccacgcacgcagacucgcagacgcccucugcuggaacugacacgcagacauucagcggcuccgccgccaaugcaaaacucaacccuaccccaggcagcaaugcuaucucagaugucccaggagagaggaguacagccagcaccuuuccuacagacccaguuuccccauugacaaccacccucagccuugcacaccacagcucugcugccuuaccugcacgcaccuccaacaccaccaucacagcgaacaccucagaugccuaccuuaaugccucugaaacaaccacucugagcccuucuggaagcgcugucauuucaaccacaacaauagcuacuacuccaucuaagccaacaugugaugaaaaauaugcaaacaucacuguggauuacuuauauaacaaggaaacuaaauuauuuacagcaaagcuaaauguuaaugagaauguggaauguggaaacaauacuugcacaaacaaugaggugcauaaccuuacagaauguaaaaaugcgucuguuuccauaucucauaauucauguacugcuccugauaagacauuaauauuagaugugccaccagggguugaaaaguuucaguuacaugauuguacacaaguugaaaaagcagauacuacuauuuguuuaaaauggaaaaauauugaaaccuuuacuugugauacacagaauauuaccuacagauuucagugugguaauaugauauuugauaauaaagaaauuaaauuagaaaaccuugaacccgaacaugaguauaagugugacucagaaauacucuauaauaaccacaaguuuacuaacgcaaguaaaauuauuaaaacagauuuugggaguccaggagagccucagauuauuuuuuguagaagugaagcugcacaucaaggaguaauuaccuggaaucccccucaaagaucauuucauaauuuuacccucuguuauauaaaagagacagaaaaagauugccucaaucuggauaaaaaccugaucaaauaugauuugcaaaauuuaaaaccuuauacgaaauauguuuuaucauuacaugccuacaucauugcaaaagugcaacguaauggaagugcugcaaugugucauuucacaacuaaaagugcuccuccaagccaggucuggaacaugacugucuccaugacaucagauaauaguaugcaugucaaguguaggccucccagggaccguaauggcccccaugaacguuaccauuuggaaguugaagcuggaaauacucugguuagaaaugagucgcauaagaauugcgauuuccguguaaaagaucuucaauauucaacagacuacacuuuuaaggccuauuuucacaauggagacuauccuggagaacccuuuauuuuacaucauucaacaucuuauaauucuaaggcacugauagcauuucuggcauuucugauuauugugacaucaauagcccugcuuguuguucucuacaaaaucuaugaucuacauaagaaaagauccugcaauuuagaugaacagcaggagcuuguugaaagggaugaugaaaaacaacugaugaauguggagccaauccaugcagauauuuuguuggaaacuuauaagaggaagauugcugaugaaggaagacuuuuucuggcugaauuucagagcaucccgcggguguucagcaaguuuccuauaaaggaagcucgaaagcccuuuaaccagaauaaaaaccguuauguugacauucuuccuuaugauuauaaccguguugaacucucugagauaaacggagaugcagggucaaacuacauaaaugccagcuauauugaugguuucaaagaacccaggaaauacauugcugcacaaggucccagggaugaaacuguugaugauuucuggaggaugauuugggaacagaaagccacaguuauugucauggucacucgaugugaagaaggaaacaggaacaagugugcagaauacuggccgucaauggaagagggcacucgggcuuuuggagauguuguuguaaagaucaaccagcacaaaagauguccagauuacaucauucagaaauugaacauuguaaauaaaaaagaaaaagcaacuggaagagaggugacucacauucaguucaccagcuggccagaccacggggugccugaggauccucacuugcuccucaaacugagaaggagagugaaugccuucagcaauuucuucaguggucccauuguggugcacugcagugcugguguugggcgcacaggaaccuauaucggaauugaugccaugcuagaaggccuggaagccgagaacaaaguggauguuuaugguuauguugucaagcuaaggcgacagagaugccugaugguucaaguagaggcccaguacaucuugauccaucaggcuuugguggaauacaaucaguuuggagaaacagaagugaauuugucugaauuacauccauaucuacauaacaugaagaaaagggauccacccagugagccgucuccacuagaggcugaauuccagagacuuccuucauauaggagcuggaggacacagcacauuggaaaucaagaagaaaauaaaaguaaaaacaggaauucuaaugucaucccauaugacuauaacagagugccacuuaaacaugagcuggaaaugaguaaagagagugagcaugauucagaugaauccucugaugaugacagugauucagaggaaccaagcaaauacaucaaugcaucuuuuauaaugagcuacuggaaaccugaagugaugauugcugcucagggaccacugaaggagaccauuggugacuuuuggcagaugaucuuccaaagaaaagucaaaguuauuguuaugcugacagaacugaaacauggagaccaggaaaucugugcucaguacuggggagaaggaaagcaaacauauggagauauugaaguugaccugaaagacacagacaaaucuucaacuuauacccuucgugucuuugaacugagacauuccaagaggaaagacucucgaacuguguaccaguaccaauauacaaacuggaguguggagcagcuuccugcagaacccaaggaauuaaucucuaugauucaggucgucaaacaaaaacuuccccagaagaauuccucugaagggaacaagcaucacaagaguacaccucuacucauucacugcagggauggaucucagcaaacgggaauauuuugugcuuuguuaaaucucuuagaaagugcggaaacagaagagguaguggauauuuuucaagugguaaaagcucuacgcaaagcuaggccaggcaugguuuccacauucgagcaauaucaauuccuauaugacgucauugccagcaccuacccugcucagaauggacaaguaaagaaaaacaaccaucaagaagauaaaauugaauuugauaaugaaguggacaaaguaaagcaggaugcuaauuguguuaauccacuuggugccccagaaaagcucccugaagcaaaggaacaggcugaagguucugaacccacgaguggcacugaggggccagaacauucugucaaugguccugcaaguccagcuuuaaaucaagguucauag

SEQ ID NO: 925 - RNA, 624 nt, Artificial Sequence
  AAH02977
auggcgaagaccuacgauuaccuguucaagcugcugcugaucggggacucggggguggggaagaccuguguccuguuccgcuucuccgaggacgccuucaacuccacuuuuaucuccaccauaggaauugacuuuaaaauuaggaccauagagcucgauggcaagagaauuaaacugcagauaugggacacagccggucaggaacgguuucggacgaucacaacggccuacuacaggggugcaaugggcaucaugcuggucuacgacaucaccaacgagaaguccuucgacaacauccggaacuggauucgcaacauugaggagcacgccucugcagacgucgaaaagaugauacucgggaacaagugugaugugaaugacaagagacaaguuuccaaggaacggggagaaaagcuggcccucgacuauggaaucaaguucauggagaccagcgcgaaggccaacaucaauguggaaaaugcauuuuucacucucgccagagauaucaaagcaaaaauggacaaaaaauuggaaggcaacagcccccaggggagcaaccagggagucaaaaucacaccggaccagcagaagaggagcagcuuuuuccgauguguucuucuguga

SEQ ID NO: 926 - RNA, 1260 nt, Artificial Sequence
  BAA81688
augaagaacuauaaagcaauuggcaaaauaggagagggaacguuuucugaaguuaugaagaugcaaagccugagagauggaaacuacuaugcauguaaacaaaugaagcagcgcuuugaaaguauugagcaagucaacaaccuacgagagauccaagcacugaggcgccugaauccgcacccaaacauucuuauguugcaugaagugguuuuugacagaaaaucugguucucuugcacuaauaugugaacuuauggacaugaauauuuaugagcuaauacgagggagaagauacccauuaucagaaaaaaaaauuaugcacuauauguaccaguuauguaagucccuggaucauauucacagaaauggaauauuucacagagauguaaaaccagaaaauauacuaauaaagcaggauguccugaaauuaggggacuuuggcuccugccggagugucuauuccaagcagccguacacggaauacaucuccacccgcugguaccgggccccggagugucuccucacugauggguucuacacguacaagauggaccuguggagcgccggcuguguguucuacgagaucgccagucugcagccccucuuuccuggaguaaaugaacuggaccaaaucucaaaaauccacgaugucaucggcacacccgcucagaagauccucaccaaguucaaacagucgagagcuaugaauuuugauuuuccuuuuaaaaagggaucaggaauaccucuacuaacaaccaauuuguccccacaaugccucucccuccugcacgcaaugguggccuaugaucccgaugagagaaucgccgcccaccaggcccugcagcaccccuacuuccaagaacagaggaaaacagagaagcgggcucugggcagccacagaaaagcuggcuuuccggagcacccuguggcaccggaaccacucaguaacagcugccagauuuccaaggagggcagaaagcagaaacagucccuaaagcaagaggaggaccgucccaagagacgaggaccggccuaugucauggaacugcccaaacuaaagcuuucgggaguggucagacugucgucuuacuccagccccacgcugcaguccgugcuuggaucuggaacaaauggaagagugccggugcugagacccuugaagugcaucccugcgagcaagaagacagauccgcagaaggaccuuaagccugccccgcagcagugucgccugcccaccauagugcggaaaggcggaagauaa

SEQ ID NO: 927 - RNA, 1389 nt, Artificial Sequence
  AAH08727
auggccagcaacagcagcuccugcccgacaccugggggcgggcaccucaauggguacccggugccucccuacgccuucuucuuccccccuaugcuggguggacucuccccgccaggcgcucugaccacucuccagcaccagcuuccaguuaguggauauagcacaccauccccagccaccauugagacccagagcagcaguucugaagagauagugcccagcccucccucgccacccccucuaccccgcaucuacaagccuugcuuugucugucaggacaaguccucaggcuaccacuauggggucagcgccugugagggcugcaagggcuucuuccgccgcagcauccagaagaacaugguguacacgugucaccgggacaagaacugcaucaucaacaaggugacccggaaccgcugccaguacugccgacugcagaagugcuuugaagugggcauguccaaggagucugugagaaacgaccgaaacaagaagaagaaggaggugcccaagcccgagugcucugagagcuacacgcugacgccggaggugggggagcucauugagaaggugcgcaaagcgcaccaggaaaccuucccugcccucugccagcugggcaaauacacuacgaacaacagcucagaacaacgugucucucuggacauugaccucugggacaaguucagugaacucuccaccaagugcaucauuaagacuguggaguucgccaagcagcugcccggcuucaccacccucaccaucgccgaccagaucacccuccucaaggcugccugccuggacauccugauccugcggaucugcacgcgguacacgcccgagcaggacaccaugaccuucucggacgggcugacccugaaccggacccagaugcacaacgcuggcuucggcccccucaccgaccuggucuuugccuucgccaaccagcugcugccccuggagauggaugaugcggagacggggcugcucagcgccaucugccucaucugcggagaccgccaggaccuggagcagccggaccggguggacaugcugcaggagccgcugcuggaggcgcuaaaggucuacgugcggaagcggaggcccagccgcccccacauguuccccaagaugcuaaugaagauuacugaccugcgaagcaucagcgccaagggggcugagcgggugaucacgcugaagauggagaucccgggcuccaugccgccucucauccaggaaauguuggagaacucagagggccuggacacucugagcggacagccgggggguggggggcgggacggggguggccuggcccccccgccaggcagcuguagccccagccucagccccagcuccaacagaagcagcccggccacccacuccccguga

SEQ ID NO: 928 - RNA, 570 nt, Artificial Sequence
  AAB02605
augacggaauauaagcuggugguggugggcgccggcggugugggcaagagugcgcugaccauccagcugauccagaaccauuuuguggacgaauacgaccccacuauagaggauuccuaccggaagcagguggucauugauggggagacgugccuguuggacauccuggauaccgccggccaggaggaguacagcgccaugcgggaccaguacaugcgcaccggggagggcuuccuguguguguuugccaucaacaacaccaagucuuuugaggacauccaccaguacagggagcagaucaaacgggugaaggacucggaugacgugcccauggugcugguggggaacaagugugaccuggcugcacgcacuguggaaucucggcaggcucaggaccucgcccgaagcuacggcauccccuacaucgagaccucggccaagacccggcagggaguggaggaugccuucuacacguuggugcgugagauccggcagcacaagcugcggaagcugaacccuccugaugagaguggccccggcugcaugagcugcaagugugugcucuccuga

SEQ ID NO: 929 - RNA, 570 nt, Artificial Sequence
  AAB59445
augacugaauauaaacuugugguaguuggagcugguggcguaggcaagagugccuugacgauacagcuaauucagaaucauuuuguggacgaauaugauccaacaauagaggauuccuacaggaagcaaguaguaauugauggagaaaccugucucuuggauauucucgacacagcaggucaagaggaguacagugcaaugagggaccaguacaugaggacuggggagggcuuucuuuguguauuugccauaaauaauacuaaaucauuugaagauauucaccauuauagagaacaaauuaaaagaguuaaggacucugaagauguaccuaugguccuaguaggaaauaaaugugauuugccuucuagaacaguagacacaaaacaggcucaggacuuagcaagaaguuauggaauuccuuuuauugaaacaucagcaaagacaagacagagaguggaggaugcuuuuuauacauuggugagagagauccgacaauacagauugaaaaaaaucagcaaagaagaaaagacuccuggcugugugaaaauuaaaaaaugcauuauaauguaa

SEQ ID NO: 930 - RNA, 570 nt, Artificial Sequence
  AAA60255
augacugaguacaaacugguggugguuggagcaggugguguugggaaaagcgcacugacaauccagcuaauccagaaccacuuuguagaugaauaugaucccaccauagaggauucuuacagaaaacaagugguuauagauggugaaaccuguuuguuggacauacuggauacagcuggacaagaagaguacagugccaugagagaccaauacaugaggacaggcgaaggcuuccucuguguauuugccaucaauaauagcaagucauuugcggauauuaaccucuacagggagcagauuaagcgaguaaaagacucggaugauguaccuauggugcuagugggaaacaagugugauuugccaacaaggacaguugauacaaaacaagcccacgaacuggccaagaguuacgggauuccauucauugaaaccucagccaagaccagacaggguguugaagaugcuuuuuacacacugguaagagaaauacgccaguaccgaaugaaaaaacucaacagcagugaugaugggacucaggguuguaugggauugccauguguggugauguaa

SEQ ID NO: 931 - RNA, 546 nt, Artificial Sequence
  AAB84001
augugcaaaggacuugcagcuuugccccacucaugccuggaaagggccaaggagauuaagaucaaguugggaauucuccuccagaagccagacucaguuggugaccuugucauuccguacaaugagaagccagagaaaccagccaagacccagaaaaccucgcuggacgaggcccugcaguggcgugauucccuggacaaacuccugcagaacaacuauggacuugccaguuucaaaaguuuccugaagucugaauucagugaggaaaaccuugaguucuggauugccugugaggauuacaagaagaucaaguccccugccaagauggcugagaaggcaaagcaaauuuaugaagaauucauucaaacggaggcuccuaaagaggugaauauugaccacuucacuaaggacaucacaaugaagaaccugguggaaccuucccugagcagcuuugacauggcccagaaaagaauccaugcccugauggaaaaggauucucugccucgcuuugugcgcucugaguuuuaucaggaguuaaucaaguag

SEQ ID NO: 932 - RNA, 2175 nt, Artificial Sequence
  CCDS4362.1
auguccuuuccuaaggcgcccuugaaacgauucaaugacccuucugguugugcaccaucuccaggugcuuaugauguuaaaacuuuagaaguauugaaaggaccaguauccuuucagaaaucacaaagauuuaaacaacaaaaagaaucuaaacaaaaucuuaauguugacaaagauacuaccuugccugcuucagcuagaaaaguuaagucuucggaaucaaaggaaucucaaaagaaugauaaagauuugaagauauuagagaaagagauucguguucuucuacaggaacguggugcccaggacaggcggauccaggaucuggaaacugaguuggaaaagauggaagcaaggcuaaaugcugcacuaagggaaaaaacaucucucucugcaaauaaugcuacacuggaaaaacaacuuauugaauugaccaggacuaaugaacuacuaaaaucuaaguuuucugaaaaugguaaccagaagaauuugagaauucuaagcuuggaguugaugaaacuuagaaacaaaagagaaacaaagaugagggguaugauggcuaagcaagaaggcauggagaugaagcugcaggucacccaaaggagucucgaagagucucaagggaaaauagcccaacuggagggaaaacuuguuucaauagagaaagaaaagauugaugaaaaaucugaaacagaaaaacucuuggaauacaucgaagaaauuaguugugcuucagaucaaguggaaaaauacaagcuagauauugcccaguuagaagaaaauuugaaagagaagaaugaugaaauuuuaagccuuaagcagucucuugaggagaauauuguuauauuaucuaaacaaguagaagaucuaaaugugaaaugucagcugcuugaaaaagaaaaagaagaccaugucaacaggaauagagaacacaacgaaaaucuaaaugcagagaugcaaaacuuaaaacagaaguuuauucuugaacaacaggaacgugaaaagcuucaacaaaaagaauuacaaauugauucacuucugcaacaagagaaagaauuaucuucgagucuucaucagaagcucuguucuuuucaagaggaaaugguuaaagagaagaaucuguuugaggaagaauuaaagcaaacacuggaugagcuugauaaauuacagcaaaaggaggaacaagcugaaaggcuggucaagcaauuggaagaggaagcaaaaucuagagcugaagaauuaaaacuccuagaagaaaagcugaaagggaaggaggcugaacuggagaaaaguagugcugcucauacccaggccacccugcuuuugcaggaaaaguaugacaguauggugcaaagccuugaagauguuacugcucaauuugaaagcuauaaagcguuaacagccagugagauagaagaucuuaagcuggagaacucaucauuacaggaaaaagcggccaaggcugggaaaaaugcagaggauguucagcaucagauuuuggcaacugagagcucaaaucaagaauauguaaggaugcuucuagaucugcagaccaagucagcacuaaaggaaacagaaauuaaagaaaucacaguuucuuuucuucaaaaaauaacugauuugcagaaccaacucaagcaacaggaggaagacuuuagaaaacagcuggaagaugaagaaggaagaaaagcugaaaaagaaaauacaacagcagaauuaacugaagaaauuaacaaguggcgucuccucuaugaagaacuauauaauaaaacaaaaccuuuucagcuacaacuagaugcuuuugaaguagaaaaacaggcauuguugaaugaacauggugcagcucaggaacagcuaaauaaaauaagagauucauaugcuaaauuauugggucaucagaauuugaaacaaaaaaucaagcauguugugaaguugaaagaugaaaauagccaacucaaaucggaaguaucaaaacuccgcugucagcuugcuaaaaaaaaacaaagugagacaaaacuucaagaggaauugaauaaaguucuagguaucaaacacuuugauccuucaaaggcuuuucaucaugaaaguaaagaaaauuuugcccugaagaccccauuaaaagaaggcaauacaaacuguuaccgagcuccuauggagugucaagaaucauggaaguaa

SEQ ID NO: 933 - RNA, 582 nt, Artificial Sequence
  AAC33179
auggcugcaauccgaaagaagcuggugaucguuggggauggugccugugggaagaccugccuccucaucgucuucagcaaggaucaguuuccggaggucuacgucccuacugucuuugagaacuauauugcggacauugagguggacggcaagcagguggagcuggcucugugggacacagcagggcaggaagacuaugaucgacugcggccucucuccuacccggacacugaugucauccucaugugcuucuccaucgacagcccugacagccuggaaaacauuccugagaaguggaccccagaggugaagcacuucugccccaacgugcccaucauccugguggggaauaagaaggaccugaggcaagacgagcacaccaggagagagcuggccaagaugaagcaggagcccguucggucugaggaaggccgggacauggcgaaccggaucagugccuuuggcuaccuugagugcucagccaagaccaaggagggagugcgggagguguuugagauggccacucgggcuggccuccagguccgcaagaacaagcgucggaggggcugucccauucucuga

SEQ ID NO: 934 - RNA, 888 nt, Artificial Sequence
  AAA36161
auguccggagcccuugauguccugcaaaugaaggaggaggauguccuuaaguuccuugcagcaggaacccacuuagguggcaccaaucuugacuuccagauggaacaguacaucuauaaaaggaaaagugauggcaucuauaucauaaaucucaagaggaccugggagaagcuucugcuggcagcucgugcaauuguugccauugaaaacccugcugaugucaguguuauauccuccaggaauacuggccagagggcugugcugaaguuugcugcugccacuggagccacuccaauugcuggccgcuucacuccuggaaccuucacuaaccagauccaggcagccuuccgggagccacggcuucuugugguuacugaccccagggcugaccaccagccucucacggaggcaucuuauguuaaccuaccuaccauugcgcuguguaacacagauucuccucugcgcuauguggacauugccaucccaugcaacaacaagggagcucacucaguggguuugaugugguggaugcuggcucgggaaguucugcgcaugcguggcaccauuucccgugaacacccaugggaggucaugccugaucuguacuucuacagagauccugaagagauugaaaaagaagagcaggcugcugcugagaaggcagugaccaaggaggaauuucagggugaauggacugcucccgcuccugaguucacugcuacucagccugagguugcagacuggucugaagguguacaggugcccucugugccuauucagcaauucccuacugaagacuggagcgcucagccugccacggaagacuggucugcagcucccacugcucaggccacugaauggguaggagcaaccacugacuggucuuaa

SEQ ID NO: 935 - RNA, 2601 nt, Artificial Sequence
  AAH14614
augaacggggagcagcagcuugaugcagaugccggcucugguauggaagagguagaauuaagcugggaagauuaucuagaagaaacaggguccacagcaguucccuaugggucuuuuaaacauguggacacacgucugcaaaauggauuugcuccugggaugaagcuggagguggcugugagaacagauccugagaccuacuggguugccaccguuaucacuaccugugagcaguugcuccuucuccgcuaugauggcuauggggaggaucggagagcagauuucuggugugacaucaggaaggcugaucucuaccccauuggguggugugagcagaauaagaagacccuugaagccccagaaggcaucagagauaaaguaucugacugggaugaguuucugcggcagacccugauaggagcauguaguccuccuguuccgcugcuagagggccuccguaaugggaggaauccuuuagaucucauugcuccaggauccagacuagaaugucaagcuuuccaggacucuuuaagcacuuggauuguuacuguaguagaaaacauuggaggaaggcugaagcuacguuaugaaggacuugaaaguucugacaauuaugaacauugguuguauuacuuggauccauuucuucaucacguugguugggcugcucaacagggauaugagcuucagcccccuucagccauuagacaucuaaaaaaugaagcugaguggcaagagauuuuggccaaagugaaagaggaagaggaagagccauuaccaucuuacuuauuuaaggacaaacaaguuauuggcauucauacauucucuguaaacaugaaauuggaagcuguagaccccuggucuccuuuugggaucucuccugcuacaguuguuaagguuuuugaugagaaguacuuucugguggaaauggaugacuugcguccugagaaccacgcacggcgauccuuugugugccacgccgacaguccuggcaucuucccugugcaguggagucugaagaauggccuacacaucagccccccuccaggcuacccaagccaggacuuugacugggcugacuaccucaaacaguguggugcugaagcugcuccccagaggugcuucccuccguuaauuucugaacaugaauuuaaggagaacaugaagcucgaggcggugaaccccauucucccugaagaaguguguguugcuaccaucacugcagugagaggcuccuaccuguggcuccagcuggaggguucuaagaagccuauaccugaauguauugugaguguggaauccauggauauauuuccuuugggcuggugugaaaccaacggccacccccucagcacuccucgccgagcacgaguauauaaacagaggaaaauugcagugguucagccagaaaaacaaguaccauccucgaggacuguccacgagggccugaggaaucaggagcugaacuccacagagucaguuaugauuaauggaaaauauugcuguccaaagauauacuucaaccaccguugcuucucagggccauaucuuaacaaaggaagaauugcugagcugccucaauguguaggaccugggaacuguguucugguccuuagagagguccucacuuuacuuaucaaugcagccuacaaacccagccguguccuucgggagcuccagcuggacaaagacucuguguggcacggauguggggaaguccuaaaagccaaauauaaaggaaagaguuaucgggcuacuguugagauagugaaaacagcagaucgggugacugaauucugccggcaaaccuguaucaaacuggaaugcuguccuaaccucuucgguccacggaugguucuggauaaguguucugagaacuguucuguacuuacaaagaccaaauacacacacuauuacggaaagaagaaaaauaaaagaauugggaggccaccuggugggcauaguaacuuagcuugugcccugaaaaaagccaguaagaggagaaagaggcggaaaaauguuuuuguucauaagaagaaacgcuccucugcaucuguugauaauaccccagcgggcucuccccagggaagugggggugaagaugaggaugacccagaugaaggggaugaugauucccuaagugaaggcaguacauccgagcagcaggaugagcuacaggaagaaucagaaaugucagaaaaaaagucaugcuccucuucucccacccaaagugagauauccacaucgcugccuccagauagacaaaggagaaaaagggagcuucgcaccuuuucauuuucugacgaugaaaauaaaccuccuucaccaaaggaaauaaggaucgaaguugcugaaaggcuucaccuggacaguaaccccuugaaguggaguguggcagacguugugcgguucaucagauccacugacugugcuccauuagcaagaauauuccuagaccaggaaauugaugggcaggcccuguugcuccuuacccuucccacuguucaagaaugcauggacuuaaaauugggcccugccaucaaacuuugccaucacauagagaggaucaaguuugcuuuuuaugagcaguuugccaacuga

SEQ ID NO: 936 - RNA, 1431 nt, Artificial Sequence
  CCDS4550.1
augagcggcagcagcgccagguccagccaccugucucagcccgucgugaagagcgugcuuguguaccgcaacggggaccccuucuacgcggggcgccgcgucgucauccaugagaagaagguguccagcuucgaagucuuccugaaggaggugaccggcggcguucaggcacccuuuggggccgucaggaacaucuacaccccgcggacuggccaccgaauccggaagcuagaccagauccagagcgggggcaauuacguggcuggaggccaggaagccuucaagaaacucaauuacuuggacauaggagaaaucaagaaaagaccaauggaaguuguuaauacagagguaaaaccaguaauccauagcaggaucaacgugucagcucgcuuuagaaaaccgcuucaggagccgugcacuaucuucuugauugcaaauggagaccucauaaacccagcuucucgccuccuuauccccagaaaaaccuugaaucagugggaucauguacuacaaauggucacagaaaaaaucacucugaggagcggggcuguucacaggcuuuauacuuuagaaggaaaacuuguugagaguggagcagaguuggagaaugggcaguuuuauguggcuguuggcagagauaaguuuaagaaacugccuuacagugaguuacuuuuugacaagucaacgaugagaaggccuuuuggucagaaagcuucuucacuaccuccuauuguaggauccagaaagucuaaagggaguggaaaugaucgccacucuaagucaacaguuggauccagugacaacucaucuccucagccccugaagaggaaagggaaaaaagaagacgugaauucagaaaaacugacgaaauugaaacaaaauguaaaauuaaagaauucacaagaaaccauuccaaauagugaugaaggcauuuucaaagcuggagcagagaggucugaaacacggggggcagcagaaguccaagaagaugaagauacucagguugagguuccagucgaucagaggccagcagaaauaguagacgaggaagaagauggagagaaggcaaacaaggaugcagaacagaaagaagacuuuucaggaaugaauggugaccuugaagaggaaggagguagggaggcuacagaugccccugagcaagucgaggagauucuggaucacagugagcagcaggcacgcccugcucguguaaauggaggcaccgaugaggagaauggugaggagcugcagcagguuaauaaugagcuucaacugguccuagacaaggaaagaaagucucaaggagcuggcaguggacaagaugaggcugauguagacccucaaagaccaccaaggccagaaguaaaaauuaccaguccagaagaaaaugaaaacaaccaacaaaacaaggacuaugcugccguggcuuag

SEQ ID NO: 937 - RNA, 1362 nt, Artificial Sequence
  BAA07903
augcguauccccguagaugccagcacgagccgccgcuucacgccgccuuccaccgcgcugagcccaggcaagaugagcgaggcguugccgcugggcgccccggacgccggcgcugcccuggccggcaagcugaggagcggcgaccgcagcaugguggaggugcuggccgaccacccgggcgagcuggugcgcaccgacagccccaacuuccucugcuccgugcugccuacgcacuggcgcugcaacaagacccugcccaucgcuuucaaggugguggcccuaggggauguuccagauggcacucuggucacugugauggcuggcaaugaugaaaacuacucggcugagcugagaaaugcuaccgcagccaugaagaaccagguugcaagauuuaaugaccucagguuugucggucgaaguggaagagggaaaagcuucacucugaccaucacugucuucacaaacccaccgcaagucgccaccuaccacagagccaucaaaaucacaguggaugggccccgagaaccucgaagacaucggcagaaacuagaugaucagaccaagcccgggagcuuguccuuuuccgagcggcucagugaacuggagcagcugcggcgcacagccaugagggucagcccacaccacccagcccccacgcccaacccucgugccucccugaaccacuccacugccuuuaacccucagccucagagucagaugcaggauacaaggcagauccaaccauccccaccgugguccuacgaucaguccuaccaauaccugggauccauugccucuccuucugugcacccagcaacgcccauuucaccuggacgugccagcggcaugacaacccucucugcagaacuuuccagucgacucucaacggcacccgaccugacagcguucagcgacccgcgccaguuccccgcgcugcccuccaucuccgacccccgcaugcacuauccaggcgccuucaccuacuccccgacgccggucaccucgggcaucggcaucggcaugucggccaugggcucggccacgcgcuaccacaccuaccugccgccgcccuaccccggcucgucgcaagcgcagggaggcccguuccaagccagcucgcccuccuaccaccuguacuacggcgccucggccggcuccuaccaguucuccauggugggcggcgagcgcucgccgccgcgcauccugccgcccugcaccaacgccuccaccggcuccgcgcugcucaaccccagccucccgaaccagagcgacgugguggaggccgagggcagccacagcaacucccccaccaacauggcgcccuccgcgcgccuggaggaggccguguggaggcccuacuga

SEQ ID NO: 938 - RNA, 1080 nt, Artificial Sequence
  ACI46041
augccgcuggagcuggagcugugucccgggcgcugggugggcgggcaacacccgugcuucaucauugccgagaucggccagaaccaccagggcgaccuggacguagccaagcgcaugauccgcauggccaaggaguguggggcugauugugccaaguuccagaagagugagcuagaauucaaguuuaaucggaaagccuuggagaggccauacaccucgaagcauuccugggggaagacguacggggagcacaaacgacaucuggaguucagccaugaccaguacagggagcugcagagguacgccgaggagguugggaucuucuucacugccucuggcauggaugagauggcaguugaauuccugcaugaacugaauguuccauuuuucaaaguuggaucuggagacacuaauaauuuuccuuaucuggaaaagacagccaaaaaaggucgcccaauggugaucuccagugggaugcagucaauggacaccaugaagcaaguuuaucagaucgugaagccccucaaccccaacuucugcuucuugcaguguaccagcgcauacccgcuccagccugaggacgucaaccugcgggucaucucggaauaucagaagcucuuuccugacauucccauaggguauucugggcaugaaacaggcauagcgauaucuguggccgcaguggcucugggggccaagguguuggaacgucacauaacuuuggacaagaccuggaaggggagugaccacucggccucgcuggagccuggagaacuggccgagcuggugcggucagugcgucuuguggagcgugcccugggcuccccaaccaagcagcugcugcccugugagauggccugcaaugagaagcugggcaagucugugguggccaaagugaaaauuccggaaggcaccauucuaacaauggacaugcucaccgugaaggugggugagcccaaagccuauccuccugaagacaucuuuaaucuagugggcaagaagguccuggucacuguugaagaggaugacaccaucauggaagaauugguagauaaucauggcaaaaaaaucaagucuuaa

SEQ ID NO: 939 - RNA, 2715 nt, Artificial Sequence
  CCDS14652.1
augcaggcuucuccacuucaaacgagucaaccaacuccaccugaagaacuucaugcugcugccuauguguuuacaaaugaugggcagcaaaugaggagugaugaaguaaaucugguugcaacagggcaucaaagcaaaaagaaacauuccagaaaauccaagagacacucuucaucuaagagaaggaagaguauguccucgugguuagacaaacaggaagaugcugcagucacucacagcauuugugaagagaggauaaauaacggccaaccaguagcugauaaugucuugucaacugcuccaccauggccugaugcuaccaucgcucacaauauccgugaagagaggauggaaaauggccaaucucgaacugacaaagucuugucaacugcuccaccacagcuuguucauauggcugcagcugguauuccauccaugaguaccagggaucugcauucuaccgucacucacaauauccgugaagagagaauggaaaauggccaaccccaaccugauaacgucuugucaacuggucccacagggcuuauuaauauggcagcaacuccuauuccagccaugagugccagagaucucuaugcuacagucacucacaaugucugugaacagaagauggaaaauguccaaccagcaccugauaacguguuguugacucuucgaccacggcguauuaauaugacagacacugguauuucacccaugaguaccagggauccauaugcuaccaucacuuacaaugucccugaggagaagauggaaaagggccaaccccaaccugauaacaucuugucaacugcuucaacagggcuuauuaauguggcaggagcugguacuccagccaucagcaccaauggccuguauuccaccgucccucacaaugucugugaagagaagauggaaaaugaccaaccgcaaccuaauaacguauugucaacuguucaaccagugauuauuuauuugacagcaacugguauuccgggcaugaauaccagggaucaguaugcuaccaucacucacaaugucugugaagagagagugguaaauaaccaaccacuaccuaguaacgccuugucaacuguucuaccagggcuugcuuauuuggcaacagcugauaugccagccaugaguaccagggaucagcaugcuaccaucauucacaaucugcgugaagagaagaaagauaacagccaaccaaccccugauaacgucuugucagcuguuacaccagagcuuauuaacuuggcaggagcugguauuccacccaugaguaccagggaucaguaugcuaccgucaaucaccauguccaugaagcaaggauggaaaauggccaacgaaaacaggauaacgucuugucaaauguucuauccgggcuuauuaauauggcaggagcuaguauuccagcaaugaguuccagggaucuguaugcuaccauuacucacaguguucgugaagagaagauggaaaguggcaaaccccaaacugauaaggucauaucaaaugaugcaccacagcuuggucauauggcugcaggugguauuccauccaugaguaccaaggaucuguaugcuaccgucacucaaaauguccaugaagagaggauggaaaauaaccaaccacaaccuaguuaugacuugucaacuguucuaccaggacuuacuuauuugacaguagcugguauuccggccaugaguaccagggaucaguaugcuaccgucacucacaauguccaugaagagaagauuaaaaauggccaagcagcauccgauaaugucuucucgacuguuccaccagcauuuauuaauauggcagcaacugguguuucauccaugaguaccagggaucaguaugcugcagucacucacaacauccgugaagagaagauaaauaacagccaaccagcaccugguaacaucuugucaacugcuccuccauggcuucgucauauggcagcagcuggaauuucauccacgauuaccagggaucuguaugucaccgccacucacaguguccaugaggagaagaugacaaauggccaacaggcaccugauaacuccuugucaacgguuccaccugguuguauuaaucugucaggagcugguauuucaugcagaaguaccagggaucuguaugcuacugucauucacgauauccaggaggaggagauggaaaaugaucaaaccccuccugauggcuuccugucaaauucugauucaccagagcugauaaauaugacaggacauuguaugccacccaaugcauuggauucuuucucucacgacuucacaagucucagcaaagaugagcugcuuuacaaaccugauaguaaugaauuugcgguaggcaccaaaaacuacagugucucugcaggugacccaccaguuacaguaaugucuuugguggaaacugugccaaauacaccacaaauaucuccugccauggcaaagaaaauuaaugaugauauaaaauaucaauuaaugaaagaaguucgaagguuugggcaaaauuaugaaagaauuuucauuuugcuugaagagguacaaggaucuaugaaagucaagagacaauuuguugaauuuaccaucaaggaagcagcaagguuuaaaaaaguugucuuaauucagcaacucgagaaggcgcuuaaagaaauagauucccacugccaucucagaaaaguuaagcacaugagaaaaagauaa

SEQ ID NO: 940 - RNA, 2403 nt, Artificial Sequence
  AAH01058
auggggucguccaagaagcaucgcggagagaaggaggcggccgggacgacggcggcggccggcaccgggggugccaccgagcagccgccgcggcaccgggaacacaaaaaacacaagcaccggaguggcggcaguggcgguagcgguggcgaacgacggaagcggagccgggaacgugggggcgagcgcgggagcgggcggcgcggggccgaagcugaggcccggagcagcacgcacgggcgggagcgcagccaggcagagcccuccgagcggcgcgugaagcgggagaagcgcgaugacggcuacgaggccgcugccagcuccaaaacuagcucaggcgaugccuccucacucagcaucgaggagacuaacaaacuccgggcaaaguuggggcugaaacccuuggagguuaaugccaucaagaaggaggcgggcaccaaggaggagcccgugacagcugaugucaucaacccuauggccuugcgacagcgagaggagcugcgggagaagcuggcagcugccaaggagaagcgccugcugaaccaaaagcuggggaagauaaagacccuaggagaggaugaccccuggcuggacgacacugcagccuggaucgagaggagccggcagcugcagaaggagaaggaccuggcagagaagagggccaaguuacuggaggagauggaccaagaguuuggugucagcacucugguggaggaggaguucgggcagaggcggcaggaccuguacagugcccgggaccugcagggccucaccguggagcaugccauugauuccuuccgagaaggggagacaaugauucuuacccucaaggacaaaggcgugcugcaggaggaggaggacgugcuggugaacgugaaccugguggauaaggagcgggcagagaaaaauguggagcugcggaagaagaagccugacuaccugcccuaugccgaggacgagagcguggacgaccuggcgcagcaaaaaccucgcucuauccuguccaaguaugacgaagagcuugaaggggagcggccacauuccuuccgcuuggagcagggcggcacggcugauggccugcgggagcgggagcuggaggagauccgggccaagcugcggcugcaggcucagucccugagcacaguggggccccggcuggccuccgaauaccucacgccugaggagauggugaccuuuaaaaagaccaagcggagggugaagaaaauccgcaagaaggagaaggagguaguagugcgggcagaugacuugcugccucucggggaccagacucaggauggggacuuugguuccagacugcggggacggggucgccgccgaguguccgaaguggaggaggagaaggagccugugccucagccccugccgucggacgacacccgaguggagaacauggacaucagugaugaggaggaagguggagcuccaccgccgggguccccgcaggugcuggaggaggacgaggcggagcuggagcugcagaagcagcuggagaagggacgccggcugcgacaguuacagcagcuacagcagcugcgagacaguggcgagaaggugguggagauugugaagaagcuggagucucgccagcggggcugggaggaggaugaggaucccgagcggaagggggccaucguguucaacgccacguccgaguucugccgcaccuugggggagauccccaccuacgggcuggcuggcaaucgcgaggagcaggaggagcucauggacuuugaacgggaugaggagcgcucagccaacgguggcuccgaaucugacggggaggagaacaucggcuggagcacggugaaccuggacgaggagaagcagcagcaggauuucucugcuuccuccaccaccauccuggacgaggaaccgaucgugaauagggggcuggcagcugcccugcuccugugucagaacaaagggcugcuggagaccacagugcagaagguggcccgggugaaggcccccaacaagucgcugcccucagccguguacugcaucgaggauaagauggccaucgaugacaaguacagccggagggaggaauaccgaggcuucacacaggacuucaaggagaaggacggcuacaaacccgacguuaagaucgaauacguggaugagacgggccggaaacucacacccaaggaggcuuuccggcagcugucgcaccgcuuccauggcaagggcucaggcaagaugaagacagagcggcggaugaagaagcuggacgaggaggcgcuccugaagaagaugagcuccagcgacacgccccugggcaccguggcccugcuccaggagaagcagaaggcucagaagacccccuacaucgugcucagcggcagcggcaagagcaugaacgcgaacaccaucaccaaguga

SEQ ID NO: 941 - RNA, 2877 nt, Artificial Sequence
  AAF00087
augaggacucacacacggggggcucccaguguguuuuucauauauuugcuuugcuuugugucagccuacaucaccgacgagaacccagaaguuaugauucccuucaccaaugccaacuacgacagccaucccaugcuguacuucuccagggcagaaguggcggagcugcagcucagggcugccagcucgcacgagcacauugcagcccgccucacggaggcugugcacacgaugcuguccagccccuuggaauaccucccucccugggaucccaaggacuacagugcccgcuggaaugaaauuuuuggaaacaacuugggugccuuggcaauguucugugugcuguauccugagaacauugaagcccgagacauggccaaagacuacauggagaggauggcagcgcagccuaguugguuggugaaagaugcuccuugggaugaggucccgcuugcucacucccugguugguuuugccacugcuuaugacuucuuguacaacuaccugagcaagacacaacaggagaaguuucuugaagugauugccaaugccucaggguauauguaugaaacuucauacaggagaggauggggauuucaauaccugcacaaucaucagcccaccaacuguauggcuuugcucacgggaagccuaguccugaugaaucaaggauaucuucaagaagccuacuuauggaccaaacaaguucugaccaucauggagaaaucucuggucuugcucagggaggugacggauggcucccucuaugaaggaguugcguauggcagcuacaccacuagaucacucuuccaauacauguuucucguccagaggcacuucaacaucaaccacuuuggccauccguggcuuaaacaacacuuugcauuuauguauagaaccauccugccaggguuucaaaggacuguggcuauugcggacucaaauuacaacugguuuuaugguccagaaagccaauuaguguuccuugauaaauuugucaugcguaauggcagugguaacuggcuagcugaccaaaucagaaggaaccgugugguggaagguccaggaacaccauccaaagggcagcgcuggugcacucugcacacagaauuucucugguaugauggcagcuugaaaucgguuccuccuccagacuuuggcaccccuacacugcauuauuuugaagacuggggugucgugacuuauggaagugcacuaccugcagaaaucaauagaucuuuccuuuccuucaagucuggaaaacuggggggacgugcaauauaugacauuguccacagaaacaaauacaaagauuggaucaaaggauggagaaauuuuaaugcagggcaugaacauccugaucaaaacucauuuacuuuugcucccaauggugugccuuucauuacugaggcucuguacgggccaaaguacaccuucuucaacaauguuuugauguuuuccccagcugugucaaagagcugcuuuucucccugggugggucaggucacagaagacugcucaucaaaauggucuaaauacaagcaugaccuggcagcuaguugucaggggagggugguugcagcagaggagaaaaauggggugguuuucauccgaggagaaggugugggagcuuauaacccccagcucaaccugaagaauguucagaggaaucucauccuccuacauccacagcugcuucuccuuguagaccaaauacaccugggagaggagagucccuuggagacagcagcgagcuucuuccauaauguggauguuccuuuugaggagacugugguagaugguguccauggggcuuucaucaggcagagagauggucucuauaaaauguacuggauggacgauacuggcuacagcgagaaagcaaccuuugccucagugacauauccucggggcuaucccuacaacgggacaaacuaugugaaugucaccaugcaccuccgaagucccaucaccagggcagcuuaccucuucauagggccaucuauagauguucagagcuucacuguccacggagacucucagcaacuggauguguucauagccaccagcaaacaugccuacgccacauaccuguggacaggugaggccacaggacagucugccuuugcacaggucauugcugaucgucacaaaauucuguuugaccggaauucagccaucaagagcagcauugucccugaggugaaggacuaugcugcuauuguggaacagaacuugcagcauuuuaaaccaguguuucagcugcuggagaagcagauacugucccgaguccggaacacagcuagcuuuaggaagacugcugaacgccugcugagauuuucagauaagagacagacugaggaggccauugacaggauuuuugccauaucacagcaacagcagcagcaaagcaagucaaagaaaaaccgaagggcaggcaaacgcuauaaauuuguggaugcugucccugauauuuuugcacagauugaagucaaugagaaaaagauuagacagaaagcucagauuuuggcacagaaagaacuacccauagaugaagaugaagaaaugaaagaccuuuuagauuuugcagauguaacauacgagaaacauaaaaaugggggcuugauuaaaggccgguuuggacaggcacggauggugacaacuacacacagcagggccccaucacugucugcuuccuauaccagguuguuccugauucugaacauugcuauuuucuuugucauguuggcaaugcaacugacuuauuuccagagggcccagagccuacauggccaaagaugucuuuaugcaguucuucucauagauagcuguauuuuauuaugguuguacucuucuuguucccaaucacaguguuag

SEQ ID NO: 942 - RNA, 2892 nt, Artificial Sequence
  AAH93784
auggcgacugcggccgaaaccucggcuucagaacccgaggcugaguccaaggcugggcccaaggcugacggagaggaggaugagguuaaggcggcuaggacaaggagaaagguguuaucgcgggcuguggccgcugcgacauacaagaccauggggccagcgugggaucagcaggaggaaggcgugagcgagagcgauggggaugaguacgccauggcuuccuccgcggagagcucccccggggaguacgagugggaauaugacgaagaggaggagaaaaaccagcuggagauugagagacuggaggagcaguugucuaucaacgucuaugacuacaacugccauguggacuugaucagacugcucaggcuggaaggggagcuuaccaaggugaggauggcccgccagaagaugagugaaaucuuucccuugacugaagagcucuggcuggaguggcugcaugacgagaucagcauggcccaggauggccuggacagagagcacguguaugaccucuuugagaaagccgugaaggauuacauuuguccuaacauuuggcuagaguauggccaguacucaguuggugggauuggucagaaagguggccuugagaaaguucgcuccguguuugaaagggcucucucgucuguugguuuacauaugaccaaaggacucgcccucugggaggcuuaccgagaguuugaaagugcgauuguggaagcugcucggcuugagaaaguccacagucuuuuccggcgacaguuggcgaucccacucuaugauauggaggccacauuugcagaguaugaagaauggucagaagacccaauaccagagucaguaauucagaacuauaacaaagcacuacagcagcuggagaaauauaaacccuaugaagaagcacuguugcaggcagaggcaccaaggcuggcagaauaucaagcauauaucgauuuugagaugaaaauuggcgauccugcucgcauucaguugaucuuugagcgcgcccuggucgagaacugccuugucccagacuuauggauccguuacagucaguaccuagaucgacaacugaaaguaaaggauuugguuuuaucuguacauaaccgcgcuauuagaaacugccccuggacaguugccuuauggagucgguaccucuuggccauggagagacauggaguugaucaucaaguaauuucuguaaccuucgagaaagcuuugaaugccggcuucauccaggccacugauuauguggagauuuggcaggcauaccuugauuaccugaggagaaggguugauuucaaacaagacuccaguaaagagcuggaggaguugagggccgccuuuacucgugccuuggaguaucugaagcaggagguggaagagcguuucaaugagaguggugauccaagcugcgugauuaugcagaacugggcuaggauugaggcucgacugugcaauaacaugcagaaagcucgggaacucugggauagcaucaugaccagaggaaaugccaaguacgccaacauguggcuagaguauuacaaccuggaaagagcucauggugacacccagcacugccggaaggcucugcaccgggccguccagugcaccagugacuacccagagcacgucugcgaaguguuacucaccauggagaggacagaagguucuuuagaagauugggauauagcuguucagaaaacugaaacccgauuagcucgugucaaugagcagagaaugaaggcugcagagaaggaagcagcccuugugcagcaagaagaagaaaaggcugaacaacggaaaagagcucgggcugagaagaaagcguuaaaaaagaagaaaaagaucagaggcccagagaagcgcggagcagaugaggacgaugagaaagaguggggcgaugaugaagaagagcagccuuccaaacgcagaagggucgagaacagcaucccugcagcuggagaaacacaaaauguagaaguagcagcagggcccgcugggaaaugugcugccguagauguggagcccccuucgaagcagaaggagaaggcagccucccugaagagggacaugcccaaggugcugcacgacagcagcaaggacagcaucaccgucuuugucagcaaccugcccuacagcaugcaggagccggacacgaagcucaggccacucuucgaggccuguggggaggugguccagauccgacccaucuucagcaaccguggggauuuccgagguuacugcuacguggaguuuaaagaagagaaaucagcccuucaggcacuggagauggaccggaaaaguguagaagggaggccaauguuuguuucccccuguguggauaagagcaaaaaccccgauuuuaagguguucagguacagcacuucccuagagaaacacaagcuguucaucucaggccugccuuucuccuguacuaaagaggaacuagaagaaaucuguaaggcucauggcaccgugaaggaccucaggcuggucaccaaccgggcuggcaaaccaaagggccuggccuacguggaguaugaaaaugaaucccaggcgucgcaggcugugaugaagauggacggcaugacuaucaaagagaacaucaucaaaguggcaaucagcaacccuccucagaggaaaguuccagagaagccagagaccaggaaggcaccagguggccccaugcuuuugccgcagacauacggagcgagggggaagggaaggacgcagcugucucuacugccucgugcccugcagcgcccaagugcugcagcuccucaggcugagaacggcccugccgcggcuccugcaguugccgccccagcagccaccgaggcacccaagauguccaaugccgauuuugccaagcuguuucugagaaaguga

SEQ ID NO: 943 - RNA, 2283 nt, Artificial Sequence
  AAC51668
augaagacuuggguaaaaaucguauuuggaguugccaccucugcugugcuugccuuauuggugaugugcauugucuuacgcccuucaagaguucauaacucugaagaaaauacaaugagagcacucacacugaaggauauuuuaaauggaacauuuucuuauaaaacauuuuuuccaaacuggauuucaggacaagaauaucuucaucaaucugcagauaacaauauaguacuuuauaauauugaaacagggcaaucauauaccauuuugaguaauagaaccaugaaaagugugaaugcuucaaauuacggcuuaucaccugaucggcaauuuguauaucuagaaagugauuauucaaagcuuuggagauacucuuacacagcaacauauuacaucuaugaccuuagcaauggagaauuuguaagaggaaaugagcuuccucguccaauucaguauuuaugcuggucgccuguugggaguaaauuagcauaugucuaucaaaacaauaucuauuugaaacaaagaccaggagauccaccuuuucaaauaacauuuaauggaagagaaaauaaaauauuuaauggaaucccagacuggguuuaugaagaggaaaugcuugcuacaaaauaugcucucugguggucuccuaauggaaaauuuuuggcauaugcggaauuuaaugauacggauauaccaguuauugccuauuccuauuauggcgaugaacaauauccuagaacaauaaauauuccauacccaaaggcuggagcuaagaaucccguuguucggauauuuauuaucgauaccacuuacccugcguauguagguccccaggaagugccuguuccagcaaugauagccucaagugauuauuauuucaguuggcucacguggguuacugaugaacgaguauguuugcaguggcuaaaaagaguccagaauguuucgguccugucuauaugugacuucagggaagacuggcagacaugggauuguccaaagacccaggagcauauagaagaaagcagaacuggaugggcugguggauucuuuguuucaacaccaguuuucagcuaugaugccauuucguacuacaaaauauuuagugacaaggauggcuacaaacauauucacuauaucaaagacacuguggaaaaugcuauucaaauuacaaguggcaagugggaggccauaaauauauucagaguaacacaggauucacuguuuuauucuagcaaugaauuugaagaauacccuggaagaagaaacaucuacagaauuagcauuggaagcuauccuccaagcaagaaguguguuacuugccaucuaaggaaagaaaggugccaauauuacacagcaaguuucagcgacuacgccaaguacuaugcacuugucugcuacggcccaggcauccccauuuccacccuucaugauggacgcacugaucaagaaauuaaaauccuggaagaaaacaaggaauuggaaaaugcuuugaaaaauauccagcugccuaaagaggaaauuaagaaacuugaaguagaugaaauuacuuuaugguacaagaugauucuuccuccucaauuugacagaucaaagaaguaucccuugcuaauucaaguguaugguggucccugcagucagaguguaaggucuguauuugcuguuaauuggauaucuuaucuugcaaguaaggaagggauggucauugccuugguggauggucgaggaacagcuuuccaaggugacaaacuccucuaugcaguguaucgaaagcuggguguuuaugaaguugaagaccagauuacagcugucagaaaauucauagaaauggguuucauugaugaaaaaagaauagccauauggggcugguccuauggaggauacguuucaucacuggcccuugcaucuggaacuggucuuuucaaaugugguauagcaguggcuccagucuccagcugggaauauuacgcgucugucuacacagagagauucaugggucucccaacaaaggaugauaaucuugagcacuauaagaauucaacugugauggcaagagcagaauauuucagaaauguagacuaucuucucauccacggaacagcagaugauaaugugcacuuucagaacucagcacagauugcuaaagcucugguuaaugcacaaguggauuuccaggcaaugugguacucugaccagaaccacggcuuauccggccuguccacgaaccacuuauacacccacaugacccacuuccuaaagcaguguuucucuuugucagacuaa

SEQ ID NO: 944 - RNA, 1128 nt, Artificial Sequence
  CCDS32839.1
auggaugcccugcaacuagcaaauucggcuuuugccguugaucuguucaaacaacuaugugaaaaggagccacugggcaauguccucuucucuccaaucugucucuccaccucucugucacuugcucaagugggugcuaaaggugacacugcaaaugaaauuggacagguucuucauuuugaaaaugucaaagauguacccuuuggauuucaaacaguaacaucggauguaaacaaacuuaguuccuuuuacucacugaaacuaaucaagcggcucuacguagacaaaucucugaaucuuucuacagaguucaucagcucuacgaagagaccguaugcaaaggaauuggaaacuguugacuucaaagauaaauuggaagaaacgaaaggucagaucaacaacucaauuaaggaucucacagauggccacuuugagaacauuuuagcugacaacagugugaacgaccagaccaaaauccuugugguuaaugcugccuacuuuguuggcaaguggaugaagaaauuuucugaaucagaaacaaaagaauguccuuucagagucaacaagacagacaccaaaccagugcagaugaugaacauggaggccacguucuguaugggaaacauugacaguaucaauuguaagaucauagagcuuccuuuucaaaauaagcaucucagcauguucauccuacuacccaaggauguggaggaugaguccacaggcuuggagaagauugaaaaacaacucaacucagagucacugucacaguggacuaaucccagcaccauggccaaugccaaggucaaacucuccauuccaaaauuuaagguggaaaagaugauugaucccaaggcuugucuggaaaaucuagggcugaaacauaucuucagugaagacacaucugauuucucuggaaugucagagaccaagggaguggcccuaucaaauguuauccacaaagugugcuuagaaauaacugaagaugguggggauuccauagaggugccaggagcacggauccugcagcacaaggaugaauugaaugcugaccaucccuuuauuuacaucaucaggcacaacaaaacucgaaacauuauuuucuuuggcaaauucuguucuccuuaa

SEQ ID NO: 945 - RNA, 1002 nt, Artificial Sequence
  AAH06564
auggcuugcucgaggccccccagccagugugaacccacaucccugcccccagggccaccugcaggacgccgacaccuaccccucagcagacgccggagagaaaugaguagcaacaaagagcagcggucagcaguguucgugauccucuuugcccucaucaccauccucauccucuacagcuccaacagugccaaugaggucuuccauuacggcucccugcggggccguagccgccgaccugucaaccucaagaaguggagcaucacugacggcuauguccccauucucggcaacaagacacugcccucucggugccaccagugugugauugucagcagcuccagccaccugcugggcaccaagcugggcccugagaucgagcgggcugaguguacaauccgcaugaaugaugcacccaccacuggcuacucagcugaugugggcaacaagaccaccuaccgcgucguggcccauuccaguguguuccgcgugcugaggaggccccaggaguuugucaaccggaccccugaaaccguguucaucuucugggggcccccgagcaagaugcagaagccccagggcagccucgugcgugugauccagcgagcgggccugguguuccccaacauggaagcauaugccgucucucccggccgcaugcggcaauuugacgaccucuuccggggugagacgggcaaggacagggagaagucucauucgugguugagcacaggcugguuuaccauggugaucgcgguggaguugugugaccacgugcaugucuauggcauggucccccccaacuacugcagccagcggccccgccuccagcgcaugcccuaccacuacuacgagcccaaggggccggacgaaugugucaccuacauccagaaugagcacagucgcaagggcaaccaccaccgcuucaucaccgagaaaagggucuucucaucgugggcccagcuguauggcaucaccuucucccaccccuccuggaccuag

SEQ ID NO: 946 - RNA, 1071 nt, Artificial Sequence
  AAC37586
augagccccugcgggcgggcccggcgacaaacguccagaggggccauggcuguacuggcguggaaguucccgcggacccggcugcccaugggagccagugcccucugugucgugguccucuguuggcucuacaucuuccccgucuaccggcugcccaacgagaaagagaucgugcagggggugcugcaacagggcacggcguggaggaggaaccagaccgcggccagagcguucaggaaacaaauggaagacugcugcgacccugcccaucucuuugcuaugacuaaaaugaauuccccuauggggaagagcaugugguaugacggggaguuuuuauacucauucaccauugacaauucaacuuacucucucuucccacaggcaaccccauuccagcugccauugaagaaaugcgcgguggugggaaauggugggauucugaagaagaguggcuguggccgucaaauagaugaagcaaauuuugucaugcgaugcaaucucccuccuuugucaagugaauacacuaaggauguuggauccaaaagucaguuagugacagcuaaucccagcauaauucggcaaagguuucagaaccuucugugguccagaaagacauuuguggacaacaugaaaaucuauaaccacaguuacaucuacaugccugccuuuucuaugaagacaggaacagagccaucuuugaggguuuauuauacacugucagauguuggugccaaucaaacagugcuguuugccaaccccaacuuucugcguagcauuggaaaguucuggaaaaguagaggaauccaugccaagcgccuguccacaggacuuuuucuggugagcgcagcucugggucucugugaagagguggccaucuauggcuucuggcccuucucugugaauaugcaugagcagcccaucagccaccacuacuaugacaacgucuuacccuuuucuggcuuccaugccaugcccgaggaauuucuccaacucugguaucuucauaaaaucggugcacugagaaugcagcuggacccaugugaagauaccucacuccagcccacuuccuag

SEQ ID NO: 947 - RNA, 1257 nt, Artificial Sequence
  BAG50894
augcggacgaaggcggcgggcugcgcggagcggcguccccugcagccgcggaccgaggcagcggcggcaccugccggccgagcaaugccaagugaguacaccuaugugaaacugagaagugauugcucgaggccuucccugcaaugguacacccgagcucaaagcaagaugagaaggcccagcuuguuauuaaaagacauccucaaauguacauugcuuguguuuggaguguggauccuuuauauccucaaguuaaauuauacuacugaagaaugugacaugaaaaaaaugcauuauguggacccugaccauguaaagagagcucagaaauaugcucagcaagucuugcagaaggaaugucgucccaaguuugccaagacaucaauggcgcuguuauuugagcacagguauagcguggacuuacucccuuuugugcagaaggcccccaaagacagugaagcugaguccaaguacgauccuccuuuuggguuccggaaguucuccaguaaaguccagacccucuuggaacucuugccagagcacgaccucccugaacacuugaaagccaagaccugucggcgcugugugguuauuggaagcggaggaauacugcacggauuagaacugggccacacccugaaccaguucgauguugugauaagguuaaacagugcaccaguugagggauauucagaacauguuggaaauaaaacuacuauaaggaugacuuauccagagggcgcaccacugucugaccuugaauauuauuccaaugacuuauuuguugcuguuuuauuuaagaguguugauuucaacuggcuucaagcaaugguaaaaaaggaaacccugccauucuggguacgacucuucuuuuggaagcagguggcagaaaaaaucccacugcagccaaaacauuucaggauuuugaauccaguuaucaucaaagagacugccuuugacauccuucaguacucagagccucagucaagguucuggggccgagauaagaacguccccacaaucggugucauugccguugucuuagccacacaucugugcgaugaagucaguuuggcggguuuuggauaugaccucaaucaacccagaacaccuuugcacuacuucgacagucaaugcauggcugcuaugaacuuucagaccaugcauaaugugacaacggaaaccaaguuccucuuaaagcuggucaaagagggaguggugaaagaucucaguggaggcauugaucgugaauuuuga

SEQ ID NO: 948 - RNA, 1059 nt, Artificial Sequence
  EAW56837
auggacuuccugcggaacuuauucucccagacgcucagccugggcagccagaaggagcgucugcuggacgagcugaccuuggaagggguggcccgguacaugcagagcgaacgcugucgcagagucaucuguuuggugggagcuggaaucuccacauccgcaggcauccccgacuuucgcucuccauccaccggccucuaugacaaccuagagaaguaccaucuucccuacccagaggccaucuuugagaucagcuauuucaagaaacauccggaacccuucuucgcccucgccaaggaacucuauccugggcaguucaagccaaccaucugucacuacuucaugcgccugcugaaggacaaggggcuacuccugcgcugcuacacgcagaacauagauacccuggagcgaauagccgggcuggaacaggaggacuugguggaggcgcacggcaccuucuacacaucacacugcgucagcgccagcugccggcacgaauacccgcuaagcuggaugaaagagaagaucuucucugaggugacgcccaagugugaagacugucagagccuggugaagccugauaucgucuuuuuuggugagagccucccagcgcguuucuucuccuguaugcagucagacuuccugaagguggaccuccuccuggucauggguaccuccuugcaggugcagcccuuugccucccucaucagcaaggcaccccucuccaccccucgccugcucaucaacaaggagaaagcuggccagucggacccuuuccuggggaugauuaugggccucggaggaggcauggacuuugacuccaagaaggccuacagggacguggccuggcugggugaaugcgaccagggcugccuggcccuugcugagcuccuuggauggaagaaggagcuggaggaccuuguccggagggagcacgccagcauagaugcccagucgggggcggggguccccaaccccagcacuucagcuucccccaagaaguccccgccaccugccaaggacgaggccaggacaacagagagggagaaaccccaguga

SEQ ID NO: 949 - RNA, 1170 nt, Artificial Sequence
  AAD40850
auggcagagccagaccccucucacccucuggagacccaggcagggaaggugcaggaggcucaggacucagauucagacucugagggaggagccgcugguggagaagcagacauggacuuccugcggaacuuauucucccagacgcucagccugggcagccagaaggagcgucugcuggacgagcugaccuuggaagggguggcccgguacaugcagagcgaacgcugucgcagagucaucuguuuggugggagcuggaaucuccacauccgcaggcauccccgacuuucgcucuccauccaccggccucuaugacaaccuagagaaguaccaucuucccuacccagaggccaucuuugagaucagcuauuucaagaaacauccggaacccuucuucgcccucgccaaggaacucuauccugggcaguucaagccaaccaucugucacuacuucaugcgccugcugaaggacaaggggcuacuccugcgcugcuacacgcagaacauagauacccuggagcgaauagccgggcuggaacaggaggacuugguggaggcgcacggcaccuucuacacaucacacugcgucagcgccagcugccggcacgaauacccgcuaagcuggaugaaagagaagaucuucucugaggugacgcccaagugugaagacugucagagccuggugaagccugauaucgucuuuuuuggugagagccucccagcgcguuucuucuccuguaugcagucagacuuccugaagguggaccuccuccuggucauggguaccuccuugcaggugcagcccuuugccucccucaucagcaaggcaccccucuccaccccucgccugcucaucaacaaggagaaagcuggccagucggacccuuuccuggggaugauuaugggccucggaggaggcauggacuuugacuccaagaaggccuacagggacguggccuggcugggugaaugcgaccagggcugccuggcccuugcugagcuccuuggauggaagaaggagcuggaggaccuuguccggagggagcacgccagcauagaugcccagucgggggcggggguccccaaccccagcacuucagcuucccccaagaaguccccgccaccugccaaggacgaggccaggacaacagagagggagaaaccccaguga

SEQ ID NO: 950 - RNA, 1401 nt, Artificial Sequence
  AAH02824
auggcggaggagcaggaccuaucggagguggagcugagccccgugggcucggaggagccccgcugccuguccccggggagcgcgcccucgcuagggcccgacggcggcggcggcggaucgggccugcgagccagcccggggccaggcgagcugggcaaggucaagaaggagcagcaggacggcgaggcggacgaugacaaguuccccgugugcauccgcgaggccgucagccaggugcucagcggcuacgacuggacgcuggugcccaugcccgugcgcgucaacggcgccagcaaaagcaagccgcacgucaagcggcccaugaacgccuucauggugugggcucaggcagcgcgcaggaagcucgcggaccaguacccgcaccugcacaacgcugagcucagcaagacgcugggcaagcucuggaggcugcugaacgaaagugacaagcgccccuucaucgaggaggcugagcggcuccguaugcagcacaagaaagaccacccggacuacaaguaccagcccaggcggcggaagaacgggaaggccgcccagggcgaggcggagugccccgguggggaggccgagcaaggugggaccgccgccauccaggcccacuacaagagcgcccacuuggaccaccggcacccaggagagggcucccccaugucagaugggaaccccgagcaccccucaggccagagccauggcccacccaccccuccaaccaccccgaagacagagcugcagucgggcaaggcagacccgaagcgggacgggcgcuccaugggggagggcgggaagccucacaucgacuucggcaacguggacauuggugagaucagccacgagguaauguccaacauggagaccuuugauguggcugaguuggaccaguaccugccgcccaaugggcacccaggccaugugagcagcuacucagcagccggcuaugggcugggcagugcccuggccguggccaguggacacuccgccuggaucuccaagccaccaggcguggcucugcccacggucucaccaccugguguggaugccaaagcccaggugaagacagagaccgcggggccccaggggcccccacacuacaccgaccagccauccaccucacagaucgccuacaccucccucagccugccccacuauggcucagccuuccccuccaucucccgcccccaguuugacuacucugaccaucagcccucaggacccuauuauggccacucgggccaggccucuggccucuacucggccuucuccuauauggggcccucgcagcggccccucuacacggccaucucugaccccagccccucagggccccagucccacagccccacacacugggagcagccaguauauacgacacugucccggcccuaa

SEQ ID NO: 951 - RNA, 456 nt, Artificial Sequence
  AAH32457
augucgauuccauucuccaacacccacuaccgaauuccacaaggauuugggaaucuucuugaagggcugacacgcgagauucugagagagcaaccggacaauauaccagcuuuugcagcagccuauuuugagagccuucuagagaaaagagagaaaaccaacuuugauccagcagaaugggggaguaagguagaagaccgcuucuauaacaaucaugcauucgaggagcaagaaccaccugagaaaagugauccuaaacaagaagagucucagauaucugggaaggaggaagagacaucagucaccaucuuagacucuucugaggaagauaaggaaaaagaagagguugcugcugucaaaauccaagcugccuuccggggacacauagccagagaggaggcaaagaaaaugaaaacaaauagucuucaaaaugaggaaaaagaggaaaacaaguga

SEQ ID NO: 952 - RNA, 294 nt, Artificial Sequence
  AAF28420
auggacaaacaauccagugccggcggggugaagaggagcguccccugugauuccaacgaggccaacgagaugaugccggagaccccaacuggggacucagacccgcaaccugcuccuaaaaaaaugaaaacaucugaguccucgaccauacuagugguucgcuacaggaggaacuuuaaaagaacaucuccagaggaacugcugaaugaccacgcccgagagaacagaaucaacccccuccaaauggaggaggaggaauucauggaaauaaugguugaaauaccugcaaaguag

SEQ ID NO: 953 - RNA, 426 nt, Artificial Sequence
  AAH62750
auggaacagccaacuuccaguaccaauggggagaagacgaagagccccugugaauccaauaacaaaaaaaaugaugagaugcaagagguaccaaacagagucuuagcccccgaacagaguuugaagaagacaaaaacaucagaauauccaauaauauuuguguauuaccucaggaaggguaagaaaauaaauucaaaucaacuggagaaugaacagucccaagagaacuccaucaauccaauccaaaaggaggaggacgaaggcguagacuuaucugaaggaucuucaaaugaggaugaagaccuaggcccaugugaaggaccuucaaaggaggacaaagaucuagacucaucugaaggauccucacaggaggaugaagaccuaggcuuaucugaaggaucuucacaggacaguggggaggauuag

SEQ ID NO: 954 - RNA, 567 nt, Artificial Sequence
  AAH01003
augaacggagacgacaccuuugcaaagagacccagggaugaugcuaaagcaucagagaagagaagcaaggccuuugaugauauugccacauacuucucuaagaaagaguggaaaaagaugaaauacucggagaaaaucagcuauguguauaugaagagaaacuauaaggccaugacuaaacuagguuucaaagucacccucccaccuuucauguguaauaaacaggccacagacuuccaggggaaugauuuugauaaugaccauaaccgcaggauucagguugaacauccucagaugacuuucggcaggcuccacagaaucaucccgaagaucaugcccaagaagccagcagaggacgaaaaugauucgaagggagugucagaagcaucuggcccacaaaacgaugggaaacaacugcaccccccaggaaaagcaaauauuucugagaagauuaauaagagaucuggacccaaaagggggaaacaugccuggacccacagacugcgugagagaaagcagcuggugauuuaugaagagaucagcgacccugaggaagaugacgaguaa

SEQ ID NO: 955 - RNA, 567 nt, Artificial Sequence
  AAH16957
augaacggagacgacgccuuugcaaggagacccacgguuggugcucaaauaccagagaagauccaaaaggccuucgaugauauugccaaauacuucucuaaggaagagugggaaaagaugaaagccucagagaaaaucuucuauguguauaugaagagaaaguaugaggcuaugacuaaacuagguuucaaggccacccucccaccuuucauguguaauaaacgggccgaagacuuccaggggaaugauuuggauaaugacccuaaccgugggaaucagguugaacguccucagaugacuuucggcaggcuccagggaaucuccccgaagaucaugcccaagaagccagcagaggaaggaaaugauucggaggaagugccagaagcaucuggcccacaaaaugaugggaaagagcugugccccccgggaaaaccaacuaccucugagaagauucacgagagaucuggacccaaaaggggggaacaugccuggacccacagacugcgugagagaaaacagcuggugauuuaugaagagaucagcgacccugaggaagaugacgaguaa

SEQ ID NO: 956 - RNA, 567 nt, Artificial Sequence
  AAC05819
augaacggagaugacaccuuugcaaggagacccacgguuggugcucaaauaccagagaagauacaaaaggccuucgaugauauugccaaauacuucucuaaggaagagugggaaaagaugaaagucucggagaaaaucgucuauguguauaugaagagaaaguaugaggccaugacuaaacuagguuucaaggccauccucccaucuuucaugcguaauaaacgggucacagacuuccaggggaaugauuuugauaaugacccuaaccgugggaaucagguucaacguccucagaugacuuucggcaggcuccagggaaucuucccgaagaucaugcccaagaagccagcagaggaaggaaauguuucgaaggaagugccagaagcaucuggcccacaaaacgaugggaaacagcugugccccccgggaaaaccaacuaccucugagaagauuaacaugauaucuggacccaaaaggggggaacaugccuggacccacagacugcgugagagaaagcagcuggugauuuaugaagagaucagcgauccugaggaagaugaugaguaa

SEQ ID NO: 957 - RNA, 567 nt, Artificial Sequence
  AAC05820
augaacggagacgacgccuuugcaaggagacccagggaugaugcucaaauaucagagaaguuacgaaaggccuucgaugauauugccaaauacuucucuaagaaagagugggaaaagaugaaauccucggagaaaaucgucuauguguauaugaagcuaaacuaugaggucaugacuaaacuagguuucaaggucacccucccaccuuucaugcguaguaaacgggcugcagacuuccacgggaaugauuuugguaacgaucgaaaccacaggaaucagguugaacguccucagaugacuuucggcagccuccagagaaucuucccgaagaucaugcccaagaagccagcagaggaagaaaaugguuugaaggaagugccagaggcaucuggcccacaaaaugaugggaaacagcugugccccccgggaaauccaaguaccuuggagaagauuaacaagacaucuggacccaaaagggggaaacaugccuggacccacagacugcgugagagaaagcagcuggugguuuaugaagagaucagcgacccugaggaagaugacgaguaa

SEQ ID NO: 958 - RNA, 888 nt, Artificial Sequence
  CCDS32420.1
auggagcugauccaggacaccucccgcccgccacuggaguacgugaagggggucccgcucaucaaguacuuugcagaggcacuggggccccugcagagcuuccaggcccggccugaugaccugcucaucagcaccuaccccaaguccggcacuaccuggguaagccagauucuggacaugaucuaccaggguggugaccuggagaagugucaccgagcucccaucuucaugcgggugcccuuccuugaguucaaagccccagggauucccucagggauggagacucugaaagacacaccggccccacgacuccugaagacacaccugccccuggcucugcucccccagacucuguuggaucagaaggucaagguggucuauguugcccgcaacgcaaaggauguggcaguuuccuacuaccacuucuaccacauggccaaggugcacccugagccugggaccugggacagcuuccuggagaaguucauggucggagaaguguccuacggauccugguaccagcacgugcaggaguggugggagcugagccgcacccacccuguucucuaccucuucuaugaagacaugaaggagaacccgaaaagggagauucaaaagauccuggaguuuguggggcgcucccugccagaggagaccguggacuucgugguucagcacacgucguucaaggagaugaagaagaacccuaugaccaacuacaccaccgucccccaggaguucauggaccacagcaucucccccuucaugaggaaaggcauggcuggggacuggaagaccaccuucaccguggcgcagaaugagcgcuucgaugcggacuaugcggagaagauggcaggcugcagccucagcuuccgcucugagcuguga

SEQ ID NO: 959 - RNA, 3807 nt, Artificial Sequence
  CCDS43990.1
augauagcagcuccagaaauaccaacugauuuuaaucuacuacaggagucagaaacacauuuuucuucugacacagauuuugaagauaucgaaggaaaaaaccaaaagcaaggcaaaggcaaaacuuguaaaaaaggcaaaaagggcccagcagaaaagggcaaagguggaaauggaggaggaaaaccuccuucugguccaaaccgaaugaauggucaucaccaacagaauggaguggaaaacaugauguuguuugaaguuguuaaaaugggcaagagugcuaugcagucggugguagaugauuggauagaaucauacaagcaugaccgagauauagcacuucuugaccuuaucaacuuuuuuauucaguguucaggcuguaaaggaguugucacagcagaaauguuuagacauaugcagaacucugagauaauucgaaaaaugacugaagaauucgaugaggauaguggagauuauccacuuaccauggcugguccucaguggaagaaguucaaauccaguuuuugugaauucauuggcguguuaguacggcaaugucaauauaguaucauauaugaugaguauaugauggauacagucauuucacuucuuacaggauugucugacucacaagucagagcauuucgacauacaagcacccuggcagcuaugaaguugaugacagcuuuggugaauguggcacuaaaucuuagcauuaauauggauaauacacaaagacaauaugaagcagaacggaauaaaaugauuggaaaacgagccaaugagaggcuagaacuccugcuacaaaagcggaaagagcuucaggaaaaucaagaugaaauagaaaauaugaugaaugcaauauuuaaaggaguguuuguacauagauaccgugaugcgauagcugaaauucgagcuauuugcauugaagagauuggcauuuggaugaagauguauagugaugccuuucuuaaugacaguuauuuaaaauauguugguuggacuaugcaugauaagcaaggugaaguaagacucaaaugucuuacugcucuacaagggcuuuauuauaacaaagagcuuaauuccaaacuggaacuuuuuaccagucgguucaaggauagaauugugucuaugacccuugacaaagaauaugauguugcaguacaagcaauaaaauuacucacucuuguuuuacagaguagugaagaaguucucacugcagaagauugugaaaaugucuaucaucugguuuauucagcucaccggccaguagcaguagcagcuggagaauuucucuacaaaaagcucuucagucguagagauccagaggaggauggaaugaugaaaagaagaggaagacaagguccaaaugccaaccuuguuaagacauugguuuuuuucuuucuagaaagugaguuacaugagcaugcagcauaccuuguggauagcaugugggacugugcuacugagcugcugaaagacugggaauguaugaauagcuuguuacuggaagagccacuuaguggagaggaagcacuaacagauaggcaagagagugcucugauugaaauaaugcuuuguaccauuagacaagcggcugaaugucauccucccgugggaagagggacaggaaaaagggugcuuacagcaaaggagaagaagacacaguuggaugauaggacaaaaaucacugagcuuuuugccguggcccuuccucaguuauuagcaaaauacucuguagaugcagaaaaggugacuaacuuguugcaguugccucaguacuuugauuuggaaauauauaccacuggacgauuagaaaagcauuuggaugccuuauugcgacagauccggaauauuguagagaagcacacagauacagauguuuuggaagcauguucuaaaacuuaccaugcacucuguaaugaagaguucacaaucuucaacagaguagauauuucaagaagucaacugauagaugaauuggcagauaaauuuaaccggcuucuugaagauuuucugcaagagggugaagaaccugaugaagaugaugcauaucagguauugucaacauugaagaggaucacugcuuuucauaaugcccaugaccuuucaaagugggauuuauuugcuuguaauuacaaacucuugaaaacuggaaucgaaaauggagacaugccugagcagauuguuauucacgcacugcaguguacucacuauguaauccuuuggcaacuugcuaagauaacugaaagcagcucuacaaaggaggacuugcugcguuuaaagaaacaaaugagaguauuuugucagauaugucaacauuaccugaccaacgugaauacuacuguuaaggaacaggccuucacuauucugugugauauuuugaugaucuucagccaucagauuaugucaggagggcgugacauguuagagccauuaguguauaccccugauucuucauugcagucugaguugcucagcuuuauuuuggaucaugucuucauugaacaggaugaugauaauaauagugcagauggucagcaagaggaugaagccaguaaaauugaagcucugcacaagagaagaaauuuacuugcagcauuuuguaagcuaauuguauauacugugguggagaugaauacagcugcagauaucuucaaacaguauaugaaguauuauaaugacuauggagauaucaucaaagaaacaaugaguaaaacaaggcagauagacaaaauucagugugcuaagacccuuauucucagucugcaacagcuuuuuaaugaaaugauacaagaaaauggcuauaauuuugauagaucauccucuacauuuaguggcauaaaagaacuugcucgacguuuugcuuuaacuuuuggacuugaucaguugaaaacaagagaagccauugccaugcuacacaaagauggcauagaauuugcuuuuaaagagccuaauccgcaaggggagagccauccaccuuuaaauuuggcauuucuugauauucugagugaauuuucuucuaaacuacuucgacaagacaaaagaacaguguauguuuacuuggaaaaguucaugaccuuucagaugucacuccgaagagaggauguguggcuuccacugaugucuuaccgaaauucuuugcuagcugguggugaugaugacaccaugucagucauuaguggaaucagcagccgggggucaacaguacggaguaaaaaaucaaaaccaucuacaggaaaacggaaagugguugagggcaugcagcuuucacucacugaagaaaguaguaguagugacaguaugugguuaagcagagaacaaacacugcacaccccuguuaugaugcagacaccacaacucaccuccacuauuaugagagagcccaaaagauuacggccugaggauagcuucaugaguguuuauccaaugcagacugaacaucaucaaacaccucuugauuauaacacgcagguaacauggauguuagcucaaagacaacaagaggaagcaaggcaacagcaggagagagcagcaaugagcuauguuaaacugcgaacuaaucuucagcaugccauucggcguggcacaagccuaauggaagaugaugaagagccaauuguggaagauguuaugauguccucagaagggaggauugaggaucuuaaugagggaauggauuuugacaccauggauauagauuugccaccaucaaagaacagacgagagagaacagaacugaagccugauuucuuugauccagcuucaauuauggaugaaucaguucuuggagugucaauguuuuaa

SEQ ID NO: 960 - RNA, 1473 nt, Artificial Sequence
  CCDS5615.1
auggaaucaaucucuaugaugggaagcccuaagagccuuagugaaacuuuuuuaccuaauggcauaaaugguaucaaagaugcaaggaaggucacuguaggugugauuggaaguggagauuuugccaaauccuugaccauucgacuuauuagaugcggcuaucauguggucauaggaaguagaaauccuaaguuugcuucugaauuuuuuccucaugugguagaugucacucaucaugaagaugcucucacaaaaacaaauauaauauuuguugcuauacacagagaacauuauaccucccugugggaccugagacaucugcuuguggguaaaauccugauugaugugagcaauaacaugaggauaaaccaguacccagaauccaaugcugaauauuuggcuucauuauucccagauucuuugauugucaaaggauuuaauguugucucagcuugggcacuucaguuaggaccuaaggaugccagccggcagguuuauauaugcagcaacaauauucaagcgcgacaacagguuauugaacuugcccgccaguugaauuucauucccauugacuugggauccuuaucaucagccagagagauugaaaauuuaccccuacgacucuuuacucucuggagagggccaguggugguagcuauaagcuuggccacauuuuuuuuccuuuauuccuuugucagagaugugauucauccauaugcuagaaaccaacagagugacuuuuacaaaauuccuauagagauugugaauaaaaccuuaccuauaguugccauuacuuugcucucccuaguauaccucgcaggucuucuggcagcugcuuaucaacuuuauuacggcaccaaguauaggagauuuccaccuugguuggaaaccugguuacaguguagaaaacagcuuggauuacuaaguuuuuucuucgcuaugguccauguugccuacagccucugcuuaccgaugagaaggucagagagauauuuguuucucaacauggcuuaucagcagguucaugcaaauauugaaaacucuuggaaugaggaagaaguuuggagaauugaaauguauaucuccuuuggcauaaugagccuuggcuuacuuucccuccuggcagucacuucuaucccuucagugagcaaugcuuuaaacuggagagaauucaguuuuauucagucuacacuuggauaugucgcucugcucauaaguacuuuccauguuuuaauuuauggauggaaacgagcuuuugaggaagaguacuacagauuuuauacaccaccaaacuuuguucuugcucuuguuuugcccucaauuguaauucuggguaagauuauuuuauuccuuccauguauaagccgaaagcuaaaacgaauuaaaaaaggcugggaaaagagccaauuucuggaagaagguaugggaggaacaauuccucaugucuccccggagagggucacaguaauguga

SEQ ID NO: 961 - RNA, 777 nt, Artificial Sequence
  EAW93749
auggaaagcagaaaagacaucacaaaccaagaagaaauuuggaaaaugaagccuaggagaaauuuagaagacaacgauuauuugcauaaggacacgggagagaccagcaugcuaaaaagaccugugcuuuugcauuugcagcaaacagcccaugcugaugaauuugacugcccuucagaacuucagcacgcacaggaacucuuuccacaguggcacuugccaauuaaaauagcugcuguuauggcaucucugacuuuucuuuacacucuucugagggaaguaauucacccuuuagcaacuucccaucaacaauauuuuuauaaaauuccaauccuggucaucaacaaagucuugccaaugguuuccaucacucucuuggcauugguuuaccuaccaggugugauagcagcaauuguccaaguucauaauggaaccaaguauaagaaguuuccacauugguuggauaaguggauguuaacaagaaagcaguuugggcuucucaguuuguuuuuugcuguacugcaugcaauuuauacucugucuuacgcaaugaggcgauccuacagauacaaguugcuaaacugggcauaucaacagguccaacaaaauaaagaagaugccuggauugagcaugauguuuggagaauggagauuuaugugucucugggaauugugggacuggcaauacuggcucuguuggcugugacaucuauuccaucugugagugacucuuugacauggagagaauuucacuauauucagguaaauaauauauaa

SEQ ID NO: 962 - RNA, 1020 nt, Artificial Sequence
  AAD15620
auggaaagcagaaaagacaucacaaaccaagaagaacuuuggaaaaugaagccuaggagaaauuuagaagaagacgauuauuugcauaaggacacgggagagaccagcaugcuaaaaagaccugugcuuuugcauuugcaccaaacagcccaugcugaugaauuugacugcccuucagaacuucagcacacacaggaacucuuuccacaguggcacuugccaauuaaaauagcugcuauuauagcaucucugacuuuucuuuacacucuucugagggaaguaauucacccuuuagcaacuucccaucaacaauauuuuuauaaaauuccaauccuggucaucaacaaagucuugccaaugguuuccaucacucucuuggcauugguuuaccugccaggugugauagcagcaauuguccaacuucauaauggaaccaaguauaagaaguuuccacauugguuggauaaguggauguuaacaagaaagcaguuugggcuucucaguuucuuuuuugcuguacugcaugcaauuuauagucugucuuacccaaugaggcgauccuacagauacaaguugcuaaacugggcauaucaacagguccaacaaaauaaagaagaugccuggauugagcaugauguuuggagaauggagauuuaugugucucugggaauugugggauuggcaauacuggcucuguuggcugugacaucuauuccaucugugagugacucuuugacauggagagaauuucacuauauucagagcaagcuaggaauuguuucccuucuacugggcacaauacacgcauugauuuuugccuggaauaaguggauagauauaaaacaauuuguaugguauacaccuccaacuuuuaugauagcuguuuuccuuccaauuguuguccugauauuuaaaagcauacuauuccugccaugcuugaggaagaagauacugaagauuagacaugguugggaagacgucaccaaaauuaacaaaacugagauauguucccaguuguag

SEQ ID NO: 963 - RNA, 498 nt, Artificial Sequence
  CCDS32752.1
augggugccccgacguugcccccugccuggcagcccuuucucaaggaccaccgcaucucuacauucaagaacuggcccuucuuggagggcugcgccugcaccccggagcggauggccgaggcuggcuucauccacugccccacugagaacgagccagacuuggcccaguguuucuucugcuucaaggagcuggaaggcugggagccagaugacgaccccauugggccgggcacgguggcuuacgccuguaauaccagcacuuugggaggccgaggcgggcggaucacgagagaggaacauaaaaagcauucguccgguugcgcuuuccuuucugucaagaagcaguuugaagaauuaacccuuggugaauuuuugaaacuggacagagaaagagccaagaacaaaauugcaaaggaaaccaacaauaagaagaaagaauuugaggaaacugcggagaaagugcgccgugccaucgagcagcuggcugccauggauuga

SEQ ID NO: 964 - RNA, 429 nt, Artificial Sequence
  AAC51660
augggugccccgacguugcccccugccuggcagcccuuucucaaggaccaccgcaucucuacauucaagaacuggcccuucuuggagggcugcgccugcaccccggagcggauggccgaggcuggcuucauccacugccccacugagaacgagccagacuuggcccaguguuucuucugcuucaaggagcuggaaggcugggagccagaugacgaccccauagaggaacauaaaaagcauucguccgguugcgcuuuccuuucugucaagaagcaguuugaagaauuaacccuuggugaauuuuugaaacuggacagagaaagagccaagaacaaaauugcaaaggaaaccaacaauaagaagaaagaauuugaggaaacugcgaagaaagugcgccgugccaucgagcagcuggcugccauggauuga

SEQ ID NO: 965 - RNA, 2931 nt, Artificial Sequence
  EAW56623
auggaaaagcaaaagcccuuugcauuguucguaccaccgagaucaagcagcagucaggugucugcggugaaaccucagacccugggaggcgauuccacuuucuucaagaguuucaacaaauguacugaagaugauuuugaguuuccauuugcaaagacuaaucucuccaaaaauggggaaaacauugauucagauccugcuuuacaaaaaguuaauuucuugcccgugcuugagcagguugguaauucugacugucacuaucaggaaggacuaaaagacucugauuuggagaauucagagggauugagcagaguguauucaaaacuguauaaggaggcugaaaagauaaaaaaauggaaaguaaguacagaagcugaacugagacagaaagaaaguaaguugcaagaaaacagaaagauaauugaagcacagcgaaaagccauucaggaacugcaauuuggaaaugaaaaaguaaguuugaaauuagaagaaggaauacaagaaaauaaagauuuaauaaaagagaauaaugccacaaggcauuuauguaaucuacucaaagaaaccugugcuagaucugcagaaaagacaaagaaauaugaauaugaacgggaagaaaccaggcaaguuuauauggaucuaaauaauaacauugagaaaaugauaacagcuuuugaggaacuucgugugcaagcugagaauuccagacuggaaaugcauuuuaaguuaaaggaagauuaugaaaaaauccaacaccuugaacaagaauacaagaaggaaauaaaugacaaggaaaagcagguaucacuacuauugauccaaaucacugagaaagaaaauaaaaugaaagauuuaacauuucugcuagaggaauccagagauaaaguuaaucaauuagaggaaaagacaaaauuacagagugaaaacuuaaaacaaucaauugagaaacagcaucauuugacuaaagaacuagaagauauuaaagugucauuacaaagaagugugaguacucaaaaggcuuuagaggaagauuuacagauagcaacaaaaacaauuugucagcuaacugaagaaaaagaaacucaaauggaagaaucuaauaaagcuagagcugcucauucguuugugguuacugaauuugaaacuacugucugcagcuuggaagaauuauugagaacagaacagcaaagauuggaaaaaaaugaagaucaauugaaaauacuuaccauggagcuucaaaagaaaucaagugagcuggaagagaugacuaagcuuacaaauaacaaagaaguagaacuugaagaauugaaaaaagucuugggagaaaaggaaacacuuuuauaugaaaauaaacaauuugagaagauugcugaagaauuaaaaggaacagaacaagaacuaauuggucuucuccaagccagagagaaagaaguacaugauuuggaaauacaguuaacugccauuaccacaagugaacaguauuauucaaaagagguuaaagaucuaaaaacugagcuugaaaacgagaagcuuaagaauacugaauuaacuucacacugcaacaagcuuucacuagaaaacaaagagcucacacaggaaacaagugauaugacccuagaacucaagaaucagcaagaagauauuaauaauaacaaaaagcaagaagaaaggauguugaaacaaauagaaaaucuucaagaaacagaaacccaauuaagaaaugaacuagaauaugugagagaagagcuaaaacagaaaagagaugaaguuaaauguaaauuggacaagagugaagaaaauuguaacaauuuaaggaaacaaguugaaaauaaaaacaaguauauugaagaacuucagcaggagaauaaggccuugaaaaaaaaagguacagcagaaagcaagcaacugaauguuuaugagauaaaggucaauaaauuagaguuagaacuagaaagugccaaacagaaauuuggagaaaucacagacaccuaucagaaagaaauugaggacaaaaagauaucagaagaaaaucuuuuggaagagguugagaaagcaaaaguaauagcugaugaagcaguaaaauuacagaaagaaauugauaagcgaugucaacauaaaauagcugaaaugguagcacuuauggaaaaacauaagcaccaauaugauaagaucauugaagaaagagacucagaauuaggacuuuauaagagcaaagaacaagaacagucaucacugagagcaucuuuggagauugaacuauccaaucucaaagcugaacuuuugucuguuaagaagcaacuugaaauagaaagagaagagaaggaaaaacucaaaagagaggcaaaagaaaacacagcuacucuuaaagaaaaaaaagacaagaaaacacaaacauuuuuauuggaaacaccugaaauuuauuggaaauuggauucuaaagcaguuccuucacaaacuguaucucgaaauuucacaucaguugaucauggcauauccaaagauaaaagagacuaucuguggacaucugccaaaaauacuuuaucuacaccauugccaaaggcauauacagugaagacaccaacaaaaccaaaacuacagcaaagagaaaacuugaauauacccauugaagaaaguaaaaaaaagagaaaaauggccuuugaauuugauauuaauucagauaguucagaaacuacugaucuuuugagcaugguuucagaagaagagacauugaaaacacuguauaggaacaauaauccaccagcuucucaucuuugugucaaaacaccaaaaaaggccccuucaucucuaacaaccccuggaucuacacugaaguuuggagcuauaagaaaaaugcgggaggaccguugggcuguaauugcuaaaauggauagaaaaaaaaaacuaaaagaagcugaaaaguuauuuguuuaa

SEQ ID NO: 966 - RNA, 2931 nt, Artificial Sequence
  AAI44020
auggaaaagcaaaagcccuuugcauuguucguaccaccgagaucaagcagcagucaggugucugcggugaaaccucagacccugggaggcgauuccacuuucuucaagaguuucaacaaauguacugaagaugauuuugaguuuccauuugcaaagacuaaucucuccaaaaauggggaaaacauugauucagauccugcuuuacaaaaaguuaauuucuugcccguguuugagcagguugguaauucugacugucacuaucaggaaggacuaaaagacucugauuuggagaauucagagggauugagcagaguguauucaaaacuguauaaggaggcugaaaagauaaaaaaauggaaaguaaguacagaagcugaacugagacagaaagaaaguaaguugcaagaaaacagaaagauaauugaagcacagcgaaaagccauucaggaacugcaauuuggaaaugaaaaaguaaguuugaaauuagaagaaggaauacaagaaaauaaagauuuaauaaaagagaauaaugccacaaggcauuuauguaaucuacucaaagaaaccugugcuagaucugcagaaaagacaaagaaauaugaauaugaacgggaagaaaccaggcaaguuuauauggaucuaaauaguaacauugagaaaaugauaacagcuuuugaggaacuucgugugcaagcugagaauuccagacuggaaaugcauuuuaaguuaaaggaagauuaugaaaaaauccaacaccuugaacaagaauacaagaaggaaauaaaugacaaggaaaagcagguaucacuacuauugauccaaaucacugagaaagaaaauaaaaugaaagauuuaacauuucugcuagaggaauccagagauaaaguuaaucaauuagaggaaaagacaaaauuacagagugaaaacuuaaaacaaucaauugagaaacagcaucauuugacuaaagaacuagaagauauuaaagugucauuacaaagaagugugaguacucaaaaggcuuuagaggaagauuuacagauagcaacaaaaacaauuugucagcuaacugaagaaaaagaaacucaaauggaagaaucuaauaaagcuagagcugcucauucguuugugguuacugaauuugaaacuacugucugcagcuuggaagaauuauugagaacagaacagcaaagauuggaaaaaaaugaagaucaauugaaaauacuuaccauggagcuucaaaagaaaucaagugagcuggaagagaugacuaagcuuacaaauaacaaagaaguagaacuugaagaauugaaaaaagucuugggagaaaaggaaacacuuuuauaugaaaauaaacaauuugagaagauugcugaagaauuaaaaggaacagaacaagaacuaauuggucuucuccaagccagagagaaagaaguacaugauuuggaaauacaguuaacugccauuaccacaagugaacaguauuauucaaaagagguuaaagaucuaaaaacugagcuugaaaacgagaagcuuaagaauacugaauuaacuucacacugcaacaagcuuucacuagaaaacaaagagcucacacaggaaacaagugauaugacccuagaacucaagaaucagcaagaagauauuaauaauaacaaaaagcaagaagaaaggauguugaaacaaauagaaaaucuucaagaaacagaaacccaauuaagaaaugaacuagaauaugugagagaagagcuaaaacagaaaagagaugaaguuaaauguaaauuggacaagagugaagaaaauuguaacaauuuaaggaaacaaguugaaaauaaaaacaaguauauugaagaacuucagcaggagaauaaggccuugaaaaaaaaagguacagcagaaagcaagcaacugaauguuuaugagauaaaggucaauaaauuagaguuagaacuagaaagugccaaacagaaauuuggagaaaucacagacaccuaucagaaagaaauugaggacaaaaagauaucagaagaaaaucuuuuggaagagguugagaaagcaaaaguaauagcugaugaagcaguaaaauuacagaaagaaauugauaagcgaugucaacauaaaauagcugaaaugguagcacuuauggaaaaacauaagcaccaauaugauaagaucauugaagaaagagacucagaauuaggacuuuauaagagcaaagaacaagaacagucaucacugagagcaucuuuggagauugaacuauccaaucucaaagcugaacuuuugucuguuaagaagcaacuugaaauagaaagagaagagaaggaaaaacucaaaagagaggcaaaagaaaacacagcuacucuuaaagaaaaaaaagacaagaaaacacaaacauuuuuauuggaaacaccugaaauuuauuggaaauuggauucuaaagcaguuccuucacaaacuguaucucgaaauuucacaucaguugaucauggcauauccaaagauaaaagagacuaucuguggacaucugccaaaaauacuuuaucuacaccauugccaaaggcauauacagugaagacaccaacaaaaccaaaacuacagcaaagagaaaacuugaauauacccauugaagaaaguaaaaaaaagagaaaaauggccuuugaauuugauauuaauucagauaguucagaaacuacugaucuuuugagcaugguuucagaagaagagacauugaaaacacuguauaggaacaauaauccaccagcuucucaucuuugugucaaaacaccaaaaaaggccccuucaucucuaacaaccccuggaucuacacugaaguuuggagcuauaagaaaaaugcgggaggaccguugggcuguaauugcuaaaauggauagaaaaaaaaaacuaaaagaagcugaaaaguuauuuguuuaa

SEQ ID NO: 967 - RNA, 2931 nt, Artificial Sequence; identical to SEQ ID NO: 965
  AAI26267

SEQ ID NO: 968 - RNA, 330 nt, Artificial Sequence
  AAI05300
auggaaaagcaaaagcccuuugcauuguucguaccaccgagaucaagcagcagucaggugucugcggugaaaccucagacccugggaggcgauuccacuuucuucaagaguuucaacaaauguacugaagaugauuuugaguuuccauuugcaaagacuaaucucuccaaaaauggggaaaacauugauucagauccugcuuuacaaaacguuaauuucuugcccgugcuugagcagguugguaauucugacugucacuaucaggaaggacuaaaagacucugauuuggagaauucagagggauugagcagaguguauucaaaacuguaa

SEQ ID NO: 969 - RNA, 1467 nt, Artificial Sequence
  BAF56181
augucuguggcuuucgcggccccgaggcagcgaggcaagggggagaucacucccgcugcgauucagaagauguuggaugacaauaaccaucuuauucaguguauaauggacucucagaauaaaggaaagaccucagaguguucucaguaucagcagauguugcacacaaacuugguauaccuugcuacaauagcagauucuaaucaaaauaugcagucucuuuuaccagcaccacccacacagaauaugccuauggguccuggagggaugaaucagagcggcccucccccaccuccacgcucucacaacaugccuucagauggaaugguagguggggguccuccugcaccgcacaugcagaaccagaugaacggccagaugccugggccuaaccauaugccuaugcagggaccuggacccaaucaacucaauaugacaaacaguuccaugaauaugccuucaaguagccauggauccaugggagguuacaaccauucugugccaucaucgcagagcaugccaguacagaaucagaugacaaugagucagggacaaccaaugggaaacuauggucccagaccaaauaugaguaugcagccaaaccaagguccaaugaugcaucagcagccuccuucucagcaauacaauaugccacagggaggcggacagcauuaccaaggacagcagccaccuauggggaugaugggucaaguuaaccaaggcaaucauaugaugggucagagacagauuccucccuauagaccuccucaacagggcccaccacagcaguacucaggccaggaagacuauuacggggaccaauacagucaugguggacaagguccuccagaaggcaugaaccagcaauauuacccugauggucauaaugauuacgguuaucagcaaccgucguauccugaacaaggcuacgauaggccuuaugaggauuccucacaacauuacuacgaaggaggaaauucacaguauggccaacagcaagaugcauaccagggaccaccuccacaacagggauauccaccccagcagcagcaguacccagggcagcaagguuacccaggacagcagcagggcuacgguccuucacagggugguccagguccucaguauccuaacuacccacagggacaaggucagcaguauggaggauauagaccaacacagccuggaccaccacagccaccccagcagaggccuuauggauaugaccagaucaugcccaagaagccagcagaggacgaaaaugauucgaagggagugucagaagcaucuggcccacaaaacgaugggaaacaacugcaccccccaggaaaagcaaauauuucugagaagauuaauaagagaucuggacccaaaagggggaaacaugccuggacccacagacugcgugagagaaagcagcuggugauuuaugaagagaucagcgacccugaggaagaugacgaguaa

SEQ ID NO: 970 - RNA, 1374 nt, Artificial Sequence
  BAF56182
augucuguggcuuucgcggccccgaggcagcgaggcaagggggagaucacucccgcugcgauucagaagauguuggaugacaauaaccaucuuauucaguguauaauggacucucagaauaaaggaaagaccucagaguguucucaguaucagcagauguugcacacaaacuugguauaccuugcuacaauagcagauucuaaucaaaauaugcagucucuuuuaccagcaccacccacacagaauaugccuauggguccuggagggaugaaucagagcggcccucccccaccuccacgcucucacaacaugccuucagauggaaugguagguggggguccuccugcaccgcacaugcagaaccagaugaacggccagaugccugggccuaaccauaugccuaugcagggaccuggacccaaucaacucaauaugacaaacaguuccaugaauaugccuucaaguagccauggauccaugggagguuacaaccauucugugccaucaucgcagagcaugccaguacagaaucagaugacaaugagucagggacaaccaaugggaaacuauggucccagaccaaauaugaguaugcagccaaaccaagguccaaugaugcaucagcagccuccuucucagcaauacaauaugccacagggaggcggacagcauuaccaaggacagcagccaccuauggggaugaugggucaaguuaaccaaggcaaucauaugaugggucagagacagauuccucccuauagaccuccucaacagggcccaccacagcaguacucaggccaggaagacuauuacggggaccaauacagucaugguggacaagguccuccagaaggcaugaaccagcaauauuacccugauggaaauucacaguauggccaacagcaagaugcauaccagggaccaccuccacaacagggauauccaccccagcagcagcaguacccagggcagcaagguuacccaggacagcagcagggcuacgguccuucacagggugguccagguccucaguauccuaacuacccacagggacaaggucagcaguauggaggauauagaccaacacagccuggaccaccacagccaccccagcagaggccuuauggauaugaccagaucaugcccaagaagccagcagaggacgaaaaugauucgaagggagugucagaagcaucuggcccacaaaacgaugggaaacaacugcaccccccaggaaaagcaaauauuucugagaagauuaauaagagaucuggacccaaaagggggaaacaugccuggacccacagacugcgugagagaaagcagcuggugauuuaugaagagaucagcgacccugaggaagaugacgaguaa

SEQ ID NO: 971 - RNA, 1467 nt, Artificial Sequence
  BAF56183
augucuguggcuuucgcggccccgaggcagcgaggcaagggggagaucacucccgcugcgauucagaagauguuggaugacaauaaccaucuuauucaguguauaauggacucucagaauaaaggaaagaccucagaguguucucaguaucagcagauguugcacacaaacuugguauaccuugcuacaauagcagauucuaaucaaaauaugcagucucuuuuaccagcaccacccacacagaauaugccuauggguccuggagggaugaaucagagcggcccucccccaccuccacgcucucacaacaugccuucagauggaaugguagguggggguccuccugcaccgcacaugcagaaccagaugaacggccagaugccugggccuaaccauaugccuaugcagggaccuggacccaaucaacucaauaugacaaacaguuccaugaauaugccuucaaguagccauggauccaugggagguuacaaccauucugugccaucaucgcagagcaugccaguacagaaucagaugacaaugagucagggacaaccaaugggaaacuauggucccagaccaaauaugaguaugcagccaaaccaagguccaaugaugcaucagcagccuccuucucagcaauacaauaugccacagggaggcggacagcauuaccaaggacagcagccaccuauggggaugaugggucaaguuaaccaaggcaaucauaugaugggucagagacagauuccucccuauagaccuccucaacagggcccaccacagcaguacucaggccaggaagacuauuacggggaccaauacagucaugguggacaagguccuccagaaggcaugaaccagcaauauuacccugauggucauaaugauuacgguuaucagcaaccgucguauccugaacaaggcuacgauaggccuuaugaggauuccucacaacauuacuacgaaggaggaaauucacaguauggccaacagcaagaugcauaccagggaccaccuccacaacagggauauccaccccagcagcagcaguacccagggcagcaagguuacccaggacagcagcagggcuacgguccuucacagggugguccagguccucaguauccuaacuacccacagggacaaggucagcaguauggaggauauagaccaacacagccuggaccaccacagccaccccagcagaggccuuauggauaugaccagaucaugcccaagaagccagcagaggaaggaaaugauucggaggaagugccagaagcaucuggcccacaaaaugaugggaaagagcugugccccccgggaaaaccaacuaccucugagaagauucacgagagaucuggacccaaaaggggggaacaugccuggacccacagacugcgugagagaaaacagcuggugauuuaugaagagaucagcgacccugaggaagaugacgaguaa

SEQ ID NO: 972 - RNA, 1374 nt, Artificial Sequence
  BAF56184
augucuguggcuuucgcggccccgaggcagcgaggcaagggggagaucacucccgcugcgauucagaagauguuggaugacaauaaccaucuuauucaguguauaauggacucucagaauaaaggaaagaccucagaguguucucaguaucagcagauguugcacacaaacuugguauaccuugcuacaauagcagauucuaaucaaaauaugcagucucuuuuaccagcaccacccacacagaauaugccuauggguccuggagggaugaaucagagcggcccucccccaccuccacgcucucacaacaugccuucagauggaaugguagguggggguccuccugcaccgcacaugcagaaccagaugaacggccagaugccugggccuaaccauaugccuaugcagggaccuggacccaaucaacucaauaugacaaacaguuccaugaauaugccuucaaguagccauggauccaugggagguuacaaccauucugugccaucaucgcagagcaugccaguacagaaucagaugacaaugagucagggacaaccaaugggaaacuauggucccagaccaaauaugaguaugcagccaaaccaagguccaaugaugcaucagcagccuccuucucagcaauacaauaugccacagggaggcggacagcauuaccaaggacagcagccaccuauggggaugaugggucaaguuaaccaaggcaaucauaugaugggucagagacagauuccucccuauagaccuccucaacagggcccaccacagcaguacucaggccaggaagacuauuacggggaccaauacagucaugguggacaagguccuccagaaggcaugaaccagcaauauuacccugauggaaauucacaguauggccaacagcaagaugcauaccagggaccaccuccacaacagggauauccaccccagcagcagcaguacccagggcagcaagguuacccaggacagcagcagggcuacgguccuucacagggugguccagguccucaguauccuaacuacccacagggacaaggucagcaguauggaggauauagaccaacacagccuggaccaccacagccaccccagcagaggccuuauggauaugaccagaucaugcccaagaagccagcagaggaaggaaaugauucggaggaagugccagaagcaucuggcccacaaaaugaugggaaagagcugugccccccgggaaaaccaacuaccucugagaagauucacgagagaucuggacccaaaaggggggaacaugccuggacccacagacugcgugagagaaaacagcuggugauuuaugaagagaucagcgacccugaggaagaugacgaguaa

SEQ ID NO: 973 - RNA, 336 nt, Artificial Sequence
  AAI05590
augaagacuaacgacacauacaugaaauuuagcugguuaacggugccagaaaagucacuggacaaagaacacagauguaucgucagacaugagaauaauaaaaacggaguugaucaagaaauuaucuuuccuccaauaaagacagaugucaucacaauggaucccaaagacaauuguucaaaagaugcaaaugauacacuacugcugcagcucacaaacaccucugcauauuacauguaccuccuccugcuccucaagaguguggucuauuuugccaucaucaccugcugucugcuuagaagaacggcuuucugcugcaauggagagaaaucauaa

SEQ ID NO: 974 - RNA, 177 nt, Artificial Sequence
  AAG29337
augcagauguuucccccaagcccacuauuuuucuuccuucaauugcugaaacaaagcuccagaaggcuggaacauaccuuugucuucuugagaaauuuuucccugauguuauuaagauacauuggcaagaaaagaagagcaacacgauucugggaucccaggaggggaacaccauga

SEQ ID NO: 975 - RNA, 1131 nt, Artificial Sequence
  AAF26776
auggcgaacucggcaaauacaaacaccgugccuaaauuauacagaucugugauugaagaugucauuaaugaugugagagacaucuuucuggaugauggaguggaugaacaaguacugauggaacuaaaaacuuuaugggaaaacaaacuaaugcaguccagggcaguagauggauuucauucagaagagcagcagcuucuacugcaaguucaacagcagcaucaaccccagcagcagcagcaucaccaccaucaccaucaucagcaagcucagccucagcagacaguaccucagcaagcgcagacccagcagguucuuauuccugcaucacagcaagccacagcaccacaaguuauuguuccagauucuaaguugauacagcauaugaaugcaucaaacaugagugcugcugcuacagcugcuaccuuagcacucccugcaggugugacuccuguucagcagauauuaacaaauucaggccagcuucuucagguggucagagcagccaauggugcccaauauaucuuucagccucagcagucagugguucuacaacaacagguuauaccacaaaugcagccugguggaguacaagcuccuguuauacagcaggugcuggcuccucuuccuggagggauuucaccacagacaggugucaucauccagccucagcaaaucuuauuuacaggaaauaagacucaaguuauaccuacgacaguggcagcaccuacaccagcccaagcacagauaacugcaacuggccagcagcaaccgcaggcccagccugcucaaacacaagcuccauuggucuuacaaguugauggaacuggggauacaucaucugaagaagaugaagaugaagaagaagacuaugaugaugaugaggaggaagacaaagagaaagauggagcugaagaugggcagguggaagaagagccccucaauagugaagaugaugugagugaugaggaaggacaggaacucuuugacacagaaaauguuguuguaugccaauaugauaagauacacagaaguaaaaacaaauggaaauuucaucucaaggauggcauuaugaaucuuaauggaagagauuauauauuuuccaaagccauuggagaugcagaaugguga

SEQ ID NO: 976 - RNA, 1173 nt, Artificial Sequence
  AAH00125
augccgcccuccgggcugcggcugcugcugcugcugcuaccgcugcuguggcuacuggugcugacgccuggccggccggccgcgggacuauccaccugcaagacuaucgacauggagcuggugaagcggaagcgcaucgaggccauccgcggccagauccuguccaagcugcggcucgccagccccccgagccagggggaggugccgcccggcccgcugcccgaggccgugcucgcccuguacaacagcacccgcgaccggguggccggggagagugcagaaccggagcccgagccugaggccgacuacuacgccaaggaggucacccgcgugcuaaugguggaaacccacaacgaaaucuaugacaaguucaagcagaguacacacagcauauauauguucuucaacacaucagagcuccgagaagcgguaccugaacccguguugcucucccgggcagagcugcgucugcugaggcucaaguuaaaaguggagcagcacguggagcuguaccagaaauacagcaacaauuccuggcgauaccucagcaaccggcugcuggcacccagcgacucgccagagugguuaucuuuugaugucaccggaguugugcggcagugguugagccguggaggggaaauugagggcuuucgccuuagcgcccacugcuccugugacagcagggauaacacacugcaaguggacaucaacggguucacuaccggccgccgaggugaccuggccaccauucauggcaugaaccggccuuuccugcuucucauggccaccccgcuggagagggcccagcaucugcaaagcucccggcaccgccgagcccuggacaccaacuauugcuucagcuccacggagaagaacugcugcgugcggcagcuguacauugacuuccgcaaggaccucggcuggaaguggauccacgagcccaagggcuaccaugccaacuucugccucgggcccugccccuacauuuggagccuggacacgcaguacagcaagguccuggcccuguacaaccagcauaacccgggcgccucggcggcgccgugcugcgugccgcaggcgcuggagccgcugcccaucguguacuacgugggccgcaagcccaagguggagcagcuguccaacaugaucgugcgcuccugcaagugcagcuga

SEQ ID NO: 977 - RNA, 1704 nt, Artificial Sequence
  AAT70724
augggucgggggcugcucaggggccuguggccgcugcacaucguccuguggacgcguaucgccagcacgaucccaccgcacguucagaagucgguuaauaacgacaugauagucacugacaacaacggugcagucaaguuuccacaacuguguaaauuuugugaugugagauuuuccaccugugacaaccagaaauccugcaugagcaacugcagcaucaccuccaucugugagaagccacaggaagucuguguggcuguauggagaaagaaugacgagaacauaacacuagagacaguuugccaugaccccaagcuccccuaccaugacuuuauucuggaagaugcugcuucuccaaagugcauuaugaaggaaaaaaaaaagccuggugagacuuucuucauguguuccuguagcucugaugagugcaaugacaacaucaucuucucagaagaauauaacaccagcaauccugacuuguugcuagucauauuucaagugacaggcaucagccuccugccaccacugggaguugccauaucugucaucaucaucuucuacugcuaccgcguuaaccggcagcagaagcugaguucaaccugggaaaccggcaagacgcggaagcucauggaguucagcgagcacugugccaucauccuggaagaugaccgcucugacaucagcuccacgugugccaacaacaucaaccacaacacagagcugcugcccauugagcuggacacccugguggggaaaggucgcuuugcugaggucuauaaggccaagcugaagcagaacacuucagagcaguuugagacaguggcagucaagaucuuucccuaugaggaguaugccucuuggaagacagagaaggacaucuucucagacaucaaucugaagcaugagaacauacuccaguuccugacggcugaggagcggaagacggaguuggggaaacaauacuggcugaucaccgccuuccacgccaagggcaaccuacaggaguaccugacgcggcaugucaucagcugggaggaccugcgcaagcugggcagcucccucgcccgggggauugcucaccuccacagugaucacacuccaugugggaggcccaagaugcccaucgugcacagggaccucaagagcuccaauauccucgugaagaacgaccuaaccugcugccugugugacuuugggcuuucccugcgucuggacccuacucugucuguggaugaccuggcuaacagugggcaggugggaacugcaagauacauggcuccagaaguccuagaauccaggaugaauuuggagaauguugaguccuucaagcagaccgaugucuacuccauggcucuggugcucugggaaaugacaucucgcuguaaugcagugggagaaguaaaagauuaugagccuccauuugguuccaaggugcgggagcaccccugugucgaaagcaugaaggacaacguguugagagaucgagggcgaccagaaauucccagcuucuggcucaaccaccagggcauccagauggugugugagacguugacugagugcugggaccacgacccagaggcccgucucacagcccaguguguggcagaacgcuucagugagcuggagcaucuggacaggcucucggggaggagcugcucggaggagaagauuccugaagacggcucccuaaacacuaccaaauag

SEQ ID NO: 978 - RNA, 2055 nt, Artificial Sequence
  BAG35778
augauggaugcaucaaaagagcugcaaguucuccacauugacuucuugaaucaggacaacgccguuucucaccacacaugggaguuccaaacgagcaguccuguguuccggcgaggacagguguuucaccugcggcuggugcugaaccagcccccacaauccuaccaccaacugaaacuggaauucagcacagggccgaauccuagcaucgccaaacacacccugguggugcucgacccgaggacgcccucagaccacuacaacuggcaggcaacccuucaaaaugagucuggcaaagaggucacaguggcugucaccaguucccccaaugccauccugggcaaguaccaacuaaacgugaaaacuggaaaccacauccuuaagucugaagaaaacauccuauaccuucucuucaacccaugguguaaagaggacaugguuuucaugccugaugaggacgagcgcaaagaguacauccucaaugacacgggcugccauuacgugggggcugccagaaguaucaaaugcaaacccuggaacuuuggucaguuugagaaaaauguccuggacugcugcauuucccugcugacugagagcucccucaagcccacagauaggagggaccccgugcuggugugcagggccaugugugcuaugaugagcuuugagaaaggccagggcgugcucauugggaauuggacuggggacuacgaagguggcacagccccauacaaguggacaggcagugccccgauccugcagcaguacuacaacacgaagcaggcugugugcuuuggccagugcuggguguuugcugggauccugacuacagugcugagagcguugggcaucccagcacgcagugugacaggcuucgauucagcucacgacacagaaaggaaccucacgguggacaccuaugugaaugagaauggcgagaaaaucaccaguaugacccacgacucugucuggaauuuccauguguggacggaugccuggaugaagcgaccggaucugcccaagggcuacgacggcuggcaggcuguggacgcaacgccgcaggagcgaagccagggugucuucugcugugggccaucaccacugaccgccauccgcaaaggugacaucuuuauugucuaugacaccagauucgucuucucagaagugaauggugacaggcucaucugguuggugaagauggugaaugggcaggaggaguuacacguaauuucaauggagaccacaagcaucgggaaaaacaucagcaccaaggcagugggccaagacaggcggagagauaucaccuaugaguacaaguauccagaaggcuccucugaggagaggcaggucauggaucaugccuuccuccuucucaguucugagagggagcacagacgaccuguaaaagagaacuuucuucacaugucgguacaaucagaugaugugcugcugggaaacucuguuaauuucaccgugauucuuaaaaggaagaccgcugcccuacagaaugucaacaucuugggcuccuuugaacuacaguuguacacuggcaagaagauggcaaaacugugugaccucaauaagaccucgcagauccaaggucaaguaucagaagugacucugaccuuggacuccaagaccuacaucaacagccuggcuauauuagaugaugagccaguuaucagagguuucaucauugcggaaauuguggagucuaaggaaaucauggccucugaaguauucacgucuuuccaguacccugaguucucuauagaguugccuaacacaggcagaauuggccagcuacuugucugcaauuguaucuucaagaauacccuggccaucccuuugacugacgucaaguucucuuuggaaagccugggcaucuccucacuacagaccucugaccaugggacggugcagccuggugagaccauccaaucccaaauaaaaugcaccccaauaaaaacuggacccaagaaauuuaucgucaaguuaaguuccaaacaagugaaagagauuaaugcucagaagauuguucucaucaccaaguag

SEQ ID NO: 979 - RNA, 3375 nt, Artificial Sequence
  CCDS6519.1
auggacucuuuagccagcuuaguucucuguggagucagcuugcuccuuucuggaacuguggaaggugccauggacuugaucuugaucaauucccuaccucuuguaucugaugcugaaacaucucucaccugcauugccucuggguggcgcccccaugagcccaucaccauaggaagggacuuugaagccuuaaugaaccagcaccaggauccgcuggaaguuacucaagaugugaccagagaaugggcuaaaaaaguuguuuggaagagagaaaaggcuaguaagaucaauggugcuuauuucugugaagggcgaguucgaggagaggcaaucaggauacgaaccaugaagaugcgucaacaagcuuccuuccuaccagcuacuuuaacuaugacuguggacaagggagauaacgugaacauaucuuucaaaaagguauugauuaaagaagaagaugcagugauuuacaaaaaugguuccuucauccauucagugccccggcaugaaguaccugauauucuagaaguacaccugccucaugcucagccccaggaugcuggaguguacucggccagguauauaggaggaaaccucuucaccucggccuucaccaggcugauaguccggagaugugaagcccagaaguggggaccugaaugcaaccaucucuguacugcuuguaugaacaauggugucugccaugaagauacuggagaaugcauuugcccuccuggguuuaugggaaggacgugugagaaggcuugugaacugcacacguuuggcagaacuuguaaagaaaggugcaguggacaagagggaugcaagucuuauguguucugucucccugaccccuauggguguuccugugccacaggcuggaagggucugcagugcaaugaagcaugccacccugguuuuuacgggccagauuguaagcuuaggugcagcugcaacaauggggagaugugugaucgcuuccaaggaugucucugcucuccaggauggcaggggcuccagugugagagagaaggcauacagaggaugaccccaaagauaguggauuugccagaucauauagaaguaaacagugguaaauuuaaucccauuugcaaagcuucuggcuggccgcuaccuacuaaugaagaaaugacccuggugaagccggaugggacagugcuccauccaaaagacuuuaaccauacggaucauuucucaguagccauauucaccauccaccggauccuccccccugacucaggaguuugggucugcagugugaacacaguggcugggaugguggaaaagcccuucaacauuucuguuaaaguucuuccaaagccccugaaugccccaaacgugauugacacuggacauaacuuugcugucaucaacaucagcucugagccuuacuuuggggauggaccaaucaaauccaagaagcuucuauacaaacccguuaaucacuaugaggcuuggcaacauauucaagugacaaaugagauuguuacacucaacuauuuggaaccucggacagaauaugaacucugugugcaacugguccgucguggagaggguggggaagggcauccuggaccugugagacgcuucacaacagcuucuaucggacucccuccuccaagaggucuaaaucuccugccuaaaagucagaccacucuaaauuugaccuggcaaccaauauuuccaagcucggaagaugacuuuuauguugaaguggagagaaggucugugcaaaaaagugaucagcagaauauuaaaguuccaggcaacuugacuucggugcuacuuaacaacuuacaucccagggagcaguacgugguccgagcuagagucaacaccaaggcccagggggaauggagugaagaucucacugcuuggacccuuagugacauucuuccuccucaaccagaaaacaucaagauuuccaacauuacacacuccucagcugugauuucuuggacaauauuggauggcuauucuauuucuucuauuacuauccguuacaagguucaaggcaagaaugaagaccagcacguugaugugaagauaaagaaugccaccaucacucaguaucagcucaagggccuagagccugaaacagcauaccagguggacauuuuugcagagaacaacauagggucaagcaacccagccuuuucucaugaacuggugacccucccagaaucucaagcaccagcggaccucggaggggggaagaugcugcuuauagccauccuuggcucugcuggaaugaccugccugacugugcuguuggccuuucugaucauauugcaauugaagagggcaaaugugcaaaggagaauggcccaagccuuccaaaacgugagggaagaaccagcugugcaguucaacucagggacucuggcccuaaacaggaaggucaaaaacaacccagauccuacaauuuauccagugcuugacuggaaugacaucaaauuucaagaugugauuggggagggcaauuuuggccaaguucuuaaggcgcgcaucaagaaggauggguuacggauggaugcugccaucaaaagaaugaaagaauaugccuccaaagaugaucacagggacuuugcaggagaacuggaaguucuuuguaaacuuggacaccauccaaacaucaucaaucucuuaggagcaugugaacaucgaggcuacuuguaccuggccauugaguacgcgccccauggaaaccuucuggacuuccuucgcaagagccgugugcuggagacggacccagcauuugccauugccaauagcaccgcguccacacuguccucccagcagcuccuucacuucgcugccgacguggcccggggcauggacuacuugagccaaaaacaguuuauccacagggaucuggcugccagaaacauuuuaguuggugaaaacuauguggcaaaaauagcagauuuuggauugucccgaggucaagagguguaugugaaaaagacaaugggaaggcucccagugcgcuggauggccaucgagucacugaauuacaguguguacacaaccaacagugauguaugguccuaugguguguuacuaugggagauuguuagcuuaggaggcacacccuacugcgggaugacuugugcagaacucuacgagaagcugccccagggcuacagacuggagaagccccugaacugugaugaugagguguaugaucuaaugagacaaugcuggcgggagaagccuuaugagaggccaucauuugcccagauauugguguccuuaaacagaauguuagaggagcgaaagaccuacgugaauaccacgcuuuaugagaaguuuacuuaugcaggaauugacuguucugcugaagaagcggccuag

SEQ ID NO: 980 - RNA, 1791 nt, Artificial Sequence
  BAF84950
auggcggaugcugaggcgagggcugaguucccggaggaggccagaccugacaggggcaccuugcagguguugcaagauauggccagccgcuugcgaauccauuccaucagggccacaugcuccacgagcuccggccacccuacaucauguagcaguucuucugagaucaugucugugcuguucuucuacaucaugagguacaagcagucagauccagagaauccggacaacgaccgauuuguccucgcaaagagacugucguuuguggauguggcaacaggauggcucggacaaggacugggaguugcauguggaauggcauauacuggcaaguacuucgacagggccagcuaccggguguucugccucaugagugauggcgaguccucagaaggcucugucugggaggcaauggccuuugcuuccuacuacagucuggacaaucuuguggcaaucuuugaugugaaccgccugggacacaguggugcauugcccgccgagcacugcauaaacaucuaucagaggcgcugcgaagccuuuggguggaacacuuaugugguggacggccgggacguggaggcacugugccagguauucuggcaggcuucucaggugaagcacaagcccacugcugugguggccaagaccuucaagggccggggcaccccaaguauugaggaugcagaaaguuggcaugcaaagccaaugccgagagaaagagcagaugccauuaucaaauuaauugagagccagauacagaccagcaggaaucuugacccacagccccccauugaggacucaccugaagucaacaucacagauguaaggaugaccucuccaccugauuacagaguuggugacaagauagcuacucggaaagcaugcggucuggcucuggcuaagcugggcuacgcgaacaacagagucguugugcuggauggugacaccagguacucuacuuucucugagauauucaacaaggaguacccugagcgcuucaucgagugcuuuauggcugaacaaaacauggugagcguggcucugggcugugccucccguggacggaccauugcuuuugcuagcaccuuugcugccuuucugacucgagcauuugaucacauccggauaggaggccucgcugagagcaacaucaacauuauugguucccacugugggguaucuguuggugacgauggugcuucccagauggcccuggaggauauagccauguuccgaaccauucccaagugcacgaucuucuacccaacugaugccgucuccacggagcaugcuguugcucuggcagccaaugccaaggggaugugcuucauucggaccacccgaccagaaacuaugguuauuuacaccccacaagaacgcuuugagaucggacaggccaagguccuccgccacugugucagugacaaggucacaguuauuggagcuggaauuacuguguaugaagccuuagcagcugcugaugagcuuucgaaacaagauauuuuuauccgugucaucgaccuguuuaccauuaaaccucuggaugucgccaccaucgucuccagugcaaaagccacagagggccggaucauuacaguggaggaucacuacccgcaagguggcaucggggaagcugucugcgcagccgucuccauggauccugacauucagguucauucgcuggcagugucgggagugccccagagugggaaguccgaggaauugcuggauauguauggaauuagugccagacauaucauaguggccgugaaaugcauguugcugaacuaa

SEQ ID NO: 981 - RNA, 861 nt, Artificial Sequence
  EAW88722
auggcggaggacggcgaggaggcggaguuccacuucgcggcgcucuauauaagugggcaguggccgcgacugcgcgcagacacugaccuucagcgccucggcuccagcgccauggcgcccuccaggaaguucuucguugggggaaacuggaagaugaacgggcggaagcagagucugggggagcucaucggcacucugaacgcggccaaggugccggccgacaccgaggugguuugugcucccccuacugccuauaucgacuucgcccggcagaagcuagaucccaagauugcuguggcugcgcagaacugcuacaaagugacuaauggggcuuuuacuggggagaucagcccuggcaugaucaaagacugcggagccacgugggugguccuggggcacucagagagaaggcaugucuuuggggagucagaugagcugauugggcagaaaguggcccaugcucuggcagagggacucggaguaaucgccugcauuggggagaagcuagaugaaagggaagcuggcaucacugagaagguuguuuucgagcagacaaaggucaucgcagauaacgugaaggacuggagcaaggucguccuggccuaugagccugugugggccauugguacuggcaagacugcaacaccccaacaggcccaggaaguacacgagaagcuccgaggauggcugaaguccaacgucucugaugcgguggcucagagcacccguaucauuuauggaggcucugugacuggggcaaccugcaaggagcuggccagccagccugauguggauggcuuccuuguggguggugcuucccucaagcccgaauucguggacaucaucaaugccaaacaauga

SEQ ID NO: 982 - RNA, 357 nt, Artificial Sequence
  CAA72108
augccacugguaguagcuguuaucuucuucucccucuggguuuuugcacuugggcaguuggaacaaccugaaauaucuauuuccagaccagcaaauaagagugcccacauaucuuggaaggcauccauccaaggcuuuagcaguaaaaucauacacugguacuggcagaaaccaaacaaaggcuuagaauauuuauuacaugucuucuugacaaucucugcucaagauugcucaggugggaagacuaagaaacuugagguaaguaaaaaugcucacacuuccacuuccacuuugaaaauaaaguucuuagagaaagaagaugaggugguguaccacugugccugcuggauuaggcac

SEQ ID NO: 983 - RNA, 414 nt, Artificial Sequence
  EAL23985
augcugucacugcuccacacaucaacgcuggcaguccuuggggcucuguguguauauggugcaggucaccuagagcaaccucaaauuuccaguacuaaaacgcugucaaaaacagcccgccuggaauguguggugucuggaauaacaauuucugcaacaucuguauauugguaucgagagagaccuggugaagucauacaguuccugguguccauuucauaugacggcacugucagaaaggaauccggcauuccgucaggcaaauuugagguggauaggauaccugaaacgucuacauccacucucaccauucacaauguagagaaacaggacauagcuaccuacuacugugccuugugggaggugcacagcagcagacaguuugagccaucccauucaauaaauguuuauuga

SEQ ID NO: 984 - RNA, 366 nt, Artificial Sequence
  CAA30181
augcugucacugcuccacacaucaacgcuggcaguccuuggggcucuguguguauauggugcaggucaccuagagcaaccucaaauuuccaguacuaaaacgcugucaaaaacagcccgccuggaauguguggugucuggaauaacaauuucugcaacaucuguauauugguaucgagagagaccuggugaagucauacaguuccugguguccauuucauaugacggcacugucagaaaggaauccggcauuccgucaggcaaauuugagguggauaggauaccugaaacgucuacauccacucucaccauucacaauguagagaaacaggacauagcuaccuacuacugugccuugugggaggug

SEQ ID NO: 985 - RNA, 366 nt, Artificial Sequence
  CAA33345
augcugucacugcuccacacaucaacgcuggcaguccuuggggcucuguguguauauggugcaggucaccuagagcaaccucaaauuuccaguacuaaaacgcugucaaaaacagcccgccuggaauguguggugucuggaauaaaaauuucugcaacaucuguauauugguaucgagagagaccuggugaagucauacaguuccugguguccauuucauaugacggcacugucagaaaggaaucuggcauuccgucaggcaaauuugagguggauaggauaccugaaacgucuacauccacucucaccauucacaauguagagaaacaggacauagcuaccuacuacugugccuugugggaggug

SEQ ID NO: 986 - RNA, 2382 nt, Artificial Sequence
  AAA93251
augauggcggcccuguacccgagcacggaccucucgggcgccuccuccuccucccugccuuccucuccauccucuuccucgccgaacgaggugauggcgcugaaggaugugcgggaggugaaggaggagaauacgcugaaugagaagcuuuucuugcuggcgugcgacaagggugacuauuauaugguuaaaaagauuuuggaggaaaacaguucaggugacuugaacauaaauugcguagaugugcuugggagaaaugcuguuaccauaacuauugaaaacgaaaacuuggauauacugcagcuucuuuuggacuacgguugucagucugcagaugcacuuuugguggcaaucgacucugaaguagugggagcuguugauauacuacuuaaucaucgaccaaaacgaucaucaagaccaacuauaguaaaacuaauggaacgaauucagaauccugaguauucaacaacuauggauguugcaccugucauuuuagcugcucaucguaacaacuaugaaauucuuacaaugcucuuaaaacaggauguaucucuacccaagccccaugcaguuggcugugaaugcacauuguguucugcaaaaaacaaaaaggauagccuccggcauuccagguuucgucuugauauauaucgauguuuggccaguccagcucuaauaauguuaacagaggaggauccaauucugagagcauuugaacuuagugcugauuuaaaagaacuaagucuuguggagguggaauucaggaaugauuaugaggaacuagcccggcaauguaaaauguuugcuaaggauuuacuugcacaagcccggaauucucgugaauuggaaguuauucuaaaccauacgucuagugacgagccucuugacaaacggggauuauuagaagaaagaaugaauuuaagucgucuaaaacuugcuaucaaauauaaccagaaagaguuugucucccagucuaacugccagcaguuccugaacacuguuugguuuggacagaugucggguuaccgacgcaagcccaccuguaagaagauaaugacuguuuugacaguaggcaucuuuuggccaguuuugucacuuuguuauuugauagcucccaaaucucaguuuggcagaaucauucacacaccuuuuaugaaauuuaucauucauggagcaucauauuucacauuucugcuguugcuuaaucuauacucucuugucuacaaugaggauaagaaaaacacaauggggccagcccuugaaagaauagacuaucuucuuauucuguggauuauugggaugauuuggucagacauuaaaagacucugguaugaaggguuggaagacuuuuuagaagaaucucguaaucaacucaguuuugucaugaauucucuuuauuuggcaaccuuugcccucaaagugguugcucacaacaaguuucaugauuuugcugaucggaaggauugggaugcauuccauccuacacugguggcagaagggcuuuuugcauuugcaaauguucuaaguuaucuucgucucuuuuuuauguauacaaccagcucuaucuuggguccauuacagauuucaaugggacagauguuacaagauuuuggaaaauuucuugggauguuucuucuuguuuuguuuucuuucacaauuggacugacacaacuguaugauaaaggauauacuucaaaggagcagaaggacuguguaggcaucuucugugaacagcaaagcaaugauaccuuccauucguucauuggcaccugcuuugcuuuguucugguauauuuucuccuuagcgcauguggcaaucuuugucacaagauuuagcuauggagaagaacugcaguccuuugugggagcugucauuguugguacauacaaugucgugguugugauugugcuuaccaaacugcugguggcaaugcuucauaaaagcuuucaguugauagcaaaucaugaagacaaagaauggaaguuugcucgagcaaaauuauggcuuagcuacuuugaugacaaauguacguuaccuccaccuuucaacaucauucccucaccaaagacuaucugcuauaugauuaguagccucaguaaguggauuugcucucauacaucaaaaggcaaggucaaacggcaaaacaguuuaaaggaauggaggaauuugaaacagaagagagaugaaaacuaucaaaaagugaugugcugccuagugcaucguuacuugacuuccaugagacagaagaugcaaaguacagaucaggcaacuguggaaaaucuaaacgaacugcgccaagaucugucaaaauuccgaaaugaaauaagggauuuacuuggcuuucggacuucuaaauaugcuauguuuuauccaagaaauuaa

SEQ ID NO: 987 - RNA, 3315 nt, Artificial Sequence
  AAZ73614
auguccuuucgggcagccaggcucagcaugaggaacagaaggaaugacacucuggacagcacccggacccuguacuccagcgcgucucggagcacagacuugucuuacagugaaagcgacuuggugaauuuuauucaagcaaauuuuaagaaacgagaaugugucuucuuuaccaaagauuccaaggccacggagaaugugugcaaguguggcuaugcccagagccagcacauggaaggcacccagaucaaccaaagugagaaauggaacuacaagaaacacaccaaggaauuuccuaccgacgccuuuggggauauucaguuugagacacuggggaagaaagggaaguauauacgucuguccugcgacacggacgcggaaauccuuuacgagcugcugacccagcacuggcaccugaaaacacccaaccuggucauuucugugaccgggggcgccaagaacuucgcccugaagccgcgcaugcgcaagaucuucagccggcucaucuacaucgcgcaguccaaaggugcuuggauucucacgggaggcacccauuauggccugaugaaguacaucggggagguggugagagauaacaccaucagcaggaguucagaggagaauauuguggccauuggcauagcagcuuggggcauggucuccaaccgggacacccucaucaggaauugcgaugcugagggcuauuuuuuagcccaguaccuuauggaugacuucacaagagauccacuguauauccuggacaacaaccacacacauuugcugcucguggacaauggcugucauggacaucccacugucgaagcaaagcuccggaaucagcuagagaaguauaucucugagcgcacuauucaagauuccaacuaugguggcaagauccccauuguguguuuugcccaaggagguggaaaagagacuuugaaagccaucaauaccuccaucaaaaauaaaauuccuuguguggugguggaaggcucgggccagaucgcugaugugaucgcuagccugguggagguggaggaugcccugacaucuucugccgucaaggagaagcugguacgcuuuuuaccccgcacggugucccggcugccugaggaggagacugagaguuggaucaaauggcucaaagaaauucucgaauguucucaccuauuaacaguuauuaaaauggaagaagcuggggaugaaauugugagcaaugccaucuccuacgcucuauacaaagccuucagcaccagugagcaagacaaggauaacuggaaugggcagcugaagcuucugcuggaguggaaccagcuggacuuagccaaugaugagauuuucaccaaugaccgccgaugggagucugcugaccuucaagaagucauguuuacggcucucauaaaggacagacccaaguuuguccgccucuuucuggagaauggcuugaaccuacggaaguuucucacccaugauguccucacugaacucuucuccaaccacuucagcacgcuuguguaccggaaucugcagaucgccaagaauuccuauaaugaugcccuccucacguuugucuggaaacugguugcgaacuuccgaagaggcuuccggaaggaagacagaaauggccgggacgagauggacauagaacuccacgacgugucuccuauuacucggcacccccugcaagcucucuucaucugggccauucuucagaauaagaaggaacucuccaaagucauuugggagcagaccaggggcugcacucuggcagcccugggagccagcaagcuucugaagacucuggccaaagugaagaacgacaucaaugcugcuggggaguccgaggagcuggcuaaugaguacgagacccgggcuguugagcuguucacugaguguuacagcagcgaugaagacuuggcagaacagcugcuggucuauuccugugaagcuugggguggaagcaacugucuggagcuggcgguggaggccacagaccagcauuucaucgcccagccugggguccagaauuuucuuucuaagcaaugguauggagagauuucccgagacaccaagaacuggaagauuauccugugucuguuuauuauacccuuggugggcuguggcuuuguaucauuuaggaagaaaccugucgacaagcacaagaagcugcuuugguacuauguggcguucuucaccucccccuucguggucuucuccuggaauguggucuucuacaucgccuuccuccugcuguuugccuacgugcugcucauggauuuccauucggugccacacccccccgagcugguccuguacucgcuggucuuuguccucuucugugaugaagugagacagugguacguaaauggggugaauuauuuuacugaccuguggaaugugauggacacgcuggggcuuuuuuacuucauagcaggaauuguauuucggcuccacucuucuaauaaaagcucuuuguauucuggacgagucauuuucugucuggacuacauuauuuucacucuaagauugauccacauuuuuacuguaagcagaaacuuaggacccaagauuauaaugcugcagaggaugcugaucgauguguucuucuuccuguuccucuuugcgguguggaugguggccuuuggcguggccaggcaagggauccuuaggcagaaugagcagcgcuggagguggauauuccguucggucaucuacgagcccuaccuggccauguucggccaggugcccagugacguggaugguaccacguaugacuuugcccacugcaccuucacugggaaugaguccaagccacuguguguggagcuggaugagcacaaccugccccgguuccccgaguggaucaccaucccccuggugugcaucuacauguuauccaccaacauccugcuggucaaccugcuggucgccauguuuggcuacacggugggcaccguccaggagaacaaugaccaggucuggaaguuccagagguacuuccuggugcaggaguacugcagccgccucaauauccccuuccccuucaucgucuucgcuuacuucuacaugguggugaagaagugcuucaaguguugcugcaaggagaaaaacauggagucuucugucugcuguuucaaaaaugaagacaaugagacucuggcaugggagggugucaugaaggaaaacuaccuugucaagaucaacacaaaagccaacgacaccucagaggaaaugaggcaucgauuuagacaacuggauacaaagcuuaaugaucucaagggucuucugaaagagauugcuaauaaaaucaaauaa

SEQ ID NO: 988 - RNA, 2097 nt, Artificial Sequence
  AAK13079
augaugcgaaguaggucuaaaaguccaagacgcccaucaccaacugcccggggugcaaacugugauguagaacuuuugaagacaacaacaagagaucgugaagaacuuaaaugcaugcuggaaaaauaugagcgccauuuggcagaaauucaggguaaugucaagguucuuaaaucugagagagacaagaucuuccuucuuuaugaacaggcacaggaagaaauuacccgacuucgacgagaaaugaugaaaagcuguaagaguccuaaaucaacaacggcacaugcuauucuccggcgaguggagacugaaagagauguagccuuuacugauuuacgaagaaugaccacagaacgagauagucuaagggagaggcuaaagauugcucaagagacagcauuuaaugagaaggcucaccuggaacaaaggauagaggagcuggaguguacaguucauaaucuugaugaugaacguauggagcaaaugucaaauaugacuuugaugaaggaaaccauaagcacuguggaaaaagaaaugaaaucacuagcaagaaaggcaauggauaccgaaagugaacuuggcagacaaaaagcagagaauaauucuuugagacuuuuguaugaaaacacagaaaaagaucuuucugauacucagcgacaccuugcuaagaaaaaauaugagcuacagcuuacucaggagaaaauuaugugcuuggaugaaaaaauugauaacuuuacaaggcaaaauauugcacagcgagaagaaaucagcauucuugguggaacccucaaugaucuggcuaaagaaaaggaaugccugcaagcauguuuggauaaaaaaucugagaauauugcaucccuuggagagaguuuggcaaugaaagaaaagaccauuucaggcaugaagaauaucauugcugagauggaacaggcaucaagacaguguacugaggcccuaauugugugugaacaagacguuuccagaaugcgucggcaauuggaugagacaaaugaugagcuggcccagaucgccagggaaagagauaucuuggcucaugacaaugacaaucuccaggaacaguuugcuaaagcuaaacaagaaaaccaggcacuguccaaaaaauugaaugacacucauaaugaacuuaaugacauaaaacagaagguucaagauacuaauuuggagguuaacaagcugaagaauauauuaaagucugaagaaucugagaaccggcaaaugauggaacaacuucgaaaagccaaugaagaugcugaaaacugggaaaauaaagcccgucaaucagaggcagauaacaauacccucaaacuggaacuuaucacugcugaggcagaggguaacagauuaaaagaaaaaguagauucccucaacagagagguugagcaacacuuaaaugcagaaaggucuuacaagucccagauuucuaccuuacauaaaucuguuguaaaaauggaagaggagcuucagaagguucaguuugaaaaaguguccgcucuugcagauuugucuucuacuagggaacucuguauuaaacuugacucaagcaaagaacuucuuaaucgacagcugguugcuaaagaucaagaaauagaaaugagggagaaugaguuagauucugcucauucugaaauugaacuccugaggagucagauggcaaaugagagaaucuccaugcagaaucuagaagcuuugcugguggccaaucgagacaaagaauaucagucucagauagcacuucaagaaaaagaaucugaaauucagcuucuuaaagaacaccuuuguuuggcagaaaauaaaauggccauccagaguagagauguggcccaguucagaaauguugucacacaauuggaagcugauuuagacauuaccaaaagacaacuaggaacagagcgcuuugaaagggagagggccguacaagaacuucgccgccaaaauuauucaaguaaugcuuaucauaugaguucuacaaugaagccaaauacaaaaugucauucaccagaacgugcucaccaucgaucuccugaccgaggccuagaucgaucauuagaagagaaucuuugcuacagagauuucuga

SEQ ID NO: 989 - RNA, 927 nt, Artificial Sequence
  CCDS48205.1
augcgcccugagggcucgcugaccuaccgggugccagagaggcugcggcaggguuucuguggcgugggucgggcagcacaggccuuggugugugcgagugccaaggagggcaccgccuucaggauggaggcugugcaggagggggcggccgggguggagagugagcaggcggcuuugggggaggaggcggugcugcuguuggaugacauaauggcggagguggaggugguggcggaggaggagggccucguggagcggcgggaggaggcccagcgggcacagcaggcugugccuggcccugggcccaugaccccagagucugcaccggaggagcugcuggccguucagguggagcuggagccgguuaaugcccaagccaggaaggccuuuucucggcagcgggaaaagauggagcggaggcgcaagccccaccuagaccgcagaggcgccgucauccagagcgucccuggcuucugggccaauguuauugcaaaccacccccagaugucagcccugaucacugacgaagaugaagacaugcugagcuacauggucagccuggaggugggagaagagaagcauccuguucaucucugcaagaucauguuguucuuucggaguaaccccuacuuccagaauaaagugauuaccaaggaauaucuggugaacaucacagaauacagggcuucucauuccacuccaauugagugguauccggauuaugaaguggaggccuaucgccgcagacaccacaacagcagccuuaacuucuucaacugguucucugaccacaacuucgcaggaucuaacaagauugcugagauccuauguaaggaccuguggcgcaauccccugcaauacuacaagaggaugaagccaccugaagagggaacagagacgucaggggacucccaguuguugaguuga

SEQ ID NO: 990 - RNA, 369 nt, Artificial Sequence
  M13231.1
augcggugggcccuacuggugcuucuagcuuuccugucuccugccagucagaaaucuuccaacuuggaagggagaacgaagucagucaccaggcagacugggucaucugcugaaaucacuugcgaucuuacuguaacaaauaccuucuacauccacugguaccuacaccaggaggggaaggccccacagcgucuucuguacuaugacgucuccacugcaagggauguguuggaaucaggacucaguccaggaaaguauuauacucauacacccaggagguggagcuggauauugagacugcaaaaucuaauugaaaaugauucuggggucuauuacugugccaccugggacaggcaaaaauuauuauaa

SEQ ID NO: 991 - RNA, 804 nt, Artificial Sequence
  CCDS12619.1
augggggcgaggcagauccagaccagcuccucccagaccucuccagaagaagccaugggaaccccucguauccagcauuugcugauccuccugguccuaggagccucccuccugaccucgggccuagagcuguauugucaaaagggucuguccaugacuguggaagcagauccagccaauauguuuaacuggaccacagaggaaguggagacuugugacaaaggggcacuuugccaggaaaccauacuaauaauuaaagcagggacugagacagccauuuuggccacgaagggcugcaucccggaaggggaggaggccauaacaauuguccagcacucuucaccucccggccugaucgugaccuccuacaguaacuacugugaggauuccuucuguaaugacaaagacagccugucucaguuuugggaguucagugagaccacagcuuccacugugucaacaacccuccauuguccaaccuguguggcuuuggggaccuguuucagugcuccuucucuucccugucccaaugguacaacucgaugcuaucaaggaaaacuugagaucacuggagguggcauugagucgucuguggaggucaaaggcuguacagccaugauuggcugcaggcugaugucuggaaucuuagcaguaggacccauguuugugagggaagcgugcccacaucagcugcucacucaaccucgaaagacugaaaauggggccaccugucuucccauuccuguuuggggguuacagcuacugcugccauugcugcugccaucauuuauucacuuuuccuaa

SEQ ID NO: 992 - RNA, 1590 nt, Artificial Sequence
  AHZ44440
augcuccuggcuguuuuguacugccugcuguggaguuuccagaccuccgcuggccauuucccuagagccugugucuccucuaagaaccugauggagaaggaaugcuguccaccguggagcggggacaggagucccuguggccagcuuucaggcagagguuccugucagaauauccuucuguccaaugcaccacuugggccucaauuucccuucacagggguggaugaccgggagucguggccuuccgucuuuuauaauaggaccugccagugcucuggcaacuucaugggauucaacuguggaaacugcaaguuuggcuuuuggggaccaaacugcacagagagacgacucuuggugagaagaaacaucuucgauuugagugccccagagaaggacaaauuuuuugccuaccucacuuuagcaaagcauaccaucagcucagacuaugucauccccauagggaccuauggccaaaugaaaaauggaucaacacccauguuuaacgacaucaauauuuaugaccucuuugucuggaugcauuauuaugugucaauggaugcacugcuugggggaucugaaaucuggagagacauugauuuugcccaugaagcaccagcuuuucugccuuggcauagacucuucuuguugcggugggaacaagaaauccagaagcugacaggagaugaaaacuucacuauuccauauugggacuggcgggaugcagaaaagugugacauuugcacagaugaguacaugggaggucagcaccccacaaauccuaacuuacucagcccagcaucauucuucuccucuuggcagauugucuguagccgauuggaggaguacaacagccaucagucuuuaugcaauggaacgcccgagggaccuuuacggcguaauccuggaaaccaugacaaauccagaaccccaaggcuccccucuucagcugauguagaauuuugccugaguuugacccaauaugaaucugguuccauggauaaagcugccaauuucagcuuuagaaauacacuggaaggauuugcuaguccacuuacugggauagcggaugccucucaaagcagcaugcacaaugccuugcacaucuauaugaauggaacaaugucccagguacagggaucugccaacgauccuaucuuccuucuucaccaugcauuuguugacaguauuuuugagcaguggcuccgaaggcaccguccucuucaagaaguuuauccagaagccaaugcacccauuagacauaaccgggaauccuacaugguuccuuuuauaccacuguacagaaauggugauuucuuuauuucauccaaagaucugggcuaugacuauagcuaucuacaagauucagacccagacucuuuucaagacuacauuaaguccuauuuggaacaagcgagucggaucuggucauggcuccuuggggcggcgaugguaggggccguccucacugcccugcuggcagggcuugugagcuugcugugucgucacaagagaaagcagcuuccugaagaaaagcagccacuccucauggagaaagaggauuaccacagcuuguaucagagccauuuauaa

SEQ ID NO: 993 - RNA, 1590 nt, Artificial Sequence
  AGV39051
augcuccuggcuguuuuguacugccugcuguggaguuuccagaccuccgcuggccauuucccuagagccugugucuccucuaagaaccugauggagaaggaaugcuguccaccguggagcggggacaggagucccuguggccagcuuucaggcagagguuccugucagaauauccuucuguccaaugcaccacuugggccucaauuucccuucacagggguggaugaccgggagucguggccuuccgucuuuuauaauaggaccugccagugcucuggcaacuucaugggauucaacuguggaaacugcaaguuuggcuuuuggggaccaaacugcacagagagacgacucuuggugagaagaaacaucuucgauuugagugccccagagaaggacaaauuuuuugccuaccucacuuuagcaaagcauaccaucagcucagacuaugucauccccauagggaccuauggccaaaugaaaaauggaucaacacccauguuuaacgacaucaauauuuaugaccucuuugucuggaugcauuauuaugugucaauggaugcacugcuugggggaucugaaaucuggagagacauugauuuugcccaugaagcaccagcuuuucugccuuggcauagacucuucuuguugcggugggaacaagaaauccagaagcugacaggagaugaaaacuucacuauuccauauugggacuggcgggaugcagaaaagugugacauuugcacagaugaguacaugggaggucagcaccccacaaauccuaacuuacucagcccagcaucauucuucuccucuuggcagauugucuguagccgauuggaggaguacaacagccaucagucuuuaugcaauggaacgcccgagggaccuuuacggcguaauccuggaaaccaugacaaauccagaaccccaaggcuccccucuucagcugauguagaauuuugccugaguuugacccaauaugaaucugguuccauggauaaagcugccaauuucagcuuuagaaauacacuggaaggauuugcuaguccacuuacugggauagcggaugccucucaaagcagcaugcacaaugccuugcacaucuauaugaauggaacaaugucccagguacagggaucugccaacgauccuaucuuccuucuucaccaugcauuuguugacaguauuuuugagcaguggcuccgaaggcaccguccucuucaagaaguuuauccagaagccaaugcacccauuggacauaaccgggaauccuacaugguuccuuuuauaccacuguacagaaauggugauuucuuuauuucauccaaagaucugggcuaugacuauagcuaucuacaagauucagacccagacucuuuucaagacuacauuaaguccuauuuggaacaagcgagucggaucuggucauggcuccuuggggcggcgaugguaggggccguccucacugcccugcuggcagggcuugugagcuugcugugucgucacaagagaaagcagcuuccugaagaaaagcagccacuccucauggagaaagaggauuaccacagcuuguaucagagccauuuauaa

SEQ ID NO: 994 - RNA, 1590 nt, Artificial Sequence
  AGV39049
augcuccuggcuguuuuguacugccugcuguggaguuuccagaccuccgcuggccauuucccuagagccugugucuccucuaagaaccugauggagaaggaaugcuguccaccguggagcggggacaggagucccuguggccagcuuucaggcagagguuccugucagaauauccuucuguccaaugcaccacuugggccucaauuucccuucacagggguggaugaccgggagucguggccuuccgucuuuuauaauaggaccugccagugcucuggcaacuucaugggauucaacuguggaaacugcaaguuuggcuuuuggggaccaaacugcacagagagacgacucuuggugagaagaaacaucuucgauuugagugccccagagaaggacaaauuuuuugccuaccucacuuuagcaaagcauaccaucagcucagacuaugucauccccauagggaccuauggccaaaugaaaaauggaucaacacccauguuuaacgacaucaauauuuaugaccucuuugucuggaugcauuauuaugugucaauggaugcacugcuugggggaucugaaaucuggagagacauugauuuugcccaugaagcaccagcuuuucugccuuggcauagacucuucuuguugcggugggaacaagaaauccagaagcugacaggagaugaaaacuucacuauuccauauugggacuggcgggaugcagaaaagugugacauuugcacagaugaguacaugggaggucagcaccccacaaauccuaacuuacucagcccagcaucauucuucuccucuuggcagauugucuguagccgauuggaggaguacaacagccaucagucuuuaugcaauggaacgcccgagggaccuuuacggcguaauccuggaaaccaugacaaauccagaaccccaaggcuccccucuucagcugauguagaauuuugccugaguuugacccaauaugaaucugguuccauggauaaagcugccaauuucagcuuuagaaauacacuggaaggauuugcuaguccacuuacugggauagcggaugccucucaaagcagcaugcacaaugccuugcacaucuauaugaauggaacaaugucccagguacagggaucugccaacgauccuaucuuccuucuucaccaugcauuuguugacaguauuuuugagcaguggcuccaaaggcaccguccucuucaagaaguuuauccagaagccaaugcacccauuggacauaaccgggaauccuacaugguuccuuuuauaccacuguacagaaauggugauuucuuuauuucauccaaagaucugggcuaugacuauagcuaucuacaagauucagacccagacucuuuucaagacuacauuaaguccuauuuggaacaagcgagucggaucuggucauggcuccuuggggcggcgaugguaggggccguccucacugcccugcuggcagggcuugugagcuugcugugucgucacaagagaaagcagcuuccugaagaaaagcagccacuccucauggagaaagaggauuaccacagcuuguaucagagccauuuauaa

SEQ ID NO: 995 - RNA, 1590 nt, Artificial Sequence
  AGV39050
augcuccuggcuguuuuguacugccugcuguggaguuuccagaccuccgcuggccauuucccuagagccugugucuccucuaagaaccugauggagaaggaaugcuguccaccguggagcggggacaggagucccuguggccagcuuucaggcagagguuccugucagaauauccuucuguccaaugcaccacuugggccucaauuucccuucacagggguggaugaccgggagucguggccuuccgucuuuuauaauaggaccugccagugcucuggcaacuucaugggauucaacuguggaaacugcaaguuuggcuuuuggggaccaaacugcacagagagacgacucuuggugagaagaaacaucuucgauuugagugccccagagaaggacaaauuuuuugccuaccucacuuuagcaaagcauaccaucagcucagacuaugucauccccauagggaccuauggccaaaugaaaaauggaucaacacccauguuuaacgacaucaauauuuaugaccucuuugucuggaugcauuauuaugugucaauggaugcacugcuugggggauaugaaaucuggagagacauugauuuugcccaugaagcaccagcuuuucugccuuggcauagacucuucuuguugcggugggaacaagaaauccagaagcugacaggagaugaaaacuucacuauuccauauugggacuggcgggaugcagaaaagugugacauuugcacagaugaguacaugggaggucagcaccccacaaauccuaacuuacucagcccagcaucauucuucuccucuuggcagauugucuguagccgauuggaggaguacaacagccaucagucuuuaugcaauggaacgcccgagggaccuuuacggcguaauccuggaaaccaugacaaauccagaaccccaaggcuccccucuucagcugauguagaauuuugccugaguuugacccaauaugaaucugguuccauggauaaagcugccaauuucagcuuuagaaauacacuggaaggauuugcuaguccacuuacugggauagcggaugccucucaaagcagcaugcacaaugccuugcacaucuauaugaauggaacaaugucccagguacagggaucugccaacgauccuaucuuccuucuucaccaugcauuuguugacaguauuuuugagcaguggcuccgaaggcaccguccucuucaagaaguuuauccagaagccaaugcacccauuggacauaaccgggaauccuacaugguuccuuuuauaccacuguacagaaauggugauuucuuuauuucauccaaagaucugggcuaugacuauagcuaucuacaagauucagacccagacucuuuucaagacuacauuaaguccuauuuggaacaagcgagucggaucuggucauggcuccuuggggcggcgaugguaggggccguccucacugcccugcuggcagggcuugugagcuugcugugucgucacaagagaaagcagcuuccugaagaaaagcagccacuccucauggagaaagaggauuaccacagcuuguaucagagccauuuauaa

SEQ ID NO: 996 - RNA, 714 nt, Artificial Sequence
  CAA04137
augagcccccuuugguggggguuucugcucaguugcuugggcugcaaaauccugccaggagcccagggucaguucccccgagucugcaugacgguggacagccuagugaacaaggagugcugcccacgccugggugcagagucggccaaugucuguggcucucagcaaggccgggggcagugcacagaggugcgagccgacacaaggcccuggaguggucccuacauccuacgaaaccaggaugaccgugagcuguggccaagaaaauucuuccaccggaccugcaagugcacaggaaacuuugccggcuauaauuguggagacugcaaguuuggcuggaccggucccaacugcgagcggaagaaaccaccagugauucggcagaacauccauuccuugaguccucaggaaagagagcaguucuugggcgccuuagaucucgcgaagaagagaguacaccccgacuacgugaucaccacacaacacugggugggccugcuugggcccaauggaacccagccgcaguuugccaacugcaguguuuaugauuuuuuuguguggcuccauuauuauucuguuagagauacauuauuagguggguuuuuuccuuggcugaagguauauuauuacagguuugugauuggguugaggguauggcagugggaaguaauuucaugcaaguuaauuaagagagcaaccacaaggcagccuuag

SEQ ID NO: 997 - RNA, 1590 nt, Artificial Sequence; identical to SEQ ID NO: 993
  AAA61242

SEQ ID NO: 998 - RNA, 1590 nt, Artificial Sequence
  AGV39054
augcuccuggcuguuuuguacugccugcuguggaguuuccagaccuccgcuggccauuucccuagagccugugucuccucuaagaaccugauggagaaggaaugcuguccaccguggagcggggacaggagucccuguggccagcuuucaggcagagguuccugucagaauauccuucuguccaaugcaccacuugggccucaauuucccuucacagggguggaugaccgggagucguggccuuccgucuuuuauaauaggaccugccagugcucuggcaacuucaugggauucaacuguggaaacugcaaguuuggcuuuuggggaccaaacugcacagagagacgacucuuggugagaagaaacaucuucgauuugagugccccagagaaggacaaauuuuuugccuaccucacuuuagcaaagcauaccaucagcucagacuaugucauccccauagggaccuauggccaaaugaaaaauggaucaacacccauguuuaacgacaucaauauuuaugaccucuuugucuggaugcauuauuaugugucaauggaugcacugcuugggggaucugaaaucuggagagacauugauuuugcccaugaagcaccagcuuuucugccuuggcauagacucuucuuguugcggugggaacaagaaauccagaagcugacaggagaugaaaacuucacuauuccauauugggacuggcgggaugcagaaaagugugacauuugcacagaugaguacgugggaggucagcaccccacaaauccuaacuuacucagcccagcaucauucuucuccucuuggcagauugucuguagccgauuggaggaguacaacagccaucagucuuuaugcaauggaacgcccgagggaccuuuacggcguaauccuggaaaccaugacaaauccagaaccccaaggcuccccucuucagcugauguagaauuuugccugaguuugacccaauaugaaucugguuccauggauaaagcugccaauuucagcuuuagaaauacacuggaaggauuugcuaguccacuuacugggauagcggaugccucucaaagcagcaugcacaaugccuugcacaucuauaugaauggaacaaugucccagguacagggaucugccaacgauccuaucuuccuucuucaccaugcauuuguugacaguauuuuugagcaguggcuccgaaggcaccguccucuucaagaaguuuauccagaagccaaugcacccauuggacauaaccgggaauccuacaugguuccuuuuauaccacuguacagaaauggugauuucuuuauuucauccaaagaucugggcuaugacuauagcuaucuacaagauucagacccagacucuuuucaagacuacauuaaguccuauuuggaacaagcgagucggaucuggucauggcuccuuggggcggcgaugguaggggccguccucacugcccugcuggcagggcuugugagcuugcugugucgucacaagagaaagcagcuuccugaagaaaagcagccacuccucauggagaaagaggauuaccacagcuuguaucagagccauuuauaa

SEQ ID NO: 999 - RNA, 1590 nt, Artificial Sequence
  AGV39162
augcuccuggcuguuuuguacugccugcuguggaguuuccagaccuccgcuggccauuucccuagagccugugucuccucuaagaaccugauggagaaggaaugcuguccaccguggagcggggacaggagucccuguggccagcuuucaggcagagguuccugucagaauauccuucuguccaaugcaccacuugggccucaauuucccuucacagggguggaugaccgggagucguggccuuccgucuuuuauaauaggaccugccagugcucuggcaacuucaugggauucaacuguggaaacugcaaguuuggcuuuuggggaccaaacugcacagagagacgacucuuggugagaagaaacaucuucgauuugagugccccagagaaggacaaauuuuuugccuaccucacuuuagcaaagcauaccaucagcucagacuaugucauccccauagggaccuauggccaaaugaaaaauggaucaacacccauguuuaacgacaucaauauuuaugaccucuuugucuggaugcauuauuaugugucaauggaugcacugcuugggggaucugaaaucuggagagacauugauuuugcccaugaagcaccagcuuuucugccuuggcauagacucuucuuguugcggugggaacaagaaauccagaagcugacaggagaugaaaacuucacuauuccauauugggacuggcgggaugcagaaaagugugacauuugcacagaugaguacaugggaggucagcaccccacaaauccuaacuuacucagcccagcaucauucuucuccucuuggcagauugucuguagccgauuggaggaguacaacagccaucagucuuuaugcaauggaacgcccgagggaccuuuacggcguaauccuggaaaccaugacaaauccagaaccccaaggcuccccucuucagcugauguagaauuuugccugaguuugacccaauaugaaucugguuccauggauaaagcugccaauuucagcuuuagaaauacacuggaaggauuugcuaguccacuuacugggauagcggaugccucucaaagcagcaugcacaaugccuugcacaucuauaugaauggaacaaugucccagguacagggaucugccaacgauccuaucuuccuucuucaccaugcauuuguugacaguauuuuugagcaguggcuccgaaggcaccgucuucuucaagaaguuuauccagaagccaaugcacccauuggacauaaccgggaauccuacaugguuccuuuuauaccacuguacagaaauggugauuucuuuauuucauccaaagaucugggcuaugacuauagcuaucuacaagauucagacccagacucuuuucaagacuacauuaaguccuauuuggaacaagcgagucggaucuggucauggcuccuuggggcggcgaugguaggggccguccucacugcccugcuggcagggcuugugagcuugcugugucgucacaagagaaagcagcuuccugaagaaaagcagccacuccucauggagaaagaggauuaccacagcuuguaucagagccauuuauaa

SEQ ID NO: 1000 - RNA, 1590 nt, Artificial Sequence
  AGV39086
augcuccuggcuguuuuguacugccugcuguggaguuuccagaccuccgcuggccauuucccuagagccugugucuccucuaagaaccugauggagaaggaaugcuguccaccguggagcggggacaggagucccuguggccagcuuucaggcagagguuccugucagaauauccuucuguccaaugcaccacuugggccucaauuucccuucacagggguggaugaccgggagucguggccuuccgucuuuuauaauaggaccugccagugcucuggcaacuucaugggauucaacuguggaaacugcaaguuuggcuuuuggggaccaaacugcacagagagacgacucuuggugagaagaaacaucuucgauuugagugccccagagaaggacaaauuuuuugccuaccucacuuuagcaaagcauaccaucagcucagacuaugucauccccauagggaccuauggccaaaugaaaaauggaucaacacccauguuuaacgacaucaauauuuaugaccucuuugucuggaugcauuauuaugugucaauggaugcacugcuugggggaucugaaaucuggagagacauugauuuugcccaugaagcaccagcuuuucugccuuggcauagacucuucuuguugcggugggaacaagaaauccagaagcugacaggagaugaaaacuucacuauuccauauugggacuggcgggaugcagaaaagugugacauuugcacagaugaguacaugggaggucagcaccccacaaauccuaacuuacucagcccagcaucauucuucuccucuuggcagauugucuguagccgauuggaggaguacaacagccaucagucuuuaugcaauggaacgcccgagggaccuuuacggcguaauccuggaaaccaugacaaauccagaaccccaaggcuccccucuucagcugauguagaauuuugccugaguuugacccaauaugaaucugguuccauggauaaagcugccaauuucagcuuuagaaauacacuggaaggauuugcuaguccacuuacugggauagcggaugccucucaaagcagcaugcacaaugccuugcacaucuauaugaauggaacaaugucccagguacagggaucugccaacgauccuaucuuccuucuucaccaugcauuuguugacaguauguuugagcaguggcuccgaaggcaccguccucuucaagaaguuuauccagaagccaaugcacccauuggacauaaccgggaauccuacaugguuccuuuuauaccacuguacagaaauggugauuucuuuauuucauccaaagaucugggcuaugacuauagcuaucuacaagauucagacccagacucuuuucaagacuacauuaaguccuauuuggaacaagcgagucggaucuggucauggcuccuuggggcggcgaugguaggggccguccucacugcccugcuggcagggcuugugagcuugcugugucgucacaagagaaagcagcuuccugaagaaaagcagccacuccucauggagaaagaggauuaccacagcuuguaucagagccauuuauaa

SEQ ID NO: 1001 - RNA, 1614 nt, Artificial Sequence
  AAC15468
augagugcuccuaaacuccucucucugggcuguaucuucuuccccuugcuacuuuuucagcaggcccgggcucaauucccaagacagugugccacuguugaggcuuugagaagugguauguguugcccagaccuguccccugugucugggccugggacagaccgcuguggcucaucaucagggaggggcagaugugaggcagugacugcagacucccggccccacagcccucaguauccccaugauggcagagaugaucgggaggucuggcccuugcgcuucuucaauaggacaugucacugcaacggcaauuucucaggacacaacugugggacgugccguccuggcuggagaggagcugccugugaccagaggguucucauagucaggagaaaucuucuggacuuaaguaaagaagaaaagaaccacuuuguccgggcccuggauauggcaaagcgcacaacucacccuuuauuugucauugccaccaggagaucagaagaaauacuggggccagauggcaacacgccacaauuugagaacauuuccauuuauaacuacuuuguuuggacacacuauuacucagucaaaaagacuuuccuugggguaggacaggaaagcuuuggugaaguggauuucucucaugagggaccagcuuuucucacauggcacagguaccaccuccugcgucuggagaaagacaugcaggaaauguugcaagagccuucuuucucccuuccuuacuggaauuuugcaacggggaaaaaugucugugauaucugcacggaugacuugaugggauccagaagcaacuuugauuccacucuaauaagcccaaacucugucuuuucucaauggcgaguggucugugacuccuuggaagauuaugauacccugggaacacuuuguaacagcaccgaggaugggccaauuaggagaaauccagcuggaaauguggccagaccaauggugcaacgucuuccugaaccacaggaugucgcucagugcuuggaaguugguuuauuugacacgccuccuuuuuauuccaacucuacaaacaguuuccgaaacacaguggaagguuacagugaccccacgggaaaguaugacccugcuguucgaagucuucacaauuuggcucaucuauuccugaauggaacagggggacaaacccauuugucuccaaaugauccuauuuuuguccuccugcacaccuucacagaugcagucuuugaugaauggcugaggagauacaaugcugauauauccacauuuccauuggaaaaugccccuauuggacauaauagacaauacaacauggugccauucuggcccccagucaccaacacagaaauguuuguuacugcuccagacaaccugggauacacuuaugaaauucaauggccaagucgggaguuuaguguaccugagauaauugccauagcaguaguuggcgcuuuguuacugguugcacucauuuuugggacugcuucuuaucugauucgugccagacgcaguauggaugaagcuaaccagccucuccucacugaucaguaucaaugcuaugcugaagaauaugaaaaacuccagaauccuaaucagucuguggucuaa

SEQ ID NO: 1002 - RNA, 1560 nt, Artificial Sequence
  AAA20870
augagcccccuuugguggggguuucugcucaguugcuugggcugcaaaauccugccaggagcccagggucaguucccccgagucugcaugacgguggacagccuagugaacaaggagugcugcccacgccugggugcagagucggccaaugucuguggcucucagcaaggccgggggcagugcacagaggugcgagccgacacaaggcccuggaguggucccuacauccuacgaaaccaggaugaccgugagcuguggccaagaaaauucuuccaccggaccugcaagugcacaggaaacuuugccggcuauaauuguggagacugcaaguuuggcuggaccggucccaacugcgagcggaagaaaccaccagugauucggcagaacauccauuccuugaguccucaggaaagagagcaguucuugggcgccuuagaucucgcgaagaagagaguacaccccgacuacgugaucaccacacaacacuggcugggccugcuugggcccaauggaacccagccgcaguuugccaacugcaguguuuaugauuuuuuuguguggcuccauuauuauucuguuagagauacauuauuaggaccaggacgccccuacagggccauagauuucucacaucaaggaccugcauuuguuaccuggcaccgguaccauuuguugugucuggaaagagaucuccagcgacucauuggcaaugagucuuuugcuuugcccuacuggaacuuugccacugggaggaacgagugugauguguguacagaccagcuguuuggggcagcgagaccagacgauccgacucugauuagucggaacucaagauucuccagcugggaaacugucugugauagcuuggaugacuacaaccaccuggucaccuugugcaauggaaccuaugaagguuugcugagaagaaaucaaaugggaagaaacagcaugaaauugccaaccuuaaaagacauacgagauugccugucucuccagaaguuugacaauccucccuucuuccagaacucuaccuucaguuucaggaaugcuuuggaaggguuugauaaagcagaugggacucuggauucucaagugaugagccuucauaauuugguucauuccuuccugaacgggacaaacgcuuugccacauucagccgccaaugaucccauuuuugugguucuucauuccuuuacugaugccaucuuugaugaguggaugaaaagauuuaauccuccugcagaugccuggccucaggagcuggccccuauuggucacaaucggauguacaacaugguuccuuucuucccuccagugacuaaugaagaacucuuuuuaaccucagaccaacuuggcuacagcuaugccaucgaucugccaguuucaguugaagaaacuccagguuggcccacaacucucuuaguagucaugggaacacugguggcuuugguuggucuuuuugugcuguuggcuuuucuucaauauagaagacuucgaaaaggauauacaccccuaauggagacacauuuaagcagcaagagauacacagaagaagccuag

SEQ ID NO: 1003 - RNA, 456 nt, Artificial Sequence
  CCDS7679.1
augaggaggcuccuccuggucaccagccuggugguugugcugcugugggaggcaggugcagucccagcacccaaggucccuaucaagaugcaagucaaacacuggcccucagagcaggacccagagaaggccuggggcgcccgugugguggagccuccggagaaggacgaccagcugguggugcuguucccuguccagaagccgaaacucuugaccaccgaggagaagccacgaggucagggcaggggccccauccuuccaggcaccaaggccuggauggagaccgaggacacccugggccauguccugagucccgagcccgaccaugacagccuguaccacccuccgccugaggaggaccagggcgaggagaggccccgguugugggugaugccaaaucaccaggugcuccugggaccggaggaagaccaagaccacaucuaccacccccaguag

SEQ ID NO: 1004 - RNA, 525 nt, Artificial Sequence
  ACF47598
auggucagcuacugggacaccgggguccugcugugcgcgcugcucagcugucugcuucucacaggaucuaguucagguucaaaauuaaaagauccugaacugaguuuaaaaggcacccagcacaucaugcaagcaggccagacacugcaucuccaaugcaggggggaagcagcccauaaauggucuuugccugaaauggugaguaaggaaagcgaaaggcugagcauaacuaaaucugccuguggaagaaauggcaaacaauucugcaguacuuuaaccuugaacacagcucaagcaaaccacacuggcuucuacagcugcaaauaucuagcuguaccuacuucaaagaagaaggaaacagaaucugcaaucuauauauuuauuagugauacagguagaccuuucguagagauguacagugaaauccccgaaauuauacacaugacugaaggaagggagcucgucauucccugccggguuacgucaccuaacaucacuguuacuuuaaaaaagaaaaaggcauaa

SEQ ID NO: 1005 - RNA, 750 nt, Artificial Sequence
  BAR92607
augggcuccgacgugcgggaccugaacgcgcugcugcccgccguccccucccuggguggcggcggcggcugugcccugccugugagcggcgcggcgcagugggcgccggugcuggacuuugcgcccccgggcgcuucggcuuacgggucguugggcggccccgcgccgccaccggcuccgccgccacccccgccgccgccgccucacuccuucaucaaacaggagccgagcuggggcggcgcggagccgcacgaggagcagugccugagcgccuucacuguccacuuuuccggccaguucacuggcacagccggagccugucgcuacgggcccuucgguccuccuccgcccagccaggcgucauccggccaggccaggauguuuccuaacgcgcccuaccugcccagcugccucgagagccagcccgcuauucgcaaucaggguuacagcacggucaccuucgacgggacgcccagcuacggucacacgcccucgcaccaugcggcgcaguuccccaaccacucauucaagcaugaggaucccaugggccagcagggcucgcugggugagcagcaguacucggugccgcccccggucuauggcugccacacccccaccgacagcugcaccggcagccaggcuuugcugcugaggacgcccuacagcagugacaauuuauaccaaaugacaucccagcuugaaugcaugaccuggaaucagaugaacuuaggagccaccuuaaagggguaa

SEQ ID NO: 1006 - RNA, 1350 nt, Artificial Sequence
  AAA61299
augggcuccgacgugcgggaccugaacgcgcugcugcccgccguccccucccuggguggcggcggcggcugugcccugccugugagcggcgcggcgcagugggcgccggugcuggacuuugcgcccccgggcgcuucggcuuacgggucguugggcggccccgcgccgccaccggcuccgccgccacccccgccgccgccgccucacuccuucaucaaacaggagccgagcuggggcggcgcggagccgcacgaggagcagugccugagcgccuucacuguccacuuuuccggccaguucacuggcacagccggagccugucgcuacgggcccuucgguccuccuccgcccagccaggcgucauccggccaggccaggauguuuccuaacgcgcccuaccugcccagcugccucgagagccagcccgcuauucgcaaucaggguuacagcacggucaccuucgacgggacgcccagcuacggucacacgcccucgcaccaugcggcgcaguuccccaaccacucauucaagcaugaggaucccaugggccagcagggcucgcugggugagcagcaguacucggugccgcccccggucuauggcugccacacccccaccgacagcugcaccggcagccaggcuuugcugcugaggacgcccuacagcagugacaauuuauaccaaaugacaucccagcuugaaugcaugaccuggaaucagaugaacuuaggagccaccuuaaagggaguugcugcugggagcuccagcucagugaaauggacagaagggcagagcaaccacagcacaggguacgagagcgauaaccacacaacgcccauccucugcggagcccaauacagaauacacacgcacggugucuucagaggcauucaggaugugcgacgugugccuggaguagccccgacucuuguacggucggcaucugagaccagugagaaacgccccuucaugugugcuuacccaggcugcaauaagagauauuuuaagcugucccacuuacagaugcacagcaggaagcacacuggugagaaaccauaccagugugacuucaaggacugugaacgaagguuuucucguucagaccagcucaaaagacaccaaaggagacauacaggugugaaaccauuccaguguaaaacuugucagcgaaaguucucccgguccgaccaccugaagacccacaccaggacucauacagguaaaacaagugaaaagcccuucagcugucgguggccaaguugucagaaaaaguuugcccggucagaugaauuaguccgccaucacaacaugcaucagagaaacaugaccaaacuccagcuggcgcuuuga

SEQ ID NO: 1007 - RNA, 279 nt, Artificial Sequence
  AAA63269
augcagaggcgaggacagccccuggaaaaccauguggcguugauacacuggcaaagcgcaggcaucccggccucgaaggugcauaauuauugcaauaugaaaaaaucgaggcuggguaggagcagggcagugaggauuucucaacccuuacuuucaccccggcgcuguccacugcaucugacagagcgcggagcugggcugcuacagccgcaaccccagggaccagugcgcacgccugggccgcccuccgggagucacccagcggccgcggacaacuga

SEQ ID NO: 1008 - RNA, 246 nt, Artificial Sequence
  AAP35763
auggagagccccaaaaagaagaaccagcagcugaaagucgggauccuacaccugggcagcagacagaagaagaucaggauacagcugagaucccagugcgcgacauggaaggugaucugcaagagcugcaucagucaaacaccggggauaaaucuggauuuggguuccggcgucaaggugaagauaauaccuaaagaggaacacuguaaaaugccagaagcaggugaagagcaaccacaaguuuag

SEQ ID NO: 1009 - RNA, 1098 nt, Artificial Sequence
  AAA59652_variant
auggccgugauggcgccccgcacccugcuccugcugcucagcggcgcccuggcccugacccagacgugggccgggucccacagcaugcgguacuucuucaccuccgucagccgcccgggccgcggggagccccgguucaucgccgugggcuacguggacgacacccaguucguccgguucgacuccgacgccgcgagccagaagauggagccccgcgcccccuggaucgagcaggaggggccggaguacugggaccaggagacccggaacaugaaggcccacucccagacggaccgcgccaaccucggcacccugcggggcuacuacaaccagagcgaggacgggucccacaccauccagaucauguacggcugcgacguggggcccgacggccgcuuccugcggggguaccgccaggacgcguacgacggcaaggacuacaucgcccucaacgaggaccugcggagcuggaccgccgccgacauggccgcgcagaucacgaagcgcaagugggaggccgugcacgccgccgagcagcggcgcgucuaccuggagggccggugcguggacgggcuccgccgguaccuggagaacggcaaggagacccugcagcgcaccgacccgcccaagacccacaugacgcaccaccccaucuccgaccacgaggccacccuccggugcugggcgcugggguucuaccccgccgagaucacccugaccuggcagcgcgacggcgaggaccagacgcaggacaccgagcucguggagacccgccccgccggcgacgggaccuuccagaagugggccgccgucguggugcccagcggcgaggagcagcgguacacgugccacguccagcacgaggggcugccgaagccccugacccuccgcugggagcuguccagccagcccaccauccccaucgugggcaucaucgcggggcuggugcuccugggcgccgucaucaccggcgccgugguggccgccgucauguggcggcgcaaguccagcgaccggaagggcggguccuacacgcaggcggccagcuccgacagcgcccaggggagcgacgugucccugaccgccugcaagguguga

SEQ ID NO: 1010 - RNA, 1098 nt, Artificial Sequence
  AAA59606_variant
auggccgugauggcgccccgcacccugguccuccugcugagcggcgcccucgcccugacccagacgugggccgggucccacagcaugcgguacuucuucaccuccgugagccgcccgggccggggcgagccccgcuucaucgccgugggcuacgucgacgacacccaguucgugcgguucgacuccgacgccgcgagccagcgcauggagccccgggcccccuggaucgagcaggaggggccggaguacugggacggcgagacccgcaaggugaaggcccacucccagacgcaccgggucgaccugggcacccuccgcggguacuacaaccagagcgaggccggcucccacaccgugcagcggauguacgggugcgacgugggcagcgacuggcgcuuccugcggggguaccaccaguacgcguacgacggcaaggacuacaucgcccugaaggaggaccuccgcuccuggaccgccgccgacauggccgcgcagacgaccaagcacaagugggaggccgcccacgucgccgagcagcugcgggccuaccuggaggggaccugcguggaguggcuccgccgguaccuggagaacgggaaggagacccugcagcgcacggacgcgcccaagacccacaugacccaccacgccgugagcgaccacgaggccacccuccggugcugggcccuguccuucuaccccgccgagaucacgcugaccuggcagcgcgacggcgaggaccagacccaggacaccgagcucgucgagacgcggcccgcgggggacggcaccuuccagaagugggccgccgugguggucccgagcggccaggagcagcgcuacacgugccacgugcagcacgaggggcugcccaagccccugacccuccgcugggagcccuccagccagccgaccauccccaucgugggcaucaucgccgggcugguccuguucggcgccgugaucaccggggcgguggucgccgccgugauguggcggcgcaaguccagcgaccggaagggcggcuccuacagccaggccgcgagcuccgacagcgcccagggguccgacgugagccucaccgccugcaaggucuga

SEQ ID NO: 1011 - RNA, 1263 nt, Artificial Sequence
  AAH37161_variant
augcccggcgggugcagccgcggccccgccgccggggacggccggcugcgccucgcgcggcuggcccuggugcuccuggggugggucuccagcuccagccccaccuccagcgccuccagcuucuccagcuccgcccccuuccuggccagcgcgguguccgcccagcccccgcuccccgaccagugccccgcccugugcgagugcagcgaggccgcgcgcaccgugaagugcgucaaccggaaccugacggaggugcccaccgaccucccggccuacgugcgcaaccuguuccugaccggcaaccagcucgccguccugcccgccggcgccuucgcgcggcgcccgccccuggccgagcucgccgcccugaaccuguccgggagccggcucgacgaggugcgcgccggcgcguucgagcaccuccccucccugcggcagcuggaccugagccacaacccccuggccgaccucucccccuucgccuucagcgggagcaacgccuccgugagcgcccccuccccgcuggucgagcugauccucaaccacaucgugccgcccgaggacgagcgccagaaccggagcuucgagggcaugguggucgcggcccugcuggccgggcgcgcccuccagggccugcggcgccuggagcucgccuccaaccacuuccuguaccugccccgggacgugcucgcgcagcugcccagccugcgccaccucgaccuguccaacaacagccuggugucccucaccuacgucagcuuccggaaccugacgcaccuggagucccuccaccuggaggacaacgcccugaaggugcuccacaacggcacccuggccgagcugcaggggcugccccacauccgcguguuccucgacaacaaccccugggucugcgacugccacauggccgacauggugaccuggcugaaggagaccgaggugguccagggcaaggaccggcugacgugcgcguaccccgagaagaugcgcaaccgcgugcuccuggagcugaacagcgccgaccucgacugcgacccgauccugccgcccucccugcagaccagcuacguguuccucgggaucguccuggcccugaucggcgccaucuuccuccuggugcuguaccucaaccggaagggcaucaagaaguggaugcacaacauccgcgacgccugccgggaccacauggagggguaccacuaccgcuacgagaucaacgcggacccccggcugaccaaccuguccagcaacuccgacgucuga

SEQ ID NO: 1012 - RNA, 1632 nt, Artificial Sequence
  AAH33010_variant
augcgcaagcccgccgccggcuuccugccgagccuccugaaggugcugcuccugccccuggcgcccgccgccgcccaggacuccacccaggccagcacccccggguccccgcucagccccacggaguacgagcgguucuucgcgcugcugacccccaccuggaaggccgagaccacgugccgccuccgggccacccacggcugccgcaaccccacccugguccagcuggaccaguacgagaaccacgggcucgugccggacggcgccgugugcuccaaccugcccuacgcgagcugguucgaguccuucugccaguucacccacuaccggugcagcaaccacgucuacuacgccaagcgcgugcugugcucccagcccgugagcauccucucccccaacacgcugaaggagaucgaggccagcgccgaggucuccccgaccaccaugaccagccccaucagcccccacuucacggugaccgagcggcagaccuuccagcccuggccggagcgccugagcaacaacguggaggagcuccugcaguccagccugucccucgggggccaggagcaggcccccgagcacaagcaggagcagggcgucgagcaccggcaggagcccacccaggagcacaagcaggaggaggggcagaagcaggaggagcaggaggaggagcaggaggaggagggcaagcaggaggaggggcagggcacgaaggaggggcgcgaggcggugagccagcugcagaccgacagcgagcccaaguuccacuccgagagccuguccagcaacccguccagcuucgcgccccgggugcgcgaggucgaguccacccccaugaucauggagaacauccaggagcucauccggagcgcccaggagaucgacgagaugaacgagaucuacgacgagaacuccuacuggcgcaaccagaaccccggcagccugcugcagcucccgcacaccgaggcccugcuggugcucugcuacuccaucguggagaacacgugcaucaucacccccaccgccaaggccuggaaguacauggaggaggagauccugggcuucgggaaguccgucugcgacucccugggccggcgccacaugagcacgugcgcccucugcgacuucugcucccugaagcuggagcagugccacagcgaggccucccuccagcggcagcagugcgacaccagccacaagacccccuucgugagcccccugcuggccucccagagccucuccaucgggaaccaggugggcagcccggaguccggccgcuucuacgggcuggaccuguacggcgggcuccacauggacuucuggugcgcccggcuggcgaccaagggcugcgaggacguccgcgugagcggguggcugcagaccgaguuccucuccuuccaggacggcgacuuccccacgaagaucugcgacaccgacuacauccaguaccccaacuacugcagcuucaagucccagcagugccugaugcggaaccgcaaccgcaaggugagccggaugcgcugccugcagaacgagaccuacuccgcccucagcccgggcaaguccgaggacgucgugcugcgguggagccaggaguucuccacccugacgcuggggcaguucggcuga

SEQ ID NO: 1013 - RNA, 1830 nt, Artificial Sequence
  AAB58754_variant
augaaguggguggagagcaucuuccugaucuuccuccugaacuucaccgagucccgcacccugcaccggaacgaguacggcaucgccagcauccucgacuccuaccagugcacggccgagaucagccuggcggaccuggccaccaucuucuucgcccaguucguccaggaggccaccuacaaggagguguccaagauggugaaggacgcccucaccgcgaucgagaagcccacgggggacgagcagagcuccggcugccuggagaaccagcugcccgccuuccucgaggagcugugccacgagaaggagauccuggagaaguacgggcacagcgacugcugcucccagagcgaggagggccgccacaacugcuuccucgcccacaagaagcccacccccgccuccaucccccuguuccaggucccggagcccgugaccagcugcgaggcguacgaggaggaccgggagaccuucaugaacaaguucaucuacgagaucgcccgccggcaccccuuccuguacgcccccacgauccuccugugggccgcccgcuacgacaagaucaucccguccugcugcaaggcggagaacgccguggagugcuuccagaccaaggccgccaccgucaccaaggagcugcgggagagcucccuccugaaccagcacgccugcgcggugaugaagaacuucgggacgcgcaccuuccaggccaucaccgugaccaagcugagccagaaguucacgaaggucaacuucaccgagauccagaagcucgugcuggacguggcccacguccacgagcacugcugccggggcgacgugcuggacugccuccaggacggcgagaagaucauguccuacaucugcagccagcaggacacccuguccaacaagaucaccgagugcugcaagcugacgacccucgagcgcgggcagugcaucauccacgccgagaacgacgagaagcccgagggccugagccccaaccugaaccgguuccucggggaccgcgacuucaaccaguucagcuccggcgagaagaacaucuuccuggccagcuucgugcacgaguacucccggcgccacccccagcuggcggucagcgugauccuccggguggccaagggguaccaggagcugcuggagaagugcuuccagaccgagaacccgcucgagugccaggacaagggcgaggaggagcugcagaaguacauccaggagucccaggcccuggccaagcgcagcugcggccucuuccagaagcugggggaguacuaccugcagaacgccuuccucgucgcguacaccaagaaggcgccccagcugacguccagcgagcugauggccaucacccggaagauggccgccaccgccgcgaccugcugccagcucuccgaggacaagcugcuggccugcggcgagggggccgccgacaucaucaucggccaccucugcauccgccacgagaugacgcccgugaaccccggcguggggcagugcugcaccagcuccuacgccaaccggcgcccgugcuucagcucccuggucguggacgagaccuacgugccgcccgccuucagcgacgacaaguucaucuuccacaaggaccugugccaggcccagggcgucgcccugcagaccaugaagcaggaguuccucaucaaccuggugaagcagaagccccagaucacggaggagcagcuggaggcggucaucgccgacuucuccgggcuccuggagaagugcugccagggccaggagcaggaggugugcuucgccgaggaggggcagaagcugaucagcaagacccgggccgcccucggcguguga

SEQ ID NO: 1014 - RNA, 2565 nt, Artificial Sequence
  AAI26251_variant
augauggccuacagcgacaccaccaugauguccgacgacaucgacuggcugcgcagccaccggggcgugugcaaggucgaccucuacaaccccgaggggcagcaggaccaggaccgcaaggugaucugcuucguggacgucuccacccugaacguggaggacaaggacuacaaggacgccgcgagcuccagcuccgagggcaaccugaaccucgggagccuggaggagaaggagaucaucgugaucaaggacaccgagaagaaggaccaguccaagaccgagggcagcgucugccuguucaagcaggccccguccgaccccgugagcgugcucaacuggcugcuguccgaccuccagaaguacgcccugggguuccagcacgcccugagccccuccaccagcacgugcaagcacaaggucggcgacaccgagggcgaguaccaccgggccuccagcgagaacugcuacuccguguacgcggaccaggugaacaucgacuaccucaugaaccgcccccagaaccugcggcuggagaugaccgccgccaagaacaccaacaacaaccagagcccgagcgccccgcccgcgaagccgcccuccacgcagcgcgccgucaucagccccgacggggagugcuccaucgacgaccucagcuucuacgugaaccggcuguccagccuggugauccagauggcccacaaggagaucaaggagaagcucgagggcaaguccaagugccugcaccacagcaucugccccucccccgggaacaaggagcgcaucagcccccggacccccgccuccaagaucgccagcgagauggcguacgaggccgucgagcugaccgccgccgagaugcgcggcaccggggaggagucccgggagggcggccagaaguccuuccucuacagcgagcugagcaacaaguccaagagcggggacaagcagaugucccagcgcgagagcaaggaguucgccgacagcaucuccaagggccugaugguguacgcgaaccagguggccagcgacaugauggucucccucaugaagacgcugaaggugcacagcuccgggaagcccauccccgccagcgugguccugaagcgggugcuccugcgccacaccaaggagaucguguccgaccugaucgacagcugcaugaagaaccuccacaacaucaccggcguccugaugaccgacuccgacuucgugagcgccgucaagcggaaccuguucaaccaguggaagcagaacgccacggacaucauggaggcgaugcucaagcgccugguguccgcccugaucggcgaggagaaggagaccaagagccagucccucagcuacgccucccugaaggccgggagccacgacccgaagugccggaaccagucccuggaguucagcaccaugaaggccgagaugaaggagcgcgacaagggcaagaugaaguccgaccccugcaagagccucaccagcgcggagaaggugggggagcacauccugaaggagggccugacgaucuggaaccagaagcaggggaacuccugcaaggucgccaccaaggccugcagcaacaaggacgagaagggcgagaagaucaacgccuccaccgacagccucgcgaaggaccugaucguguccgcccugaagcucauccaguaccaccugacccagcagacgaagggcaaggacacgugcgaggaggacugccccgggagcaccaugggcuacauggcccaguccacccaguacgagaagugcgggggcgggcagagcgccaaggcccuguccgugaagcagcucgagagccaccgggcgcccggcccguccacgugccagaaggagaaccagcaccuggacagccagaagauggacauguccaacaucguccugaugcugauccagaagcuccugaacgagaaccccuucaagugcgaggaccccugcgagggcgagaacaagugcagcgagccccgcgccuccaaggccgccagcauguccaaccggagcgacaaggccgaggagcagugccaggagcaccaggagcuggacugcaccagcgggaugaagcaggcgaacggccaguucaucgacaagcucguggaguccgugaugaagcugugccugaucauggccaaguacagcaacgacggggccgcccucgccgagcuggaggagcaggcggccuccgccaacaagccgaacuuccgcggcacccgcugcauccacagcggggccaugccccagaacuaccaggacucccugggccacgaggucaucgugaacaaccagugcagcaccaacucccuccagaagcagcugcaggcggugcugcaguggaucgccgccagccaguucaacguccccaugcucuacuucaugggcgacaaggacgggcagcuggagaagcugccccagguguccgccaaggccgcggagaagggcuacagcgucgggggccuccugcaggaggugaugaaguucgccaaggagcggcagccggacgaggccgugggcaagguggcccgcaagcagcugcucgacuggcugcuggccaaccucuga

SEQ ID NO: 1015 - RNA, 1251 nt, Artificial Sequence
  BAG61782_variant
augguggacuaccacgccgccaaccaguccuaccaguacggccccuccagcgcggggaacggcgccgggggcgggggcuccaugggcgacuacauggcccaggaggacgacugggaccgcgaccugcuccuggacccggccugggagaagcagcagcggaagaccuucaccgccuggugcaacagccaccuccgcaaggcggggacccagaucgagaacaucgacgaggacuuccgggacggccugaagcugaugcugcuccuggaggucaucuccggggagcgccugcccaagcccgagcggggcaagaugcgcgugcacaagaucaacaacgugaacaaggcccucgacuucaucgccagcaagggggucaagcugguguccaucggcgccgaggagaucguggacggcaacgcgaagaugacccuggggaugaucuggaccaucauccuccgguucgccauccaggacaucagcgucgaggagaccuccgccaaggagggccugcugcucuggugccagcgcaagacggcccccuacaagaacgugaacgugcagaacuuccacaucagcuggaaggacgggcuggccuucaacgcgcugauccaccggcaccgcccggagcucaucgaguacgacaagcugcggaaggacgaccccgucaccaaccugaacaacgccuucgagguggccgagaaguaccucgacauccccaagaugcuggacgccgaggacaucgugaacaccgcccgccccgacgagaaggcgaucaugaccuacgucuccagcuucuaccacgccuucuccggcgcccagaaggccgagacggccgcgaaccggaucugcaaggugcuggccgugaaccaggagaacgagcaccucauggaggacuacgagaagcuggccagcgaccugcucgaguggauccgccggaccaucccguggcuggaggaccgcgucccccagaagaccauccaggagaugcagcagaagcuggaggacuuccgggacuaccgccgggugcacaagccgcccaaggugcaggagaagugccagcucgagaucaacuucaacacccugcagacgaagcugcgccucuccaaccggcccgccuucaugcccagcuggcgcucccgcgccagcuccagccccaccagcacgugcgcggccuccagccccgcccggccgaugcuguggggccccgggucccgcccccgguggcgccggagcggcgccagcccccugcgcuga

SEQ ID NO: 1016 - RNA, 1689 nt, Artificial Sequence
  BAG65349_variant
augguggacuaccacgccgccaaccagagcuaccaguacggccccuccagcgcggggaacggcgccgggggcgggggcuccaugggcgacuacauggcccaggaggacgacugggaccgcgaccugcuccuggacccggccugggagaagcagcagcggaagaccuucaccgccuggugcaacagccaccuccgcaaggcggggacgcagaucgagaacaucgacgaggacuuccgggacggccugaagcugaugcugcuccuggaggucaucuccggggagcgccugcccaagcccgagcggggcaagaugcgcgugcacaagaucaacaacgugaacaaggcccucgacuucaucgccagcaagggggucaagcugguguccaucggcgccgaggagaucguggacggcaacgcgaagaugacccuggggaugaucuggaccaucauccuccgguucgccauccaggacaucagcgucgaggagaccuccgccaaggagggccugcugcucuggugccagcgcaagacggcccccuacaagaacgugaacgugcagaacuuccacaucagcuggaaggacgggcuggccuucaacgcgcugauccaccggcaccgcccggagcucaucgaguacgacaagcugcggaaggacgaccccgucaccaaccugaacaacgccuucgagguggccgagaaguaccucgacauccccaagaugcuggacgccgaggacaucgugaacaccgcccgccccgacgagaaggcgaucaugaccuacgucuccagcuucuaccacgccuucuccggcgcccagaaggccgagacggccgcgaaccggaucugcaaggugcuggccgugaaccaggagaacgagcaccucauggaggacuacgagaagcuggccagcgaccugcucgaguggauccagcgcaccaucccguggcuggaggaccgggucccccagaaggccauccaggagaugcagcagaagcuggaggacuuccgcgacuaccggcgcgugcacaagccgcccaaggugcaggagaagugccagcucgagaucaacuucaacacccugcagaccaagcugcggcucuccaaccgccccgccuucaugcccagcgagggcaagauggucuccgacaucaacaacggguggcagcaccuggagcaggcggagaagggcuacgaggaguggcugcucaacgagauccggcgccuggagcgccuggaccaccucgccgagaaguuccggcagaaggccagcauccacgaggccuggacggacgggaaggaggcgaugcugaagcaccgcgacuacgagaccgccacccuguccgacaucaaggcccucauccggaagcacgaggccuucgagagcgaccuggccgcgcaccaggaccgcguggagcagaucgccgccaucgcccaggagcugaacgagcucgacuacuacgacagccacaacgugaacacccccgacggccugcaggaggggcccggccagccgcacucccccaucccgccccugugcaucuacgccaagcacagccuccaguccagcggcgucgggggcugggcggggcggggcugggggcgccugagcccccugucccugugcggccucgcccggcgcuucccccggcccggcuggggcgaccuggggcccgcccugcucgugugguga

SEQ ID NO: 1017 - RNA, 2736 nt, Artificial Sequence
  AAH05033_variant
augguggacuaccacgccgccaaccagagcuaccaguacggccccuccagcgcggggaacggcgccgggggcgggggcuccaugggcgacuacauggcccaggaggacgacugggaccgcgaccugcuccuggacccggccugggagaagcagcagcggaagaccuucaccgccuggugcaacagccaccuccgcaaggcggggacgcagaucgagaacaucgacgaggacuuccgggacggccucaagcugaugcugcuccuggaggucaucuccggggagcgccugcccaagcccgagcggggcaagaugcgcgugcacaagaucaacaacgugaacaaggcccucgacuucaucgccagcaagggggucaagcugguguccaucggcgccgaggagaucguggacggcaacgcgaagaugacccuggggaugaucuggaccaucauccuccgguucgccauccaggacaucagcgucgaggagaccuccgccaaggagggccugcugcucuggugccagcgcaagacggcccccuacaagaacgugaacgugcagaacuuccacaucagcuggaaggacgggcuggccuucaacgcgcugauccaccggcaccgcccggagcucaucgaguacgacaagcugcggaaggacgaccccgucaccaaccugaacaacgccuucgagguggccgagaaguaccucgacauccccaagaugcuggacgccgaggacaucgugaacaccgcccgccccgacgagaaggcgaucaugaccuacgucuccagcuucuaccacgccuucuccggcgcccagaaggccgagacggccgcgaaccggaucugcaaggugcuggccgugaaccaggagaacgagcaccucauggaggacuacgagaagcuggccagcgaccugcucgaguggauccgccggaccaucccguggcuggaggaccgcgucccccagaagaccauccaggagaugcagcagaagcuggaggacuuccgggacuaccgccgggugcacaagccgcccaaggugcaggagaagugccagcucgagaucaacuucaacacccugcagacgaagcugcgccucuccaaccggcccgccuucaugcccagcgagggcaagauggucuccgacaucaacaacggguggcagcaccuggagcaggccgagaagggcuacgaggaguggcugcucaacgagauccgccgccuggagcggcuggaccaccucgcggagaaguuccgccagaaggccagcauccacgaggccuggaccgacgggaaggaggccaugcugaagcaccgggacuacgagaccgcgacccuguccgacaucaaggcccucauccgcaagcacgaggccuucgagagcgaccuggccgcccaccaggaccggguggagcagaucgcggccaucgcccaggagcugaacgagcucgacuacuacgacagccacaacgugaacacgcgcugccagaagaucugcgaccagugggacgcccugggcucccugacccacagccggcgcgaggcccucgagaagaccgagaagcagcuggaggcgaucgaccagcugcaccuggaguacgccaagcgggccgcccccuucaacaacuggauggaguccgccauggaggaccuccaggacauguucaucguccacaccaucgaggagaucgaggggcugaucagcgcgcacgaccaguucaaguccacgcugcccgacgccgaccgcgagcgggaggccauccucgccauccacaaggaggcgcagcgcaucgccgagagcaaccacaucaagcuguccggcagcaacccguacaccaccgugacgccccagaucaucaacuccaagugggagaaggugcagcagcugguccccaagcgggaccacgcccuccuggaggagcagagcaagcagcaguccaacgagcaccuccgccggcaguucgccagccaggccaacguggucggccccuggauccagaccaagauggaggagaucgggcgcaucuccaucgagaugaacggcacccuggaggaccagcugagccaccugaagcaguacgagcgguccaucguggacuacaagccgaaccucgaccugcuggagcagcagcaccagcucauccaggaggcgcugaucuucgacaacaagcacaccaacuacaccauggagcacauccgcguggggugggagcagcugcucacgaccaucgcccggaccaucaacgaggucgagaaccagauccugacccgcgacgccaagggcaucagccaggagcagaugcaggaguuccgcgccuccuucaaccacuucgacaaggaccacgggggcgcccugggccccgaggaguucaaggcgugccucaucagccugggguacgacguggagaacgaccggcagggcgaggccgaguucaaccgcaucaugucccugguggaccccaaccacagcgggcucgucacguuccaggccuucaucgacuucaugagccgggagaccaccgacaccgacacggccgaccaggugaucgccuccuucaaggugcuggcgggcgacaagaacuucaucaccgccgaggagcugcgccgggagcugcccccggaccaggccgaguacugcaucgcccgcauggcgcccuaccaggggcccgacgccguccccggcgcccuggacuacaagagcuucuccaccgcccuguacggcgagagcgaccucuga

SEQ ID NO: 1018 - RNA, 597 nt, Artificial Sequence
  EAX10817_variant
auggcccugcagggcaucagcgugauggagcucuccgggcuggcccccggcccguucugcgcgaugguccuggccgacuucggggcccgcguggugcgggucgaccgccccggcagccgguacgacgugucccgccucgggcggggcaagcgcagccuggugcuggaccucaagcagccccggggcgccgccguccugcgccggcugugcaagcgcuccgacgugcuccuggagcccuuccggcgcggggugauggagaagcugcagcucggcccggagauccugcagcgggagaacccccgccugaucuacgcgcggcucagcggguucggccaguccgggagcuucugccgccuggccggccacgacaucaacuaccuggcccucuccggcgggcggaacagcaucuucaaguucuucuccgucgagaacagcgagaucgaguccgugggcagcaccucccgcaccgagcacguggggugguggagcacguuccuguacgaccugcaggacucccgguggggcauccacggcugcuggagcaaccgcacccccguccuccgggccgcggaccagcgcaccuggaccaagguguga

SEQ ID NO: 1019 - RNA, 597 nt, Artificial Sequence
  BAF85677_variant
auggcccugcagggcaucagcguggucgagcucuccgggcuggcccccggcccguucugcgcgauggugcuggccgacuucggggcccgcgugguccggguggaccgccccggcagccgguacgacgugucccgccucgggcggggcaagcgcagccugguccuggaccucaagcagccccggggcgccgccgugcugcgccggcugugcaagcgcuccgacgugcuccuggagcccuuccggcgcggggucauggagaagcugcagcucggcccggagauccugcagcgggagaacccccgccugaucuacgcgcggcucagcggguucggccaguccgggagcuucugccgccuggccggccacgacaucaacuaccuggcccucuccggcgggcggaacagcaucuucaaguucuucuccguggagaacagcgagaucgaguccgugggcagcaccucccgcaccgagcacgucgggugguggagcacguuccuguacgaccugcaggacucccgguggggcauccacggcugcuggagcaaccgcacccccuuccuccgggccgcggaccagcgcaccuggaccaagguguga

SEQ ID NO: 1020 - RNA, 2763 nt, Artificial Sequence
  EAX05380_variant
auggaggugcagcugggccucgggcgcgucuacccccggccgcccagcaagaccuaccgcggcgccuuccagaaccuguuccaguccgugcgggaggugauccagaaccccgggccccgccacccggaggccgcgagcgccgccccccccggcgccucccugcuccugcugcagcagcagcagcagcagcagcagcagcagcagcagcagcagcagcagcagcagcagcagcagcagcaggagaccagcccccggcagcagcagcagcagcagggggaggacggcuccccgcaggcccaccgccggggccccacgggguaccucguccuggacgaggagcagcagcccagccagccccaguccgcgcuggagugccacccggagcgcggcugcgugcccgagcccggggccgccguggccgcgagcaagggccucccccagcagcugccggccccccccgacgaggacgacuccgccgcccccagcacccugucccuccuggggccgaccuuccccggccugagcuccugcagcgccgaccucaaggacauccuguccgaggcgagcaccaugcagcugcuccagcagcagcagcaggaggccgucuccgagggcagcuccagcgggcgggcccgcgaggccagcggcgcccccacguccagcaaggacaacuaccuggggggcaccuccaccaucagcgacaacgcgaaggagcugugcaaggccguguccgugagcaugggccucggggucgaggcccuggagcaccugucccccggcgagcagcuccggggggacugcauguacgccccgcugcugggcgugccccccgccgugcgccccaccccgugcgcgccccucgccgagugcaaggggagccugcuggacgacuccgccggcaagagcacggaggacaccgccgaguacucccccuucaagggcggguacaccaagggccucgagggggagagccugggcugcuccgggagcgccgcggccggcuccagcggcacccuggagcucccguccacgcugagccuguacaaguccggggcccucgacgaggccgcggccuaccagagccgggacuacuacaacuucccccuggcccuggccggcccccccccgcccccccccccgccccacccccacgcccgcaucaagcucgagaacccccuggacuacgggagcgcgugggccgccgccgccgcgcagugccgguacggcgaccuggccucccuccacggggccggcgccgccggcccggggagcggcucccccagcgcggccgccuccagcuccuggcacacccuguucaccgccgaggaggggcagcuguacggccccugcggcgggggcgggggcgggggcggcgggggcgggggcgggggcggcgggggcgggggcgggggcggcggggaggcgggcgccgucgcccccuacggguacacccgcccgccccagggccucgccgggcaggagagcgacuucacggcccccgacgugugguaccccggcggcauggugucccgggucccguaccccagccccaccugcgugaaguccgagauggggcccuggauggacagcuacuccggcccguacggggacaugcgccuggagaccgcgcgggaccacgugcugcccaucgacuacuacuuccccccgcagaagaccugccucaucugcggcgacgaggccagcggcugccacuacggggcccugacgugcggcuccugcaaggucuucuucaagcgcgccgccgaggggaagcagaaguaccugugcgcgagccggaacgacugcaccaucgacaaguuccgccgcaagaacugccccuccugccggcugcgcaagugcuacgaggccggcaugacccucggggcccggaagcugaagaagcugggcaaccucaagcugcaggaggagggcgaggccagcagcaccacgucccccaccgaggagaccacccagaagcugacggugagccacaucgagggguacgagugccagcccaucuuccucaacgugcuggaggccaucgagccgggcgucgugugcgcggggcacgacaacaaccagcccgacuccuucgccgcccugcucagcucccugaacgagcugggcgagcgccagcucgugcacgucgugaagugggccaaggcgcugcccggguuccggaaccugcacgucgacgaccagauggccgugauccaguacagcuggaugggccucaugguguucgccaugggcuggcgcuccuucaccaacgucaacagccggaugcuguacuucgcccccgaccugguguucaacgaguaccgcaugcacaagucccggauguacagccagugcgugcgcaugcggcaccucucccaggaguucggguggcugcagaucaccccgcaggaguuccugugcaugaaggcccuccugcuguucagcaucauccccgucgacggccucaagaaccagaaguucuucgacgagcugcgcaugaacuacaucaaggagcuggaccggaucaucgcgugcaagcgcaagaaccccaccuccugcagccggcgcuucuaccagcucacgaagcugcuggacuccgugcagcccaucgcccgggagcuccaccaguucaccuucgaccugcugaucaagagccacaugguguccgucgacuucccggagaugauggccgagaucaucagcgugcaggugcccaagauccucuccgggaaggucaagcccaucuacuuccacacccaguga

SEQ ID NO: 1021 - RNA, 1239 nt, Artificial Sequence
  AAH64630_variant
auggcccccguggagcacgucguggccgacgcgggcgccuuccugcgccacgccgcccuccaggacaucgggaagaacaucuacaccauccgggagguggucaccgagauccgcgacaaggccacgcggcgccggcuggcggugcugccguacgagcuccgcuucaaggagccccugcccgaguacgugcggcuggucaccgaguucagcaagaagaccggcgacuaccccucccucagcgccaccgacauccaggugcuggcccugacguaccagcucgaggccgaguucgugggggucucccaccugaagcaggagccgcagaaggugaaggugagcuccagcauccagcaccccgagacgccccugcacaucuccggcuuccaccuccccuacaagccgaagccgccccaggagaccgagaaggggcacagcgcgugcgagcccgagaaccuggaguucuccagcuucauguucuggcgcaacccccugcccaacaucgaccacgagcuccaggagcugcugaucgaccggggcgaggacguccccuccgaggaggaggaggaggaggagaacggcuucgaggaccgcaaggacgacagcgacgacgacgggggcggguggaucacccccuccaacaucaagcagauccagcaggagcucgagcagugcgacgugccggaggacgugcgggucggcugccugaccaccgacuucgccaugcagaacgugcugcuccagauggggcugcacgugcuggccgucaacggcaugcucauccgcgaggcccggagcuacauccugcgcugccacggcugcuucaagaccaccuccgacaugagccggguguucugcucccacugcgggaacaagacgcugaagaaggugagcgucaccguguccgacgacggcacccuccacaugcacuucagccgcaaccccaaggugcugaacccccgggggcugcgcuacagccuccccaccccgaagggcggcaaguacgccaucaacccccaccugacggaggaccagcgguucccccagcugcgccucucccagaaggcgcggcagaagaccaacgucuucgcccccgacuacaucgccggggugagcccguucgucgagaacgacaucuccagccgcuccgccacccuccaggugcgcgacagcacccugggcgccgggcggcgccggcugaaccccaacgcgucccgcaagaaguucgugaagaagcgguga

SEQ ID NO: 1022 - RNA, 984 nt, Artificial Sequence
  AAH69102_variant
augcagaugcccgccaugaugagccugcuccugguguccgucggccugauggaggcccuccaggcgcagagccaccccaucacccgccgggaccuguucucccaggagauccagcuggacauggcccucgccagcuucgacgaccaguacgccgggugcgccgcggccaugaccgccgcccugcccgaccugaaccacacggaguuccaggcgaaccagguguacgccgacuccuggacccucgccagcucccaguggcaggagcgccaggcccgguggcccgaguggagccugucccccacccgcccguccccgccgccccugggcuuccgggacgagcacgggguggcccuccuggcguacaccgccaacagcccccugcacaaggaguucaacgccgccguccgcgaggccggccggagccgcgcgcacuaccuccaccacuucuccuucaagacgcugcacuuccugcucaccgaggcccugcagcugcucgggagcggccagcggccgccccgcugccaccagguguuccggggcgugcacgggcugcgcuuccggcccgccggcccccgcgccaccguccggcucgggggcuucgccuccgcgagccugaagcacguggccgcccagcaguucggggaggacaccuucuucggcaucuggacgugccugggcgcccccaucaagggguacuccuucuuccccggcgaggaggaggugcugaucccgcccuucgagaccuuccaggucaucaacgccagccgccucgcgcaggggcccgcccggaucuaccugcgcgcccugggcaagcacuccaccuacaacugcgaguacaucaaggacaagaagugcaagagcggccccugccaccucgacaacagcgccauggggcaguccccgcugagcgcgguguggucccugcuccugcugcucugguuccuggugguccgggccuuccccgacggccccgggcugcucuga

SEQ ID NO: 1023 - RNA, 1035 nt, Artificial Sequence
  AAH09751_variant
auggcccagaaggagaacagcuaccccuggcccuacggccgccagaccgcccccuccgggcugagcacccucccccagcgggugcugcgcaaggagcccgucacgccguccgcgcuggugcucaugagccgguccaacgugcagcccaccgccgcccccggccagaaggucauggagaacagcuccgggacccccgacauccugacccgccacuucacgaucgacgacuucgagaucggccggccgcuggggaagggcaaguucggcaacguguaccucgcccgcgagaagaagucccacuucaucguggcccugaagguccuguucaagagccagaucgagaaggaggggguggagcaccagcuccggcgcgagaucgagauccaggcgcaccuccaccaccccaacauccugcggcuguacaacuacuucuacgaccgccggcgcaucuaccugauccuggaguacgcgccccggggcgagcucuacaaggagcugcagaaguccugcaccuucgacgagcagcgcaccgccaccaucauggaggagcuggccgacgcccucauguacugccacgggaagaaggugauccaccgggacaucaagcccgagaaccugcugcucggccugaagggggagcugaagaucgccgacuucggcuggagcguccacgccccgagccuccgccggaagacgaugugcggcacccuggacuaccugccgcccgagaugaucgaggggcgcaugcacaacgagaagguggaccucuggugcaucggcgugcugugcuacgagcugcucgucgggaacccgcccuucgaguccgccagccacaacgagaccuaccggcgcaucgugaagguggaccugaaguuccccgccuccguccccaugggcgcgcaggaccugaucagcaagcuccugcggcacaaccccuccgagcgccugccccucgcccaggugagcgcccaccccugggugcgcgccaacucccggcgcguccugccgcccagcgcccugcagagcguggcguga

SEQ ID NO: 1024 - RNA, 360 nt, Artificial Sequence
  AAD48083_variant
augagccgcuccguggcccuggccguccucgcgcugcugagccucuccggccuggaggccauccagcggacccccaagauccagguguacagccgccacccggccgagaacgggaaguccaacuuccugaacugcuacgugagcggcuuccaccccuccgacaucgaggucgaccuccugaagaacggggagcggaucgagaagguggagcacagcgaccuguccuucagcaaggacugguccuucuaccuccuguacuacaccgaguucacgcccaccgagaaggacgaguacgccugccgcgugaaccacgucacccugagccagcccaagaucgugaagugggaccgggacauguga

SEQ ID NO: 1025 - RNA, 1137 nt, Artificial Sequence
  AAH28058_variant
augcgcaugcuggugagcggccggcgcgucaagaaguggcagcucaucauccagcuguucgcgaccugcuuccuggccucccucauguucuucugggagcccaucgacaaccacaucgugagccacaugaaguccuacagcuaccgguaccugaucaacuccuacgacuucgugaacgacacccugagccucaagcacacguccgccgggccgcgcuaccaguaccugaucaaccacaaggagaagugccaggcccaggacguccugcuccugcuguucgugaagaccgcccccgagaacuacgaccggcgcagcggcauccggcgcaccugggggaacgagaacuacgugcggucccagcucaacgccaacaucaagacccuguucgcccugggcacgcccaacccccucgagggggaggagcugcagcgcaagcuggcgugggaggaccagcgguacaacgacaucauccagcaggacuucgucgacagcuucuacaaccucacccugaagcugcucaugcaguucuccugggccaacaccuacugcccgcacgccaaguuccugaugaccgccgacgacgacaucuucauccacaugcccaaccugaucgaguaccuccagagccuggagcagaucggcgugcaggacuucuggaucggccgcgugcaccgcggggcgccgcccauccgggacaaguccagcaaguacuacgucuccuacgagauguaccaguggcccgccuaccccgacuacacggccggcgccgccuacgugaucagcggggacguggcggccaaggucuacgaggccucccagacccugaacagcucccucuacaucgacgacguguucaugggccugugcgccaacaagaucgggaucgugccccaggaccacgucuucuucagcggcgagggcaagacccccuaccacccgugcaucuacgagaagaugaugaccagccacgggcaccuggaggaccuccaggaccuguggaagaacgccacggaccccaaggugaagaccaucuccaagggcuucuucgggcagaucuacugccggcugaugaagaucauccuccugugcaagaucagcuacguggacaccuaccccugccgcgcggccuucaucuga

SEQ ID NO: 1026 - RNA, 1602 nt, Artificial Sequence
  AAA35516_variant
auguggcugggccgccgggcccucugcgcccuggugcugcuccuggcgugcgccagccuggggcuccuguacgccuccacccgcgacgcccccggccugcggcucccgcuggcccccugggcgccgccccagagcccccgccggcccgagcugcccgaccucgcccccgagccgcgcuacgcccacauccccguccggaucaaggagcaggucguggggcugcuggccuggaacaacugcuccugcgagagcuccggcgggggccucccccugcccuuccagaagcagguccgcgcgaucgaccugaccaaggccuucgacccggccgagcuccgggccgccagcgcgacgcgcgagcaggaguuccaggccuuccugucccggagccagucccccgccgaccagcugcucaucgcccccgccaacagcccccugcaguacccgcugcagggcguggaggugcagccccuccgcuccauccuggugcccgggcugagccuccaggcggccuccggccaggagguguaccaggugaaccugaccgccagccuggggaccugggacgucgccggcgaggugaccggggugacgcucaccggcgagggccaggccgaccugacccuggucucccccgggcucgaccagcugaaccggcagcugcagcucgugaccuacagcucccgcagcuaccagacgaacaccgcggacaccgugcgguucuccaccgagggccacgaggccgccuucacgauccgcauccggcacccgcccaacccccgccuguacccgcccgggagccugccccagggcgcccaguacaacaucagcgcccucgucaccaucgcgaccaagaccuuccugcgguacgaccgccugcgggcccucaucacguccauccgccgcuucuaccccaccgugaccguggucaucgccgacgacagcgacaagcccgagcggguguccggcccguacguggagcacuaccugaugcccuucgggaagggcugguucgccgggcgcaaccuggcggucagccaggugaccacgaaguacgugcucugggucgacgacgacuucguguucaccgcccggacccgccuggagcggcuggucgacgugcucgagcgcacgccccuggaccuggugggcggggccguccgggagaucuccggcuucgccaccaccuaccgccagcugcucagcguggagccgggcgcccccgggcugggcaacugccugcggcagcgccggggguuccaccacgagcucgugggcuuccccgggugcgucgugaccgacggcguggucaacuucuuccuggcgcgcaccgacaaggugcgggaggugggcuucgacccccgccugucccgggucgcccaccucgaguucuuccuggacgggcugggcagccuccgcgugggguccugcagcgacguggucguggaccacgccuccaagcugaagcugccguggacgagccgggacgccggcgccgagaccuacgcgcgcuaccgguaccccgggucccucgacgagagccagauggccaagcaccgccugcuguucuucaagcaccgccuccagugcaugaccucccaguga

SEQ ID NO: 1027 - RNA, 849 nt, Artificial Sequence
  AAH74729_variant
auggccagccugggccagauccucuucugguccaucaucagcaucaucaucauccuggccggggcgaucgcccugaucaucggcuucgggaucuccggccgccacagcaucaccgugaccacggucgccuccgccgggaacaucggcgaggacggcauccucagcugcaccuucgagcccgacaucaagcuguccgacaucgugauccaguggcugaaggagggggugcucggccugguccacgaguucaaggaggggaaggacgagcugagcgagcaggacgagauguuccggggccgcaccgccguguucgcggaccaggugaucgucgggaacgccucccuccggcugaagaacgugcagcugaccgacgccggcacguacaagugcuacaucaucaccagcaagggcaaggggaacgccaaccucgaguacaagaccggcgcguucuccaugccggaggugaacgucgacuacaacgccagcuccgagacccugcgcugcgaggcgccccggugguucccccagcccacgguggugugggccagccaggucgaccagggggccaacuucuccgaggugagcaacaccuccuucgagcugaacagcgagaacgugaccaugaaggucguguccgugcucuacaacgucaccaucaacaacacguacagcugcaugaucgagaacgacaucgccaaggccaccggcgacaucaaggugaccgagagcgagaucaagcgccggucccaccuccagcugcugaacagcaaggccucccugugcgugagcuccuucuucgccaucagcugggcccugcucccgcugucccccuaccugaugcucaaguga

SEQ ID NO: 1028 - RNA, 132 nt, Artificial Sequence
  AAC50123_variant
auggccgcccgcgcgguguuccuggcccucagcgcccagcugcugcaggcccggcucaugaaggaggagucccccgucgugagcuggcgccuggagccggaggacggcaccgcccugugcuucaucuucuga

SEQ ID NO: 1029 - RNA, 1158 nt, Artificial Sequence
  AAN40694_variant
auggccgccgcccuguucgugcugcugggcuucgcccugcucgggacccacggcgccagcggggccgccggcuucguccaggcgccccugucccagcagcgcugggucgggggcagcguggagcugcacugcgaggccgugggcuccccggugcccgagauccaguggugguucgaggggcagggccccaacgacacgugcagccagcucugggacggggcccggcuggaccgcgugcacauccacgccaccuaccaccagcacgcggccuccaccaucagcaucgacacccuggucgaggaggacaccggcacguacgagugccgggccuccaacgaccccgaccgcaaccaccucacccgggccccgcgcgugaagugggugcgggcccaggcggucgugcuggugcuggagcccgggaccgucuucaccacgguggaggaccucggcagcaagauccugcugaccugcucccucaacgacagcgccaccgaggugaccggccaccgcuggcugaagggcggggucgugcugaaggaggacgcccuccccgggcagaagacggaguucaagguggacuccgacgaccaguggggcgaguacagcugcgucuuccugcccgagccgaugggcaccgccaacauccagcugcacgggccgccccgggugaaggccgugaaguccagcgagcacaucaacgagggcgagaccgcgaugcucgucugcaaguccgagagcgugccgcccgugaccgacugggccugguacaagaucacggacuccgaggacaaggcccugaugaacgggagcgagucccgcuucuucgucagcagcucccagggccggagcgagcugcacaucgagaaccucaacauggaggccgaccccgggcaguaccgcugcaacggcaccuccagcaagggcuccgaccaggccaucaucacccugcgggugcgcagccaccuggcggcccucuggcccuuccuggggaucgucgccgaggugcuggugcucgucaccaucaucuucaucuacgagaagcggcgcaagcccgaggacgugcuggacgacgacgacgccggcuccgcgccccucaagagcuccgggcagcaccagaacgacaagggcaagaacgugcggcagcgcaacagcuccuga

SEQ ID NO: 1030 - RNA, 720 nt, Artificial Sequence
  ABX60202_variant
auggcccacgccggccgcaccggguacgacaaccgggagaucgugaugaaguacauccacuacaagcugagccagcgcggcuacgagugggacgcgggggacgucggcgccgcgcccccgggggccgcccccgcccccggcaucuucuccagccagcccggccacaccccgcaccccgccgccucccgggaccccguggcccgcacgagcccccuccagaccccggcggcccccggggccgccgccggccccgcgcugucccccgugccgcccgucgugcaccugacccuccggcaggccggggacgacuucagccgccgguaccgccgggacuucgccgagauguccagccagcugcaccugacccccuucacggcccgcggccgguucgccaccguggucgaggagcuguuccgcgacggggugaacuggggccggaucguggcguucuucgaguucggcggggucaugugcguggaguccgugaaccgcgagaugagcccccuggucgacaacaucgcccuguggaugaccgaguaccucaaccggcaccuccacaccuggauccaggacaacggcgggugggacgccuucguggagcuguacggcccguccaugcgcccccucuucgacuucagcuggcugucccugaagacgcuccugagccuggcccucgugggcgccugcaucacccugggggcguaccugucccacaaguga

SEQ ID NO: 1031 - RNA, 1290 nt, Artificial Sequence
  ABX82700_variant
augguggaccccgucggcuucgccgaggccuggaaggcgcaguucccggacagcgagccgccccgcauggagcugcgguccgugggggacaucgagcaggagcucgagcgcugcaaggccagcauccggcgccuggagcaggaggugaaccaggagcgguuccgcaugaucuaccugcagacccuccuggccaaggagaagaaguccuacgaccggcagcgcuggggcuuccggcgcgccgcccaggcgcccgacggggccagcgagccccgggccuccgccagccgcccccagcccgcgcccgccgacggcgccgacccgccgcccgccgaggagcccgaggcccggcccgacggggagggcucccccggcaaggcgcgccccgggaccgcccggcgccccggcgccgccgccagcggggagcgggacgaccgcggcccgcccgcguccgucgccgcccugcggagcaacuucgagcgcauccggaaggggcacggccagcccggcgccgacgccgagaagcccuucuacgugaacguggaguuccaccacgagcgcgggcucgucaaggugaacgacaaggagguguccgaccgcaucagcucccugggcagccaggcgaugcagauggagcggaagaagucccagcacggggccggcagcuccgucggcgacgccagccgcccgcccuaccgggggcgcuccagcgagagcuccugcggcguggacggggacuacgaggacgccgagcugaacccccgguuccucaaggacaaccugaucgacgccaacggcgggagccggcccccguggccgccccuggaguaccagcccuaccaguccaucuacgugggcggcaugauggagggggagggcaaggggccccuccugcgcagccaguccacgagcgagcaggagaagcgccugaccuggccccggcgcuccuacagcccccgguccuucgaggacugcggcgggggcuacaccccggacugcagcuccaacgagaaccucaccagcuccgaggaggacuucagcuccggccagagcucccgcgucagccccucccccacgaccuaccggauguuccgcgacaagagccggagccccucccagaacagccagcaguccuucgacagcuccagcccgcccacgccccagugccacaagcgccaccggcacugccccgugguggucuccgaggcgaccaucgugggggugcgcaagaccggccagaucuggccgaacgacggggagggcgccuuccacggggacgccgacggcggcuga

SEQ ID NO: 1032 - RNA, 1665 nt, Artificial Sequence
  ABX82703_variant
augguggaccccgucggcuucgccgaggccuggaaggcgcaguucccggacagcgagccgccccgcauggagcugcgguccgugggggacaucgagcaggagcucgagcgcugcaaggccagcauccggcgccuggagcaggaggugaaccaggagcgguuccgcaugaucuaccugcagacccuccuggccaaggagaagaaguccuacgaccggcagcgcuggggcuuccggcgcgccgcccaggcgcccgacggggccagcgagccccgggccuccgccagccgcccccagcccgcgcccgccgacggcgccgacccgccgcccgccgaggagcccgaggcccggcccgacggggagggcucccccggcaaggcgcgccccgggaccgcccggcgccccggcgccgccgccagcggggagcgggacgaccgcggcccgcccgcguccgucgccgcccugcggagcaacuucgagcgcauccggaaggggcacggccagcccggcgccgacgccgagaagcccuucuacgugaacguggaguuccaccacgagcgcgggcucgucaaggugaacgacaaggagguguccgaccgcaucagcucccugggcagccaggcgaugcagauggagcggaagaagucccagcacggggccggcagcuccgucggcgacgccagccgcccgcccuaccgggggcgcuccagcgagagcuccugcggcguggacggggacuacgaggacgccgagcugaacccccgguuccucaaggacaaccugaucgacgccaacggcgggagccggcccccguggccgccccuggaguaccagcccuaccaguccaucuacgugggcggcaugauggagggggagggcaaggggccccuccugcgcagccaguccacgagcgagcaggagaagcgccugaccuggccccggcgcuccuacagcccccgguccuucgaggacugcggcgggggcuacaccccggacugcagcuccaacgagaaccucaccagcuccgaggaggacuucagcuccggccagagcucccgcgucagccccucccccacgaccuaccggauguuccgcgacaagagccggagccccucccagaacagccagcaguccuucgacagcuccagcccgcccacgccccagugccacaagcgccaccggcacugccccgugguggucuccgaggcgaccaucgugggggugcgcaagaccggccagaucuggccgaacgacggggagggcgccuuccacggggacgccgacggcagcuucggcaccccgcccggguacggcugcgccgcggaccgggccgaggagcagcgccgccaccaggacgggcugcccuacaucgacgacucccccagcuccagcccccaccuguccagcaagggccggggcucccgcgacgcccucgucagcggggcccuggaguccaccaaggccagcgagcuggaccucgagaagggccuggagaugcggaagugggugcugagcgggauccucgcguccgaggagaccuaccugagccaccuggaggcccuccugcugcccaugaagccccucaaggccgccgccacgaccucccagccggugcugaccagccagcagaucgagaccaucuucuucaagguccccgaccugcucuga

SEQ ID NO: 1033 - RNA, 1545 nt, Artificial Sequence
  ABX82704_variant
augguggaccccgucggcuucgccgaggccuggaaggcgcaguucccggacagcgagccgccccgcauggagcugcgguccgugggggacaucgagcaggagcucgagcgcugcaaggccagcauccggcgccuggagcaggaggugaaccaggagcgguuccgcaugaucuaccugcagacccuccuggccaaggagaagaaguccuacgaccggcagcgcuggggcuuccggcgcgccgcccaggcgcccgacggggccagcgagccccgggccuccgccagccgcccccagcccgcgcccgccgacggcgccgacccgccgcccgccgaggagcccgaggcccggcccgacggggagggcucccccggcaaggcgcgccccgggaccgcccggcgccccggcgccgccgccagcggggagcgggacgaccgcggcccgcccgcguccgucgccgcccugcggagcaacuucgagcgcauccggaaggggcacggccagcccggcgccgacgccgagaagcccuucuacgugaacguggaguuccaccacgagcgcgggcucgucaaggugaacgacaaggagguguccgaccgcaucagcucccugggcagccaggcgaugcagauggagcggaagaagucccagcacggggccggcagcuccgucggcgacgccagccgcccgcccuaccgggggcgcuccagcgagagcuccugcggcguggacggggacuacgaggacgccgagcugaacccccgguuccucaaggacaaccugaucgacgccaacggcgggagccggcccccguggccgccccuggaguaccagcccuaccaguccaucuacgugggcggcaugauggagggggagggcaaggggccccuccugcgcagccaguccacgagcgagcaggagaagcgccugaccuggccccggcgcuccuacagcccccgguccuucgaggacugcggcgggggcuacaccccggacugcagcuccaacgagaaccucaccagcuccgaggaggacuucagcuccggccagagcucccgcgucagccccucccccacgaccuaccggauguuccgcgacaagagccggagccccucccagaacagccagcaguccuucgacagcuccagcccgcccacgccccagugccacaagcgccaccggcacugccccgugguggucuccgaggcgaccaucgugggggugcgcaagaccggccagaucuggccgaacgacggggagggcgccuuccacggggacgccgacggcagcuucggcaccccgcccggguacggcugcgccgcggaccgggccgaggagcagcgccgccaccaggacgggcugcccuacaucgacgacucccccagcuccagcccccaccuguccagcaagggccggggcucccgcgacgcccucgucagcggggcccuggaguccaccaaggccagcgagcuggaccucgagaagggccuggagaugcggaagugggugcugagcgggauccucgcguccgaggagaucacccuguga

SEQ ID NO: 1034 - RNA, 1326 nt, Artificial Sequence
  ABX82705_variant
augguggaccccgucggcuucgccgaggccuggaaggcgcaguucccggacagcgagccgccccgcauggagcugcgguccgugggggacaucgagcaggagcucgagcgcugcaaggccagcauccggcgccuggagcaggaggugaaccaggagcgguuccgcaugaucuaccugcagacccuccuggccaaggagaagaaguccuacgaccggcagcgcuggggcuuccggcgcgccgcccaggcgcccgacggggccagcgagccccgggccuccgccagccgcccccagcccgcgcccgccgacggcgccgacccgccgcccgccgaggagcccgaggcccggcccgacggggagggcucccccggcaaggcgcgccccgggaccgcccggcgccccggcgccgccgccagcggggagcgggacgaccgcggcccgcccgcguccgucgccgcccugcggagcaacuucgagcgcauccggaaggggcacggccagcccggcgccgacgccgagaagcccuucuacgugaacguggaguuccaccacgagcgcgggcucgucaaggugaacgacaaggagguguccgaccgcaucagcucccugggcagccaggcgaugcagauggagcggaagaagucccagcacggggccggcagcuccgucggcgacgccagccgcccgcccuaccgggggcgcuccagcgagagcuccugcggcguggacggggacuacgaggacgccgagcugaacccccgguuccucaaggacaaccugaucgacgccaacggcgggagccggcccccguggccgccccuggaguaccagcccuaccaguccaucuacgugggcggcaugauggagggggagggcaaggggccccuccugcgcagccaguccacgagcgagcaggagaagcgccugaccuggccccggcgcuccuacagcccccgguccuucgaggacugcggcgggggcuacaccccggacugcagcuccaacgagaaccucaccagcuccgaggaggacuucagcuccggccagagcucccgcgucagccccucccccacgaccuaccggauguuccgcgacaagagccggagccccucccagaacagccagcaguccuucgacagcuccagcccgcccacgccccagugccacaagcgccaccggcacugccccgugguggucuccgaggcgaccaucgugggggugcgcaagaccggccagaucuggccgaacgacggggagggcgccuuccacggggacgccgacggcagccuggagcugcagggcaagcccucccgguggacccaguga

SEQ ID NO: 1035 - RNA, 1575 nt, Artificial Sequence
  ABX82706_variant
augguggaccccgucggcuucgccgaggccuggaaggcgcaguucccggacagcgagccgccccgcauggagcugcgguccgugggggacaucgagcaggagcucgagcgcugcaaggccagcauccggcgccuggagcaggaggugaaccaggagcgguuccgcaugaucuaccugcagacccuccuggccaaggagaagaaguccuacgaccggcagcgcuggggcuuccggcgcgccgcccaggcgcccgacggggccagcgagccccgggccuccgccagccgcccccagcccgcgcccgccgacggcgccgacccgccgcccgccgaggagcccgaggcccggcccgacggggagggcucccccggcaaggcgcgccccgggaccgcccggcgccccggcgccgccgccagcggggagcgggacgaccgcggcccgcccgcguccgucgccgcccugcggagcaacuucgagcgcauccggaaggggcacggccagcccggcgccgacgccgagaagcccuucuacgugaacguggaguuccaccacgagcgcgggcucgucaaggugaacgacaaggagguguccgaccgcaucagcucccugggcagccaggcgaugcagauggagcggaagaagucccagcacggggccggcagcuccgucggcgacgccagccgcccgcccuaccgggggcgcuccagcgagagcuccugcggcguggacggggacuacgaggacgccgagcugaacccccgguuccucaaggacaaccugaucgacgccaacggcgggagccggcccccguggccgccccuggaguaccagcccuaccaguccaucuacgugggcggcaugauggagggggagggcaaggggccccuccugcgcagccaguccacgagcgagcaggagaagcgccugaccuggccccggcgcuccuacagcccccgguccuucgaggacugcggcgggggcuacaccccggacugcagcuccaacgagaaccucaccagcuccgaggaggacuucagcuccggccagagcucccgcgucagccccucccccacgaccuaccggauguuccgcgacaagagccggagccccucccagaacagccagcaguccuucgacagcuccagcccgcccacgccccagugccacaagcgccaccggcacugccccgugguggucuccgaggcgaccaucgugggggugcgcaagaccggccagaucuggccgaacgacggggagggcgccuuccacggggacgccgacggcagcuucggcaccccgcccggguacggcugcgccgcggaccgggccgaggagcagcgccgccaccaggacgggcugcccuacaucgacgacucccccagcuccagcccccaccuguccagcaagggccggggcucccgcgacgcccucgucagcggggcccuggaguccaccaaggccagcgagcuggaccucgagaagggccuggagaugcggaagugggaccccgugaagaugacccccacguucagccugcacugcaugauccucuggccgguggagaucacccuguga

SEQ ID NO: 1036 - RNA, 1398 nt, Artificial Sequence
  ABX82707_variant
augguggaccccgucggcuucgccgaggccuggaaggcgcaguucccggacagcgagccgccccgcauggagcugcgguccgugggggacaucgagcaggagcucgagcgcugcaaggccagcauccggcgccuggagcaggaggugaaccaggagcgguuccgcaugaucuaccugcagacccuccuggccaaggagaagaaguccuacgaccggcagcgcuggggcuuccggcgcgccgcccaggcgcccgacggggccagcgagccccgggccuccgccagccgcccccagcccgcgcccgccgacggcgccgacccgccgcccgccgaggagcccgaggcccggcccgacggggagggcucccccggcaaggcgcgccccgggaccgcccggcgccccggcgccgccgccagcggggagcgggacgaccgcggcccgcccgcguccgucgccgcccugcggagcaacuucgagcgcauccggaaggggcacggccagcccggcgccgacgccgagaagcccuucuacgugaacguggaguuccaccacgagcgcgggcucgucaaggugaacgacaaggagguguccgaccgcaucagcucccugggcagccaggcgaugcagauggagcggaagaagucccagcacggggccggcagcuccgucggcgacgccagccgcccgcccuaccgggggcgcuccagcgagagcuccugcggcguggacggggacuacgaggacgccgagcugaacccccgguuccucaaggacaaccugaucgacgccaacggcgggagccggcccccguggccgccccuggaguaccagcccuaccaguccaucuacgugggcggcaugauggagggggagggcaaggggccccuccugcgcagccaguccacgagcgagcaggagaagcgccugaccuggccccggcgcuccuacagcccccgguccuucgaggacugcggcgggggcuacaccccggacugcagcuccaacgagaaccucaccagcuccgaggaggacuucagcuccggccagagcucccgcgucagccccucccccacgaccuaccggauguuccgcgacaagagccggagccccucccagaacagccagcaguccuucgacagcuccagcccgcccacgccccagugccacaagcgccaccggcacugccccgugguggucuccgaggcgaccaucgugggggugcgcaagaccggccagaucuggccgaacgacggggagggcgccuuccacggggagcaccccggcgccgccgaggaggucuuccagaagcugcugcccgacauccggggcgcggccgacgccgaccagcucgugugcgagacccccgacugcccgcagcacagcgccgaccaccaguga

SEQ ID NO: 1037 - RNA, 1377 nt, Artificial Sequence
  ABX82709_variant
augguggaccccgucggcuucgccgaggccuggaaggcgcaguucccggacagcgagccgccccgcauggagcugcgguccgugggggacaucgagcaggagcucgagcgcugcaaggccagcauccggcgccuggagcaggaggugaaccaggagcgguuccgcaugaucuaccugcagacccuccuggccaaggagaagaaguccuacgaccggcagcgcuggggcuuccggcgcgccgcccaggcgcccgacggggccagcgagccccgggccuccgccagccgcccccagcccgcgcccgccgacggcgccgacccgccgcccgccgaggagcccgaggcccggcccgacggggagggcucccccggcaaggcgcgccccgggaccgcccggcgccccggcgccgccgccagcggggagcgggacgaccgcggcccgcccgcguccgucgccgcccugcggagcaacuucgagcgcauccggaaggggcacggccagcccggcgccgacgccgagaagcccuucuacgugaacguggaguuccaccacgagcgcgggcucgucaaggugaacgacaaggagguguccgaccgcaucagcucccugggcagccaggcgaugcagauggagcggaagaagucccagcacggggccggcagcuccgucggcgacgccagccgcccgcccuaccgggggcgcuccagcgagagcuccugcggcguggacggggacuacgaggacgccgagcugaacccccgguuccucaaggacaaccugaucgacgccaacggcgggagccggcccccguggccgccccuggaguaccagcccuaccaguccaucuacgugggcggcaugauggagggggagggcaaggggccccuccugcgcagccaguccacgagcgagcaggagaagcgccugaccuggccccggcgcuccuacagcccccgguccuucgaggacugcggcgggggcuacaccccggacugcagcuccaacgagaaccucaccagcuccgaggaggacuucagcuccggccagagcucccgcgucagccccucccccacgaccuaccggauguuccgcgacaagagccggagccccucccagaacagccagcaguccuucgacagcuccagcccgcccacgccccagugccacaagcgccaccggcacugccccgugguggucuccgaggcgaccaucgugggggugcgcaagaccggccagaucuggccgaacgacggggagggcgccuuccacggggacgccgacggcagcuucggcaccccgcccggguacugcugccugugccugcccgccuggcccuccggcugcaccgcggccaccgcccgggucacgcgcagcuga

SEQ ID NO: 1038 - RNA, 1365 nt, Artificial Sequence
  ABX82710_variant
augguggaccccgucggcuucgccgaggccuggaaggcgcaguuccccgacagcgagccgccccgcauggagcugcgguccgugggggacaucgagcaggagcucgagcgcugcaaggccagcauccggcgccuggagcaggaggugaaccaggagcgguuccgcaugaucuaccugcagacccuccuggccaaggagaagaaguccuacgaccggcagcgcuggggcuuccggcgcgccgcccaggcgcccgacggggccagcgagccccgggccuccgccagccgcccccagcccgcgcccgccgacggcgccgacccgccgcccgccgaggagcccgaggcccggcccgacggggagggcucccccggcaaggcgcgccccgggaccgcccggcgccccggcgccgccgccagcggggagcgggacgaccgcggcccgcccgcguccgucgccgcccugcggagcaacuucgagcgcauccggaaggggcacggccagcccggcgccgacgccgagaagcccuucuacgugaacguggaguuccaccacgagcgcgggcucgucaaggugaacgacaaggagguguccgaccgcaucagcucccugggcagccaggcgaugcagauggagcggaagaagucccagcacggggccggcagcuccgucggcgacgccagccgcccgcccuaccgggggcgcuccagcgagagcuccugcggcguggacggggacuacgaggacgccgagcugaacccccgguuccucaaggacaaccugaucgacgccaacggcgggagccggcccccguggccgccccuggaguaccagcccuaccaguccaucuacgugggcggcaugauggagggggagggcaaggggccccuccugcgcagccaguccacgagcgagcaggagaagcgccugaccuggccccggcgcuccuacagcccccgguccuucgaggacugcggcgggggcuacaccccggacugcagcuccaacgagaaccucaccagcuccgaggaggacuucagcuccggccagagcucccgcgucagccccucccccacgaccuaccggauguuccgcgacaagagccggagccccucccagaacagccagcaguccuucgacagcuccagcccgcccacgccccagugccacaagcgccaccggcacugccccgugguggucuccgaggcgaccaucgugggggugcgcaagaccggccagaucuggccgaacgacggggagggcgccuuccacggggacgccgacggcagcuucggcaccccgcccggguacggcugcgccgcggggcggccgccccaccugaccgagcugcccguccagcaccaguga

SEQ ID NO: 1039 - RNA, 1404 nt, Artificial Sequence
  ABX82711_variant
augguggaccccgucggcuucgccgaggccuggaaggcgcaguucccggacagcgagccgccccgcauggagcugcgguccgugggggacaucgagcaggagcucgagcgcugcaaggccagcauccggcgccuggagcaggaggugaaccaggagcgguuccgcaugaucuaccugcagacccuccuggccaaggagaagaaguccuacgaccggcagcgcuggggcuuccggcgcgccgcccaggcgcccgacggggccagcgagccccgggccuccgccagccgcccccagcccgcgcccgccgacggcgccgacccgccgcccgccgaggagcccgaggcccggcccgacggggagggcucccccggcaaggcgcgccccgggaccgcccggcgccccggcgccgccgccagcggggagcgggacgaccgcggcccgcccgcguccgucgccgcccugcggagcaacuucgagcgcauccggaaggggcacggccagcccggcgccgacgccgagaagcccuucuacgugaacguggaguuccaccacgagcgcgggcucgucaaggugaacgacaaggagguguccgaccgcaucagcucccugggcagccaggcgaugcagauggagcggaagaagucccagcacggggccggcagcuccgucggcgacgccagccgcccgcccuaccgggggcgcuccagcgagagcuccugcggcguggacggggacuacgaggacgccgagcugaacccccgguuccucaaggacaaccugaucgacgccaacggcgggagccggcccccguggccgccccuggaguaccagcccuaccaguccaucuacgugggcggcaugauggagggggagggcaaggggccccuccugcgcagccaguccacgagcgagcaggagaagcgccugaccuggccccggcgcuccuacagcccccgguccuucgaggacugcggcgggggcuacaccccggacugcagcuccaacgagaaccucaccagcuccgaggaggacuucagcuccggccagagcucccgcgucagccccucccccacgaccuaccggauguuccgcgacaagagccggagccccucccagaacagccagcaguccuucgacagcuccagcccgcccacgccccagugccacaagcgccaccggcacugccccgugguggucuccgaggcgaccaucgugggggugcgcaagaccggccagaucuggccgaacgacggggagggcgccuuccacggggacgccguccugaagaccgaggugccccaccagggcgugcggcgcgcccgccugagccucgaggcgcugggcgaggaccccuccuuccuguuccccgccagcgacgggccgcggcacuccagcaccugguga

SEQ ID NO: 1040 - RNA, 1542 nt, Artificial Sequence
  ABX82712_variant
augguggaccccgucggcuucgccgaggccuggaaggcgcaguucccggacagcgagccgccccgcauggagcugcgguccgugggggacaucgagcaggagcucgagcgcugcaaggccagcauccggcgccuggagcaggaggugaaccaggagcgguuccgcaugaucuaccugcagacccuccuggccaaggagaagaaguccuacgaccggcagcgcuggggcuuccggcgcgccgcccaggcgcccgacggggccagcgagccccgggccuccgccagccgcccccagcccgcgcccgccgacggcgccgacccgccgcccgccgaggagcccgaggcccggcccgacggggagggcucccccggcaaggcgcgccccgggaccgcccggcgccccggcgccgccgccagcggggagcgggacgaccgcggcccgcccgcguccgucgccgcccugcggagcaacuucgagcgcauccggaaggggcacggccagcccggcgccgacgccgagaagcccuucuacgugaacguggaguuccaccacgagcgcgggcucgucaaggugaacgacaaggagguguccgaccgcaucagcucccugggcagccaggcgaugcagauggagcggaagaagucccagcacggggccggcagcuccgucggcgacgccagccgcccgcccuaccgggggcgcuccagcgagagcuccugcggcguggacggggacuacgaggacgccgagcugaacccccgguuccucaaggacaaccugaucgacgccaacggcgggagccggcccccguggccgccccuggaguaccagcccuaccaguccaucuacgugggcggcaugauggagggggagggcaaggggccccuccugcgcagccaguccacgagcgagcaggagaagcgccugaccuggccccggcgcuccuacagcccccgguccuucgaggacugcggcgggggcuacaccccggacugcagcuccaacgagaaccucaccagcuccgaggaggacuucagcuccggccagagcucccgcgucagccccucccccacgaccuaccggauguuccgcgacaagagccggagccccucccagaacagccagcaguccuucgacagcuccagcccgcccacgccccagugccacaagcgccaccggcacugccccgugguggucuccgaggcgaccaucgugggggugcgcaagaccggccagaucuggccgaacgacggggagggcgccuuccacggggacgccgacggcagcuucggcaccccgcccggguacggcugcgccgcggaccgggccgaggagcagcgccgccaccaggacgggcugcccuacaucgacgacucccccagcuccagcccccaccuguccagcaagggccggggcucccgcgacgcccucgucagcggggcccuggaguccaccaaggccagcgagcuggaccccgugaagaugacccccacguucagccuccacugcaugauccuguggccgguggagaucacccuguga

SEQ ID NO: 1041 - RNA, 1221 nt, Artificial Sequence
  ABX82714_variant
augguggaccccgucggcuucgccgaggccuggaaggcgcaguucccggacagcgagccgccccgcauggagcugcgguccgugggggacaucgagcaggagcucgagcgcugcaaggccagcauccggcgccuggagcaggaggugaaccaggagcgguuccgcaugaucuaccugcagacccuccuggccaaggagaagaaguccuacgaccggcagcgcuggggcuuccggcgcgccgcccaggcgcccgacggggccagcgagccccgggccuccgccagccgcccccagcccgcgcccgccgacggcgccgacccgccgcccgccgaggagcccgaggcccggcccgacggggagggcucccccggcaaggcgcgccccgggaccgcccggcgccccggcgccgccgccagcggggagcgggacgaccgcggcccgcccgcguccgucgccgcccugcggagcaacuucgagcgcauccggaaggggcacggccagcccggcgccgacgccgagaagcccuucuacgugaacguggaguuccaccacgagcgcgggcucgucaaggugaacgacaaggagguguccgaccgcaucagcucccugggcagccaggcgaugcagauggagcggaagaagucccagcacggggccggcagcuccgucggcgacgccagccgcccgcccuaccgggggcgcuccagcgagagcuccugcggcguggacggggacuacgaggacgccgagcugaacccccgguuccucaaggacaaccugaucgacgccaacggcgggagccggcccccguggccgccccuggaguaccagcccuaccaguccaucuacgugggcggcaugauggagggggagggcaaggggccccuccugcgcagccaguccaccagcgagcaggagaagcgccugaccuggccccggcgcuccuacagcccccgguccuucgaggacugcggcgggggcuacaccccggacugcagcuccaacgagaaccucaccagcuccgaggaggacuucagcuccggccagagcucccgcgucagccccucccccacgaccuaccggauguuccgcgacaagagccggagccccucccagaacagccagcaguccuucgacagcuccagcccgcccacgccccagugccacaagcgccaccggcacugccccgugguggucuccgaggcgaccagcgggcaguga

SEQ ID NO: 1042 - RNA, 2346 nt, Artificial Sequence
  AAH58926_variant
auggccacccaggccgaccugauggagcucgacauggcgauggagcccgaccgcaaggccgccgugagccacuggcagcagcaguccuaccuggacagcggcauccacuccggggccaccacgaccgcccccagccuguccggcaaggggaaccccgaggaggaggacgucgacaccagccaggugcucuacgagugggagcagggcuucucccagagcuucacccaggagcaggucgcggacaucgacgggcaguacgccaugacgcgggcccagcgcgugcgggccgcgauguuccccgagacccuggacgagggcaugcagauccccuccacccaguucgacgccgcccacccgaccaacgugcagcgccuggccgagcccagccagaugcucaagcacgccguggucaaccugaucaacuaccaggacgacgcggagcuggccacgcgggccauccccgagcucaccaagcugcugaacgacgaggaccaggugguggucaacaaggccgccgugauggugcaccagcucuccaagaaggaggcgagccgccacgccaucaugcggagcccccagauggucuccgccaucgugcgcaccaugcagaacaccaacgacguggagacggcccggugcaccgccggcacccugcacaaccugucccaccaccgcgaggggcuccuggcgaucuucaagagcggcgggaucccggcccuggucaagaugcucggcucccccguggacagcgugcuguucuacgccaucaccacgcugcacaaccuccugcugcaccaggagggggccaagauggccguccggcucgcgggcggccugcagaagaugguggcccugcucaacaagaccaacgugaaguuccuggccaucaccaccgacugccugcagauccucgccuacgggaaccaggaguccaagcugaucauccuggcgagcggcgggccccaggcccucgucaacaucaugcgcacguacaccuacgagaagcugcuguggaccaccagccgggugcucaaggugcuguccgucugcagcuccaacaagcccgccaucguggaggccggcggcaugcaggcccuggggcuccaccugacggacccgagccagcgccugguccagaacugccucuggacccugcggaaccuguccgacgcggccaccaagcaggagggcauggaggggcuccugggcacccuggugcagcuccuggggagcgacgacaucaacguggucacgugcgccgccggcauccuguccaaccugaccugcaacaacuacaagaacaagaugauggugugccaggugggcgggaucgaggcccucguccgcaccgugcugcgggcgggcgaccgcgaggacaucaccgagcccgccaucugcgcccugcggcaccucacgagccgccaccaggaggccgagauggcccagaacgcggugcggcugcacuacgggcugcccgucguggugaagcuccugcacccgcccucccacuggccccugaucaaggccaccgucggccucauccgcaaccuggcccugugccccgccaaccacgcgccccuccgcgagcagggggccaucccgcggcuggugcagcugcucgugcgcgcccaccaggacacccagcggcgcaccagcaugggcggcacgcagcagcaguucgucgagggggugcggauggaggagaucguggagggcugcaccggggcccugcacauccuggcccgcgacguccacaaccggaucgugauccgcggccucaacaccaucccccuguucgugcagcugcucuacucccccaucgagaacauccagcgggucgcggccggggugcugugcgagcuggcccaggacaaggaggccgccgaggcgaucgaggccgagggcgccaccgcgccccucaccgagcugcugcacagccgcaacgagggcguggccacguacgccgccgccguccucuuccggauguccgaggacaagccgcaggacuacaagaagcgccugagcguggagcugaccuccagccucuuccggaccgagcccauggccuggaacgagaccgcggaccuggggcuggacaucggcgcccagggggagccccucggcuaccgccaggacgaccccuccuaccggagcuuccacuccggcggguacggccaggacgcccuggggauggacccgaugauggagcacgagaugggcgggcaccaccccggcgccgacuaccccguggacggccugccggaccucgggcacgcccaggaccugauggacggccugccgcccggggacagcaaccagcucgcgugguucgacacggaccuguga

SEQ ID NO: 1043 - RNA, 1692 nt, Artificial Sequence
  AAI21007_variant
auggacgugggcgagcugcucagcuaccagcccaaccgcgggaccaagcggccgcgcgacgacgaggaggaggagcagaagaugcggcgcaagcagaccggcacgcgggagcgcgggcgguaccgcgaggaggagaugaccgucguggaggaggccgacgacgacaagaagcggcugcugcagaucaucgaccgcgacggcgaggaggaggaggaggaggaggagccccucgacgaguccagcgugaagaagaugauccugaccuucgagaagcgguccuacaagaaccaggagcugcgcaucaaguuccccgacaaccccgagaaguucauggagagcgagcucgaccugaacgacaucauccaggagaugcacgucguggccaccaugccggaccuguaccaccuccugguggagcugaacgcgguccagucccuccuggggcugcucggccacgacaacacggacgugagcaucgccguggucgaccugcugcaggagcucaccgacaucgacacccugcacgaguccgaggagggcgccgaggugcugaucgacgcccucguggacgggcaggucguggcccugcuggugcagaaccucgagcggcuggacgagagcgucaaggaggaggcggacggcgugcacaacacccuggccaucguggagaacauggccgaguuccgccccgagaugugcacggagggggcccagcagggccuccugcaguggcugcucaagcggcugaaggcgaagaugcccuucgacgccaacaagcuguacugcuccgagguccucgccauccugcugcaggacaacgacgagaaccgcgagcuccugggggagcuggacggcaucgacgugcuccugcagcagcugagcguguucaagcggcacaaccccuccaccgccgaggagcaggagaugauggagaaccucuucgacagccugugcuccugccugaugcucagcuccaaccgcgagcgguuccugaagggcgaggggcugcagcucaugaaccugaugcugcgcgagaagaagaucagccgguccagcgcccugaagguccucgaccacgcgaugaucggcccggaggggaccgacaacugccacaaguucguggacauccugggccugcgcaccaucuucccccucuucaugaaguccccgcgcaagaucaagaaggugggcacgaccgagaaggagcacgaggagcacgucugcagcauccuggccagccugcuccggaaccugcgcgggcagcagcggacccgccugcucaacaaguucaccgagaacgacuccgagaagguggaccggcugauggagcugcacuucaaguaccucggcgccaugcaggucgccgacaagaagaucgagggggagaagcacgacauggugcgccggggcgagaucaucgacaacgacacggaggaggaguucuaccugcgccggcuggacgccggccucuucgugcugcagcacaucugcuacaucauggcggagaucugcaacgccaacgucccccagauccgccagcgggugcaccagauccugaacaugcgcgggagcuccaucaagaucgugcggcacaucaucaaggaguacgccgagaacaucggcgacgggcgcagccccgaguuccgggagaacgagcagaagcgcauccucggccugcuggagaacuucuga

SEQ ID NO: 1044 - RNA, 1833 nt, Artificial Sequence
  CCDS4772.1_variant
auggagaccgcccccaagccgggcaaggacgugccgcccaagaaggacaagcugcagaccaagcgcaagaagccccggcgcuacugggaggaggagacgguccccaccaccgccggggcgagccccggcccgccccggaacaagaagaaccgcgagcuccggccccagcgccccaagaacgccuacauccugaagaagucccggaucagcaagaagccccaggugcccaagaagccgcgcgaguggaagaaccccgagucccagcgggggcugagcggcacccaggaccccuuccccgggccggcccccgugcccgucgagguggugcagaaguucugccgcaucgacaagucccggaagcucccccacagcaaggccaagacgcgcucccggcuggaggucgccgaggcggaggaggaggagaccagcaucaaggccgcccgcuccgagcugcuccuggccgaggagccgggcuuccuggagggcgaggacggggaggacaccgcgaagaucugccaggccgacaucguggaggccguggacaucgccagcgccgcgaagcacuucgaccucaaccugcggcaguucggccccuaccgccugaacuacucccggaccgggcgccaccucgccuucggcgggcggcgcggccacgucgccgcccuggacugggugacgaagaagcugaugugcgagaucaacgugauggaggccguccgggacauccgcuuccuccacagcgaggcgcugcuggccguggcccagaaccgcuggcuccacaucuacgacaaccagggcaucgagcugcacugcauccggcgcugcgaccgggugacccgccuggaguuccuccccuuccacuuccugcuggccaccgccuccgagaccggguuccucacguaccuggacgucagcgugggcaagaucguggcggcccugaacgcccgggccgggcgccucgacgucaugucccagaaccccuacaacgccgugauccaccugggccacagcaacggcaccgugucccuguggagcccggcgaugaaggagccccucgccaagauccugugccaccgcgggggcguccgggccguggccguggacuccaccgggaccuacauggcgacgagcggccuggaccaccagcucaagaucuucgaccugcgggggaccuaccagccccugagcacccgcacccucccccacggcgccggccaccuggccuucucccagcgggggcugcucgucgccggcaugggggacguggucaacaucugggccggccaggggaaggcgagcccgcccucccuggagcagcccuaccugacgcaccgccucagcggcccggugcacggccugcaguucugccccuucgaggacgugcugggggucggccacaccgggggcaucaccuccaugcucgugcccggggccggcgagcccaacuucgacggccuggagagcaacccguaccggucccgcaagcagcggcaggagugggaggugaaggcccugcucgagaagguccccgccgagcugaucugccuggacccccgcgcccuggcggagguggacgugaucagccucgagcaggggaagaaggagcagaucgagcggcugggcuacgacccccaggccaaggccccguuccagcccaagcccaagcagaaggggcgcuccagcaccgccucccuggucaagcggaagcgcaaggugauggacgaggagcaccgcgacaaggugcggcagagccuccagcagcagcaccacaaggaggccaaggcgaagcccacgggcgcccgcccguccgcccuggaccgguucguccgcuga

SEQ ID NO: 1045 - RNA, 897 nt, Artificial Sequence
  AAG37878_variant
augggccccaaggacagcgccaagugccugcaccgcgggccgcagcccucccacugggccgcgggcgacgggcccacccaggagcggugcggcccccgcagccucggguccccggugcugggccuggacacgugccgggccugggaccacgucgacggccagauccucgggcagcugcgcccccugaccgaggaggaggaggaggagggcgccggggccacccucagccggggccccgccuuccccgggaugggcuccgaggagcugcgccuggcgagcuucuacgacuggccgcucaccgccgaggugccgcccgagcugcuggccgccgcgggcuucuuccacaccgggcaccaggacaaggugcggugcuucuucugcuacggcgggcuccaguccuggaagcgcggcgacgaccccuggacggagcacgccaagugguuccccagcugccaguuccugcugcgguccaagggccgcgacuucguccacagcgugcaggagacccacucccagcuccuggggagcugggaccccugggaggagcccgaggacgccgcccccguggccccguccguccccgcgagcggcuaccccgagcugcccaccccgcggcgcgaggugcaguccgagagcgcccaggagcccgggggcgugucccccgccgaggcccagcgggccugguggguccucgagcccccgggggcgcgcgacguggaggcccagcugcggcgccugcaggaggagcggaccugcaaggugugccucgaccgcgccgucagcaucguguucgugcccugcggccaccuggucugcgccgagugcgcccccggccugcagcucugccccaucugccgggcgccggugcgcucccgggugcgcacguuccugagcuga

SEQ ID NO: 1046 - RNA, 2280 nt, Artificial Sequence
  EAW60925_variant
auggaccugagcgcccuccgcguggaggagguccagaacgugaucaacgccaugcagaagauccuggagugccccaucugccuggagcucaucaaggagccgguguccaccaagugcgaccacaucuucugcaaguucugcaugcugaagcugcucaaccagaagaagggccccagccagugcccccugugcaagaacgacaucaccaagcggucccugcaggagagcacgcgcuucucccagcucgucgaggagcugcugaagaucaucugcgcguuccagcucgacaccgggcuggaguacgccaacagcuacaacuucgccaagaaggagaacaacucccccgagcaccugaaggacgaggugagcaucauccaguccaugggcuaccggaaccgcgccaagcggcuccugcagagcgagccggagaaccccucccugcaggagaccagccucuccgugcagcugagcaaccuggggaccguccgcacgcuccggaccaagcagcgcauccagccccagaagaccuccguguacaucgagcugggcagcgacuccagcgaggacaccgugaacaaggccacguacugcuccgucggggaccaggagcugcuccagaucacgccccagggcacccgggacgagaucagccuggacagcgcgaagaaggccgccugcgaguucuccgagaccgacgugaccaacaccgagcaccaccagccgagcaacaacgaccugaacaccaccgagaagcgcgccgcggagcggcaccccgagaaguaccagggcgaggccgccuccgggugcgagagcgagacguccgugagcgaggacugcuccggccucagcucccagagcgacauccugaccacccagcagcgcgacaccaugcagcacaaccugaucaagcuccagcaggagauggccgagcuggaggccguccuggagcagcacgggucccagcccagcaacuccuaccccagcaucaucuccgacagcuccgcgcucgaggaccugcggaacccggagcagagcacguccgagaaggugcugaccagccagaaguccagcgaguaccccaucagccagaaccccgagggccucuccgccgacaaguucgaggugagcgccgacuccagcaccuccaagaacaaggagcccggggucgagcgcagcuccccgagcaagugccccucccuggacgaccggugguacaugcacagcugcuccggcagccugcagaaccgcaacuaccccucccaggaggagcucaucaaggugguggacgucgaggagcagcagcuggaggagagcggcccccacgaccugaccgagacguccuaccucccgcggcaggaccuggaggggacccccuaccuggagagcggcaucagccucuucuccgacgaccccgagagcgaccccuccgaggaccgcgccccggagagcgcccggguggggaacauccccuccagcaccuccgcgcugaaggugccccagcugaaggucgccgagagcgcccagucccccgccgccgcgcacaccacggacaccgccggcuacaacgccauggaggagagcgugucccgcgagaagccggagcucaccgccagcaccgagcgggugaacaagcgcauguccauggucgugagcggccugacgcccgaggaguucaugcuggucuacaaguucgcccgcaagcaccacaucacccugaccaaccucaucaccgaggagacgacccacguggugaugaagaccgacgcggaguucgucugcgagcggacccugaaguacuuccuggggaucgccggcgggaagugggugguguccuacuucugggucacccagagcaucaaggagcgcaagaugcucaacgagcacgacuucgaggugcggggcgacguggucaacgggcgcaaccaccagggccccaagcgggcccgcgagucccaggaccggaagaucuuccgcggccuggagaucugcugcuacgggccguucacgaacaugcccaccgaccagcuggaguggauggugcagcucugcggcgccagcguggucaaggagcuguccagcuucacccuggggaccggcgugcaccccaucguggucgugcagcccgacgcguggacggaggacaacggguuccacgccaucggccagaugugcgaggccccgguggucacccgggagugggugcucgacagcguggcccuguaccagugccaggagcuggacaccuaccucaucccccagaucccccacucccacuacuga

SEQ ID NO: 1047 - RNA, 2160 nt, Artificial Sequence
  EAW60922_variant
auggaccugagcgcccuccgcguggaggagguccagaacgugaucaacgccaugcagaagauccuggagugccccaucugccuggagcucaucaaggagccgguguccaccaagugcgaccacaucuucugcaaguucugcaugcugaagcugcucaaccagaagaagggccccagccagugcccccugugcaagaacgacaucaccaagcggucccugcaggagagcacgcgcuucucccagcucgucgaggagcugcugaagaucaucugcgcguuccagcucgacaccgggcuggaguacgccaacagcuacaacuucgccaagaaggagaacaacucccccgagcaccugaaggacgaggugagcaucauccaguccaugggcuaccggaaccgcgccaagcggcuccugcagagcgagccggagaaccccucccugcaggagaccagccucuccgugcagcugagcaaccuggggaccguccgcacgcuccggaccaagcagcgcauccagccccagaagaccuccguguacaucgagcuggccgcgugcgaguucagcgagaccgacgugacgaacaccgagcaccaccagcccuccaacaacgaccugaacaccaccgagaagcgggccgccgagcgccacccggagaaguaccagggcgaggccgcgagcgggugcgaguccgagacgagcgucagcgaggacugcuccggccucagcucccagagcgacauccugaccacccagcagcgggacaccaugcagcacaaccugaucaagcuccagcaggagauggccgagcuggaggccgugcuggagcagcacggcucccagcccagcaacuccuaccccagcaucaucuccgacagcuccgcccucgaggaccugcgcaaccccgagcagagcacguccgagaaggccgugcugaccagccagaaguccagcgaguacccgaucucccagaaccccgaggggcucagcgcggacaaguucgaggucuccgccgacagcagcaccuccaagaacaaggagcccggcguggagcggagcucccccagcaagugcccgucccuggacgaccgcugguacaugcacagcugcuccgggagccugcagaaccggaacuaccccucccaggaggagcucaucaagguggucgacguggaggagcagcagcuggaggagagcggcccccacgaccugaccgagacguccuaccucccccgccaggaccuggaggggaccccguaccuggagagcggcaucucccucuucagcgacgaccccgaguccgaccccagcgaggaccgggcccccgaguccgcccgcgugggcaacaucccgagcagcaccuccgcccugaaggucccccagcugaagguggcggagagcgcccagucccccgccgccgcccacaccacggacaccgcgggguacaacgccauggaggagagcgugucccgggagaagcccgagcucaccgccagcaccgagcgcgucaacaagcggauguccaugguggugagcggccugacgccggaggaguucaugcuggucuacaaguucgcccgcaagcaccacaucacccucaccaaccugaucaccgaggagacgacccacguggucaugaagaccgacgccgaguucgugugcgagcgcacccugaaguacuuccuggggaucgcgggcggcaaguggguggucuccuacuucugggugacgcagagcaucaaggagcggaagaugcucaacgagcacgacuucgaggugcgcggggacgucgugaacggccggaaccaccaggggcccaagcgcgcccgggagucccaggaccgcaagaucuuccggggccuggagaucugcugcuacgggcccuucaccaacaugccgaccgaccagcuggaguggauggugcagcucugcggcgccagcgucgugaaggagcuguccagcuucacccugggcaccggggugcaccccaucgucguggugcagcccgacgccuggacggaggacaacggcuuccacgcgaucgggcagaugugcgaggcccccgucgugacccgcgagugggugcucgacuccgucgcccuguaccagugccaggagcuggacaccuaccucaucccgcagaucccccacagccacuacuga

SEQ ID NO: 1048 - RNA, 2166 nt, Artificial Sequence
  EAW60923_variant
auggaccugagcgcccuccgcguggaggagguccagaacgugaucaacgccaugcagaagauccuggagugccccaucugccuggagcucaucaaggagccgguguccaccaagugcgaccacaucuucugcaaguucugcaugcugaagcugcucaaccagaagaagggccccagccagugcccccugugcaagaacgacaucaccaagcggucccugcaggagagcacgcgcuucucccagcucgucgaggagcugcugaagaucaucugcgcguuccagcucgacaccgggcuggaguacgccaacagcuacaacuucgccaagaaggagaacaacucccccgagcaccugaaggacgaggugagcaucauccaguccaugggcuaccggaaccgcgccaagcggcuccugcagagcgagccggagaaccccucccugcaggagaccagccucuccgugcagcugagcaaccuggggaccguccgcacgcuccggaccaagcagcgcauccagccccagaagaccuccguguacaucgagcugggcagcgacuccagcgaggacaccgugaacaaggccacguacugcuccgucggggaccaggagcugcuccagaucacgccccagggcacccgggacgagaucagccuggacagcgcgaagaagggcgaggccgccuccgggugcgagagcgagaccuccgugagcgaggacugcuccggccugagcucccagagcgacauccucaccacccagcagcgcgacaccaugcagcacaaccugaucaagcugcagcaggagauggccgagcucgaggcggugcuggagcagcacgggucccagccgagcaacuccuaccccagcaucaucuccgacagcuccgcccuggaggaccuccggaaccccgagcagagcaccuccgagaaggccguccugacgagccagaaguccagcgaguaccccaucagccagaacccggagggccuguccgccgacaaguucgaggugagcgccgacuccagcaccuccaagaacaaggagcccgggguggagcgcagcucccccagcaagugccccucccucgacgaccggugguacaugcacagcugcuccggcagccugcagaaccgcaacuacccgucccaggaggagcugaucaaggucguggacguggaggagcagcagcucgaggagagcggcccccacgaccugaccgagaccuccuaccugccccggcaggaccucgaggggacgcccuaccuggagagcggcaucucccuguucagcgacgacccggagagcgaccccuccgaggaccgcgcgcccgagagcgcccgggucgggaacauccccuccagcaccuccgcccucaaggugccgcagcugaagguggccgagagcgcccagucccccgcggccgcccacaccaccgacacggccggcuacaacgccauggaggagagcgucucccgcgagaagcccgagcugaccgcgagcaccgagcgggugaacaagcgcauguccaugguggucagcggccucacccccgaggaguucaugcugguguacaaguucgcccggaagcaccacaucacgcugaccaaccugaucaccgaggagaccacgcacgucgugaugaagaccgacgccgaguucgugugcgagcgcacccucaaguacuuccuggggaucgccggcgggaagugggucguguccuacuucugggugacccagagcaucaaggagcgcaagaugcugaacgagcacgacuucgagguccggggcgacguggugaacgggcgcaaccaccagggcccgaagcgggcccgcgagucccaggaccggaagaucuuccgcggccucgagaucugcugcuacgggcccuucacgaacaugcccaccgaccagcuggaguggaugguccagcugugcggcgcgagcguggugaaggagcucuccagcuucacccuggggaccggcguccacccgaucguggugguccagcccgacgccuggaccgaggacaacggguuccacgccaucggccagaugugcgaggcccccguggugacgcgggaguggguccuggacuccguggcgcucuaccagugccaggagcuggacaccuaccugaucccccagaucccgcacagccacuacuga

SEQ ID NO: 1049 - RNA, 36 nt, Artificial Sequence
  AIC83575_variant
auggaccugagcgcccuccgcguggaggaggucuga

SEQ ID NO: 1050 - RNA, 522 nt, Artificial Sequence
  ABC59810_variant
auggacgccgaguucgugugcgagcgcacccugaaguacuuccucggcaucgccgggggcaagugggucgugagcuacuucugggugacccaguccaucaaggagcggaagaugcugaacgagcacgacuucgagguccgcggggacguggugaacggccggaaccaccaggggcccaagcgcgcgcgggagagccaggaccgcaagaucuuccggggccuggagaucugcugcuacggcccguucacgaacaugcccaccgaccagcucgaguggaugguccagcugugcggggccuccguggugaaggagcugagcuccuucacccucggcaccgggguccaccccaucguggugguccagcccgacgccuggacggaggacaacggcuuccacgccaucgggcagaugugcgaggccccgguggugacccgcgaguggguccuggacagcguggcgcuguaccagugccaggagcucgacaccuaccugaucccccagaucccccacucccacuacuga

SEQ ID NO: 1051 - RNA, 1065 nt, Artificial Sequence
  ABC88652_variant
augcacagcugcuccggcagccugcagaaccgcaacuaccccucccaggaggagcucaucaagguggucgacguggaggagcagcagcuggaggagagcgggccgcacgaccugaccgagaccuccuaccucccccggcaggaccuggagggcacgcccuaccuggagagcgggaucucccucuucagcgacgaccccgaguccgacccgagcgaggaccgcgcccccgaguccgcccgggugggcaacauccccagcuccaccagcgcgcugaaggucccccagcugaagguggccgaguccgcccaggggccggccgccgcgcacaccaccgacacggccggcuacaacgccauggaggagagcgugucccgcgagaagcccgagcucaccgccagcaccgagcgggucaacaagcgcauguccaugguggugagcggccugacccccgaggaguucaugcuggucuacaaguucgcgcggaagcaccacaucacgcucaccaaccugaucaccgaggagaccacgcacguggugaugaagaccgacgccgaguucgucugcgagcgcacccugaaguacuuccucgggaucgccggcgggaaguggguggugagcuacuucugggucacccaguccaucaaggagcggaagaugcugaacgagcacgacuucgaggugcgcggcgacguggucaacgggcggaaccaccagggccccaagcgcgcccgggagagccaggaccgcaagaucuuccggggccuggagaucugcugcuacgggccguucacgaacaugcccaccgaccagcucgaguggauggugcagcugugcggcgccuccguggucaaggagcugagcuccuucacccucgggaccggcgugcaccccaucguggucgugcagcccgacgcguggacggaggacaacggcuuccacgccaucgggcagaugugcgagaccccggucgugacccgcgagugggugcuggacagcgucgcccuguaccagugccaggagcucgacaccuaccugaucccccagaucccccacucccacuacuga

SEQ ID NO: 1052 - RNA, 2043 nt, Artificial Sequence
  EAW60939_variant
auggaccugagcgcccuccgcguggaggagguccagaacgugaucaacgccaugcagaagauccuggagugccccaucugccuggagcucaucaaggagccgguguccaccaagugcgaccacaucuucugcaaguucugcaugcugaagcugcucaaccagaagaagggccccagccagugcccccugugcaagaacgacaucaccaagcggucccugcaggagagcacgcgcuucucccagcucgucgaggagcugcugaagaucaucugcgcguuccagcucgacaccgggcuggaguacgccaacagcuacaacuucgccaagaaggagaacaacucccccgagcaccugaaggacgaggugagcaucauccaguccaugggcuaccggaaccgcgccaagcggcuccugcagagcgagccggagaaccccucccugcaggagaccagccucuccgugcagcugagcaaccuggggaccguccgcacgcuccggaccaagcagcgcauccagccccagaagaccuccguguacaucgagcugggcgaggccgcgagcgggugcgaguccgagaccagcguguccgaggacugcagcggccugagcucccagagcgacauccucacgacccagcagcgggacaccaugcagcacaaccugaucaagcugcagcaggagauggccgagcucgaggccguccuggagcagcacggcucccagcccagcaacuccuacccgagcaucaucuccgacagcuccgcccuggaggaccuccgcaaccccgagcagagcaccuccgagaaggcggugcugacgagccagaaguccagcgaguaccccaucucccagaaccccgaggggcugagcgccgacaaguucgagguguccgccgacagcuccaccagcaagaacaaggagccgggcgucgagcggagcucccccagcaagugccccucccucgacgaccgcugguacaugcacagcugcuccgggagccugcagaaccggaacuaccccucccaggaggagcugaucaaggugguggacgucgaggagcagcagcucgaggagagcggcccgcacgaccugaccgagaccuccuaccugccccgccaggaccucgaggggacgcccuaccuggagagcggcaucucccuguucagcgacgaccccgaguccgacccgagcgaggaccgggcccccgaguccgcccgcgugggcaacauccccagcuccaccagcgcgcucaaggugccccagcugaaggucgccgagagcgcccaguccccggccgccgcgcacaccaccgacacggccggguacaacgccauggaggagagcgugucccgggagaagcccgagcugaccgccagcaccgagcgcgugaacaagcggauguccauggucgugagcggccucacccccgaggaguucaugcugguguacaaguucgcccgcaagcaccacaucacgcugaccaaccucaucaccgaggagaccacgcacgucgugaugaagaccgacgcggaguucgucugcgagcggacccugaaguacuuccuggggaucgccggcggcaagugggugguguccuacuucugggucacccagagcaucaaggagcgcaagaugcugaacgagcacgacuucgaggugcgcggggacguggucaacggccggaaccaccaggggcccaagcgcgcccgggagucccaggaccgcaagaucuuccggggccucgagaucugcugcuacgggccguucacgaacaugcccaccgaccagcuggaguggauggugcagcugugcggcgccagcguggucaaggagcucuccagcuucacccugggcaccggggugcaccccaucguggucgugcagccggacgccuggacggaggacaacggcuuccacgcgaucgggcagaugugcgaggcccccguggucacccgcgagugggugcuggacuccguggcccucuaccagugccaggagcuggacaccuaccugaucccccagaucccccacagccacuacuga

SEQ ID NO: 1053 - RNA, 546 nt, Artificial Sequence
  AAC72302_variant
augcugcucgagcccggccgcgggugcugcgcccuggccauccugcucgcgaucguggacauccagagcggcgggugcaucaacaucaccuccagcgccucccaggagggcacccggcugaaccugaucugcacggucuggcacaagaaggaggaggccgagggguucgugguguuccucugcaaggaccgcagcggcgacugcuccccggagaccagccugaagcagcugcggcucaagcgcgaccccggcaucgacggggucggcgagaucuccagccagcugauguucaccaucucccaggugacgccccugcacagcgggaccuaccagugcugcgcccggucccagaaguccggcauccgccuccaggggcacuucuucagcauccuguucaccgagaccggcaacuacaccgugacgggccugaagcagcggcagcaccucgaguucagccacaacgaggggacccuguccagcggcuuccugcaggagaaggucugggugaugcucgugaccucccuggucgcccugcaggcgcucuga

SEQ ID NO: 1054 - RNA, 639 nt, Artificial Sequence
  BAG58223_variant
augcugcucagcguguacuucaaggagcaguuccuggacggcgacggguggaccucccgcuggaucgagagcaagcacaaguccgacuucggcaaguucguccugagcuccgggaaguucuacggcgacgaggagaaggacaaggggcuccagaccagccaggacgcccgguucuacgcccuguccgcgagcuucgagcccuucuccaacaagggccagacgcugguggugcaguucaccgucaagcacgagcagaacaucgacugcggcgggggcuacgugaagcuguucccgaacagccucgaccagaccgacaugcacggggacuccgaguacaacaucauguucggccccgacaucugcgggcccggcaccaagaaggugcacgucaucuucaacuacaagggcaagaacgugcugaucaacaaggacauccgcugcaaggacgacgaguucacgcaccucuacacccugaucgugcggcccgacaacaccuacgaggucaagaucgacaacagccagguggaguccgggagccuggaggacgacugggacuuccucccgcccaagaagaucaaggaccccgacgccuccaagcccgaggacugggacgagcgcgccaagaucgacgacccguga

SEQ ID NO: 1055 - RNA, 891 nt, Artificial Sequence
  BAG65301_variant
augcacggcgacagcgaguacaacaucauguucgggcccgacaucugcggcccggggaccaagaaggugcacgucaucuucaacuacaagggcaagaacgugcugaucaacaaggacauccgcugcaaggacgacgaguucacccaccucuacacgcugaucgugcggcccgacaacaccuacgaggucaagaucgacaacucccagguggagagcgggucccuggaggacgacugggacuuccucccgcccaagaagaucaaggaccccgacgccagcaagcccgaggacugggacgagcgcgccaagaucgacgaccccaccgacuccaagcccgaggacugggacaagccggagcacauccccgaccccgacgcgaagaagcccgaggacugggacgaggagauggacggcgagugggagccgcccgugauccagaaccccgaguacaagggcgaguggaagccccggcagaucgacaacccggacuacaaggggaccuggauccaccccgagaucgacaaccccgaguacagccccgacccguccaucuacgccuacgacaacuucggcguccuggggcuggaccucuggcaggucaagagcggcacgaucuucgacaacuuccugaucaccaacgacgaggccuacgccgaggaguucgggaacgagaccuggggcgugaccaaggccgcggagaagcagaugaaggacaagcaggacgaggagcagcgccugaaggaggaggaggaggacaagaagcggaaggaggaggaggaggccgaggacaaggaggacgacgaggacaaggacgaggacgaggaggacgaggaggacaaggaggaggacgaggaggaggacgugcccggccaggccaaggacgagcucuga

SEQ ID NO: 1056 - RNA, 1254 nt, Artificial Sequence
  AAA36582_variant
augcugcucagcgugccccugcugcucggccugcuggggcucgccgucgccgagccggcgguguacuucaaggagcaguuccuggacggcgacggguggaccucccgcuggaucgagagcaagcacaaguccgacuucggcaaguucgugcugagcuccgggaaguucuacggcgacgaggagaaggacaagggccuccagaccagccaggacgcccgguucuacgcccuguccgccagcuucgagcccuucuccaacaaggggcagacgcuggucgugcaguucaccgugaagcacgagcagaacaucgacugcggcgggggcuacgucaagcuguuccccaacagccucgaccagaccgacaugcacggggacuccgaguacaacaucauguucggccccgacaucugcggcccggggaccaagaaggugcacgugaucuucaacuacaagggcaagaacguccugaucaacaaggacauccgcugcaaggacgacgaguucacgcaccucuacacccugaucgugcggcccgacaacaccuacgaggugaagaucgacaacagccaggucgaguccgggagccuggaggacgacugggacuuccucccgcccaagaagaucaaggaccccgacgccuccaagcccgaggacugggacgagcgcgcgaagaucgacgaccccaccgacagcaagcccgaggacugggacaagccggagcacauccccgaccccgacgccaagaagcccgaggacugggacgaggagauggacggcgagugggagccgcccgugauccagaaccccgaguacaagggcgaguggaagccccggcagaucgacaacccggacuacaaggggacguggauccaccccgagaucgacaaccccgaguacucccccgacccgagcaucuacgccuacgacaacuucggcgugcuggggcuggaccucuggcaggucaaguccggcaccaucuucgacaacuuccugaucaccaacgacgaggccuacgcggaggaguucgggaacgagaccuggggcgugacgaaggccgccgagaagcagaugaaggacaagcaggacgaggagcagcgccugaaggaggaggaggaggacaagaagcggaaggaggaggaggaggccgaggacaaggaggacgacgaggacaaggacgaggacgaggaggacgaggaggacaaggaggaggacgaggaggaggacgugcccggccaggccaaggacgagcucuga

SEQ ID NO: 1057 - RNA, 1155 nt, Artificial Sequence
  BAB71655_variant
auggcccgcgcccuggugcagcucugggcgaucugcaugcugcggguggcccuggccaccguguacuuccaggaggaguuccucgacggcgagcacuggcgcaaccgguggcugcagagcaccaacgacucccgcuucgggcacuuccggcugagcuccggcaaguucuacgggcacaaggagaaggacaagggccuccagacgacccagaacgggcgcuucuacgccaucagcgcccgguucaagcccuucuccaacaagggcaagacccuggugauccaguacaccgucaagcacgagcagaagauggacugcggcgggggcuacaucaagguguucccggcggacaucgaccagaagaaccugaacggcaagagccaguacuacaucauguucgggcccgacaucugcggguucgacaucaagaaggugcacgucauccuccacuucaagaacaaguaccacgagaacaagaagcugauccgcugcaagguggacggcuucacgcaccuguacacccucauccugcggcccgaccuguccuacgacgugaagaucgacggccagagcaucgaguccgggagcaucgaguacgacuggaaccucaccucccugaagaaggagaccagccccgccgaguccaaggacugggagcagacgaaggacaacaaggcccaggacugggagaagcacuuccuggacgccagcaccuccaagcagagcgacuggaacggcgaccucgacggggacuggccggcgcccaugcugcagaagccgcccuaccaggacggccugaagcccgagggcauccacaaggacgucuggcuccaccgcaagaugaagaacaccgacuaccugacccaguacgaccuguccgaguucgagaacaucggggccaucggccucgagcuguggcagguccggagcgggacgaucuucgacaacuuccugaucaccgacgacgaggaguacgccgacaacuucggcaaggccaccuggggcgagaccaaggggcccgagcgcgagauggacgccauccaggcgaaggaggagaugaagaaggcccgggaggaggaggaggaggagcuccuguccggcaagaucaaccgccacgagcacuacuucaaccaguuccaccggcgcaacgagcuguga

SEQ ID NO: 1058 - RNA, 330 nt, Artificial Sequence
  CAA10193_variant
augcugauggcccaggaggcccucgcguuccugauggcccagggcgccaugcuggccgcccaggagcgccgggugccccgcgcggccgaggucccgggggcccagggccagcaggggccccggggccgcgaggaggcgccccgcggggugcggauggccgugccccuccugcggcgcauggagggcgccccggccggccccgggggccggaccgccgccugcuucagcugcaccucccgcugccugagccggcgccccuggaagcgguccuggagcgcgggguccugccccggcaugccgcaccucagccccgaccaggggcgcuucuga

SEQ ID NO: 1059 - RNA, 1440 nt, Artificial Sequence
  CAA66853_variant
auggacuucagccgcaaccuguacgacaucggcgagcagcucgacuccgaggaccuggccagccugaaguuccucucccuggacuacaucccccagcggaagcaggagccgaucaaggacgcccugaugcuguuccagcgccugcaggagaagcggaugcuggaggagagcaaccucuccuuccugaaggagcuccucuuccgcaucaaccggcuggaccugcucaucaccuaccugaacacccgcaaggaggagauggagcgggagcugcagacgcccgggcgcgcgcagaucagcgccuaccgggugaugcucuaccagaucuccgaggaggucagccgcuccgagcugcggagcuucaaguuccugcuccaggaggagaucuccaagugcaagcuggacgacgacaugaaccugcucgacaucuucaucgagauggagaagcgcgugauccugggcgaggggaagcuggacauccucaagcgggugugcgcccagaucaacaagagccugcugaagaucaucaacgacuacgaggaguucuccaaggagcgcagcuccagccucgagggcucccccgacgaguucagcaacggggaggagcugugcggcgucaugaccaucuccgacagcccccgggagcaggacagcgagucccagacccuggacaagguguaccagaugaaguccaagccgcgcggcuacugccucaucaucaacaaccacaacuucgccaaggcccgggagaaggugcccaagcugcacagcauccgcgaccggaacgggacccaccuggacgcgggcgcccucacgaccaccuucgaggagcugcacuucgagaucaagccccacgacgacugcaccgucgagcagaucuacgagauccugaagaucuaccagcucauggaccacagcaacauggacugcuucaucugcugcauccugucccacggggacaagggcaucaucuacgggacggacggccaggaggcccccaucuacgagcugaccagccaguucaccggccucaagugcccgucccuggccgggaagcccaagguguucuucauccaggcgugccagggcgacaacuaccagaaggggauccccguggagaccgacagcgaggagcagcccuaccuggagauggaccucuccagcccgcagacgcgcuacauccccgacgaggccgacuuccugcugggcauggccaccgucaacaacugcguguccuaccggaaccccgccgagggcaccugguacauccagagccucugccagucccugcgcgagcgcugcccccgcggggacgacauccugaccauccugacggaggugaacuacgaggucagcaacaaggacgacaagaagaacaugggcaagcagaugccgcagcccaccuucacccuccggaagaagcugguguuccccuccgacuga

SEQ ID NO: 1060 - RNA, 1569 nt, Artificial Sequence
  CCDS2340.1_variant
augaagucccagggccagcacugguacagcagcuccgacaagaacugcaaggugagcuuccgcgagaagcugcucaucaucgacuccaaccuggggguccaggacguggagaaccugaaguuccucugcaucggccuggugcccaacaagaagcuggagaaguccagcagcgccuccgacgucuucgagcaccuccuggccgaggaccugcucagcgaggaggacccguucuuccuggcggagcugcucuacaucauccggcagaagaagcugcugcagcaccucaacugcaccaaggaggagguggagcgccugcugcccacccggcagcgcgugucccucuuccggaaccugcuguacgagcucagcgaggggaucgacuccgagaaccugaaggacaugaucuuccugcucaaggacagccugcccaagacggagaugaccucccugagcuuccucgccuuccuggagaagcagggcaagaucgacgaggacaaccugaccugccucgaggaccugugcaagaccgucgugcccaagcugcuccgcaacaucgagaaguacaagcgggagaaggccauccagaucgugacgccgcccgucgacaaggaggccgaguccuaccagggggaggaggagcuggugagccagaccgacgugaagaccuuccuggaggcccucccccaggaguccuggcagaacaagcacgcgggcagcaacggcaaccgcgccaccaacggggcccccagccuggucucccggggcaugcagggggccagcgcgaacacgcugaacuccgagaccagcaccaagcgcgccgccguguaccggaugaaccgcaaccaccggggccucugcgugaucgucaacaaccacuccuucaccagccugaaggaccgccaggggacgcacaaggacgccgagauccugucccacguguuccaguggcucggcuucaccgugcacauccacaacaacgucaccaagguggagauggagauggugcugcagaagcagaagugcaacccggcccacgcggacggcgacugcuucgucuucugcauccugacccacgggcgguucggcgccguguacagcuccgacgaggcccucauccccauccgcgagaucaugagccacuucacggcccugcagugcccccggcuggccgagaagcccaagcuguucuucauccaggcgugccagggggaggagauccagccguccgugagcaucgaggccgacgcccucaaccccgagcaggcccccaccucccugcaggacagcauccccgccgaggcggacuuccugcucggccuggccaccgucccgggcuacguguccuuccgccacgucgaggaggggagcugguacauccagucccugugcaaccaccucaagaagcuggugccccggcacgaggacauccugagcauccucaccgccgugaacgacgacgucucccgccggguggacaagcagggcacgaagaagcagaugccccagcccgccuucacccugcgcaagaagcugguguucccggucccccucgacgcccugagccuguga

SEQ ID NO: 1061 - RNA, 1020 nt, Artificial Sequence
  EAW65632_variant
auguggcagcugugggccagccucugcugccugcuggugcucgccaacgcgcgcucccggcccagcuuccacccgcuguccgacgagcuggucaacuacgugaacaagcgcaacaccaccuggcaggccggccacaacuucuacaacguggacaugagcuaccucaagcggcugugcgggacguuccugggcgggcccaagccgccccagcgcgucauguucaccgaggaccucaagcugcccgccuccuucgacgcccgggagcaguggccccagugccccaccaucaaggagauccgcgaccagggcagcugcggguccugcugggccuucggcgcgguggaggccaucagcgaccggaucugcauccacaccaacgcccacguguccgucgaggugagcgccgaggaccugcucacgugcugcggcuccaugugcggggacggcugcaacgggggcuaccccgcggaggccuggaacuucuggacccgcaaggggcuggugagcggcggccuguacgagucccacgucgggugccggccguacagcaucccgcccugcgagcaccacgugaacggcucccgcccgcccugcaccggggagggcgacacccccaagugcagcaagaucugcgagcccggcuacucccccacguacaagcaggacaagcacuacggguacaacagcuacuccgugagcaacagcgagaaggacaucauggccgagaucuacaagaacggccccgucgagggggccuucuccguguacagcgacuuccuccuguacaaguccggcguguaccagcacgucaccggggagaugaugggcggccacgccauccggauccugggguggggcguggagaacgggacccccuacuggcucguggcgaacagcuggaacaccgacuggggcgacaacggguucuucaagauccugcgcggccaggaccacugcggcaucgaguccgaggucguggccgggaucccccggacggaccaguacugggagaagaucuga

SEQ ID NO: 1062 - RNA, 1020 nt, Artificial Sequence; identical to SEQ ID NO: 1061
  AAC37547_variant

SEQ ID NO: 1063 - RNA, 1002 nt, Artificial Sequence
  EAW62731_variant
augaaccccacccugauccucgccgccuucugccugggcaucgcgagcgccacccugacguucgaccacucccucgaggcccaguggaccaaguggaaggccaugcacaaccgccuguacgggaugaacgaggagggcuggcggcgcgccgugugggagaagaacaugaagaugaucgagcugcacaaccaggaguaccgggaggggaagcacagcuucaccauggcgaugaacgccuucggcgacaugaccuccgaggaguuccgccaggucaugaacggguuccagaaccggaagccgcgcaagggcaagguguuccaggagccccucuucuacgaggcgccccggagcguggacuggcgcgagaagggcuacgucacgcccgugaagaaccaggggcagugcggcuccugcugggccuucagcgccaccggggcccuggagggccagauguuccggaagaccgggcgccugaucucccucagcgagcagaaccugguggacugcuccggcccgcagggcaacgaggggugcaacggcgggcugauggacuacgccuuccaguacguccaggacaacggcggccucgacagcgaggaguccuaccccuacgaggccaccgaggagagcugcaaguacaaccccaaguacuccguggccaacgacacgggguucguggacauccccaagcaggagaaggcgcugaugaaggccgucgccaccgugggcccgaucagcguggccaucgacgccgggcacgaguccuuccuguucuacaaggagggcaucuacuucgagcccgacugcagcuccgaggacauggaccacgggguccucguggugggcuacggcuucgagagcaccgaguccgacaacaacaaguacuggcuggucaagaacagcuggggcgaggagugggggaugggcggguacgugaagauggcgaaggaccggcgcaaccacugcgggaucgccagcgccgccuccuaccccaccguguga

SEQ ID NO: 1064 - RNA, 1002 nt, Artificial Sequence; identical to SEQ ID NO: 1063
  AAA66974_variant

SEQ ID NO: 1065 - RNA, 456 nt, Artificial Sequence
  AAG17239_variant
auggacuacgccuuccaguacgugcaggacaacggcgggcuggacagcgaggaguccuaccccuacgaggccaccgaggagagcugcaaguacaacccgaaguacuccgucgcgaacgacaccggcuucguggacauccccaagcaggagaaggcccucaugaaggccguggccacggucgggcccaucagcguggccaucgacgcgggccacgaguccuuccuguucuacaaggaggggaucuacuucgagcccgacugcagcuccgaggacauggaccacggcgugcuggucgugggcuacggguucgagagcaccgaguccgacaacaacaaguacuggcucgugaagaacagcuggggcgaggagugggggaugggcggguacgucaagauggccaaggaccgccggaaccacugcggcaucgccuccgccgcgagcuacccgaccguguga

SEQ ID NO: 1066 - RNA, 984 nt, Artificial Sequence
  AAA51932_variant
augcuguuccuccugcugccccuccuggccgugcugccgggcgacgggaacgccgacggccucaaggagccccugagcuuccacgucaccuggaucgcguccuucuacaaccacagcuggaagcagaaccugguguccggguggcucagcgaccugcagacccacacgugggacuccaacagcuccaccaucguguuccugugccccuggagccgcggcaacuucuccaacgaggaguggaaggagcucgagacccuguuccggauccgcaccauccggagcuucgaggggauccgccgguacgcccacgagcugcaguucgaguaccccuucgagauccaggucacgggcggcugcgagcuccacuccgggaaggugagcggcuccuuccugcagcuggccuaccaggggagcgacuucguguccuuccagaacaacagcuggcucccguaccccgucgccggcaacauggccaagcacuucugcaaggugcugaaccagaaccagcacgagaacgacaucacccacaaccugcucuccgacacgugcccccgcuucauccuggggcugcucgacgcgggcaaggcccaccuccagcgccaggugaagcccgaggccuggcugagccacggcccgucccccgggcccggccaccuccagcuggucugccacgugagcggguucuaccccaagccggugugggucauguggaugcggggcgagcaggagcagcagggcacccagcgcggggacauccugcccagcgccgacggcaccugguaccugcgggcgacccuggagguggccgccggggaggccgccgaccuguccugccgggugaagcacagcucccucgagggccaggacaucguccuguacugggagcaccacagcuccgugggguucaucauccuggcggugaucgucccccuccugcugcucaucggccuggcccugugguuccgcaagcggugcuucugcuga

SEQ ID NO: 1067 - RNA, 1002 nt, Artificial Sequence
  AAA51939_variant
augcugcuccugcccuuccagcugcucgccgugcuguucccgggcgggaacagcgagcacgccuuccagggccccaccuccuuccacgucauccagaccagcuccuucacgaacagcaccugggcgcagacccagggguccggcuggcuggacgaccuccagauccacgggugggacagcgacuccggcaccgccaucuuccugaagcccuggagcaagggcaacuucuccgacaaggagguggccgagcuggaggagaucuuccgcguguacaucuucggguucgcccgggagguccaggacuucgccggcgacuuccagaugaaguaccccuucgagauccaggggaucgcgggcugcgagcuccacagcgggggcgccaucguguccuuccugcgcggcgcccucgggggccuggacuuccugagcgugaagaacgccuccugcgucccgagccccgagggcgggucccgggcgcagaaguucugcgcccugaucauccaguaccagggcaucauggagacggugcgcauccuccuguacgagaccugcccccgguaccugcucggggugcugaacgccggcaaggccgaccugcagcgccaggucaagcccgaggccuggcucagcuccgggccgagccccggccccgggcggcugcagcuggugugccacguguccggcuucuaccccaagccggucugggugauguggaugcgcggcgagcaggagcagcaggggacccagcucggcgacauccugcccaacgcgaacuggaccugguaccugcgggccacgcucgacguggccgacggggaggccgccggccugagcugccgcgucaagcacagcucccuggaggggcaggacaucauccucuacuggcggaaccccaccagcaucggcuccaucgugcuggcgaucaucgugcccagccugcuccugcugcucugccuggcccugugguacaugcgccggcgcuccuaccagaacaucccguga

SEQ ID NO: 1068 - RNA, 1002 nt, Artificial Sequence
  AAI26466_variant
augcuguuccuccaguuccugcugcucgcccugcugcuccccggcggggacaacgccgacgcgagccaggagcacguguccuuccacgucauccagaucuucagcuucgugaaccaguccugggcccgcggccaggggagcggcuggcuggacgagcugcagacccacgggugggacuccgagagcggcaccaucaucuuccuccacaacugguccaagggcaacuucagcaacgaggagcuguccgaccuggagcuccuguuccgguucuaccuguucgggcucacgcgcgagauccaggaccacgccagccaggacuacuccaaguacccguucgaggugcaggucaaggccggcugcgagcugcacagcgggaagucccccgagggcuucuuccagguggccuucaacgggcuggaccuccugagcuuccagaacaccaccugggugcccucccccggcugcggcagccuggcgcaguccgucugccaccuccugaaccaccaguacgagggggugaccgagacgguguacaaccugauccggagcacgugcccgcgcuuccuccugggccugcucgacgccgggaagauguacguccaccgccaggugcggcccgaggccuggcuguccagccggcccagccugggcuccggccagcuccugcuggugugccacgccagcggguucuaccccaagccggucugggugaccuggaugcgcaacgagcaggagcagcucggcaccaagcacggggacauccugcccaacgcggacggcaccugguaccuccaggugauccuggaggucgccuccgaggagcccgccgggcugagcugccgggugcgccacuccagccugggcggccaggacaucauccucuacugggggcaccacuucuccaugaacuggaucgcccugguggucaucgugccccuggugauccucaucguccuggugcugugguucaagaagcacugcagcuaccaggacauccucuga

SEQ ID NO: 1069 - RNA, 1008 nt, Artificial Sequence
  AAA59672_variant
augggcugccuccuguuccugcugcucugggcccugcugcaggccugggggagcgcggaggugccccagcgccucuucccgcugcggugccugcagaucuccagcuucgccaacuccagcuggacccgcaccgacggccucgccuggcugggggagcugcagacgcacuccuggagcaacgacuccgacaccguccggagccucaagcccuggucccagggcaccuucagcgaccagcagugggagacccugcagcacaucuuccgcguguaccgguccagcuucacgcgcgacgugaaggaguucgccaagaugcugcggcucuccuacccccuggagcugcaggucagcgccgggugcgaggugcaccccggcaacgcguccaacaacuucuuccacguggccuuccagggcaaggacauccucagcuuccaggggaccuccugggagccgacccaggaggcgccccugugggucaaccuggccauccaggugcucaaccaggacaaguggacccgcgagacggugcaguggcugcugaacgggaccugcccccaguucgucagcgggcuccuggaguccggcaagagcgagcugaagaagcaggucaagcccaaggccuggcucagccgggggccgucccccggccccggccgccugcugcucgugugccacgugagcggguucuaccccaagccggugugggugaaguggaugcggggcgagcaggagcagcaggggacccagcccggcgacauccugcccaacgccgacgagaccugguaccugcgcgccacgcucgacgucguggccggcgaggccgcggggcuguccugccgggugaagcacagcucccuggagggccaggacaucguccucuacuggggcggcagcuacaccuccauggggcugaucgcccuggccgugcucgccugccugcuguuccuccugaucgugggcuucaccagccgcuucaagcggcagaccuccuaccagggcguccuguga

SEQ ID NO: 1070 - RNA, 1167 nt, Artificial Sequence
  EAW52830_variant
augcugcuccuguuccuccuguucgagggccugugcugccccggggagaacaccgccgccccgcaggcgcugcagagcuaccaccucgccgccgaggagcagcuguccuuccgcaugcugcagaccagcuccuucgccaaccacagcugggcccacuccgagggcagcggguggcucggcgaccugcagacgcacgggugggacaccgugcugggcaccauccgguuccucaagcccuggucccacggcaacuucagcaagcaggagcugaagaaccugcagucccucuuccagcuguacuuccacagcuucauccagaucguccaggcguccgccgggcaguuccagcuggaguaccccuucgagauccagauccucgccggcugccgcaugaacgcgccccagaucuuccugaacauggccuaccaggggagcgacuuccuguccuuccagggcaucagcugggagccgucccccggggccggcauccgggcccagaacaucugcaaggugcucaaccgcuaccuggacaucaaggagauccugcagagccuccugggccacacgugcccccgguuccuggccgggcucauggaggccggcgaguccgagcugaagcgcaaggugaagcccgaggcguggcugagcugcgggccgucccccggccccggccggcuccagcuggucugccacgugagcggguucuaccccaagccggugugggucauguggaugcgcggcgagcaggagcagcgggggacccagcgcggcgacgugcugcccaacgccgacgagaccugguaccuccgggccacccuggacguggccgccggggaggcggccggccugagcugccgcgucaagcacuccagccucggcgggcacgaccugaucauccacuggggcggguacuccaucuuccugauccucaucugccugaccgugaucgugacgcuggucauccucgugguggucgacagccggcugaagaagcaguccagcaacaagaacauccugagcccccacacccccuccccgguguuccucaugggcgccaacacccaggacaccaagaacucccgccaccaguucugccuggcccaggugagcuggaucaagaaccggguccugaagaaguggaagacgcgccucaaccagcugugguga

SEQ ID NO: 1071 - RNA, 894 nt, Artificial Sequence
  AAA35581_variant
augaccacgccccgcaacagcgugaacggcaccuucccggccgagcccaugaaggggcccaucgccaugcaguccggccccaagccgcuguuccggcgcaugagcucccucgucgggcccacccagagcuucuucaugcgggaguccaagacccugggcgcggugcagaucaugaacgggcuguuccacaucgcccucggcggccugcugaugauccccgccgggaucuacgcccccaucugcgugaccgucugguacccgcucuggggcgggaucauguacaucaucagcggcucccugcuggccgcgacggagaagaacagccgcaagugccucgugaaggggaagaugaucaugaacucccugagccuguucgccgccaucuccggcaugauccucagcaucauggacauccugaacaucaagaucucccacuuccugaagauggagagccucaacuucauccgggcccacacccccuacaucaacaucuacaacugcgagcccgcgaaccccuccgagaagaacagcccguccacccaguacugcuacagcauccagucccuguuccugggcauccucagcgugaugcugaucuucgccuucuuccaggagcuggucaucgccgggaucguggagaacgaguggaagcggaccugcagccgccccaaguccaacaucgugcuccugagcgccgaggagaagaaggagcagacgaucgagaucaaggaggaggucgugggccugaccgagaccuccagccagcccaagaacgaggaggacaucgagaucauccccauccaggaggaggaggaggaggagaccgagacgaacuucccggagccgccccaggaccaggaguccagccccaucgagaacgacuccagccccuga

SEQ ID NO: 1072 - RNA, 1989 nt, Artificial Sequence
  AAC18956_variant
auggagagcaagaccgagaaguggauggagcgcauccaccugaacguguccgagcggcccuucccgccccacauccagcucccgcccgagauccaggagagccaggaggucacccugacgugccugcucaacuucuccugcuacggcuaccccauccagcugcaguggcugcucgagggggugcccaugcgccaggccgccgugaccagcaccucccugaccaucaagagcgucuucacgcgguccgagcugaaguucagcccccaguggucccaccacggcaagaucgugaccugccagcuccaggacgcggacgggaaguuccugagcaacgacaccgugcagcugaacgucaagcacacccccaagcucgagaucaaggugacgccguccgacgccaucgugcgcgagggcgacagcgucaccaugaccugcgagguguccagcaccaaccccgaguacacgaccguguccuggcugaaggacgggaccagccugaagaagcagaacaccuucacgcucaaccugcgggaggucaccaaggaccaguccggcaaguacugcugccaggugagcaacgacgugggccccgggcgcuccgaggaggucuuccuccaggugcaguacgcccccgagccgagcaccgugcagauccugcacagccccgccgucgagggcucccagguggaguuccugugcaugagccuggccaacccccuccccaccaacuacacgugguaccacaacgggaaggagaugcagggccggaccgaggagaaggugcacaucccgaagauccugcccuggcacgcggggaccuacuccugcgucgccgagaacauccugggcaccggccagcgcgggcccggcgccgagcucgacgugcaguacccgcccaagaaggugacgaccgucauccagaaccccaugcccauccgggagggggacaccgugacccugagcugcaacuacaacuccagcaaccccuccgucacgcgcuacgaguggaagccgcacggcgccugggaggagcccagccugggcgugcucaagauccagaagguggggugggacaacaccaccaucgcgugcgcccggugcaacuccuggugcagcugggccucccccgucgcccugaacgugcaguacgcgccccgcgacgugcggguccgcaagaucaagccgcugagcgagauccacuccggcaacagcgugucccuccagugcgacuucagcuccagccaccccaaggaggugcaguucuucugggagaagaacgggcggcugcugggcaaggagucccagcucaacuucgacagcaucagccccgaggacgccggguccuacagcugcugggucaacaacuccaucggccagaccgccagcaaggccuggacgcuggaggugcuguacgccccgcgccggcuccgcguguccaugagccccggcgaccaggucauggaggggaaguccgccacccugcggugcgagagcgacgcgaacccgcccgugucccacuacaccugguucgacuggaacaaccagagccugcccuaccacucccagaagcuccgccuggagcccgugaagguccagcacagcggcgccuacuggugccaggggaccaacuccgugggcaaggggcggagcccccuguccacgcucaccguguacuacagccccgagaccaucggccgccgcgucgccgugggccugggguccugccuggccauccucauccuggccaucugcggccugaagcuccagcggcgcgacgcggagagcagcgagaugcagcggccgccccggaccugcgacgacaccgugacguacuccgcccugcacaagcgccaggucggggacuacgagaacgugauccccgacuuccccgaggacgagggcauccacuacagcgagcugauccaguucggggugggcgagcgcccgcaggcccaggagaacgucgacuacgugauccugaagcacuga

SEQ ID NO: 1073 - RNA, 2544 nt, Artificial Sequence
  AAB06448_variant
augcaccuccucggccccuggcugcugcuccuggugcuggaguaccucgccuucagcgacuccagcaagugggucuucgagcacccggagacccuguacgccugggagggggcgugcguguggauccccugcaccuaccgcgcccuggacggcgaccucgaguccuucauccuguuccacaaccccgaguacaacaagaacacgagcaaguucgacgggacccggcuguacgaguccaccaaggacggcaaggugcccagcgagcagaagcgcguccaguuccucggggacaagaacaagaacugcacccuguccauccacccggugcaccugaacgacagcggccagcucggccugcggauggaguccaagacggagaaguggauggagcgcauccaccugaacgugagcgagcggcccuucccgccccacauccagcucccgcccgagauccaggagucccaggaggucacccugaccugccugcucaacuucagcugcuacggguaccccauccagcugcaguggcugcucgagggcgugcccaugcgccaggccgccgugaccuccacgagccugaccaucaaguccgucuucacccggagcgagcugaaguucuccccgcaguggagccaccacgggaagaucgugaccugccagcuccaggacgccgacggcaaguuccuguccaacgacacggugcagcugaacgucaagcacacccccaagcucgagaucaaggugacccccagcgacgcgaucgugcgcgagggggacagcgucaccaugacgugcgagguguccagcuccaaccccgaguacaccaccgugagcuggcugaaggacggcaccucccugaagaagcagaacacguucacccucaaccugcgggaggucaccaaggaccagagcggcaaguacugcugccagguguccaacgacguggggcccggccgcagcgaggaggucuuccuccaggugcaguacgcccccgagcccuccaccgugcagauccugcacagccccgccgucgaggggucccagguggaguuccugugcaugagccuggccaacccgcuccccacgaacuacaccugguaccacaacggcaaggagaugcagggccggaccgaggagaagguccacauccccaagauccugcccuggcacgcggggaccuacuccugcguggccgagaacauccugggcacggggcagcgcggcccgggggccgagcucgacgugcaguacccgcccaagaaggucaccaccgugauccagaaccccaugcccauccgggagggcgacaccgugacgcugagcugcaacuacaacuccagcaaccccuccgucacccgcuacgaguggaagccccacggcgccugggaggagccgagccugggggugcucaagauccagaacgugggcugggacaacaccaccaucgccugcgcggccugcaacuccuggugcagcugggccagccccgucgcccugaacgugcaguacgcgccccgggacgugcgcguccggaagaucaagccccuguccgagauccacagcgggaacuccgugagccuccagugcgacuucuccagcucccacccgaaggaggugcaguucuucugggagaagaacggccgccugcuggggaaggagagccagcugaacuucgacuccaucagccccgaggacgccggcuccuacagcugcugggucaacaacuccaucggccagacggccagcaaggccuggacccucgaggugcuguacgcgccccggcgccugcggguguccaugagccccggggaccaggucauggagggcaaguccgccacccugaccugcgagagcgacgccaacccgcccgugagccacuacaccugguucgacuggaacaaccagucccugcccuaccacagccagaagcugcgccucgagcccgugaagguccagcacuccggggccuacuggugccagggcacgaacagcguggggaagggccgcuccccgcugagcacccugaccguguacuacucccccgagaccaucggccggcgcgucgccguggggcucggcagcugccuggccauccugauccucgccaucugcgggcugaagcugcagcggcgcuggaagcggacgcagucccagcagggccuccaggagaacagcuccggccagagcuucuucgugcgcaacaagaagguccggcgcgcgccccuguccgaggggccccacagccugggcugcuacaacccgaugauggaggacgggaucuccuacaccacccuccgguuccccgagaugaacaucccccgcaccggcgacgccgagagcuccgagaugcagcggcccccgcccgacugcgacgacacggugaccuacagcgcccugcacaagcgccaggugggggacuacgagaacgucauccccgacuuccccgaggacgagggcauccacuacuccgagcugauccaguucggcgugggggagcggccgcaggcccaggagaacguggacuacgucauccucaagcacuga

SEQ ID NO: 1074 - RNA, 2544 nt, Artificial Sequence; identical to SEQ ID NO: 1073
  ABK41939_variant

SEQ ID NO: 1075 - RNA, 1605 nt, Artificial Sequence
  CAE47548_variant
augcugcgccggcgcggcagccccgggaugggcgugcacgucggggccgcccucggcgcgcugugguucugccugaccggggcccucgagguccaggugccggaggaccccgugguggcccuggugggcaccgacgccacgcugugcugcuccuucagccccgagcccggcuucucccucgcccagcugaaccugaucuggcagcucaccgacaccaagcagcugguccacagcuucgcggaggggcaggaccagggcuccgccuacgccaaccggaccgcccuguucccggaccuccuggcgcaggggaacgccagccugcgccuccagcgggugcgcguggccgacgagggcuccuucacgugcuucgucagcauccgggacuucggguccgccgccgugagccuccagguggcggcccccuacuccaagcccagcaugacccuggagcccaacaaggaccugcgcccgggcgacaccgucaccaucacgugcuccagcuaccagggcuaccccgaggccgagguguucuggcaggacgggcagggcgugccccugaccgggaacgucaccaccucccagauggccaacgagcagggccuguucgacgugcacagcauccuccgggugguccugggcgccaacgggacguacuccugccuggugcgcaaccccgugcuccagcaggacgcgcacagcuccgucaccaucaccccgcagcggagccccaccggcgccguggaggugcagguccccgaggaccccguggucgcccugguggggacggacgccacccugcgcugcagcuucuccccggagcccggcuucagccucgcccagcugaaccugaucuggcagcucaccgacaccaagcagcuggugcacuccuucacggaggggcgggaccagggcagcgcguacgccaaccgcaccgcccuguuccccgaccuccuggcccagggcaacgccucccugcggcuccagcgcguccggguggcggacgaggggagcuucacgugcuucguguccauccgcgacuucggcagcgccgccgucucccuccagguggccgcgcccuacagcaagccguccaugacccuggagcccaacaaggaccugcggcccggggacaccgugaccaucacgugcagcuccuaccgcggcuaccccgaggccgaggucuucuggcaggacgggcagggcgugccgcugaccggcaacgugaccaccagccagauggccaacgagcaggggcuguucgacguccacuccgugcuccgggugguccugggcgccaacgggaccuacagcugccuggugcgcaaccccgugcuccagcaggacgcccacggcuccgucaccaucacggggcagcccaugaccuucccgcccgaggcgcugugggugaccgugggccugagcgucugccucaucgcccugcugguggcccuggccuucgugugcuggcgcaagaucaagcaguccugcgaggaggagaacgccggcgcggaggaccaggacggggagggcgaggggagcaagaccgcccuccagccccugaagcacagcgacuccaaggaggacgacggccaggagaucgccuga

SEQ ID NO: 1076 - RNA, 639 nt, Artificial Sequence
  BAG57312_variant
augccccugcuccugcugcucccccugcugugggccgaccucacccaccgccccaagauccugauccccggcacccuggagcccgggcacagcaagaaccucacgugcuccgugagcugggccugcgagcagggcaccccgcccaucuucuccuggcugagcgcggcccccaccucccuggggccccggaccacgcacagcuccguccucaucaucaccccgcgcccccaggaccacggcaccaaccugaccugccaggugaaguucgccggggccggcgugacgaccgagcggaccauccagcugaacgucaccuacgugccccagaaccccacgaccggcaucuucccgggggacggcagcgggaagcaggagacccgcgccggcgugguccacggggcgaucggcggcgccggggugaccgcccuccuggcccugugccucugccugaucuucuucaucgugaagacgcaccggcgcaaggcggcccggaccgccgucggccgcaacgacacccaccccaccacgggguccgccagccccguguccgacggcgccagcuggcaccccgugugcccggcggacaccuccagccagugcggcccgcccuccugccccauccagcacuuccagaacuga

SEQ ID NO: 1077 - RNA, 1095 nt, Artificial Sequence
  AAK83654_variant
augccccugcuccugcugcucccgcugcugugggccggcgcccucgcgauggaccccaacuucuggcuccaggugcaggagagcgucaccgugcaggaggggcugugcgugcucguccccugcaccuucuuccaccccaucccguacuacgacaagaacucccccgugcacggcuacugguuccgcgagggggccaucaucagccgggacucccccguggccacgaacaagcuggaccaggagguccaggaggagacccagggccgcuuccggcugcucggggaccccagccgcaacaacugcucccugagcaucguggacgcccggcgccgggacaacggcuccuacuucuuccgcauggagcggggcagcaccaaguacuccuacaagagcccgcagcuguccgugcacgucaccgaccucacgcaccgccccaagauccugauccccgggacccuggagcccggccacagcaagaaccugaccugcuccgugagcugggccugcgagcaggggaccccgcccaucuucuccuggcugagcgcggcccccacgucccugggcccccggaccacccacagcuccgugcucaucaucaccccgcgcccccaggaccacgggacgaaccugaccugccaggucaaguucgccggcgccggcgugaccaccgagcggacgauccagcugaacgugaccuacgucccccagaaccccaccaccgggaucuucccgggcgacgggagcggcaagcaggagacgcgcgcgggcguggugcacggggccaucggcggggccggcgucaccgcccuccuggcccugugccucugccugaucuucuucaucgugaagacccaccggcgcaaggcggcccggaccgccguggggcgcaacgacacgcaccccaccaccggcagcgccucccccaagcaccagaagaaguccaagcugcacggccccaccgagacgagcagcugcuccggggccgcgccgaccgucgagauggacgaggagcuccacuacgccagccugaacuuccacggcaugaaccccuccaaggacaccagcaccgaguacuccgaggugcggacgcaguga

SEQ ID NO: 1078 - RNA, 1095 nt, Artificial Sequence; identical to SEQ ID NO: 1077
  CAD36509_variant

SEQ ID NO: 1079 - RNA, 624 nt, Artificial Sequence
  AAA52295_variant
augcagagcggcacccacuggcgcgugcuggggcucugccugcuguccgucggcgugugggggcaggacggcaacgaggagaugggcgggaucacccagacgcccuacaaggugagcaucuccggcaccaccgucauccugaccugcccccaguaccccgggagcgagauccucuggcagcacaacgacaagaacaucggcggggacgaggacgacaagaacaucggcuccgacgaggaccaccugagccucaaggaguucuccgagcuggagcagagcggguacuacgugugcuacccccggggcuccaagcccgaggacgccaacuucuaccuguaccuccgcgcccgggugugcgagaacugcauggagauggacgucaugagcguggcgacgaucgugaucgucgacaucugcaucaccggcgggcugcugcuccugguguacuacugguccaagaaccgcaaggccaaggccaagccggugacccggggcgccggggccggcggccgccagcgggggcagaacaaggagcgcccgccgcccguccccaaccccgacuacgagcccauccggaagggccagcgcgaccuguacagcgggcucaaccagcggcgcaucuga

SEQ ID NO: 1080 - RNA, 495 nt, Artificial Sequence
  AAH25703_variant
augaaguggaaggcccuguucaccgccgcgauccuccaggcccagcugcccaucaccgaggcccagagcuucggccugcucgaccccaagcugugcuaccugcucgacgggauccuguucaucuacggcgugauccugacggcccucuuccugcgcgucaaguucucccggagcgccgacgcgcccgccuaccagcaggggcagaaccagcuguacaacgagcucaaccugggccgccgggaggaguacgacgugcuggacaagcgccgggggcgcgaccccgagaugggcggcaagccccagcggcgcaagaacccgcaggaggggcucuacaacgagcugcagaaggacaagauggccgaggccuacuccgagaucggcaugaagggggagcggcgccggggcaaggggcacgacggccuguaccagggccucagcaccgcgaccaaggacaccuacgacgcccugcacaugcaggcccugccgccccgcuga

SEQ ID NO: 1081 - RNA, 2229 nt, Artificial Sequence
  CCDS7897.1_variant
auggacaaguucugguggcacgccgccuggggccugugccucgugccccugagccuggcgcagaucgaccucaacaucacgugccgcuucgccggggucuuccacguggagaagaacggccgguacuccaucagccgcaccgaggccgccgaccugugcaaggccuucaacuccacccugccgaccauggcgcagauggagaaggcccucagcaucggguucgagaccugccgguacggcuucaucgaggggcacguggucaucccccgcauccaccccaacuccaucugcgccgccaacaacaccggcguguacauccugacgagcaacaccucccaguacgacaccuacugcuucaacgcgagcgcgcccccggaggaggacugcaccuccgugacggaccugcccaacgccuucgacggccccaucaccaucaccaucgucaaccgggacgggacccgcuacgugcagaagggcgaguaccggacgaaccccgaggacaucuacccgagcaaccccaccgacgacgacguguccagcggguccagcuccgagcgcagcuccaccagcggcggguacaucuucuacaccuucuccacgguccaccccauccccgacgaggacagcccguggaucaccgacagcaccgaccggauccccgccaccacgcucauguccaccagcgccaccgccaccgagacggccaccaagcgccaggagaccugggacugguucuccuggcuguuccugcccagcgaguccaagaaccaccuccacaccacgacccagauggccggcaccagcuccaacaccaucagcgccggcugggagcccaacgaggagaacgaggacgagcgggaccgccaccuguccuucagcggguccggcaucgacgacgacgaggacuucaucagcuccacgaucagcaccaccccgcgggccuucgaccacaccaagcagaaccaggacuggacgcaguggaaccccucccacagcaaccccgaggugcugcuccagaccaccacccgcaugaccgacguggaccggaacgggacgaccgcguacgagggcaacuggaaccccgaggcccacccgccccugauccaccacgagcaccacgaggaggaggagacgccccacuccaccagcaccauccaggccacccccuccagcaccaccgaggagacggccacccagaaggagcagugguucggcaaccgcuggcacgagggguaccggcagaccccgaaggaggacagccacuccaccacgggcaccgccgcggccagcgcccacaccucccaccccaugcaggggcgcaccacgcccagccccgaggacuccagcuggaccgacuucuucaacccgaucucccaccccaugggccgggggcaccaggccggccgccggauggacauggacagcucccacagcaucacccugcagcccaccgccaacccgaacacgggccucgucgaggaccuggaccgcaccgggccccuguccaugaccacccagcagagcaacucccagagcuucuccacgagccacgagggccucgaggaggacaaggaccaccccaccaccuccacccugacgagcagcaaccgcaacgacgugaccgggggccggcgcgaccccaaccacuccgaggggagcaccacccugcucgagggcuacacgucccacuacccgcacaccaaggagagccggaccuucauccccgugaccuccgcgaagacgggcagcuucggggucaccgccgugaccgugggcgacuccaacagcaacgucaaccgcucccugagcggggaccaggacaccuuccaccccuccggcgggagccacaccacgcacggcuccgagagcgacggccacucccacgggagccaggagggcggggccaacaccaccuccggccccauccggaccccgcagauccccgaguggcugaucauccucgccagccugcuggcgcucgcccugauccuggccgugugcaucgccgugaacucccgccggcgcugcggccagaagaagaagcucgucaucaacagcgggaacggcgccguggaggaccggaagcccagcgggcugaacggcgaggcguccaagagccaggagauggugcaccuggucaacaaggaguccagcgagacgcccgaccaguucaugaccgccgacgagacccgcaaccuccagaacguggacaugaagaucggggucuga

SEQ ID NO: 1082 - RNA, 2100 nt, Artificial Sequence
  XM_006718388.1_variant
auggacaaguucugguggcacgccgccuggggccugugccucgugccccugagccuggcgcagaucgaccucaacaucacgugccgcuucgccggggucuuccacguggagaagaacggccgguacuccaucagccgcaccgaggccgccgaccugugcaaggccuucaacuccacccugccgaccauggcgcagauggagaaggcccucagcaucggguucgagaccugccgguacggcuucaucgaggggcacguggucaucccccgcauccaccccaacuccaucugcgccgccaacaacaccggcguguacauccugacgagcaacaccucccaguacgacaccuacugcuucaacgcgagcgcgcccccggaggaggacugcaccuccgugacggaccugcccaacgccuucgacggccccaucaccaucaccaucgucaaccgggacgggacccgcuacgugcagaagggcgaguaccggacgaaccccgaggacaucuacccgagcaaccccaccgacgacgacguguccagcggguccagcuccgagcgcagcuccaccagcggcggguacaucuucuacaccuucuccacgguccaccccauccccgacgaggacagcccguggaucaccgacagcaccgaccggauccccgccaccacgcucauguccaccagcgccaccgccaccgagacggccaccaagcgccaggagaccugggacugguucuccuggcuguuccugcccagcgaguccaagaaccaccuccacaccacgacccagauggccggcaccagcuccaacaccaucagcgccggcugggagcccaacgaggagaacgaggacgagcgggaccgccaccuguccuucagcggguccggcaucgacgacgacgaggacuucaucagcuccacgaucagcaccaccccgcgggccuucgaccacaccaagcagaaccaggacuggacgcaguggaaccccucccacagcaaccccgaggugcugcuccagaccaccacccgcaugaccgacguggaccggaacgggacgaccgcguacgagggcaacuggaaccccgaggcccacccgccccugauccaccacgagcaccacgaggaggaggagacgccccacuccaccagcaccaccgccuccgcccacaccagccaccccaugcagggccgcaccacgccgagccccgaggacuccagcuggaccgacuucuucaaccccaucucccaccccauggggcggggccaccaggccgggcgccggauggacauggacagcucccacagcaucacccugcagccgaccgcgaaccccaacacgggccucgucgaggaccuggaccgcaccgggccccuguccaugaccacccagcagagcaacucccagagcuucuccacgagccacgagggccucgaggaggacaaggaccacccgaccaccuccacccugacgagcuccaaccggaacgacgugaccggcgggcgccgcgaccccaaccacagcgagggcuccaccacccugcucgagggguacacgagccacuacccccacaccaaggagagccggaccuucauccccgugaccuccgccaagacgggcagcuucggggucaccgccgugaccgugggcgacuccaacagcaacgucaaccgcucccugagcggcgaccaggacaccuuccacccguccgggggcagccacacgacccacggguccgagagcgacggccacucccacgggagccaggagggcggcgccaacaccaccuccgggcccauccggacgccccagauccccgaguggcugaucauccucgccagccugcuggcgcucgcccugauccuggccgugugcaucgccgugaacucccgccggcgcugcggccagaagaagaagcucgucaucaacagcgggaacggcgcgguggaggaccggaagccguccggccugaacggggaggccagcaagucccaggagauggugcaccuggucaacaaggagagcagcgagacccccgaccaguucaugaccgccgacgagacccgcaaccuccagaacguggacaugaagaucggcgucuga

SEQ ID NO: 1083 - RNA, 1377 nt, Artificial Sequence
  AAA35572_variant
augaaccgcggcgugcccuuccggcaccuccuccugguccugcagcucgcccugcugccggccgcgacccaggggaagaagguggugcucggcaagaagggggacaccgucgagcugacgugcaccgccagccagaagaaguccauccaguuccacuggaagaacagcaaccagaucaagauccugggcaaccagggguccuuccucaccaagggccccagcaagcugaacgaccgcgccgacucccggcgcagccugugggaccagggcaacuucccccucaucaucaagaaccugaagaucgaggacuccgacaccuacaucugcgagguggaggaccagaaggaggaggugcagcugcucgucuucgggcugacggccaacagcgacacccaccuccugcagggccagucccugacccugacccucgagagcccgcccggguccagccccuccgugcagugccggagcccccgcggcaagaacauccagggcgggaagacgcuguccgugagccagcuggagcuccaggacuccggcaccuggaccugcaccguccugcagaaccagaagaagguggaguucaagaucgacaucgugguccuggccuuccagaaggcgagcuccaucguguacaagaaggagggggagcaggucgaguucagcuucccccucgccuucacgguggagaagcugaccggcagcggggagcugugguggcaggccgagcgggccuccagcuccaagagcuggaucaccuucgaccucaagaacaaggagguguccgugaagcgcgucacccaggacccgaagcugcagaugggcaagaagcugccccuccaccugacgcugccccaggcgcucccccaguacgccggcagcgggaaccugacccuggcccucgaggccaagaccggcaagcugcaccaggaggugaaccugguggucaugcgggccacccagcuccagaagaaccugacgugcgaggugugggggccgaccucccccaagcugaugcucagccugaagcuggagaacaaggaggcgaagguguccaagcgcgagaaggccgucugggugcucaaccccgaggccggcauguggcagugccugcugagcgacuccgggcagguccugcucgagagcaacaucaaggugcugcccaccugguccaccccggugcagcccauggcccugaucguccucggcggcguggccgggcugcugcuguucaucggccuggggaucuucuucugcgugcggugccgccaccggcgccggcaggcggagcgcaugagccagaucaagcggcugcucuccgagaagaagacgugccagugcccccaccgcuuccagaagaccugcagccccaucuga

SEQ ID NO: 1084 - RNA, 186 nt, Artificial Sequence
  CAA44323_variant
augaagcgcuuccuguuccuccugcugaccaucagccuccuggugaugguccagauccagaccggccuguccgggcagaacgacacgagccagaccuccagccccuccgccagcuccaacaucagcggcgggaucuuccucuucuucguggccaacgcgaucauccaccuguucugcuucuccuga

SEQ ID NO: 1085 - RNA, 186 nt, Artificial Sequence
  AAP35780_variant
augaagcgcuuccuguuccuccugcugaccaucagccuccuggugaugguccagauccagaccggccuguccgggcagaacgacacgagccagaccuccagccccuccgccagcuccagcauguccggcgggaucuuccucuucuucguggccaacgcgaucauccaccuguucugcuucagcuga

SEQ ID NO: 1086 - RNA, 186 nt, Artificial Sequence; identical to SEQ ID NO: 1084
  ACS44650_variant

SEQ ID NO: 1087 - RNA, 954 nt, Artificial Sequence
  EAW93489_variant
augaccguggcccgccccagcgucccggccgcgcugccccuccugggcgagcugccccggcuccugcugcucgugcugcugugccuccccgccguguggggcgacugcgggcugccgcccgacguccccaacgcccagcccgcccuggaggggcgcaccuccuucccggaggacacggugaucaccuacaagugcgaggagagcuucgugaagauccccggcgagaaggacuccgucaucugccucaaggggagccagugguccgacaucgaggaguucugcaaccagaaguccugccccaaccccggcgagauccggaacggccagaucgacgugcccgggggcauccuguucggggccaccaucagcuucagcugcaacaccggcuacaagcuguucggguccacgagcuccuucugccucaucagcggcuccagcgugcagugguccgacccccugcccgagugccgcgagaucuacugccccgcgccgccccagaucgacaacggcaucauccagggggagcgggaccacuacggcuaccgccagagcgucaccuacgccugcaacaagggguucaccaugaucggcgagcacuccaucuacugcaccgugaacaacgacgagggcgaguggagcgggccgcccccggagugccggggcaagucccugacgagcaaggugccgcccaccguccagaagcccaccaccgugaacgugcccacgaccgaggucagccccaccucccagaagaccacgaccaagaccaccacgcccaacgcccaggccacccgcagcacccccgugucccggaccacgaagcacuuccacgagaccaccccgaacaaggggagcggcaccacguccgggaccacccgccuccugagcggccacacgugcuucacccugaccggccuccuggggacccuggugaccaugggccuccugacguga

SEQ ID NO: 1088 - RNA, 882 nt, Artificial Sequence
  EAW93497_variant
augaucggcgagcacagcaucuacugcaccgugaacaacgacgagggggagugguccgggcccccgcccgagugccgcggcaagagccugaccuccaaggucccgcccacggugcagaagcccaccaccgugaacguccccaccacggaggugagccccaccucccagaagaccaccacgaagaccaccacccccaacgcccagggcacggagaccccgagcgugcuccagaagcacaccaccgagaacgucuccgccacgcggaccccgcccacgccccagaagcccaccaccgugaacgugcccgcgaccaucgucacccccacgccccagaagccgaccaccaucaacgugcccgccaccggggugagcuccacgccccagcgccacaccaucgucaacgugagcgccaccggcacccugcccacccugcagaagccgacgcgggccaacgacuccgccaccaagagccccgcggccgcccagaccuccuucaucagcaagacccucuccacgaagacccccagcgccgcgcagaaccccaugaugaccaacgccuccgccacccaggccacccugacggcccagaaguucaccaccgcgaagguggccuucacccagagcccguccgccgcccgcaagagcacgaacguccacagccccgugaccaacggccugaaguccacccagcgguuccccagcgcccacaucaccgcgacgcgcuccacccccgugagccggaccaccaagcacuuccacgagacgaccccgaacaagggguccggcaccaccagcgggacgacccgccuccuguccggccacacgugcuucacccugaccgggcuccugggcacccuggucaccaugggccuccugaccuga

SEQ ID NO: 1089 - RNA, 804 nt, Artificial Sequence
  EAW93493_variant
augaucggcgagcacagcaucuacugcaccgugaacaacgacgagggggagugguccgggcccccgcccgagugccgcggcaagagccugaccuccaaggucccgcccacggugcagaagcccaccaccgugaacguccccaccacggaggugagccccaccucccagaagaccaccacgaagaccaccacccccaacgcccagggcacggagaccccgagcgugcuccagaagcacaccaccgagaacgucuccgccacgcggaccccgcccacgccccagaagcccaccaccgugaacgugcccgcgaccaucgucacccccacgccccagaagccgaccaccaucaacgugcccgccaccggggugagcuccacgccccagcgccacaccaucgucaacgugagcgccaccggcacccugcccacccugcagaagccgacgcgggccaacgacuccgccaccaagagccccgcggccgcccagaccuccuucaucagcaagacccucuccacgaagacccccagcgccgcgcagaaccccaugaugaccaacgccuccgccacccaggccacccugacggcccagaaguucaccaccgcgaagguggccuucacccagagcccguccgccgcccccacgcgcagcacccccgucagccggaccaccaagcacuuccacgagacgacccccaacaagggcuccgggaccaccagcggcacgacccgccugcucuccgggcacacgugcuucacccugaccggccugcucgggacccuggugaccaugggccugcucaccuga

SEQ ID NO: 1090 - RNA, 1146 nt, Artificial Sequence
  AAA52168_variant
augaccguggcccgccccagcgucccggccgcgcugccccuccugggcgagcugccccggcuccugcugcucgugcugcugugccuccccgccguguggggcgacugcgggcugccgcccgacguccccaacgcccagcccgcccuggaggggcgcaccuccuucccggaggacacggugaucaccuacaagugcgaggagagcuucgugaagauccccggcgagaaggacuccgucaucugccucaaggggagccagugguccgacaucgaggaguucugcaaccggagcugcgaggugcccacccgccugaacuccgccagccugaagcagcccuacaucacccagaacuacuucccggugggcacggucguggaguacgagugccggcccggcuaccgccgggagcccucccucagccccaagcugaccugccugcagaaccucaagugguccaccgcgguggaguucugcaagaagaaguccugcccgaaccccggggagauccgcaacggccagaucgacguccccgggggcauccuguucggggccaccaucagcuucagcugcaacacgggcuacaagcuguucggcuccaccagcuccuucugccucaucagcggguccagcgugcaguggagcgacccccugccggagugccgggagaucuacugccccgccccgccccagaucgacaacggcaucauccagggggagcgcgaccacuacggcuaccggcaguccgugaccuacgccugcaacaagggcuucaccaugaucggggagcacagcaucuacugcacggucaacaacgacgagggcgagugguccgggcccccgcccgagugccgcggcaagagccugaccuccaaggugccgcccaccgugcagaagcccaccacggucaacgugcccaccaccgaggugagccccaccucccagaagacgaccaccaagaccacgacccccaacgcgcaggccacccggagcacccccgucucccgcacgaccaagcacuuccacgagaccacccccaacaaggggagcggcacgaccuccggcaccacccggcuccugagcgggcacacgugcuucacccugaccggccuccuggggacccuggugaccaugggccuccugacguga

SEQ ID NO: 1091 - RNA, 2577 nt, Artificial Sequence
  CCDS73385.1_variant
augcugcagaccaaggaccucaucuggacccuguucuuccugggcacggccgugagccuccaggucgacaucgugcccucccagggggagaucagcgugggcgaguccaaguucuuccugugccaggucgccggggacgcgaaggacaaggacaucagcugguucuccccgaacggcgagaagcugacccccaaccagcagcgcaucagcgugguguggaacgacgacuccagcuccacccucaccaucuacaacgccaacaucgacgacgccgggaucuacaagugcgucgugacgggcgaggacggcagcgaguccgaggccaccgugaacgucaagaucuuccagaagcugauguucaagaacgcccccacgccccaggaguuccgggagggggaggacgcggugaucgugugcgacgucgugagcucccugccgcccaccaucaucuggaagcacaagggccgcgacgugauccucaagaaggacguccgguucaucgugcugagcaacaacuaccugcagauccgcgggaucaagaagaccgacgagggcaccuaccggugcgaggggcgcauccucgcccggggcgagaucaacuucaaggacauccaggugaucgucaacgugccgcccaccauccaggcccgccagaacaucgugaacgccaccgcgaaccugggccaguccgucacgcuggugugcgacgccgagggguuccccgagcccaccaugagcuggaccaaggacggcgagcagaucgagcaggaggaggacgacgagaaguacaucuucuccgacgacagcucccagcucaccaucaagaagguggacaagaacgacgaggccgaguacaucugcaucgccgagaacaaggccggggagcaggacgcgacgauccaccugaaggucuucgccaagcccaagaucaccuacguggagaaccagaccgccauggagcuggaggagcaggucacccucacgugcgaggccagcggcgaccccaucccgagcaucaccuggcggaccuccacccgcaacaucagcuccgaggagaaggccagcuggacgcggcccgagaagcaggagacccuggacggccacaugguggugcgcucccacgcgcgggucagcucccugacccucaagagcauccaguacaccgacgccggggaguacaucugcacggccuccaacaccaucggccaggacagccaguccauguaccuggaggugcaguacgcccccaagcugcaggggcccguggccgucuacaccugggagggcaaccaggugaacaucacgugcgagguguucgcguacccgagcgccaccaucuccugguuccgcgacgggcagcuccugcccagcuccaacuacagcaacaucaagaucuacaacacccccuccgccagcuaccuggaggucacccccgacuccgagaacgacuucggcaacuacaacugcaccgccgugaaccggaucggccaggagagccucgaguucauccuggugcaggccgacacgccgagcucccccagcaucgaccaggucgagcccuacuccagcaccgcccaggugcaguucgacgagcccgaggcgaccgggggcgugccgauccugaaguacaaggccgaguggcgcgccgucggggaggagguguggcacuccaagugguacgacgcgaaggaggccagcauggagggcaucgugaccaucgucgggcucaagcccgagaccacguacgccgugcggcuggccgcccugaacggcaagggccucggggagaucuccgcggccagcgaguucaagacccagcccgugcagggcgagcccuccgccccgaagcuggaggggcagaugggcgaggacgggaacagcaucaaggucaaccugaucaagcaggacgacggcggcucccccauccgccacuaccucgugcgguaccgcgcccugagcuccgaguggaagcccgagauccggcugccgagcggguccgaccacgugaugcucaagagccuggacuggaacgccgaguacgaggucuacgugguggcggagaaccagcagggcaaguccaaggccgcccacuucgucuuccgcaccagcgcccagcccaccgccauccccgcgaacgggagccccacguccggccugagcaccggcgccaucguggggauccucaucgugaucuucguccugcugcucgugguggucgacaucacgugcuacuuccugaacaagugcggccuguucaugugcaucgccgugaaccucugcgggaaggccggcccgggggcgaagggcaaggacauggaggagggcaaggccgccuucuccaaggacgagagcaaggagcccaucguggagguccgcaccgaggaggagcggacccccaaccacgacgggggcaagcacaccgagcccaacgagaccaccccgcugacggagcccgagaaggggcccguggaggccaagcccgagugccaggagaccgagaccaagccggcccccgcggaggugaagaccguccccaacgacgccacgcagaccaaggagaacgaguccaaggccuga

SEQ ID NO: 1092 - RNA, 867 nt, Artificial Sequence
  ABK41933_variant
augggccacacccgccggcaggggaccagccccuccaagugcccguaccugaacuucuuccagcuccuggugcuggccggccucagccacuucugcuccggggucauccacgugacgaaggaggugaaggaggucgccacccugagcugcggccacaacguguccguggaggagcuggcccagacccgcaucuacuggcagaaggagaagaagaugguccucaccaugaugagcggggacaugaacaucuggcccgaguacaagaaccggacgaucuucgacaucaccaacaaccuguccaucgugauccuggcccuccgccccagcgacgagggcaccuacgagugcgugguccugaaguacgagaaggacgccuucaagcgggagcaccuggccgaggugacccucuccgugaaggccgacuuccccacgccgagcaucuccgacuucgagauccccaccagcaacauccgccggaucaucugcuccaccagcggcggguuccccgagccccaccuguccuggcuggagaacggcgaggagcucaacgcgaucaacaccacggucagccaggacccggagaccgagcuguacgccguguccagcaagcuggacuucaacaugaccaccaaccacuccuucaugugccucaucaaguacgggcaccuccgcgugaaccagacguucaacuggaacaccaccaagcaggagcacuuccccgacaaccugcugcccagcugggccaucacccugaucagcgucaacggcaucuucgugaucugcugccugacguacugcuucgcgccccggugccgcgagcggcgccggaacgagcgccuccggcgcgaguccgugcggccggucuga

SEQ ID NO: 1093 - RNA, 867 nt, Artificial Sequence; identical to SEQ ID NO: 1092
  AAA36045_variant

SEQ ID NO: 1094 - RNA, 990 nt, Artificial Sequence
  CCDS3009.1_variant
auggacccccagugcaccaugggccugagcaacauccucuucgugauggccuuccugcuguccggggccgcgccgcucaagauccaggccuacuucaacgagaccgccgaccugcccugccaguucgccaacagccagaaccagucccugagcgagcucgucguguucuggcaggaccaggagaaccuggugcugaacgaggucuaccucggcaaggagaaguucgacuccgugcacagcaaguacauggggcgcaccuccuucgacagcgacuccuggacccugcggcugcacaaccuccagaucaaggacaagggccuguaccagugcaucauccaccacaagaagcccaccgggaugauccgcauccaccagaugaacagcgagcuguccgugcucgccaacuucagccagcccgagaucgucccgaucuccaacaucaccgagaacguguacaucaaccugacgugcagcuccauccacggcuaccccgagcccaagaagaugagcgugcugcuccggaccaagaacuccaccaucgaguacgacggcgucaugcagaagucccaggacaacgugaccgagcuguacgacgugagcaucagccugagcgucuccuuccccgacgugacgagcaacaugaccaucuucugcauccucgagaccgacaagacccgccugcuguccagcccguucuccaucgagcucgaggacccccagcccccgcccgaccacauccccuggaucacggcggugcugcccaccgucaucaucugcgugaugguguucugccugauccucuggaaguggaagaagaagaagcggccccgcaacagcuacaagugcgggaccaacaccauggagcgggaggaguccgagcagacgaagaagcgcgagaagauccacaucccggagcggagcgacgaggcccagcgcgucuucaaguccagcaagaccuccagcugcgacaaguccgacacgugcuucuga

SEQ ID NO: 1095 - RNA, 708 nt, Artificial Sequence
  AAA59674_variant
auggcccugcccgugaccgcccuccugcugccgcucgcgcugcugcuccacgccgcccgccccagccaguuccgggucagcccccuggaccgcaccuggaaccugggcgagacgguggagcucaagugccaggugcugcugagcaaccccaccuccgggugcagcuggcuguuccagccgcggggcgccgccgcgucccccaccuuccuccuguaccucagccagaacaagcccaaggccgccgaggggcuggacacccagcgcuucuccggcaagcggcugggggacacguucguccucacccugagcgacuuccgccgggagaacgagggcuacuacuucugcuccgcccugagcaacuccaucauguacuucagccacuucgugcccguguuccucccggcgaagcccaccaccacgcccgcgccccgcccgcccacccccgcccccaccaucgccucccagccgcugagccugcggcccgaggccugccgccccgccgccggcggggccguccacacccggggccucgacuucgccugcgacaucuacaucugggcgccccuggccgggacgugcggcgugcugcuccugucccuggugaucacccucuacugcaaccaccgcaaccggcgccgggucugcaagugcccgcgccccguggugaaguccggggacaagcccucccugagcgcccgguacgucuga

SEQ ID NO: 1096 - RNA, 2472 nt, Artificial Sequence
  EAW57688_variant
augaccgugcugcaggagcccguccaggccgccaucuggcaggcgcucaaccacuacgccuaccgcgacgccguguuccuggccgagcggcuguacgccgaggugcacagcgaggaggcccucuuccugcuggcgaccugcuacuaccgcuccggcaaggccuacaaggccuaccggcuccugaaggggcacagcugcacgaccccgcagugcaaguaccugcucgcgaagugcugcgucgaccuguccaagcuggccgagggcgagcagauccucagcgggggcguguucaacaagcagaagucccacgacgacaucgugaccgaguucggggacagcgccugcuucacccugucccugcucggccacgucuacugcaagacggaccgccuggccaagggcagcgagugcuaccagaagucccugagccucaaccccuuccuguggucccccuucgagagccugugcgagaucggggagaagcccgacccggaccagaccuucaaguucaccucccuccagaacuucagcaacugccugcccaacuccugcaccacccaggugcccaaccacagccugucccaccggcagcccgagaccgugcucaccgagaccccgcaggacacgaucgagcugaaccgccugaaccucgagagcuccaacagcaaguacagccugaacaccgacuccagcgucuccuacaucgacagcgccgugaucucccccgacaccgugccccugggcaccgggacgagcauccucuccaagcagguccagaacaagcccaagaccggccggagccugcucgggggcccggcggcccugagcccccugacgcccuccuucggcauccugccccucgagaccccgucccccggggacggcagcuaccugcagaacuacacgaacaccccgcccgugaucgacgugcccuccaccggggcgcccagcaagaaguccgucgcccgcaucggccagaccggcaccaagagcguguucucccagagcgggaacucccgggaggugacgcccauccuggcccagacccagagcagcggcccccagaccuccacgaccccgcagguccucagccccaccaucaccuccccgcccaacgcccugccccgccggagcucccgccuguucacgagcgacuccagcaccaccaaggagaacuccaagaagcucaagaugaaguucccgcccaagauccccaaccggaagaccaagagcaagacgaacaagggcgggaucacccagcccaacaucaacgacucccuggagaucaccaagcuggacagcuccaucaucagcgaggggaagaucuccaccaucacgccccagauccaggccuucaaccuccagaaggccgccgccggccugaugagccugcuccgcgagaugggcaagggguaccuggcgcugugcuccuacaacugcaaggaggccaucaacauccugagccaccuccccagccaccacuacaacaccggcugggugcugugccagaucgggcgggccuacuucgagcuguccgaguacaugcaggccgagcgcaucuucagcgaggugcggcgcaucgagaacuaccgggucgagggcauggagaucuacuccaccacccucuggcaccuccagaaggacguggcccugagcgugcuguccaaggaccugaccgacauggacaagaacagcccggaggcguggugcgccgccgggaacugcuucucccugcagcgcgagcacgacaucgccaucaaguucuuccagcgggcgauccaggucgaccccaacuacgccuacgccuacacgcuccugggccacgaguucgugcugaccgaggagcucgacaaggcccuggccugcuuccgcaacgcgauccgcgucaacccccggcacuacaacgccugguacggccuggggaugaucuacuacaagcaggagaaguucagccucgccgagaugcacuuccagaaggcccuggacaucaacccccaguccagcgugcugcucugccacaucggcgugguccagcacgcccugaagaaguccgagaaggcgcuggacacccucaacaaggccaucgugaucgacccgaagaacccccugugcaaguuccaccgcgccagcgugcuguucgccaacgagaaguacaaguccgcccuccaggagcuggaggagcugaagcagaucguccccaaggagagccucguguacuuccugaucgggaagguguacaagaagcugggccagacccaccucgcgcugaugaacuucuccugggccauggaccuggaccccaagggggccaacaaccagaucaaggaggccaucgacaagcgguaccucccggacgacgaggagcccaucacgcaggaggagcagaucaugggcaccgacgagagccaggaguccagcaugaccgacgcggacgacacccagcugcacgccgccgaguccgacgaguucuga

SEQ ID NO: 1097 - RNA, 2475 nt, Artificial Sequence
  AAB34378_variant
augaccgugcugcaggagcccguccaggccgccaucuggcaggcgcucaaccacuacgccuaccgcgacgccguguuccuggccgagcggcuguacgccgaggugcacagcgaggaggcccucuuccugcuggcgaccugcuacuaccgcuccggcaaggccuacaaggccuaccggcuccugaaggggcacagcugcacgaccccgcagugcaaguaccugcucgcgaagugcugcgucgaccuguccaagcuggccgagggcgagcagauccucagcgggggcguguucaacaagcagaagucccacgacgacaucgugaccgaguucggggacagcgccugcuucacccugucccugcucggccacgucuacugcaagacggaccgccuggccaagggcagcgagugcuaccagaagucccugagccucaaccccuuccuguggucccccuucgagagccugugcgagaucggggagaagcccgacccggaccagaccuucaaguucaccucccuccagaacuucagcaacugccugcccaacuccugcaccacccaggugcccaaccacagccugucccaccggcagcccgagaccgugcucaccgagaccccgcaggacacgaucgagcugaaccgccugaaccucgagagcuccaacagcaaguacagccugaacaccgacuccagcgucuccuacaucgacagcgccgugaucucccccgacaccgugccccugggcaccgggacgagcauccucuccaagcagguccagaacaagcccaagaccggccggagccugcucgggggcccggcggcccugagcccccugacgcccuccuucggcauccugccccucgagaccccgucccccggggacggcagcuaccugcagaacuacacgaacaccccgcccgugaucgacgugcccuccaccggggcgcccagcaagaaguccgucgcccgcaucggccagaccggcaccaagagcguguucucccagagcgggaacucccgggaggugacgcccauccuggcccagacccagagcagcggcccccagaccuccacgaccccgcagguccucagccccaccaucaccuccccgcccaacgcccugccccgccggagcucccgccuguucacgagcgacuccagcaccaccaaggagaacuccaagaagcucaagaugaaguucccgcccaagauccccaaccggaagaccaagagcaagacgaacaagggcgggaucacccagcccaacaucaacgacucccuggagaucaccaagcuggacagcuccaucaucagcgaggggaagaucuccaccaucacgccccagauccaggccuucaaccuccagaaggccgccgccgagggccugaugagccugcuccgcgagaugggcaagggguaccuggcgcugugcuccuacaacugcaaggaggccaucaacauccugagccaccuccccagccaccacuacaacaccggcugggugcugugccagaucgggcgggccuacuucgagcuguccgaguacaugcaggccgagcgcaucuucagcgaggugcggcgcaucgagaacuaccgggucgagggcauggagaucuacuccaccacccucuggcaccuccagaaggacguggcccugagcgugcuguccaaggaccugaccgacauggacaagaacagcccggaggcguggugcgccgccgggaacugcuucucccugcagcgcgagcacgacaucgccaucaaguucuuccagcgggcgauccaggucgaccccaacuacgccuacgccuacacgcuccugggccacgaguucgugcugaccgaggagcucgacaaggcccuggccugcuuccgcaacgcgauccgcgucaacccccggcacuacaacgccugguacggccuggggaugaucuacuacaagcaggagaaguucagccucgccgagaugcacuuccagaaggcccuggacaucaacccccaguccagcgugcugcucugccacaucggcgugguccagcacgcccugaagaaguccgagaaggcgcuggacacccucaacaaggccaucgugaucgacccgaagaacccccugugcaaguuccaccgcgccagcgugcuguucgccaacgagaaguacaaguccgcccuccaggagcuggaggagcugaagcagaucguccccaaggagagccucguguacuuccugaucgggaagguguacaagaagcugggccagacccaccucgcgcugaugaacuucuccugggccauggaccuggaccccaagggggccaacaaccagaucaaggaggccaucgacaagcgguaccucccggacgacgaggagcccaucacgcaggaggagcagaucaugggcaccgacgagagccaggaguccagcaugaccgacgcggacgacacccagcugcacgccgccgaguccgacgaguucuga

SEQ ID NO: 1098 - RNA, 1788 nt, Artificial Sequence
  AAA51947_variant
augcgcgugcugcucgccgcccugggccuccucuuccugggggcgcugcgggccuucccccaggaccgcccguucgaggacacgugccacggcaaccccagccacuacuacgacaaggccguccggcgcugcugcuaccggugccccauggggcuguuccccacccagcagugcccgcagcgccccaccgacugccggaagcagugcgagcccgacuacuaccuggacgaggccgaccgcugcaccgccugcgugaccugcucccgggacgaccugguggagaagacccccugcgcguggaacagcucccgcgucugcgagugccggccgggcauguucugcagcaccuccgccgugaacagcugcgcccgcugcuucuuccacuccgugugccccgccgggaugaucgucaaguuccccggcaccgcgcagaagaacaccgugugcgagcccgccagcccgggcgugucccccgccugcgccagccccgagaacugcaaggagcccuccagcgggaccaucccgcaggccaagcccacgcccgucucccccgcgaccagcuccgccagcaccaugccggugcggggcgggacccgccucgcccaggaggccgccuccaagcugacgcgggcgcccgacagccccuccagcgugggccgccccagcuccgacccggggcugagccccacccagcccugccccgagggcuccggcgacugccggaagcagugcgagccggacuacuaccucgacgaggccgggcgcugcaccgccugcgucagcugcucccgggacgaccugguggagaagacccccugcgccuggaacagcucccgcacgugcgagugccggcccggcaugaucugcgccaccagcgcgaccaacuccugcgcccgcugcgugccguaccccaucugcgccgccgagaccgucacgaagccccaggacauggccgagaaggacaccaccuucgaggcgcccccgcuggggacccagcccgacugcaaccccacgcccgagaacggcgaggccccggccagcaccucccccacccagagccuccugguggacucccaggccagcaagacccugcccauccccacguccgcgccgguggcccucagcuccaccggcaagcccguccuggacgccgggcccgugcuguucugggugauccucguccuggugguggucgugggcagcuccgccuuccugcucugccaccgccgggccugccgcaagcggauccgccagaagcugcaccugugcuaccccguccagaccagccagccgaagcucgagcugguggacagccggccccgccgguccagcacccagcugcgcuccggggcgagcgugacggagcccgucgccgaggagcggggccucaugucccagccccugauggagaccugccacagcgugggggccgccuaccuggagucccucccgcugcaggacgccagccccgcgggcggccccuccagcccccgcgaccugccggagccccggguguccaccgagcacaccaacaacaagaucgagaagaucuacaucaugaaggccgacacggucaucguggggaccgugaaggccgagcuccccgagggccgcgggcuggccggcccggccgagcccgagcuggaggaggagcucgaggcggaccacacgccccacuaccccgagcaggagaccgagccgccccuggggagcugcuccgacgucaugcugagcguggaggaggagggcaaggaggacccccuccccaccgccgccuccggcaaguga

SEQ ID NO: 1099 - RNA, 912 nt, Artificial Sequence
  EAW97060_variant
auggccaccagccgcuacgagcccguggccgagaucggcgucggggcguacggcaccguguacaaggcccgggacccgcacuccgggcacuucguggcccucaagagcguccgcgugcccaacggcgggggcggcgggggcgggcugcccaucuccacggugcgggaggucgcccugcugcgccggcucgaggccuucgagcaccccaacguggugcgccugauggacgucugcgcgaccagccggaccgaccgcgagaucaaggugacccugguguucgagcacgucgaccaggaccuccggacguaccuggacaaggccccgccgcccggccugcccgccgagaccaucaaggaccucaugcgccaguuccugcgggggcuggacuuccuccacgccaacugcaucgugcaccgcgaccugaagccggagaacauccuggugaccuccggcggcaccgucaagcucgcggacuucgggcuggcccggaucuacagcuaccagauggcccugacgcccgugguggucacccucugguaccgcgcccccgaggugcugcugcaguccaccuacgccacccccguggacauguggagcgucggcugcaucuucgcggagauguuccggcgcaagccccucuucugcgggaacuccgaggccgaccagcugggcaagaucuucgaccugaucggccucccgcccgaggacgacuggccccgggacgugagccugccccgcggggccuucccgccccggggcccccgccccgugcaguccgucgugcccgagauggaggagagcggggcccagcugcuccuggagaugcugacguucaacccccacaagcggaucuccgccuuccgcgcgcuccagcacagcuaccugcacaaggacgagggcaaccccgaguga

SEQ ID NO: 1100 - RNA, 912 nt, Artificial Sequence; identical to SEQ ID NO: 1099
  AAA35673_variant

SEQ ID NO: 1101 - RNA, 690 nt, Artificial Sequence
  AAB50213_variant
auggacgugugcgccaccagccgcaccgaccgggagaucaaggucacgcugguguucgagcacguggaccaggaccuccgcaccuaccuggacaaggcgcccccgcccggccugcccgccgagaccaucaaggaccucaugcggcaguuccugcgcgggcuggacuuccuccacgccaacugcaucguccaccgggaccugaagcccgagaacauccuggugaccuccggcgggacggugaagcucgccgacuucggccuggcccgcaucuacagcuaccagauggcccugaccccggucguggugacccucugguaccgggcgcccgagguccugcugcaguccaccuacgccacgcccguggacauguggagcguggggugcaucuucgccgagauguuccgccggaagccccucuucugcggcaacuccgaggccgaccagcugggcaagaucuucgaccugaucgggcucccgcccgaggacgacuggccccgcgacgucagccugccccggggcgcguucccgccccgcgggccccggcccgugcaguccguggucccggagauggaggagagcggcgcccagcugcuccuggagaugcugaccuucaacccccacaagcgcaucuccgccuuccgggcccuccagcacagcuaccugcacaaggacgaggggaaccccgaguga

SEQ ID NO: 1102 - RNA, 336 nt, Artificial Sequence
  AAH15669_variant
auggccaccagccgcuacgagcccguggccgagaucggcgucggggcguacggcaccguguacaaggcccgggacccgcacuccgggcacuucguggcccucaagagcguccgcgugcccaacggcgggggcggcgggggcgggcugcccaucuccacggugcgggaggucgcccugcugcgccggcucgaggccuucgagcaccccaacguggugcgccugauggacgucugcgcgaccagccggaccgaccgcgagaucaagcggugcuucguggagucccugagcuccguggagacccucaagccgacgagcugggccaagucccugaccuga

SEQ ID NO: 1103 - RNA, 429 nt, Artificial Sequence
  ACY78326_variant
auggagcccgccgccggcagcuccauggagccgagcgcggacuggcuggccaccgccgccgcccgcgggcggguggaggagguccgcgcgcuccuggaggccggcgcccugcccaacgcccccaacuccuacgggcggcgccccauccaggugaugaugaugggcagcgcgcggguggccgagcuccugcugcuccacggggccgagccgaacugcgccgaccccgccacccugacgcgccccguccacgacgcggcccgggagggcuuccuggacacccucguggugcugcaccgcgccggcgcccccugcgccaugccgggggcggucugccccuggaccuggcugcgguccugggccaucgccaugagccacgggaccugcgcccgccuccggggcgcccccgaggcggugacgaugcccgccuga

SEQ ID NO: 1104 - RNA, 351 nt, Artificial Sequence
  EAW58598_variant
auggagcccgccgccggcagcuccauggagcccagcgcggacuggcuggccaccgccgccgcccgcgggcggguggaggagguccgcgcgcuccuggaggccggcgcccugcccaacgcccccaacuccuacgggcggcgccccauccaggugggccgggggagcgcggccggcgccggcgacgggggccgccucuggcggaccaaguucgccggggagcuggaguccggcagcgccuccauccugcgcaagaaggggcggcuccccggcgaguucagcgagggcgugugcaaccaccgcccgccgcccggggacgcgcugggcgccugggaggccaaggaggaggaguga

SEQ ID NO: 1105 - RNA, 471 nt, Artificial Sequence
  AFN61598_variant
auggagcccgccgccggcagcuccauggagccgagcgcggacuggcuggccaccgccgccgcccgcgggcggguggaggagguccgcgcgcuccuggaggccggcgcccugcccaacgcccccaacuccuacgggcggcgccccauccaggugaugaugaugggcagcgcgcggguggccgagcuccugcugcuccacggggccgagccgaacugcgccgaccccgccacccugacgcgccccguccacgacgcggcccgggagggcuuccuggacacccucguggugcugcaccgcgccggcgcccggcuggacguccgcgacgccugggggcggcuccccguggaccuggcggaggagcugggccaccgcgacguggcccgguaccuccgcgccgccgccgggggcacccggggguccaaccacgcgcgcaucgacgccgccgagggcccgagcgacauccccgacuga

SEQ ID NO: 1106 - RNA, 327 nt, Artificial Sequence
  CCQ43815_variant
auggaggugaugaugaugggcagcgcccgcgucgccgagcugcuccugcugcacggggcggagcccaacugcgccgacccggccacccucacccggcccgugcacgacgccgcccgcgagggcuuccuggacacgcuggugguccuccaccgggcgggggcccgccuggacgugcgggacgccuggggccgccugcccguggaccucgccgaggagcuggggcaccgggacgucgcgcgcuaccugcgggccgccgccggcggcacccgcggguccaaccacgcccggaucgacgcggccgagggccccagcgacaucccggacuga

SEQ ID NO: 1107 - RNA, 399 nt, Artificial Sequence
  AAA82236_variant
auggugcgccgguuccuggucacccuccgcauccggcgcgccugcgggcccccgcgggugcgcguguucgucgugcacaucccccggcugaccggggagugggccgcgcccggcgcccccgccgccguggcccugguccucaugcugcugcgcagccagcggcucgggcagcagccgcugccccgccggcccggccacgacgacgggcagcgccccuccggcggcgcggccgccgccccgcggcgcggggcgcagcugcggcgcccccggcacagccaccccacgcgcgcccggcgcugccccggcgggcucccgggccacgccgggggcgccgcccccggccggggcgcggccggccgcgcccgcugccuggggcccuccgcccggggccccggcuga

SEQ ID NO: 1108 - RNA, 2109 nt, Artificial Sequence
  CCDS12584.1_variant
auggagagccccuccgccccgccccaccgcuggugcauccccuggcagcggcugcuccugaccgccagccugcucaccuucuggaacccgcccacgaccgcgaagcugaccaucgaguccacccccuucaacguggccgagggcaaggagguccugcuccuggugcacaaccugccccagcaccucuucggguacagcugguacaagggcgagcgcguggacgggaaccggcagaucaucggcuacgucaucgggacgcagcaggccacccccggcccggccuacuccggccgcgagaucaucuaccccaacgccagccugcugauccagaacaucauccagaacgacaccggguucuacacccuccacgugaucaaguccgaccuggugaacgaggaggcgacgggccaguuccgggucuaccccgagcugcccaagccgagcaucuccagcaacaacuccaagcccguggaggacaaggacgccguggccuucacgugcgagcccgagacccaggacgccaccuaccucuggugggucaacaaccagagccugcccguguccccgcgccugcagcucagcaacgggaaccggacgcugacccuguucaacgugacccgcaacgacaccgcguccuacaagugcgagacgcagaaccccgucagcgcccggcgcuccgacagcgugauccucaacgugcuguacggccccgacgcccccaccaucuccccgcugaacaccagcuaccggagcggggagaaccucaaccuguccugccacgccgccagcaacccgcccgcgcaguacuccugguucgucaacggcaccuuccagcagagcacgcaggagcuguucauccccaacaucaccgugaacaacuccggcagcuacacgugccaggcccacaacuccgacaccgggcucaaccgcaccaccgugaccaccaucacggucuacgccgagccgcccaagcccuucaucaccagcaacaacuccaaccccguggaggacgaggacgccguggcccugaccugcgagcccgagauccagaacaccacguaccuguggugggucaacaaccagagccuccccgugagcccccggcugcagcuguccaacgacaaccgcacccucacccugcuguccgugacccggaacgacgucggcccguacgagugcgggauccagaacgagcucagcguggaccacuccgaccccgucauccugaacgugcuguacggccccgacgaccccacgaucagcccguccuacaccuacuaccgccccggcgugaaccucagccuguccugccacgcggccagcaacccgcccgcccaguacagcuggcugaucgacgggaacauccagcagcacacccaggagcuguucaucuccaacaucaccgagaagaacagcggccucuacacgugccaggccaacaacuccgccagcgggcacucccggaccaccgucaagaccaucaccgugagcgcggagcugcccaagcccuccaucagcuccaacaacagcaagcccguggaggacaaggacgccgucgccuucacgugcgagcccgaggcccagaacaccaccuaccucuggugggugaacggccagucccugccggugagcccccgccugcagcucuccaacgggaaccggacccugacgcuguucaacgucacccgcaacgacgcccgggcguacgugugcggcauccagaacagcguguccgccaaccgcagcgaccccgucacccuggacgugcucuacggccccgacaccccgaucaucuccccgcccgacagcagcuaccuguccggggccaaccugaaccucagcugccacuccgccagcaaccccagcccccaguacuccuggcgcaucaacggcaucccccagcagcacacccaggugcuguucaucgcgaagaucacccccaacaacaacgggaccuacgccugcuucgucuccaaccuggccaccggccggaacaacagcaucgugaaguccaucacggugagcgccuccgggaccagccccggccucuccgccggcgcgaccgucgggaucaugaucggcgugcuggugggggucgcccugaucuga

SEQ ID NO: 1109 - RNA, 1035 nt, Artificial Sequence
  AAA51739_variant
auggggcccccgagcgccccgcccugccgccugcacgugcccuggaaggagguccuccugaccgccucccugcucaccuucuggaacccgcccacgaccgcgaagcugaccaucgagagcacccccuucaacguggccgagggcaaggaggugcugcuccuggcccacaaccugccccagaaccggaucggcuacuccugguacaagggggagcgcgucgacggcaacagccucaucgugggguacgugaucggcacgcagcaggccacccccggccccgccuacuccgggcgggagaccaucuaccccaacgcgagccugcugauccagaacgucacccagaacgacacgggcuucuacacccuccaggugaucaaguccgaccuggugaacgaggaggccaccgggcaguuccacgucuaccccgagcugccgaagcccagcaucuccagcaacaacuccaaccccguggaggacaaggacgccguggccuucacgugcgagcccgagguccagaacaccaccuaccucuggugggugaacggccagagccugccggugagcccccgccugcagcucuccaacgggaacaugacccugacccugcucuccgucaagcggaacgacgcgggcagcuacgagugcgagauccagaaccccgccuccgccaaccgcagcgaccccgugacgcugaacgugcuguacggcccggacgggcccaccaucucccccagcaaggccaacuaccggcccggcgagaaccucaaccugagcugccacgccgcguccaacccgcccgcccaguacagcugguucaucaacgggaccuuccagcaguccacccaggagcuguucauccccaacaucacggucaacaacagcggcuccuacaugugccaggcccacaacagcgccaccggccucaaccgcaccaccgugacgaugaucaccguguccgggagcgcccccguccuguccgcgguggccaccgugggcaucaccaucgggguccuggcccggguggcccucaucuga

SEQ ID NO: 1110 - RNA, 1173 nt, Artificial Sequence
  AAB04533_variant
augggcgccaccaccauggaccagaagucccugugggccgggguggucgugcuccugcugcuccagggcgggagcgcguacaagcuggugugcuacuucacgaacuggagccaggaccgccaggagcccggcaaguucaccccggagaacaucgaccccuuccugugcucccaccucaucuacagcuucgccuccaucgagaacaacaaggucaucaucaaggacaagagcgaggugaugcuguaccagaccaucaacucccugaagaccaagaaccccaagcucaagauccugcugagcaucgggggcuaccucuucggcuccaagggguuccaccccaugguggacagcuccacgagccggcuggaguucaucaacuccaucauccuguuccuccgcaaccacaacuucgacggccuggacgucagcuggaucuacccggaccagaaggagaacacccacuucaccgugcugauccacgagcucgccgaggccuuccagaaggacuucaccaaguccacgaaggagcggcugcugcucaccgccggggugagcgcgggccgccagaugaucgacaacuccuaccaggucgagaagcuggccaaggaccuggacuucaucaaccuccugagcuucgacuuccacggguccugggagaagccccugaucaccggccacaacagcccccucagcaagggcuggcaggaccgggggcccuccagcuacuacaacguggaguacgccgugggcuacuggauccacaaggggaugccguccgagaaggucgugaugggcauccccaccuacggccacagcuucacgcuggccuccgcggagaccaccgugggggcccccgccagcggccccggggccgccggcccgaucaccgaguccagcggguuccuggcguacuacgagaucugccaguuccucaagggcgccaagaucacgcgccugcaggaccagcagguccccuacgccgugaagggcaaccagugggugggguacgacgacgucaaguccauggagaccaaggugcaguuccugaagaaccucaaccugggcggggccaugaucuggagcaucgacauggacgacuucaccggcaaguccugcaaccaggggcccuacccccuggugcaggccgucaagcggagccucggcucccuguga

SEQ ID NO: 1111 - RNA, 2832 nt, Artificial Sequence
  AAD40367_variant
augacccagcgcagcaucgccggccccaucugcaaccugaaguucgugacccuccuggucgcccuguccagcgagcucccguuccugggggcgggcgugcagcugcaggacaacggguacaacggccuccugaucgccaucaacccccaggugcccgagaaccagaaccugaucuccaacaucaaggagaugaucacggaggccagcuucuaccucuucaacgccaccaagcggcgcgucuucuuccggaacaucaagauccugauccccgccaccuggaaggcgaacaacaacuccaagaucaagcaggagagcuacgagaaggccaacgugaucgugaccgacugguacggggcccacggcgacgacccguacacgcugcaguaccgcggcugcgggaaggagggcaaguacauccacuucacccccaacuuccuccugaacgacaaccugaccgccggguacggcucccgggggcgcgucuucgugcacgagugggcgcaccuccgguggggcguguucgacgaguacaacaacgacaagcccuucuacaucaacggccagaaccagaucaaggucacccgcugcagcuccgacaucacggggaucuucgugugcgagaagggccccugcccgcaggagaacugcaucaucagcaagcuguucaaggaggggugcaccuucaucuacaacuccacccagaacgccaccgccagcaucauguucaugcagucccugagcuccguggucgaguucugcaacgccagcacgcacaaccaggaggcccccaaccuccagaaccagaugugcucccugcggagcgcgugggacgugaucaccgacuccgccgacuuccaccacagcuuccccaugaacggcaccgagcugcccccgccgcccaccuucagccucgugcaggccggcgacaaggucgugugccuggugcuggacgucuccagcaagauggccgaggccgaccgccuccugcagcugcagcaggcggccgaguucuaccucaugcagaucguggagauccacacguucguggggaucgccuccuucgacagcaagggcgagauccgggcccagcugcaccagaucaacuccaacgacgaccgcaagcugcucgucagcuaccugcccaccaccguguccgccaagaccgacaucagcaucugcuccgggcugaagaagggcuucgagguggucgagaagcucaacgggaaggcguacggcagcgugaugauccuggucacguccggcgacgacaagcugcucgggaacugccugcccaccgugcugagcuccggcagcaccauccacuccaucgcccucgggagcuccgccgcccccaaccuggaggagcugagccggcucaccggcgggcugaaguucuucgugcccgacaucuccaacagcaacagcaugaucgacgccuucucccgcaucagcuccggcacgggcgacaucuuccagcagcacauccagcuggagagcaccggggagaacgucaagccccaccaccagcucaagaacaccgugaccguggacaacacggucggcaacgacaccauguuccuggugaccuggcaggcguccgggccgcccgagaucauccuguucgaccccgacggccggaaguacuacaccaacaacuucaucacgaaccucaccuuccgcaccgccagccuguggauccccgggaccgccaagccgggccacuggacguacacccugaacaacacccaccacucccugcaggcccucaaggugaccgucaccagccgggcguccaacagcgccgugccgcccgccacgguggaggccuucgucgagcgcgacucccugcacuucccccaccccgugaugaucuacgccaacgugaagcagggcuucuaccccauccugaacgcgaccgucaccgccaccguggagcccgagacgggggacccggugacccuccggcugcuggacgacggcgccggggccgacgucaucaagaacgacggcaucuacagccgcuacuucuucuccuucgccgcgaacggccgguacagccucaaggugcacgugaaccacucccccagcaucuccacccccgcccacagcauccccgggagccacgccauguacgucccgggcuacaccgccaacgggaacauccagaugaacgcgccccgcaaguccgugggccgcaacgaggaggagcggaaguggggguucagccgcguguccagcggcggcuccuucagcguccugggggugcccgccggcccccacccggacguguucccgcccugcaagaucaucgaccuggaggccgucaagguggaggaggagcucacgcuguccuggaccgcccccggggaggacuucgaccagggccaggccaccagcuacgagauccggauguccaagagccugcagaacauccaggacgacuucaacaacgcgauccucgugaacaccuccaagcgcaacccccagcaggccgggauccgggagaucuucacguucagcccccagaucuccaccaacggccccgagcaccagcccaacggcgagacccacgagagccaccgcaucuacgucgccauccgggccauggaccgcaacucccugcagagcgccguguccaacaucgcgcaggccccgcuguucaucccgcccaacagcgaccccgugcccgcccgggacuaccucauccugaaggggguccugaccgccaugggccucaucgggaucaucugccugaucaucguggugacgcaccacacccugucccgcaagaagcgggccgacaagaaggagaacggcaccaagcuccuguga

SEQ ID NO: 1112 - RNA, 708 nt, Artificial Sequence
  AAF82135_variant
auggaggaggagacccacaccgacgccaagauccgcgccgagaacggcacggggagcagcccccggggcccggggugcagccugcgccacuucgcgugcgagcagaaccuccugucccggcccgacggcagcgccuccuuccugcagggggacaccagcgugcucgccggcgucuacggccccgccgaggugaagguguccaaggagaucuucaacaaggccacccuggaggucauccugcgccccaagaucgggcucccgggcguggcggagaagucccgggagcgccugauccggaacacgugcgaggccgugguccuggggacccuccacccccgcaccuccaucaccguggugcugcaggucgugagcgacgccggcucccugcucgccugcugccugaacgcggccugcauggcccugguggacgccgggguccccaugcgggcccucuucugcggcguggcgugcgcccuggacagcgacggcacccuggugcucgaccccacguccaagcaggagaaggaggcccgcgccguccugaccuucgcccuggacagcguggagcggaagcuccugauguccagcaccaaggggcuguacuccgacaccgagcuccagcagugccuggcggccgcccaggccgccagccagcacguguuccgcuucuaccgggagucccugcagcgccgguacagcaagagcuga

SEQ ID NO: 1113 - RNA, 1752 nt, Artificial Sequence
  CCDS6312.1_variant
auggagguggccgccaacugcagccugcgcgucaagcggccccuccuggacccgcgcuucgagggcuacaagcugucccucgagccccugcccugcuaccagcuggagcucgacgcggccguggccgaggugaagcugcgggacgaccaguacacccuggagcacaugcacgccuucgggauguacaacuaccuccacugcgacagcugguaccaggacuccgucuacuacaucgacacccugggccgcaucaugaaccugacggugaugcucgacaccgcccuggggaagccccgggagguguuccgccugccgaccgaccucaccgcgugcgacaaccggcugugcgccagcauccacuucuccagcuccacgugggucacccugagcgacggcaccgggcgccucuacgugaucggcaccggcgagcgggggaacuccgccagcgagaagugggagaucauguucaacgaggagcugggcgaccccuucaucaucauccacuccaucagccugcucaacgccgaggagcacuccaucgcgacgcugcugcuccgcaucgagaaggaggagcuggacaugaaggggagcggcuucuacgugucccuggagugggucaccaucagcaagaagaaccaggacaacaagaaguacgagaucaucaagcgggacauccuccgcgggaaguccgugccccacuacgccgccaucgagcccgacggcaacggccugaugaucgugagcuacaagucccugaccuucguccaggccgggcaggaccucgaggagaacauggacgaggacaucagcgagaagaucaaggagccgcuguacuacuggcagcagaccgaggacgaccugacggugaccauccggcuccccgaggacagcaccaaggaggacauccagauccaguuccugcccgaccacaucaacaucgugcugaaggaccaccaguuccucgagggcaagcuguacuccagcaucgaccacgaguccagcaccuggaucaucaaggaguccaacagccuggagaucucccucaucaagaagaacgaggggcugacguggcccgagcuggucaucggcgacaagcagggcgagcucauccgcgacagcgcccagugcgcggccaucgccgagcggcugaugcaccugaccuccgaggagcucaacccgaaccccgacaaggagaagccgcccugcaacgcccaggagcuggaggagugcgacaucuucuucgaggagagcuccagccugugccgcuucgacgggaacacccucaagaccacgcacguggugaaccugggcuccaaccaguaccuguucagcgucaucguggaccccaaggagaugcccugcuucugccugcggcacgacguggacgcccuccuguggcagccccacuccagcaagcaggacgacaugugggagcacaucgcgaccuucaacgcccugggguacguccaggccuccaagcgcgacaagaaguucuucgccugcgcccccaacuacagcuacgcggcccucugcgagugccugcggcgcguguucaucuaccggcagccggcccccauguccaccgugcuguacaaccgcaaggagggccgccaggucggccagguggccaagcagcaggucgccagccucgagaccaacgaccccauccugggguuccaggcgacgaacgagcggcuguucgugcucaccaccaagaaccuguuccugaucaaggugaacaccgagaacuga

SEQ ID NO: 1114 - RNA, 1563 nt, Artificial Sequence
  CCDS41288.1_variant
augagcagcccccuggccucccucuccaagacccgcaaggugccgcugcccagcgagcccaugaaccccggccggcgcgggauccggaucuacggcgacgaggacgaggucgacaugcuguccgacgggugcggcagcgaggagaagaucuccgugccgagcugcuacgggggcaucggcgcccccgugucccgccagguccccgcgagccacgacuccgagcucauggccuucaugacccggaagcugugggaccuggagcagcaggucaaggcccagacggacgagauccucagcaaggaccagaagaucgccgcccuggaggaccuggugcagacccuccgcccccacccggcggaggccacccugcagcggcaggaggagcuggagaccaugugcgugcagcuccagcgccaggugcgggagauggagcgcuuccuguccgacuacgggcugcagugggugggcgagcccauggaccaggaggacagcgaguccaagacggucagcgagcacggggagcgggacuggaugaccgccaagaaguucuggaagcccggcgacucccucgcgcccccggagguggacuucgaccgccugcuggccagccuccaggaccuguccgagcugguggucgagggggacacccaggugacccccgugcccggcggcgcccggcuccgcacgcuggagcccaucccgcugaagcucuaccggaacgggaucaugauguucgacggccccuuccagcccuucuacgaccccagcacccagcgcugccugcgggacauccuggacggguucuucccgagcgagcuccagcgccuguaccccaacggcguccccuucaagguguccgaccugcggaaccagguguaccucgaggacggccuggaccccuucccgggggagggccgcgucguggggcggcagcugaugcacaaggcccucgaccgcguggaggagcaccccggcagccgcaugaccgccgagaaguuccugaaccggcugcccaaguucgucauccgccagggggaggugaucgacauccggggccccauccgcgacacccuccagaacugcugcccgcugcccgcccggauccaggagaucguggucgagacgcccacccuggcggccgagcgcgagcggucccaggagagcccgaacacccccgccccgccccucuccaugcugcgcaucaagagcgagaacggcgagcaggccuuccugcucaugaugcagcccgacaacaccaucggggacgugcgggcccugcuggcgcaggcccgcgucauggacgccuccgccuucgagaucuucagcacguucccgcccacccucuaccaggacgacacccugacccugcaggccgcgggccucgugcccaaggccgcccugcugcugcgggcccgccgggcccccaaguccagccucaaguucucccccgggcccugccccggcccggggcccggccccagccccggcccggggcccggccccucccccgggccgggccccgggcccagccccugcccgggccccucccccagcccgcaguga

SEQ ID NO: 1115 - RNA, 429 nt, Artificial Sequence
  AAA88022_variant
auggccaccaagaucgacaaggaggccugccgcgcggccuacaaccuggugcgggacgacggcagcgccgucaucugggugaccuucaaguacgacggguccacgaucgugcccggcgagcagggggccgaguaccagcacuucauccagcagugcaccgacgacguccgccucuucgccuucgugcgguucaccaccggcgacgcgaugagcaagcgcuccaaguucgcccugaucacguggaucggggagaacgugagcggccugcagcgggccaagaccggcaccgacaagacccucgucaaggagguggugcagaacuucgccaaggaguucgucaucuccgaccgcaaggagcuggaggaggacuucaucaagagcgagcugaagaaggccgggggcgcgaacuacgacgcccagacggaguga

SEQ ID NO: 1116 - RNA, 495 nt, Artificial Sequence
  CCQ43891_variant
auggccacccgcgaccccuggguguggauggccagcccggacuuccaggcgcggaagggcaagcgcguccaccaggagacccuggcccccggggagacgaaggacaagauggagcuccugggccugcgggggccccucgaccugcugggccccggggcccuccuggccacccugggcaagauggccccgggcgagcacaaggcgcagcgcgcccccaaggagucccccgacaagaccgcccggugggcccagcgcgacccccaggggccgcgggugagccucgaguaccuggagcgccgggcgaccaugggccaccaggccucccuggaccaccaggggccccgcgccagccagggcgccugggggcucggcgagcggacgguguggaccgucccccaggaccgccggggcucccuggccaccgaggcgcgcauggagcugcaggggcccggcgugccgcaggccagccgggccucccgcgagacccagugguga

SEQ ID NO: 1117 - RNA, 1623 nt, Artificial Sequence
  AAO18361_variant
augggccccggggagcgcgccggcgggggcggggacgccggcaagggcaacgcggccgggggcgggggcgggggccggagcgccaccaccgccggcucccgcgccgugagcgcgcugugccuccugcuguccgucgggagcgccgccgccugccuccugcugggcgugcaggcggccgcccuccaggggcggguggccgcccuggaggaggagcgcgagcugcuccggcgcgcgggcccgcccggcgcccuggacgccugggccgagccccaccuggagcggcuccugcgcgagaagcuggacgggcucgccaagauccggacggcgcgcgaggcccccuccgagugcgucugcccgcccggcccgcccgggcggcgcggcaagcccgggcggcgcggcgaccccggcccgcccgggcagagcggccgggacggguaccccggcccccuggggcuggacggcaagcccggccuccccgggccgaagggcgagaagggggcccccggcgacuucgggccccgcggcgaccagggccaggacggggccgccgggcccccgggcccgcccggcccgcccggcgcgcgggggccgcccggcgacaccgggaaggacggcccccgcggggcccagggccccgccggccccaagggggagcccggccaggacggggagaugggccccaaggggccgcccggccccaagggcgagcccggggugcccggcaagaagggggacgacggcacccccucccagcccgggccgcccggccccaagggcgagcccgggagcaugggcccgcgcggggagaacggcguggacggggcccccggccccaagggcgagcccgggcaccggggcaccgacggggccgcgggcccgcggggcgcccccgggcugaagggcgagcagggggacacggucgugaucgacuacgacggccgcauccuggacgcccucaaggggccgcccggcccccagggcccgcccgggccgcccggcauccccggggccaagggcgagcuggggcugcccggcgcgcccggcaucgacggggagaagggccccaaggggcagaagggcgaccccggggagcccggcccggccggccucaagggggaggccggcgagauggggcuguccggccugcccggcgccgacgggcucaagggcgagaagggggagagcgccuccgacagccugcaggagucccuggcgcagcucaucguggagcccgggcccccgggcccgcccggcccgcccggccccauggggcugcagggcauccaggggcccaagggccuggacggggccaagggcgagaagggcgccagcggggagcgcggccccuccgggcuccccggccccgucgggccgcccggccugaucggccugcccgggaccaagggcgagaaggggcggcccggcgagcccgggcucgacggcuuccccggcccgcgcggggagaagggcgaccggagcgagcgcggggagaagggcgagcggggcgugcccgggcgcaagggcgugaaggggcagaagggcgagcccgggcccccgggccuggaccagcccugccccgucggcccggacgggcugcccgugcccggcugcuggcacaaguga

SEQ ID NO: 1118 - RNA, 492 nt, Artificial Sequence
  CAG25548_variant
augcuggcccgcgcccuccugcugugcgcggugcucgcccugagccacaccgccaaccccugcugcucccaccccugccagaaccggggcgucugcaugagcgugggguucgaccaguacaagugcgacugcacccgcaccggcuucuacggggagaacugcuccacccccgaguuccugacccggaucaagcuguuccucaagcccacccccaacacggugcacuacauccugacccacuucaagggcuucuggaacgucgugaacaacaucccguuccuccgcaacgccaucaugagcuacgugcugaccucccggagccaccugaucgacuccccgcccaccuacaacgccgacuacggguacaagagcugggaggcguucuccaaccucagcuacuacacgcgcgcccugccgcccguccccgacgacugccccacgccccugggcgugaaggcccuccacgccuccguguuccaggaccggagcuga

SEQ ID NO: 1119 - RNA, 1632 nt, Artificial Sequence
  AAC50809_variant
augggcaccagccugucccccaacgacccguggccccucaacccccugagcauccagcagaccacgcugcuccugcugcucuccgugcuggccaccguccacguggggcagcgccugcuccggcagcgccggcgccagcugcggagcgcgcccccgggccccuucgccuggccccugaucgggaacgccgccgccgugggccaggccgcgcaccucuccuucgcccgccuggcccggcgcuacggggacgucuuccagauccggcugggcagcugccccaucguggugcucaacggcgagcgcgccauccaccaggcgcugguccagcagggguccgccuucgccgaccggccggccuucgccagcuuccgcgugguguccggcgggcggagcauggcguucggccacuacuccgagcacuggaagguccagcgccgggccgcccacagcaugaugcgcaacuucuucacccggcagccccgcucccgccaggugcuggaggggcacgugcucagcgaggcccgggagcuggucgcccugcucgugcggggcuccgcggacggcgccuuccuggacccccgcccccugaccguggucgccguggccaacgugaugagcgccgucugcuucgggugccgcuacucccacgacgacccggaguuccgggagcuccugagccacaacgaggaguucggccgcacggugggggcgggcucccugguggacgucaugcccuggcuccaguacuuccccaaccccgugcggaccguguuccgcgaguucgagcagcugaaccggaacuucagcaacuucauccuggacaaguuccuccgccacugcgagagccugcggccgggcgccgcgccccgcgacaugauggacgccuucauccuguccgccgagaagaaggccgccggggacagccacggcgggggcgcccggcucgaccuggagaacguccccgccaccaucaccgacaucuucggggcgucccaggacacgcugagcaccgcccuccaguggcugcugcuccuguucacccgcuaccccgacgugcagacccggguccaggccgagcuggaccagguggugggccgcgaccggcucccgugcaugggcgaccagcccaaccugcccuacguccuggccuuccucuacgaggccaugcgcuucuccagcuucgugcccgugacgaucccgcacgcgaccaccgccaacaccuccguccugggguaccacauccccaaggacacggugguguucgucaaccaguggagcgugaaccacgacccccugaaguggcccaacccggagaacuucgaccccgcccgguuccucgacaaggacggccugaucaacaaggaccugaccucccgcgugaugaucuucagcgucgggaagcggcgcugcaucggcgaggagcuguccaagaugcagcuguuccucuucaucagcauccuggcccaccagugcgacuuccgggccaaccccaacgagccggcgaagaugaacuucuccuacgggcucaccaucaagcccaagagcuucaaggugaacgugacccugcgcgaguccauggagcugcucgacagcgccguccagaaccugcaggccaaggagacgugccaguga

SEQ ID NO: 1120 - RNA, 333 nt, Artificial Sequence
  NM_001129828_variant
auguggaugggccugauccagcucguggagggggucaagcgcaaggaccagggcuuccuggagaaggaguucuaccacaagaccaacaucaagaugcggugcgaguuccuggccugcuggcccgccuucaccgugcucggggaggcguggcgcgaccagguggacuggagccggcugcugcgcgacgccggccucgucaagaugucccggaagccgcgcgccagcagcccccuguccaacaaccacccgcccacgcccaagcgguucccccgccagcccgggcgggagaagggccccaucaaggaggugccgggcaccaaggggucccccuga

SEQ ID NO: 1121 - RNA, 384 nt, Artificial Sequence
  NM_001129826_variant
auguggaugggccugauccagcucguggagggggucaagcgcaaggaccagggcuuccuggagaaggaguucuaccacaagaccaacaucaagaugcggugcgaguuccuggccugcuggcccgccuucaccgugcucggggaggcguggcgcgaccagguggacuggagccggcugcugcgcgacgccggccucgucaagaugucccggaagccgcgcgccagcagcccccuguccaacaaccacccgcccacgcccaagcggcgcggguccggccggcacccccugaaccccggccccgaggcccucagcaaguucccgcgccagcccgggcgggagaagggccccaucaaggaggugcccgggaccaagggcuccccguga

SEQ ID NO: 1122 - RNA, 570 nt, Artificial Sequence
  AAI40914_variant
augaccgacaagaccgagaagguggccgucgaccccgagacgguguucaagcgcccgcgggagugcgacagccccuccuaccagaagcgccagcggauggcccugcucgcgcgcaagcagggcgccggggacagccugaucgccggcuccgccaugagcaaggccaagaagcugaugaccgggcacgcgaucccgcccucccagcucgacagccagaucgacgacuucaccggcuucuccaaggaccggaugaugcagaagcccgggagcaacgcccccgugggcggcaacgucaccuccagcuucuccggggacgaccuggagugccgcgagacggccagcucccccaagagccagcgggagaucaacgccgacaucaagcgcaagcuggugaaggagcuccggugcgugggccagaaguacgagaagaucuucgagaugcuggaggggguccagggccccaccgcggugcgcaagcgguucuucgaguccaucaucaaggaggccgcccgcugcaugcggcgcgacuucgugaagcaccugaagaagaagcucaagcggaugaucuga

SEQ ID NO: 1123 - RNA, 795 nt, Artificial Sequence
  AAH20662_variant
augcugcgccuccugcggcuggcccucgccuucuacggccgcaccgcggaccccgccgagcggcaggggccgcagcagcagggccugccccagggggacacccagcugacgaccgugcagggcgucgugaccagcuucugcggggacuacggcaugaucgacgaguccaucuacuucagcuccgacguggucaccggcaacgugccccucaagguggggcagaaggucaacgugguggucgaggaggacaagccccacuacggccugcgcgccaucaagguggacguggucccgcggcaccuguacggggccggccccagcgacuccgggacgcgcgugcucaucggcugcgugaccagcaucaacgaggacaacaucuacaucuccaacagcaucuacuucuccaucgccaucgucagcgaggacuucgugcccuacaagggcgaccugcuggagguggaguacuccaccgagcccgggaucagcaacaucaaggcgaccuccgucaagccgauccggugcauccacacggaggaggugugcaucaccagcgugcacggccgcaacggggucaucgacuacaccaucuucuucacccucgacuccgugaagcugcccgacggcuacgugccccaggucgacgacaucgugaacgucgugaugguggagagcauccaguucugcuucaucuggcgggccaucuccaucacgcccguccacaagagcuccagcggcuuccaggacgacgggggccuggggcgcccgaagcgggagcgccggagccaguccaucuga

SEQ ID NO: 1124 - RNA, 2844 nt, Artificial Sequence
  CCDS735.1_variant
augagccugcccucccgccagaccgccaucaucgugaacccgcccccccccgaguacaucaacaccaagaagaacggccggcucacgaaccagcugcaguaccugcagaaggucgugcucaaggaccuguggaagcacagcuucuccuggccguuccagcgccccguggacgccgucaagcugcagcuccccgacuacuacaccaucaucaagaaccccauggaccugaacaccaucaagaagcggcuggagaacaaguacuacgcgaaggccagcgagugcaucgaggacuucaacaccauguucuccaacugcuaccucuacaacaagccgggggacgacaucgugcugauggcccaggcccuggagaagcucuucaugcagaagcugagccagaugccccaggaggagcagguggucggcgugaaggagcgcaucaagaaggggacgcagcagaacaucgccguguccagcgcgaaggagaaguccagccccuccgccaccgagaaggucuucaagcagcaggagauccccagcguguucccgaagaccuccaucagcccccugaacgugguccagggcgccuccgugaacagcuccagccagaccgccgcgcaggugacgaagggggucaagcggaaggccgacaccaccacccccgccacguccgccgugaaggccagcagcgaguucucccccaccuucaccgagaagagcguggcgcucccgcccaucaaggagaacaugcccaagaacguccugcccgacucccagcagcaguacaacguggugaagaccgucaaggugacggagcagcugcgccacugcagcgagauccucaaggagaugcuggccaagaagcacuucuccuacgccuggccguucuacaaccccguggacgucaacgcccugggccuccacaacuacuacgacguggucaagaaccccauggaccugggcaccaucaaggagaagauggacaaccaggaguacaaggacgccuacaaguucgcggccgacgugcggcugauguucaugaacugcuacaaguacaaccccccggaccacgagguggucaccauggcccgcaugcuccaggacguguucgagacccacuucagcaagauccccaucgagcccguggaguccaugccccugugcuacaucaagacggacaucaccgagaccaccgggcgggagaacacgaacgaggccagcuccgagggcaacagcuccgacgacagcgaggacgagcgcgucaagcggcuggccaagcuccaggagcagcugaaggcggugcaccagcagcugcaggugcucucccaggucccguuccgcaagcugaacaagaagaaggagaagagcaagaaggagaagaagaaggagaaggugaacaacuccaacgagaacccccggaagaugugcgagcagaugcgccugaaggagaagagcaagcggaaccagcccaagaagcgcaagcagcaguucaucgggcucaaguccgaggacgaggacaacgccaagccgaugaacuacgacgagaagcggcagcugagccugaacaucaacaagcuccccggcgacaagcuggggcgcgugguccacaucauccagucccgggagcccagccugagcaacuccaaccccgacgagaucgagaucgacuucgagacccucaaggccagcacccugcgcgagcuggagaaguacguguccgccugccuccggaagcgcccgcugaagccccccgccaagaagaucaugaugagcaaggaggagcugcacucccagaagaagcaggagcucgagaagcgccugcuggacgugaacaaccagcucaacagccggaagcgccagaccaaguccgacaagacgcagcccagcaaggcggucgagaacgugucccggcugagcgaguccagcuccagcuccagcuccagcagcgaguccgagagcuccagcuccgaccugagcuccagcgacuccagcgacuccgagagcgagauguucccgaaguucaccgaggugaagcccaacgacucccccagcaaggagaacgucaagaagaugaagaacgagugcauccccccggagggccgcaccggcgugacccagaucggguacugcgugcaggacacgaccuccgccaacaccacccugguccaccagacgacccccagccacgugaugccccccaaccaccaccagcucgccuucaacuaccaggagcuggagcaccugcagaccgugaagaacaucuccccgcuccagauccugccccccagcggcgacuccgagcagcugagcaacgggaucaccgucaugcaccccagcggcgacuccgacaccacgaugcucgagagcgagugccaggccccggugcagaaggacaucaagaucaagaacgcggacuccuggaagagccugggcaagcccgugaagcccuccggggucaugaagagcuccgacgagcuguucaaccaguuccggaaggccgccaucgagaaggaggugaaggcccgcacccaggagcucauccggaagcaccuggagcagaacaccaaggagcugaaggccagccaggagaaccagcgcgaccucggcaacgggcugaccguggaguccuucagcaacaagauccagaacaagugcuccggcgaggagcagaaggagcaccagcagagcuccgaggcgcaggacaagagcaagcuguggcuccugaaggaccgggaccuggcccgccagaaggagcaggagcggcgccggcgcgaggccauggucgggacgaucgacaugacccuccaguccgacaucaugaccauguucgagaacaacuucgacuga

SEQ ID NO: 1125 - RNA, 543 nt, Artificial Sequence
  CCDS35455.1_variant
augcaggccgagggccgcgggaccggcgggagcaccggcgacgccgacgggcccggcggcccggggauccccgacggccccgggggcaacgccgggggccccggcgaggccggggccacgggcgggcggggcccgcgcggcgccggggccgcgcgggccuccggcccccgcgggggcgcgccccgggggccccacggcggcgccgcgagcgcccaggacgggcgcugcccgugcggcgcccggcgccccgacucccggcugcucgagcugcacaucaccaugcccuucagcucccccauggaggccgagcuggugcgccggauccucagccgcgacgccgcgccgcugccccggcccggggccguccugaaggacuucaccguguccggcaaccuccuguucauccgccugaccgccgccgaccaccggcagcuccagcugagcaucuccagcugccugcagcagcucucccugcugauguggaucacgcagugcuuccuccccguguuccuggcccaggcgccgagcgggcagcgccgguga

SEQ ID NO: 1126 - RNA, 633 nt, Artificial Sequence
  CAA10196_variant
augcaggccgagggccaggggaccggcgggagcaccggcgacgccgacgggcccggcggccccgggauccccgacggccccgggggcaacgccgggggccccggcgaggccggggccacgggcgggcgcggcccgcggggcgccggggccgcccgcgccuccggcccccgcgggggcgcgccccgggggccccacggcggcgccgcgagcgcccaggacgggcggugcccgugcggcgcccgccggcccgacucccgccugcuccagcugcacaucaccaugcccuucagcucccccauggaggccgagcuggugcggcgcauccucagccgggacgccgcgccgcugccccgccccggggccguccugaaggacuucaccguguccggcaaccuccuguucaugagcgugcgggaccaggaccgcgagggggccggccggaugcgcgucgugggcugggggcugggcuccgccagccccgaggggcagaaggcccgggaccuccgcaccccgaagcacaagguguccgagcagcggcccggcacgcccgggcccccgccgcccgagggcgcgcagggcgacgggugccgcggcgucgccuucaacgugauguucagcgcgccccacaucuga

SEQ ID NO: 1127 - RNA, 1992 nt, Artificial Sequence
  CCDS13459.1_variant
auggccgccaccgagaucagcgugcuguccgagcaguucaccaagaucaaggagcucgagcugaugcccgagaagggccugaaggaggaggagaaggacggggucugccgcgagaaggaccaccggagcccguccgagcucgaggcggagcgcacgagcggcgccuuccaggacuccgugcuggaggaggagguggagcugguccucgcccccagcgaggaguccgagaaguacauccugacccugcagaccgugcacuucaccagcgaggccguggagcuccaggacaugucccugcugagcauccagcagcaggaggggguccagguggugguccagcagcccggccccgggcuccuguggcuggaggagggcccgcggcagucccuccagcagugcguggccaucagcauccagcaggagcuguacagcccccaggagauggaggugcugcaguuccacgcgcucgaggagaacgucaugguggccuccgaggacuccaagcuggccgugagccuggccgagacgaccggccucaucaagcuggaggaggagcaggagaagaaccagcugcucgcggagcgcaccaaggagcagcuguucuucgucgagaccauguccggggacgagcggagcgacgagaucgugcugacgguguccaacagcaacgucgaggagcaggaggaccagcccaccgccggccaggccgacgccgagaaggccaagagcaccaagaaccagcgcaagaccaagggggcgaagggcacguuccacugcgacgugugcauguucaccuccagccggauguccagcuucaaccgccacaugaagacccacaccuccgagaagccccaccucugccaccugugccugaagacguuccggaccgugacccuccugcgcaaccacgucaacacccacacggggacccggccguacaagugcaacgacugcaacauggccuucgugaccagcggcgagcuggugcgccaccggcgcuacaagcacacccacgagaagcccuucaagugcuccaugugcaaguacgccagcgucgaggccuccaagcucaagcggcacgugcgcagccacacgggcgagcggcccuuccagugcugccagugcuccuacgccagccgcgacaccuacaagcugaagcggcacaugcgcacccacuccggggagaagcccuacgagugccacaucugccacacccgguucacgcagagcggcaccaugaagauccacauccugcagaagcacggggagaacgucccgaaguaccagugcccccacugcgcgaccaucaucgcccgcaaguccgaccuccgcgugcacaugcggaaccugcacgccuacagcgccgccgagcugaagugccgcuacugcuccgcgguguuccacgagcgguacgcccucauccagcaccagaagacccacaagaacgagaagcgcuucaagugcaagcacugcagcuacgccugcaagcaggagcggcacaugacggcccacauccgcacccacaccggcgagaagcccuucacgugccuguccugcaacaagugcuuccggcagaagcagcugcucaacgcccacuuccgcaaguaccacgacgcgaacuucauccccaccgucuacaagugcagcaagugcggcaagggguucagccgguggaucaaccugcaccgccacuccgagaagugcggcagcggggaggccaaguccgccgccagcggcaaggggcggcgcacccggaagcgcaagcagaccauccugaaggaggcgaccaagggccagaaggaggccgccaagggcuggaaggaggccgccaacggggacgaggcggccgccgaggaggccuccaccacgaagggcgagcaguucccgggggagauguuccccguggccugccgggagaccaccgcgcgcgugaaggaggaggucgacgagggcgugaccugcgagaugcuccugaacacgauggacaaguga

SEQ ID NO: 1128 - RNA, 2148 nt, Artificial Sequence
  CCDS11368.1_variant
augagccaggugauguccagcccccugcucgccggcgggcacgccgucucccuggcgccgugcgacgagccccgccggacccugcaccccgcccccagcccgucccuccccccccagugcagcuacuacaccacggagggcuggggggcccaggcccugauggcccccgugccgugcaugggcccccccgggcgccugcagcaggcgccccagguggaggccaaggccaccugcuuccucccgucccccggcgagaaggcccugggcacccccgaggaccuggacagcuacaucgacuucucccucgagagccugaaccagaugauccuggagcucgaccccaccuuccagcugcugccgcccgggacgggcgggucccaggcggagcucgcccagagcaccauguccaugcggaagaaggaggagagcgaggcccuggacaucaaguacaucgaggucaccuccgcccgcagccggugccacgacggcccccagcacugcuccagccccuccgugaccccgcccuucgggagccugcgcagcggcggccuccugcugucccgggacgugccccgcgagacgcggagcuccagcgagucccucaucuucagcgggaaccagggccgcgggcaccagcggccccugccgcccuccgagggccugagcccccgccccccgaacucccccagcaucuccauccccugcaugggcagcaaggccuccagcccgcacgggcucggcuccccccuggucgcgagcccccggcuggagaagcgccucgggggccuggccccccagcgggggucccgcaucagcgugcuguccgccagcccggugagcgacgucuccuacauguucggcagcucccagagccuccugcacuccagcaacuccagccaccaguccagcucccggagccuggagucccccgccaacagcuccagcucccuccacagccugggcagcgugucccugugcacccgccccagcgacuuccaggccccccggaacccgacccucaccauggggcagccccgcacgccccacucccccccgcuggcgaaggagcacgccagcuccugcccccccagcaucaccaacuccaugguggacauccccaucguccugaucaacggcugcccggagcccgggagcucccccccccagcggaccccgggccaccagaacagcgugcagcccggggccgccucccccagcaaccccugcccggccacccgcuccaacagccagacgcucuccgacgcgcccuucaccaccugccccgagggcccggcccgcgacaugcagcccaccaugaaguucgugauggacacgagcaaguacugguucaagcccaacaucacccgggagcaggccaucgagcugcugcgcaaggaggagcccggcgccuucgucauccgggacuccagcuccuaccgcgggagcuucggccucgcccugaaggugcaggaggugccggcgagcgcccagucccggcccggggaggacagcaacgaccugauccgccacuuccucaucgaguccagcgccaagggcguccaccugaagggggccgacgaggagcccuacuucggcucccugagcgcguucgugugccagcacuccaucauggcccucgcccugcccugcaagcugaccaucccgcagcgggagcugggcggggccgacggcgccagcgacuccaccgacagccccgcguccugccagaagaagagcgccgggugccacacgcucuaccuguccagcguguccgucgagacccugaccggcgcccucgccgugcagaaggccaucagcaccacguucgagcgcgacauccugcccacccccaccgugguccacuucaaggugaccgagcagggcaucacgcugaccgacguccagcggaagguguucuuccgccggcacuacccgcucaccacccugcgcuucugcgggauggaccccgagcagcggaaguggcagaaguacugcaagcccuccuggaucuucggcuucguggcgaagagccagacggagccccaggagaacgucugccaccuguucgccgaguacgacauggugcagccggccucccaggugaucgggcucgucaccgcccugcugcaggacgccgagcgcauguga

SEQ ID NO: 1129 - RNA, 1302 nt, Artificial Sequence
  AAH06510_variant
auggcccugcgcgugacccggaacagcaagaucaacgccgagaacaaggcgaagaucaacauggccggcgccaagcgcguccccaccgccccggccgcgacguccaagcccgggcuccggccccgcaccgcccugggcgacaucgggaacaaggugagcgagcagcugcaggccaagaugcccaugaagaaggaggccaagccguccgcgaccggcaaggugaucgacaagaagcuccccaagccccuggagaagguccccaugcuggugccggugcccgucagcgagcccgugcccgagccggagcccgagcccgagcccgagccggugaaggaggagaagcucucccccgagcccauccuggucgacaccgccagccccuccccgauggagacgagcgggugcgcccccgccgaggaggaccugugccaggccuucuccgacgugauccucgcggugaacgacgucgacgccgaggacggcgccgaccccaaccugugcagcgaguacgugaaggacaucuacgccuaccugcggcagcucgaggaggagcaggccgugcgccccaaguaccugcugggccgggaggucaccgggaacaugcgcgcgauccucaucgacuggcugguccaggugcagaugaaguuccggcugcuccaggagaccauguacaugaccguguccaucaucgaccgcuucaugcagaacaacugcgugccgaagaagaugcugcagcuggugggcgucacggccauguucaucgccagcaaguacgaggagauguacccgcccgagaucggggacuucgccuucgugaccgacaacaccuacaccaagcaccagauccggcagauggagaugaagauccuccgcgcccugaacuucggccuggggcggccccucccccugcacuuccugcgccgggcguccaagaucggcgagguggacgucgagcagcacacgcucgccaaguaccugauggagcugaccaugcucgacuacgacauggugcacuucccgcccagccagaucgccgccggcgccuucugccuggcgcugaagauccucgacaacggggaguggacccccacccugcagcacuaccuguccuacacggaggagagccuccugcccgucaugcagcaccuggccaagaacguggugauggucaaccagggccucaccaagcacaugaccgugaagaacaaguacgccaccuccaagcacgccaagaucagcacgcugccccagcugaacuccgcgcucgugcaggaccuggccaaggccgucgccaagguguga

SEQ ID NO: 1130 - RNA, 888 nt, Artificial Sequence
  AAA58392_variant
auggagcaccagcugcucugcugcgagguggagaccauccgccgggccuaccccgacgccaaccugcugaacgaccgcguccuccgggcgaugcugaaggccgaggagaccugcgccccgagcguguccuacuucaagugcgugcagaaggagguccugcccagcaugcgcaagaucguggccacguggaugcucgaggugugcgaggagcagaagugcgaggaggaggucuucccccuggccaugaacuaccuggaccgguuccucucccuggagcccgugaagaagucccgccugcagcuccugggcgcgaccugcauguucguggccagcaagaugaaggagaccaucccgcugaccgccgagaagcucugcaucuacacggacaacagcauccggcccgaggagcugcugcagauggagcuccugcuggucaacaagcucaaguggaaccuggccgcgaugacgccccacgacuucaucgagcacuuccuguccaagaugcccgaggccgaggagaacaagcagaucauccgcaagcacgcccagaccuucguggcccucugcgccaccgacgugaaguucaucagcaacccgcccuccauggucgcggccgggagcgugguggccgccguccagggccugaaccugcggucccccaacaacuuccucagcuacuaccgccugacccgguuccugucccgcgugaucaagugcgaccccgacugccuccgggccugccaggagcagaucgaggcgcugcuggagagcucccuccgccaggcccagcagaacauggacccgaaggccgccgaggaggaggaggaggaggaggaggagguggaccuggccugcacccccaccgacguccgggacguggacaucuga

SEQ ID NO: 1131 - RNA, 651 nt, Artificial Sequence
  AAA36601_variant
augcugcgccucagcgagcggaacaugaaggugcugcuggccgccgcgcucaucgccggcuccgucuucuuccugcugcuccccgggccgagcgccgccgacgagaagaagaagggccccaaggugaccgugaaggucuacuucgaccugcgcaucggggacgaggacgugggccgggugaucuucgggcuguucggcaagaccguccccaagacgguggacaacuucguggcccucgcgaccggcgagaagggguucggcuacaagaacuccaaguuccaccgcgucaucaaggacuucaugauccagggcggggacuucacccgcggggacggcaccggcggcaagagcaucuacggggagcgguuccccgacgagaacuucaagcugaagcacuacgggccgggcuggguguccauggccaacgccggcaaggacacgaacgggagccaguucuucaucaccaccgugaagaccgccuggcuggacggcaagcacgucguguucgggaaggugcucgagggcauggaggucgugcggaagguggaguccacgaagaccgacagccgcgacaagccccugaaggacgucaucaucgcggacugcgggaagaucgagguggagaagcccuucgccaucgccaaggaguga

SEQ ID NO: 1132 - RNA, 1044 nt, Artificial Sequence
  AAD10634_variant
augccccgcggccagaaguccaagcugcgggcccgcgagaagcggcgcaaggcccgggaggagacccaggggcucaagguggcgcacgccaccgccgccgagaaggaggagugcccgagcagcucccccguccugggcgacacgcccaccagcucccccgccgcggggaucccgcagaagccccagggcgccccgcccaccaccacggccgccgcggccgugagcugcaccgaguccgacgagggggccaagugccagggcgaggagaacgccagcuucucccaggccaccaccagcacggaguccagcgugaaggaccccgucgcgugggaggccggcaugcugaugcacuucauccuccgcaaguacaagaugcgggagcccaucaugaaggccgacaugcugaaggugguggacgagaaguacaaggaccacuucaccgagauccugaacggggccucccgccggcucgagcuggucuucggccuggaccucaaggaggacaaccccagcgggcacaccuacacccugguguccaagcugaaccucacgaacgacggcaaccugagcaacgacugggacuucccccgcaacgggcugcucaugccgcugcugggcgugaucuuccucaagggcaacuccgccaccgaggaggagaucuggaaguucaugaacguccugggggcguacgacggcgaggagcaccugaucuacggggagccccggaaguucaucacccaggaccucgugcaggagaaguaccugaaguacgagcagguccccaacagcgacccgccccgcuaccaguuccuguggggcccccgggccuacgccgagaccacgaagaugaaggugcucgaguuccuggccaagaugaacggcgccacgccccgcgacuuccccucccacuacgaggaggcgcugcgggacgaggaggagcgcgcccaggugcggagcagcgugcgcgcccggcgccggaccaccgccaccaccuuccgcgcccgcucccgggcgccguucagccgcuccagccaccccauguga

SEQ ID NO: 1133 - RNA, 2436 nt, Artificial Sequence
  BAF91373_variant
auggagagccagggcgugcccccggggcccuaccgcgccaccaagcuguggaacgaggucaccacguccuuccgggccggcaugccccuccgcaagcaccggcagcacuucaagaaguacgggaacugcuucaccgcgggcgaggccguggacuggcuguacgaccugcuccgcaacaacagcaacuucgggcccgaggugacccggcagcagaccauccagcugcugcgcaaguuccucaagaaccacgucaucgaggacaucaagggccgguggggcuccgagaacguggacgacaacaaccagcuguuccgcuucccggccacgagcccccugaagacccucccccggcgcuaccccgagcugcggaagaacaacaucgagaacuucuccaaggacaaggacagcaucuucaagcugcgcaaccucucccggcgcaccccgaagcggcacgggcugcaccugagccaggagaacggcgagaagaucaagcacgagaucaucaacgaggaccaggagaacgccaucgacaaccgcgagcucucccaggaggacguggaggaggucuggcgguacgugauccugaucuaccugcagaccauccucggggugcccagccuggaggaggucaucaaccccaagcaggucaucccccaguacaucauguacaacauggccaacacguccaagcgcggcguggugauccugcagaacaagagcgacgaccucccgcacugggugcuguccgcgaugaagugccuggccaacuggccccggagcaacgacaugaacaaccccaccuacgugggguucgagcgcgacgucuuccggaccaucgccgacuacuuccucgaccugcccgagccgcugcucaccuucgaguacuacgagcuguucgugaacauccugguggucugcggcuacaucacgguguccgaccgcagcuccggcauccacaagauccaggacgacccccagagcuccaaguuccuccaccugaacaaccugaacagcuucaagagcaccgagugccuccugcugucccuccugcaccgcgagaagaacaaggaggagagcgacuccaccgagcggcugcagaucagcaaccccggguuccaggagcgcugcgccaagaagaugcagcucgugaaccugcggaaccgccgggucuccgcgaacgacaucaugggcgggagcugccacaaccugaucggccucuccaacaugcacgaccugagcuccaacagcaagccccgcugcugcucccuggagggcaucguggacgugccggggaacagcuccaaggaggccagcuccgucuuccaccagagcuuccccaacaucgagggccagaacaacaagcuguuccuggaguccaagcccaagcaggaguuccugcucaaccugcacagcgaggagaacauccagaagcccuucuccgccggguucaagcggaccagcacgcugaccgugcaggaccaggaggagcugugcaacggcaagugcaagagcaagcagcucugccgcucccagagccugcugcuccgguccagcacccgccggaacuccuacaucaacaccccggucgccgagaucaucaugaagcccaacguggggcagggcagcacguccgugcagaccgccauggagagcgagcugggcgaguccagcgcgaccaucaacaagcgccugugcaaguccaccaucgagcucagcgagaacucccugcugcccgccagcuccaugcucacggggacccagagccugcugcagccccaccucgagcgggucgccaucgacgcccugcagcugugcugccuccugcugccgccgcccaaccgccggaagcuccagcugcugaugcgcaugaucucccggaugagccagaacguggacaugcccaagcuccacgacgccaugggcacccgcagccugaugauccacaccuucucccggugcgugcugugcugcgcggaggaggucgaccucgacgagcugcuggccgggcgccucgugagcuuccugauggaccaccaccaggagauccuccaggugcccuccuaccuccagacggccgucgagaagcaccuggacuaccugaagaagggccacaucgagaaccccggggacggccucuucgcgccccugccgaccuacagcuacugcaagcagaucuccgcccaggaguucgacgagcagaaggugagcaccucccaggccgccaucgccgagcugcucgagaacaucaucaagaaccgcagccugccccugaaggagaagcggaagaagcucaagcaguuccagaaggaguacccccugaucuaccagaagcgcuuccccaccacggaguccgaggccgcccuguucggcgacaagccgaccaucaagcagcccaugcucauccugcggaagcccaaguuccgcagccugcgguga

SEQ ID NO: 1134 - RNA, 297 nt, Artificial Sequence
  AAA46940_variant
augcacggcgacacccccacccugcacgaguacaugcucgaccugcagccggagacgaccgaccuguacugcuacgagcagcucaacgacagcuccgaggaggaggacgagaucgacgggcccgccggccaggccgagcccgaccgcgcgcacuacaacaucgugaccuucugcugcaagugcgacagcacccugcggcugugcguccaguccacgcacguggacauccgcacccucgaggaccugcugauggggacccucggcaucgugugccccaucugcagccagaagccguga

SEQ ID NO: 1135 - RNA, 318 nt, Artificial Sequence
  AAA46947_variant
augcacggccccaaggccacccugcaggacaucgugcuccaccuggagccgcagaacgagauccccgucgaccugcucugccacgagcagcugagcgacuccgaggaggagaacgacgagaucgacggggugaaccaccagcaccuccccgcccgccgggcggagccccagcgccacaccaugcucugcaugugcugcaagugcgaggcccggaucaagcugguggucgagagcuccgccgacgaccugcgcgccuuccagcagcuguuccugaacacgcugagcuucgugugcccguggugcgccucccagcaguga

SEQ ID NO: 1136 - RNA, 297 nt, Artificial Sequence
  AAA46951_variant
augcgcggcgagacccccacccugcaggacuacgugcucgaccugcagccggaggccacggaccugcacugcuacgagcagcuccccgacagcuccgacgaggaggacgucaucgacagccccgccgggcaggcggagcccgacaccuccaacuacaacaucgugaccuucugcugccagugcaagagcacccugcggcugugcgugcaguccacgcaggucgacauccgcauccuccaggagcugcugaugggcagcuucgggaucgugugcccgaacugcuccacccggcucuga

SEQ ID NO: 1137 - RNA, 294 nt, Artificial Sequence
  AAA46959_variant
augcgcggccacaagcccacccugaaggaguacgugcucgaccuguacccggagcccaccgaccuguacugcuacgagcagcucagcgacuccagcgacgaggacgaggggcuggaccggcccgacggccaggcccagcccgccacggcggacuacuacaucgugaccugcugccacacgugcaacaccaccguccgccugugcgugaacuccaccgccagcgaccuccggaccauccagcagcugcugauggggaccgucaacaucgugugcccgacgugcgcccagcaguga

SEQ ID NO: 1138 - RNA, 300 nt, Artificial Sequence
  AAA46967_variant
augcacggcgagaucaccacccugcaggacuacgugcucgaccuggagcccgaggccacggaccuguacugcuacgagcagcucugcgacagcuccgaggaggaggaggacaccaucgacgggccggccggccaggcgaagcccgacaccagcaacuacaacaucgucaccuccugcugcaagugcgaggccacgcugcgccugugcgugcagagcacccacaucgacauccggaagcucgaggaccugcugauggggaccuucggcaucgugugccccgggugcucccagcgcgccuga

SEQ ID NO: 1139 - RNA, 330 nt, Artificial Sequence
  AAA47051_variant
augcgcggccccaagccgacccugcaggagaucgugcucgaccugugccccuacaacgagauccagcccgucgaccuggugugccacgagcagcucggggagagcgaggacgagaucgacgagcccgaccacgccgugaaccaccagcaccagcugcuggcccggcgcgacgagccgcagcggcacaccauccagugcuccugcugcaagugcaacaacacgcuccagcuggucguggaggcgagccgcgacacccugcggcagcuccagcagcuguucauggacucccugggcuucgugugccccuggugcgccaccgccaaccaguga

SEQ ID NO: 1140 - RNA, 321 nt, Artificial Sequence
  CAA52574_variant
augcacggcccccgcgagacccugcaggagaucgugcuccaccuggagccgcagaacgagcuggaccccgucgaccuccugugcuacgagcagcugagcgaguccgaggaggagaacgacgaggccgacggggugagccacgcccagcuccccgcgcggcgcgccgagccccagcggcacaagauccugugcgugugcugcaagugcgacggccgcaucgagcugaccgucgaguccagcgccgaggaccuccggacgcugcagcagcuguuccucuccacccugagcuucgugugcccguggugcgccaccaaccaguga

SEQ ID NO: 1141 - RNA, 306 nt, Artificial Sequence
  M62877.1_variant
augcgcggcaacgugccccagcugaaggacgucgugcuccaccugaccccgcagaccgagaucgaccugcagugcuacgagcaguucgacagcuccgaggaggaggacgagguggacaacaugcgggaccagcuccccgagcgccgggccgggcaggccacgugcuaccgcaucgaggcgcccugcugccggugcagcuccgucgugcagcuggccguggagagcuccggcgacacccugcgcgucgugcagcagaugcucaugggggagcugagccuggugugccccugcugcgccaacaacuga

SEQ ID NO: 1142 - RNA, 300 nt, Artificial Sequence
  CAA52586_variant
augcgcggcgacaaggccaccaucaaggacuacauccuggaccuccagcccgagaccacggaccugcacugcuacgagcagcugggggacagcuccgacgaggaggacaccgacggcguggaccggccggacgggcaggccgagcaggcgaccagcaacuacuacaucgucaccuacugccacuccugcgacagcacgcuccgccugugcauccacuccaccgccaccgaccugcggacccuccagcagaugcugcugggcacgcuccagguggugugccccgggugcgcccgccuguga

SEQ ID NO: 1143 - RNA, 318 nt, Artificial Sequence
  CAA52597_variant
augcacggcaaggugcccacccugcaggacgucgugcucgagcugaccccgcagacggagaucgaccugcagugcaacgagcagcucgacagcuccgaggacgaggacgaggacgagguggaccaccuccaggagcgcccccagcaggcccggcaggccaagcagcacacgugcuaccugauccacguccccugcugcgagugcaaguucguggugcagcuggacauccagagcaccaaggaggaccugcgcgucgugcagcagcugcucaugggggcgcugaccgugaccugcccccugugcgccuccagcaacuga

SEQ ID NO: 1144 - RNA, 297 nt, Artificial Sequence
  AAF13691_variant
augcgcggcaacaaccccacccugcgggaguacauccucgaccugcacccggagcccaccgaccuguucugcuacgagcagcucugcgacagcuccgacgaggacgagaucgggcuggaccgccccgacggccaggcccagcccgccacggcgaacuacuacaucgugaccugcugcuacacgugcgacaccaccguccggcugugcaucaacagcaccaccaccgacgugcgcacgcuccagcagcugcugauggggaccugcaccaucgugugcccguccugcgcccagcaguga

SEQ ID NO: 1145 - RNA, 324 nt, Artificial Sequence
  ACL12335_variant
augcacggccccaaggccacccugugcgacaucgugcucgaccuggagccgcagaacuacgaggaggucgaccuggugugcuacgagcagcuccccgacagcgacuccgagaacgagaaggacgagcccgacggggugaaccacccccugcugcucgcccgccgggcggagccgcagcgccacaacaucgucugcgugugcugcaagugcaacaaccagcugcagcugguggucgagaccagccaggacggccuccgggcccugcagcagcuguucauggacacgcucuccuucgugugcccccugugcgccgccaaccaguga

SEQ ID NO: 1146 - RNA, 318 nt, Artificial Sequence
  AAA79500_variant
augcacggcaagguccccacccugcaggaggucauccucgagcuggccccgcagaccgagaucgaccugcagugcaacgagcagcucgacagcuccgaggacgaggacgaggacgagaucgaccaccuccuggagcgcccccagcaggcccggcaggcggagcagcacaagugcuaccugauccacgugcccugcugcaagugcgagcuggugguccagcuggacauccagagcacgaaggaggagcuccgcguggugcagcagcugcugaugggggcccucaccgugaccugcccccugugcgccuccagcaaguga

SEQ ID NO: 1147 - RNA, 1392 nt, Artificial Sequence
  AAF80488_variant
augggcaaggagaagacgcacaucaacaucguggucaucgggcacguggacagcggcaaguccaccacgaccgggcaccugaucuacaagugcggcgggaucgacaagcgcaccaucgagaaguucgagaaggaggccgccgagaugggcaagggcagcuucaaguacgcgugggugcucgacaagcugaaggccgagcgggagcgcgggaucaccaucgacaucucccuguggaaguucgagacgaccaaguacuacaucaccaucaucgacgcccccggccaccgggacuucaucaagaacaugaucaccgggacgagccaggccgacugcgccguccucaucguggcggccggcgugggggaguucgaggccggcaucuccaagaacggccagacccgcgagcacgcccugcuggcguacacccucggggucaagcagcugaucgugggcgugaacaagauggacagcaccgagccggccuacuccgagaagcgguacgacgagaucgucaaggaggugagcgccuacaucaagaagaucggguacaaccccgccacggugcccuucguccccaucuccggcuggcacggcgacaacaugcuggagccgagccccaacaugcccugguucaagggguggaagguggagcgcaaggagggcaacgccuccggggugagccuccuggaggcgcuggacaccauccugcccccgacccggcccaccgacaagccccugcgccugccccuccaggacgucuacaagaucggcgggaucggcacggugccggugggccgggucgagaccgggauccugcgccccggcaugguggugaccuucgcccccgucaacaucaccacggaggugaaguccguggagaugcaccacgaggcccugagcgaggcccuccccggggacaacgucggcuucaacgugaagaacgucuccgugaaggacauccggcgcgggaacgugugcggcgacagcaaguccgacccgccccaggaggccgcgcaguucaccagccaggucaucauccugaaccaccccggccagaucuccgccggguacagccccgugaucgacugccacaccgcccacaucgccugcaaguucgccgagcugaaggagaagaucgaccggcgcagcggcaagaagcucgaggacaacccgaagucccucaagagcggggacgcggccaucguggagaugguccccggcaagcccaugugcguggaguccuucagccaguacccgccccuggggcgguucgccgugcgcgacaugcggcagaccgucgccgugggcgugaucaagaacgucgagaagaaguccggcggggccggcaaggugaccaagagcgcgcagaaggcccagaaggccgggaaguga

SEQ ID NO: 1148 - RNA, 2919 nt, Artificial Sequence
  EAW51573_variant
auggacaccgaccuguacgacgaguucggcaacuacaucgggcccgagcucgacagcgacgaggacgacgacgagcugggccgcgagaccaaggaccuggacgagauggacgacgacgacgacgacgacgacgugggggaccacgacgacgaccacccgggcauggaggucgugcuccacgaggacaagaaguacuaccccacggccgaggagguguacgggcccgaggucgagaccaucgugcaggaggaggacacccagccccugaccgagccgaucaucaagcccgugaagacgaagaaguucacccugauggagcagacccuccccgucaccguguacgagauggacuuccuggccgaccugauggacaacuccgagcucauccggaacgugacgcugugcggccaccuccaccacggcaagaccugcuucgucgacugccucaucgagcagacccaccccgagauccgcaagcgguacgaccaggaccugugcuacaccgacauccuguucacggagcaggagcgcggggugggcaucaagagcaccccggugaccgucgugcuccccgacaccaaggggaaguccuaccuguucaacaucauggacacgcccggccacgugaacuucagcgacgaggucaccgcggggcugcggaucuccgacggcguggugcuguucaucgacgccgccgagggcgucaugcugaacaccgagcgccugaucaagcacgccgugcaggagcggcucgccgugaccgucugcaucaacaagaucgaccgccugauccuggagcucaagcugcccccgacggacgcguacuacaagcugcggcacaucguggacgaggugaacgggcucaucagcauguacuccaccgacgagaaccugauccugagcccccuccugggcaacgucugcuucuccagcucccaguacagcaucugcuucacccugggguccuucgccaagaucuacgccgacaccuucggcgacaucaacuaccaggaguucgccaagcgccucuggggcgacaucuacuucaaccccaagacgcggaaguucaccaagaaggcgcccaccagcuccagccagcgcuccuucguggaguucauccuggagccgcuguacaagauccucgcccaggucgugggggacguggacaccagccugccccggacgcuggacgagcucggcauccaccugaccaaggaggagcugaagcucaacauccgcccccugcugcggcucgucugcaagaaguucuucggggaguucaccggcuucguggacaugugcgugcagcacauccccuccccgaaggucggggccaagcccaagaucgagcacaccuacacgggcggcguggacagcgaccugggggaggccaugagcgacugcgaccccgacggcccccugaugugccacaccaccaagauguacuccaccgacgacggggugcaguuccacgccuucggccgcguccucagcgggacgauccacgcgggccagccggugaaggugcugggcgagaacuacacccuggaggacgaggaggacucccagaucugcaccgucgggcggcuguggaucagcguggcccgcuaccacaucgaggugaaccggguccccgccggcaacugggugcucaucgaggggguggaccagcccaucgucaagaccgccaccaucacggagccccgcggcaacgaggaggcccagaucuuccggccgcugaaguucaacaccaccuccgugaucaagaucgcgguggagcccgucaaccccagcgagcugccgaagaugcucgacgggcugcgcaaggugaacaaguccuaccccagccugaccacgaagguggaggaguccggcgagcacgucauccucggcaccggggagcuguaccuggacugcgugaugcacgaccuccgcaagauguacagcgagaucgacaucaagguggccgaccccgucgugaccuucugcgagaccguggucgagacguccagccugaagugcuucgccgagacccccaacaagaagaacaagaucaccaugaucgccgagccgcuggagaagggccucgccgaggacaucgagaacgagguggugcagaucaccuggaaccggaagaagcugggggaguucuuccagacgaaguacgacugggaccugcucgcggcccgcuccaucugggccuucggccccgacgccaccggccccaacauccuggucgacgacacccugcccagcgagguggacaaggcccuccugggguccgugaaggacagcaucguccagggcuuccagugggggacccgggagggcccgcugugcgacgagcucauccgcaacgugaaguucaagauccuggacgcgguggucgcccaggagccccugcaccgcgggggcggccagaucauccccacggcccggcgggugguguacuccgccuuccucauggcgacgccccgccugauggagccguacuacuucgucgaggugcaggcccccgccgacugcgugagcgccgucuacaccgugcuggcccggcgccgggggcacgugacccaggacgcgcccauccccggcuccccgcucuacaccaucaaggccuucauccccgccaucgacagcuucggguucgagaccgaccugcgcacccacacccagggccaggccuucagccuguccgucuuccaccacuggcagaucgugcccggggacccccucgacaagagcaucgugauccggccgcuggagccccagcccgcgccccaccuggcccgcgaguucaugaucaagacgcggcgccggaagggccucuccgaggacgucagcaucuccaaguucuucgacgacccgaugcugcuggagcucgccaagcaggacgugguccugaacuaccccauguga

SEQ ID NO: 1149 - RNA, 1971 nt, Artificial Sequence
  EAW50963_variant
augcgccccagcggcaccgccggggccgcgcugcucgcccugcuggccgcccucugcccggccucccgggcgcuggaggagaagaaggugugccagggcaccagcaacaagcugacgcagcucgggaccuucgaggaccacuuccugucccugcagcgcauguucaacaacugcgaggucgugcucggcaaccuggagaucaccuacgugcagcggaacuacgaccugagcuuccucaagaccauccaggaggucgccggguacgugcugaucgcccugaacacgguggagcgcaucccccucgagaaccugcagaucauccggggcaacauguacuacgagaacuccuacgcccuggcgguccucagcaacuacgacgccaacaagaccggccugaaggagcugcccaugcgcaaccuccaggagauccugcacggggccgugcgguucuccaacaaccccgcccugugcaacguggagagcauccaguggcgcgacaucgucuccagcgacuuccucuccaacaugagcauggacuuccagaaccaccugggcuccugccagaagugcgacccgagcugccccaacggguccugcuggggcgccggggaggagaacugccagaagcugaccaagaucaucugcgcgcagcagugcagcggccggugccgcggcaagucccccagcgacugcugccacaaccagugcgccgccgggugcaccggcccccgggaguccgacugccucgugugccgcaaguuccgggacgaggccacgugcaaggacacgugcccgccccugaugcuguacaaccccaccaccuaccagauggacgugaaccccgaggggaaguacagcuucggcgcgaccugcgucaagaagugcccgcgcaacuacguggugaccgaccacggcagcugcguccgggccugcggggccgacuccuacgagauggaggaggacggcgugcgcaagugcaagaagugcgaggggcccugccggaaggugugcaacggcaucgggaucggcgaguucaaggacagccucuccaucaacgccaccaacaucaagcacuucaagaacugcaccagcaucuccggcgaccugcacauccugcccgucgccuuccgcggggacagcuucacgcacacgcccccgcucgacccccaggagcuggacauccugaagaccgugaaggagaucaccggcuuccuccugauccaggccuggcccgagaaccggaccgaccugcacgcguucgagaaccucgagaucauccgcgggcggaccaagcagcacggccaguucucccuggccguggucagccugaacaucaccucccucgggcugcgcagccugaaggagaucuccgacggcgacgugaucaucagcggcaacaagaaccucugcuacgccaacaccaucaacuggaagaagcuguucgggacguccggccagaagaccaagaucaucagcaaccgcggggagaacuccugcaaggccaccggccaggugugccacgcccugugcagccccgaggggugcuggggcccggagccccgggacugcgucuccugccgcaacgugagccggggccgcgagugcgucgacaagugcaaccuccuggagggggagccccgggaguucguggagaacuccgagugcauccagugccaccccgagugccugccgcaggcgaugaacaucacgugcaccggccgcgggcccgacaacugcauccagugcgcccacuacaucgacggcccccacugcgugaagaccugccccgccggcgucaugggggagaacaacacccugguguggaaguacgccgacgcgggccacgugugccaccucugccacccgaacugcaccuacgggugcacgggccccgggcuggagggcugccccaccaacggcagcuacaucgucagccacuucccgcgguccuucuacaagaugagcgugcac

SEQ ID NO: 1150 - RNA, 3411 nt, Artificial Sequence
  ADL28125_variant
augcgccccagcggcaccgccggggccgcgcugcucgcccugcuggccgcccucugcccggccucccgggcgcuggaggagaagaaggugugccagggcaccagcaacaagcugacgcagcucgggaccuucgaggaccacuuccugucccugcagcgcauguucaacaacugcgaggucgugcucggcaaccuggagaucaccuacgugcagcggaacuacgaccugagcuuccucaagaccauccaggaggucgccggguacgugcugaucgcccugaacacgguggagcgcaucccccucgagaaccugcagaucauccggggcaacauguacuacgagaacuccuacgcccuggcgguccucagcaacuacgacgccaacaagaccggccugaaggagcugcccaugcgcaaccuccaggagauccugcacggggccgugcgguucuccaacaaccccgcccugugcaacguggagagcauccaguggcgcgacaucgucuccagcgacuuccucuccaacaugagcauggacuuccagaaccaccugggcuccugccagaagugcgacccgagcugccccaacggguccugcuggggcgccggggaggagaacugccagaagcugaccaagaucaucugcgcgcagcagugcagcggccggugccgcggcaagucccccagcgacugcugccacaaccagugcgccgccgggugcaccggcccccgggaguccgacugccucgugugccgcaaguuccgggacgaggccacgugcaaggacacgugcccgccccugaugcuguacaaccccaccaccuaccagauggacgugaaccccgaggggaaguacagcuucggcgcgaccugcgucaagaagugcccgcgcaacuacguggugaccgaccacggcagcugcguccgggccugcggggccgacuccuacgagauggaggaggacggcgugcgcaagugcaagaagugcgaggggcccugccggaaggugugcaacggcaucgggaucggcgaguucaaggacagccucuccaucaacgccaccaacaucaagcacuucaagaacugcaccagcaucuccggcgaccugcacauccugcccgucgccuuccgcggggacagcuucacgcacacgcccccgcucgacccccaggagcuggacauccugaagaccgugaaggagaucaccggcuuccuccugauccaggccuggcccgagaaccggaccgaccugcacgcguucgagaaccucgagaucauccgcgggcggaccaagcagcacggccaguucucccuggccguggucagccugaacaucaccucccucgggcugcgcagccugaaggagaucuccgacggcgacgugaucaucagcggcaacaagaaccucugcuacgccaacaccaucaacuggaagaagcuguucgggacguccggccagaagaccaagaucaucagcaaccgcggggagaacuccugcaaggccaccggccaggugugccacgcccugugcagccccgaggggugcuggggcccggagccccgggacugcgucuccugccgcaacgugagccggggccgcgagugcgucgacaagugcaaccuccuggagggggagccccgggaguucguggagaacuccgagugcauccagugccaccccgagugccugccgcaggcgaugaacaucacgugcaccggccgcgggcccgacaacugcauccagugcgcccacuacaucgacggcccccacugcgugaagaccugccccgccggcgucaugggggagaacaacacccugguguggaaguacgccgacgcgggccacgugugccaccucugccacccgaacugcaccuacgggugcacgggccccgggcuggagggcugccccaccaacggcccgaagauccccagcaucgccaccgggauggucggcgcccugcuccugcugcucgugguggcccuggggaucggccuguucaugcggcgccggcacaucguccgcaagcggacccuccgccggcugcugcaggagcgcgagcucguggagccccugacgcccagcggggaggccccgaaccaggcgcugcuccggauccugaaggagaccgaguucaagaagaucaaggugcugggcuccggcgccuucgggaccgucuacaagggccucuggauccccgagggggagaaggugaagauccccguggccaucaaggagcugcgcgaggccaccagccccaaggccaacaaggagauccuggacgaggcguacgucauggccuccguggacaacccgcacgugugccggcuccugggcaucugccugaccagcacgguccagcucaucacccagcugaugcccuucgggugccugcucgacuacgugcgcgagcacaaggacaacaucggcucccaguaccugcugaacuggugcgugcagaucgccaagggcaugaacuaccucgaggaccggcgccugguccaccgcgaccuggccgcccggaacgugcucgugaagacgccccagcacgucaagaucaccgacuucgggcuggcgaagcugcucggcgccgaggagaaggaguaccacgccgagggcgggaaggugcccaucaaguggauggcccuggagagcauccugcaccgcaucuacacccaccaguccgacguguggagcuacggggucaccgugugggagcucaugaccuucggcuccaagccguacgacggcauccccgcgagcgagaucuccagcauccuggagaagggggagcggcugccccagcccccgaucugcaccaucgacguguacaugaucauggucaagugcuggaugaucgacgccgacucccgccccaaguuccgggagcucaucaucgaguucagcaagauggcccgcgacccccagcgguaccuggugauccagggcgacgagcgcaugcaccuccccuccccgacggacagcaacuucuaccgggcccugauggacgaggaggacauggacgacguggucgacgccgacgaguaccugaucccccagcagggguucuucuccagccccagcaccucccgcacgccccugcucagcucccugagcgcgaccuccaacaacagcaccguggccugcaucgaccggaacggccugcaguccugcccgaucaaggaggacagcuuccuccagcgcuacuccagcgaccccaccggcgcccugaccgaggacuccaucgacgacaccuuccugcccgugccgggggaguggcucgucuggaagcagagcugcuccagcacguccagcacccacuccgccgccgcgagccugcagugccccucccaggugcugccgcccgccagccccgagggcgagaccguggccgaccuccagacccaguga

SEQ ID NO: 1151 - RNA, 150 nt, Artificial Sequence
  CCO13722_variant
augugcgcgaccugcgccauccagaccgcccccacgggcccgaacaagagcucccugagcgacuucucccucccccugaagcugcacuuccucagcaccaucuccaucagccccuucgccuccaacaaggugcugacccuguucaucuga

SEQ ID NO: 1152 - RNA, 1218 nt, Artificial Sequence
  CCDS47587.1_variant
augcgccccagcggcaccgccggggccgcgcugcucgcccugcuggccgcccucugcccggccucccgggcgcuggaggagaagaaggugugccagggcaccagcaacaagcugacccagcucgggaccuucgaggaccacuuccugucccugcagcgcauguucaacaacugcgaggucgugcucggcaaccuggagaucaccuacgugcagcggaacuacgaccugagcuuccucaagaccauccaggaggucgccggguacgugcugaucgcccugaacacgguggagcgcaucccccucgagaaccugcagaucauccggggcaacauguacuacgagaacuccuacgcccuggcgguccucagcaacuacgacgccaacaagaccggccugaaggagcugcccaugcgcaaccuccaggagauccugcacggggccgugcgguucuccaacaaccccgcccugugcaacguggagagcauccaguggcgcgacaucgucuccagcgacuuccucuccaacaugagcauggacuuccagaaccaccugggcuccugccagaagugcgacccgagcugccccaacggguccugcuggggcgccggggaggagaacugccagaagcugaccaagaucaucugcgcgcagcagugcagcggccggugccgcggcaagucccccagcgacugcugccacaaccagugcgccgccgggugcaccggcccccgggaguccgacugccucgugugccgcaaguuccgggacgaggccacgugcaaggacacgugcccgccccugaugcuguacaaccccaccaccuaccagauggacgugaaccccgaggggaaguacagcuucggcgcgaccugcgucaagaagugcccgcgcaacuacguggugaccgaccacggcagcugcguccgggccugcggggccgacuccuacgagauggaggaggacggcgugcgcaagugcaagaagugcgaggggcccugccggaaggugugcaacggcaucgggaucggcgaguucaaggacagccucuccaucaacgccaccaacaucaagcacuucaagaacugcaccagcaucuccggcgaccugcacauccugcccgucgccuuccgcggggacagcuucacgcacacgcccccgcucgacccccaggagcuggacauccugaagaccgugaaggagaucaccggccucuccuga

SEQ ID NO: 1153 - RNA, 3633 nt, Artificial Sequence
  AAG35789_variant
augcgccccagcggcaccgccggggccgcccugcucgcccugcuggccgcccucugcccggccucccgggcgcuggaggagaagaaggugugccagggcaccagcaacaagcugacgcagcucgggaccuucgaggaccacuuccugucccugcagcgcauguucaacaacugcgaggucgugcucggcaaccuggagaucaccuacgugcagcggaacuacgaccugagcuuccucaagaccauccaggaggucgccggguacgugcugaucgcccugaacacgguggagcgcaucccccucgagaaccugcagaucauccggggcaacauguacuacgagaacuccuacgcccuggcgguccucagcaacuacgacgccaacaagaccggccugaaggagcugcccaugcgcaaccuccaggagauccugcacggggccgugcgguucuccaacaaccccgcccugugcaacguggagagcauccaguggcgcgacaucgucuccagcgacuuccucuccaacaugagcauggacuuccagaaccaccugggcuccugccagaagugcgacccgagcugccccaacggguccugcuggggcgccggggaggagaacugccagaagcugaccaagaucaucugcgcgcagcagugcagcggccggugccgcggcaagucccccagcgacugcugccacaaccagugcgccgccgggugcaccggcccccgggaguccgacugccucgugugccgcaaguuccgggacgaggccacgugcaaggacacgugcccgccccugaugcuguacaaccccaccaccuaccagauggacgugaaccccgaggggaaguacagcuucggcgcgaccugcgucaagaagugcccgcgcaacuacguggugaccgaccacggcagcugcguccgggccugcggggccgacuccuacgagauggaggaggacggcgugcgcaagugcaagaagugcgaggggcccugccggaaggugugcaacggcaucgggaucggcgaguucaaggacagccucuccaucaacgccaccaacaucaagcacuucaagaacugcaccagcaucuccggcgaccugcacauccugcccgucgccuuccgcggggacagcuucacgcacacgcccccgcucgacccccaggagcuggacauccugaagaccgugaaggagaucaccggcuuccuccugauccaggccuggcccgagaaccggaccgaccugcacgcguucgagaaccucgagaucauccgcgggcggaccaagcagcacggccaguucucccuggccguggucagccugaacaucaccucccucgggcugcgcagccugaaggagaucuccgacggcgacgugaucaucagcggcaacaagaaccucugcuacgccaacaccaucaacuggaagaagcuguucgggacguccggccagaagaccaagaucaucagcaaccgcggggagaacuccugcaaggccaccggccaggugugccacgcccugugcagccccgaggggugcuggggcccggagccccgggacugcgucuccugccgcaacgugagccggggccgcgagugcgucgacaagugcaaccuccuggagggggagccccgggaguucguggagaacuccgagugcauccagugccaccccgagugccugccgcaggcgaugaacaucacgugcaccggccgcgggcccgacaacugcauccagugcgcccacuacaucgacggcccccacugcgugaagaccugccccgccggcgucaugggggagaacaacacccugguguggaaguacgccgacgcgggccacgugugccaccucugccacccgaacugcaccuacgggugcacgggccccgggcuggagggcugccccaccaacggcccgaagauccccagcaucgccaccgggauggucggcgcccugcuccugcugcucgugguggcccuggggaucggccuguucaugcggcgccggcacaucguccgcaagcggacccuccgccggcugcugcaggagcgcgagcucguggagccccugacgcccagcggggaggccccgaaccaggcgcugcuccggauccugaaggagaccgaguucaagaagaucaaggugcugggcuccggcgccuucgggaccgucuacaagggccucuggauccccgagggggagaaggugaagauccccguggccaucaaggagcugcgcgaggccaccagccccaaggccaacaaggagauccuggacgaggcguacgucauggccuccguggacaacccgcacgugugccggcuccugggcaucugccugaccagcacgguccagcucaucacccagcugaugcccuucgggugccugcucgacuacgugcgcgagcacaaggacaacaucggcucccaguaccugcugaacuggugcgugcagaucgccaagggcaugaacuaccucgaggaccggcgccugguccaccgcgaccuggccgcccggaacgugcucgugaagacgccccagcacgucaagaucaccgacuucgggcuggcgaagcugcucggcgccgaggagaaggaguaccacgccgagggcgggaaggugcccaucaaguggauggcccuggagagcauccugcaccgcaucuacacccaccaguccgacguguggagcuacggggucaccgugugggagcucaugaccuucggcuccaagccguacgacggcauccccgcgagcgagaucuccagcauccuggagaagggggagcggcugccccagcccccgaucugcaccaucgacguguacaugaucauggucaagugcuggaugaucgacgccgacucccgccccaaguuccgggagcucaucaucgaguucagcaagauggcccgcgacccccagcgguaccuggugauccagggcgacgagcgcaugcaccuccccuccccgacggacagcaacuucuaccgggcccugauggacgaggaggacauggacgacguggucgacgccgacgaguaccugaucccccagcagggguucuucuccagccccagcaccucccgcacgccccugcucagcucccugagcgcgaccuccaacaacagcaccguggccugcaucgaccggaacggccugcaguccugcccgaucaaggaggacagcuuccuccagcgcuacuccagcgaccccaccggcgcccugaccgaggacuccaucgacgacaccuuccugcccgugccggaguacaucaaccagagcguccccaagcggcccgccggguccgugcagaaccccguguaccacaaccagccgcucaaccccgcccccagccgcgacccccacuaccaggacccgcacuccacggcggucggcaaccccgaguaccugaacaccgugcagccgaccugcgugaacagcaccuucgacucccccgcccacugggcccagaaggggagccaccagaucucccuggacaaccccgacuaccagcaggacuucuuccccaaggaggccaagcccaacggcaucuucaaggggagcacggccgagaacgcggaguaccuccgggucgcgccccagagcuccgaguucaucggcgccuga

SEQ ID NO: 1154 - RNA, 1395 nt, Artificial Sequence
  AAI18666_variant
auggccgccgaggacgugaucaucugcgcgcagcagugcagcggccgcugccgggggaagucccccagcgacugcugccacaaccagugcgccgccggcugcaccgggccgcgcgaguccgacugccuggucugccggaaguuccgcgacgaggcgaccugcaaggacacgugcccgccccucaugcuguacaaccccaccaccuaccagauggacgugaaccccgagggcaaguacagcuucggggcgaccugcgugaagaagugcccccggaacuacgucgugacggaccacggcuccugcgugcgcgccugcggcgccgacagcuacgagauggaggaggacgggguccggaagugcaagaagugcgagggccccugccgcaaggugugcaacgggaucggcaucggggaguucaaggacucccugagcaucaacgccaccaacaucaagcacuucaagaacugcaccuccaucagcggcgaccuccacauccugcccguggccuuccggggcgacuccuucacccacacgccgccccuggacccccaggagcucgacauccugaagaccgucaaggagaucaccggguuccugcucauccaggccuggcccgagaaccgcaccgaccugcacgccuucgagaaccuggagaucauccggggccgcacgaagcagcacgggcaguucagccucgccguggugucccugaacaucaccagccugggccuccggucccugaaggagaucagcgacggcgacgucaucaucuccgggaacaagaaccugugcuacgccaacaccaucaacuggaagaagcuguucggcaccagcgggcagaagacgaagaucaucuccaaccgcggcgagaacagcugcaaggccaccggccaggugugccacgcgcucugcagcccggaggggugcuggggccccgagccccgggacugcguguccugccgcaacgucagccgggggcgcgagugcguggacaagugcaaccugcucgagggcgagccccgggaguucguggagaacuccgagugcauccagugccacccggagugccugccccaggccaugaacaucacgugcaccgggcgcggccccgacaacugcauccagugcgcccacuacaucgacgggccccacugcgucaagaccugcccggccggcgugaugggcgagaacaacacccugguguggaaguacgccgacgcggggcacgucugccaccucugccaccccaacugcaccuacggcugcaccgggcccggccuggaggggugccccacgaacggcccgaagauccccagcaucgccaccggcauggugggggcccugcuccugcugcucguggucgcccugggcaucgggccccugcacggccgguga

SEQ ID NO: 1155 - RNA, 3276 nt, Artificial Sequence
  AAH94761_variant
augcgccccagcggcaccgccggggccgcgcugcucgcccugcuggccgcccucugccccgccucccgggcgcuggaggagaagaaggugugccagggcaccagcaacaagcugacgcagcucgggaccuucgaggaccacuuccugucccugcagcgcauguucaacaacugcgaggucgugcucggcaaccuggagaucaccuacgugcagcggaacuacgaccugagcuuccucaagaccauccaggaggucgccggguacgugcugaucgcccugaacacgguggagcgcaucccccucgagaaccugcagaucauccggggcaacauguacuacgagaacuccuacgcccuggcgguccucagcaacuacgacgccaacaagaccggccugaaggagcugcccaugcgcaaccuccaggggcagaagugcgaccccuccugcccgaacggcagcugcuggggcgccggggaggagaacugccagaagcugaccaagaucaucugcgcccagcagugcuccgggcggugccgcggcaagagccccuccgacugcugccacaaccagugcgccgcgggcugcaccgggccccgggagagcgacugccuggugugccgcaaguuccgggacgaggccacgugcaaggacacgugcccgccccucaugcuguacaaccccaccaccuaccagauggacgugaaccccgagggcaaguacuccuucggggcgaccugcgucaagaagugcccccgcaacuacguggugaccgaccacggcagcugcguccgggccugcggcgccgacuccuacgagauggaggaggacggggugcgcaagugcaagaagugcgagggcccgugccggaaggugugcaacgggaucggcaucggggaguucaaggacagccuguccaucaacgccaccaacaucaagcacuucaagaacugcaccagcaucuccggcgaccuccacauccugcccgucgccuuccgcggcgacagcuucacgcacaccccgccccuggacccccaggagcucgacauccugaagaccgugaaggagaucaccggguuccugcucauccaggccuggcccgagaaccggacggaccugcacgccuucgagaaccuggagaucauccgcggccggaccaagcagcacgggcaguucagccucgccguggucucccugaacaucaccagccugggccuccgcucccugaaggagaucagcgacggggacgugaucaucuccggcaacaagaaccugugcuacgcgaacaccaucaacuggaagaagcuguucggcacgagcgggcagaagaccaagaucaucuccaaccggggcgagaacagcugcaaggccaccggccaggugugccacgcccugugcucccccgaggggugcugggggcccgagccgcgcgacugcgucagcugccgcaacgugucccggggccgcgagugcguggacaagugcaaccugcucgagggcgagccccgggaguucgucgagaacagcgagugcauccagugccaccccgagugccugccccaggccaugaacaucacgugcaccgggcgcggcccggacaacugcauccagugcgcccacuacaucgacgggccccacugcgugaagaccugccccgcgggcgucaugggcgagaacaacacccugguguggaaguacgccgacgccgggcacgugugccaccucugccaccccaacugcaccuacggcugcacggggccgggccuggaggggugccccaccaacggccccaagaucccguccaucgccaccggcauggucggggcgcugcugcuccugcuggugguggcccucggcaucgggcuguucaugcggcgccggcacaucguccgcaagcggacccugcgccggcuccugcaggagcgcgagcugguggagccccucacgcccagcggcgaggcccccaaccaggcccugcugcggauccucaaggagaccgaguucaagaagaucaaggugcugggguccggcgccuucggcaccgucuacaaggggcuguggaucccggagggcgagaaggugaagauccccguggcgaucaaggagcuccgcgaggccaccagccccaaggccaacaaggagauccuggacgaggccuacgucauggccuccguggacaacccccacgugugccggcugcucgggaucugccugaccagcacgguccagcugaucacccagcucaugccguucggcugccugcuggacuacgugcgcgagcacaaggacaacaucgggucccaguaccuccugaacuggugcgugcagaucgcgaagggcaugaacuaccuggaggaccggcgccucguccaccgggaccuggccgcccgcaacgugcuggugaagacgccccagcacgucaagaucaccgacuucggccucgccaagcugcugggggccgaggagaaggaguaccacgcggagggcgggaaggugcccaucaaguggauggcccucgagagcauccugcaccgcaucuacacccaccagagcgacgugugguccuacggcgucaccgugugggagcugaugaccuucgggagcaagcccuacgacggcaucccggccuccgagaucagcuccauccucgagaagggcgagcggcugccccagccgcccaucugcaccaucgacguguacaugaucauggucaagugcuggaugaucgacgccgacagccgccccaaguuccgggagcugaucaucgaguucuccaagauggcgcgcgacccccagcgguaccucgugauccagggggacgagcgcaugcaccuccccagccccacggacuccaacuucuaccgggcccugauggacgaggaggacauggacgacguggucgacgccgacgaguaccucaucccgcagcagggcuucuucagcucccccagcaccucccgcacgccccugcugagcucccucagcgccaccuccaacaacagcaccguggccugcaucgaccggaacgggcugcagagcugccccaucaaggaggacuccuuccugcagcgcuacagcuccgacccgaccggcgcgcucaccgaggacagcaucgacgacaccuuccugcccgugcccggcgaguggcuggucuggaagcaguccugcagcuccacgagcuccacccacagcgccgccgccucccuccagugcccgagccaggugcugccgcccgccucccccgagggggagaccguggcggaccugcagacccaguga

SEQ ID NO: 1156 - RNA, 216 nt, Artificial Sequence
  CAA34902_variant
augcgccccagcggcaccgccggggccgcgcugcucgcccugcuggccgcccucugcccggccucccgggcgcuggaggagaagaagggcaagggggugagccgccggcugccccgccggccccgcaucgcgccccggaccccgcagcccgcccagccccgcacgggcgcccccgcccgggcccgcgccccggcccggcccuuccucuuccccuga

SEQ ID NO: 1157 - RNA, 720 nt, Artificial Sequence
  AAH10992_variant
augccccugggccacaucaugcgccucgaccuggagaagaucgcccuggaguacaucgugccgugccuccacgaggucggguucugcuaccuggacaacuuccugggcgagguggugggggacugcguccucgagcgggugaagcagcugcacugcaccggcgcccugcgcgacgggcagcucgcgggcccccgggccggcgugagcaagcgccaccuccgcggggaccagaucaccuggaucggcgggaacgaggagggcugcgaggccaucuccuuccugcucagccugaucgaccggcugguccucuacugcgggucccggcugggcaaguacuacgugaaggagcgcagcaaggccaugguggccugcuaccccggcaacgggacgggcuacguccggcacguggacaaccccaacggggacggccgcugcaucacgugcaucuacuaccugaacaagaacugggacgcgaagcuccacggcgggauccugcggaucuucccggagggcaaguccuucaucgccgacguggagcccaucuucgaccgccugcuguucuucuggagcgaccggcgcaacccccacgagguccagcccuccuacgccacccgguacgccaugaccgugugguacuucgacgcggaggagcgcgccgaggccaagaagaaguuccggaaccugacccgcaagaccgagagcgcccugaccgaggacuga

SEQ ID NO: 1158 - RNA, 1566 nt, Artificial Sequence
  BAH13456_variant
auggccaccagccugcacgagggccccaccaaccagcucgaccugcugauccgcgccguggaggcguccguccacagcuccaacgcccacugcacggacaagaccaucgaggccgccgaggcccuccugcacauggagagcccgaccugccugcgggacucccgcagccccgaguucauccacgcggccaugcggcccgacgugaucaccgagacgguggucgagguguccaccgaggagagcgagcccauggacaccuccccgauccccaccagccccgacucccacgagcccaugaagaagaagaagguggggcgcaagccgaagacgcagcagagccccaucuccaacggcagccccgagcucgggaucaagaagaagccccgggagggcaaggggaacaccaccuaccugugggaguuccugcucgaccugcugcaggacaagaacacgugcccgcgcuacaucaaguggacgcagcgggagaagggcaucuucaagcucgucgacuccaaggccgugagcaagcuguggggcaagcacaagaacaagcccgacaugaacuacgagaccauggggcgcgcccugcgguacuacuaccagcgcggcauccucgcgaagguggaggggcagcggcuggucuaccaguucaaggacaugcccaagaacaucguggugaucgacgacgacaaguccgagaccugcaacgaggaccuggccggcaccacggacgagaagucccucgagcgcgucagccugagcgccgagagccugcucaaggccgccuccagcgugcgguccgggaagaacagcucccccaucaacugcagccgcgcggagaagggcguggcccgggucgugaacaucaccuccccgggccacgacgccagcucccgcagccccaccaccacggccuccgugagcgccaccgcggcgccccggaccguccgcguggccaugcagguccccguggugaugaccucccuggggcagaagaucagcacgguggccguccaguccgugaacgccggcgccccgcugaucaccagcaccucccccaccacggccaccagccccaaggucgugauccagaccauccccaccgugaugccggccuccacggagaacggggacaagaucaccaugcagcccgccaagaucaucaccauccccgccacccagcucgcgcagugccagcugcagaccaagagcaaccugaccggcagcggcuccaucaacaucgucgggacgccccucgccgugcgggcccugaccccggugagcaucgcccacggcacccccgucaugcgccuguccaugcccacccagcaggcgagcgggcagaccccgccccgggugaucuccgccgugaucaagggccccgaggucaagagcgaggccguggccaagaagcaggagcacgacgugaagacccuccagcuggucgaggagaagcccgccgacgggaacaagaccgugacgcacguggucgugguguccgcgccgagcgccaucgcccugcccgucaccaugaagaccgagggccucgugaccugcgagaaguga

SEQ ID NO: 1159 - RNA, 810 nt, Artificial Sequence
  BAC67168_variant
auggccgccgcccuguucgugcuccugggcuucgcccugcucgggacccacggcgccagcggggccgccggcaccgucuucacgaccguggaggaccugggguccaagauccugcugaccugcagccucaacgacuccgcgaccgaggugacgggccaccgcuggcugaagggcggggucgugcucaaggaggacgcccugcccggccagaagaccgaguucaagguggacagcgacgaccaguggggcgaguacuccugcgucuuccugccggagcccauggggaccgccaacauccagcuccacgggccgccccgggugaaggccgucaagagcuccgagcacaucaacgagggcgagaccgcgaugcuggugugcaagagcgaguccgugccgcccgugacggacugggccugguacaagaucaccgacagcgaggacaaggcccugaugaacggcuccgagagccgcuucuucgucuccagcucccaggggcggagcgagcuccacaucgagaaccugaacauggaggccgaccccggccaguaccgcugcaacgggaccuccagcaagggcuccgaccaggccaucaucacccugcgggugcgcagccaccucgcggcccuguggcccuuccugggcaucguggccgagguccucgugcuggugacgaucaucuucaucuacgagaagcggcgcaagcccgaggacguccuggacgacgacgacgccgggagcgcgccccucaaguccagcggccagcaccagaacgacaaggggaagaacgugcggcagcgcaacuccagcuga

SEQ ID NO: 1160 - RNA, 945 nt, Artificial Sequence
  AAA35723_variant
auggccccgccccaggugcuggccuucggccuccugcuggcggccgccaccgccaccuucgccgcggcccaggaggagugcgucugcgagaacuacaagcucgccgugaacugcuucgugaacaacaaccgccagugccagugcacgagcgucggggcccagaacaccgugaucugcuccaagcuggcggccaagugccuggugaugaaggccgagaugaacggcagcaagcucgggcggcgcgccaagcccgagggcgcccugcagaacaacgacgggcuguacgaccccgacugcgacgaguccggccucuucaaggcgaagcagugcaacggcaccagcaugugcuggugcgucaacaccgccggggugcggcgcacggacaaggacaccgagaucacgugcuccgagcgggugcgcaccuacuggaucaucaucgagcugaagcacaaggcccgggagaagcccuacgacagcaagucccugcgcaccgcccuccagaaggagaucaccacccgguaccagcuggacccgaaguucaucaccagcauccuguacgagaacaacgucaucacgaucgaccucgugcagaacuccagccagaagacccagaacgacguggacaucgccgacgucgcguacuacuucgagaaggacgugaagggcgagucccuguuccacagcaagaagauggaccugaccgugaacggggagcagcucgaccuggaccccggccagacccugaucuacuacgucgacgagaaggcccccgaguucuccaugcaggggcucaaggccggcgugaucgccgugaucgucgugguggucaucgccgugguggcgggcaucgucgugcuggucaucagccgcaagaagcggauggccaaguacgagaaggccgagaucaaggagaugggggagaugcaccgcgagcugaacgccuga

SEQ ID NO: 1161 - RNA, 2931 nt, Artificial Sequence
  CCDS169.1_variant
auggagcugcaggccgcccgcgcgugcuucgcccuccuguggggcugcgcccuggccgccgcggccgccgcccaggggaaggaggugguccuccuggacuucgcggccgccggcggggagcugggcuggcucacccaccccuacgggaagggcugggaccugaugcagaacaucaugaacgacaugccgaucuacauguacagcgugugcaacgugauguccggcgaccaggacaacuggcugcggaccaacugggucuaccgcggggaggccgagcggaucuucaucgagcucaaguucacggugcgcgacugcaacagcuuccccggcggggccuccagcugcaaggagaccuucaaccuguacuacgcggaguccgaccuggacuacggcaccaacuuccagaagcgccucuucaccaagaucgacacgaucgcccccgacgagaucaccgugagcuccgacuucgaggcccgccacgucaagcugaacguggaggagcggagcguggggccccugacccgcaagggcuucuaccucgccuuccaggacaucggcgccugcgucgcgcugcuguccgugcggguguacuacaagaagugcccggagcuccugcaggggcuggcccacuuccccgagaccaucgccggcagcgacgcccccucccucgccacggucgcggggaccugcguggaccacgccguggugcccccgggcggcgaggagccccgcaugcacugcgccguggacggggaguggcuggugcccaucggccagugccugugccaggccggguacgagaaggucgaggacgccugccaggcgugcagccccggcuucuucaaguucgaggccuccgagagcccgugccucgagugccccgagcacacccugcccucccccgagggggccaccagcugcgagugcgaggagggcuucuuccgggccccgcaggaccccgcguccaugcccugcacgcggcccccgagcgcgccccacuaccugaccgccgugggcaugggggccaagguggagcuccgguggaccccgccccaggacuccggcgggcgcgaggacaucgucuacagcgugaccugcgagcagugcuggcccgagagcggcgagugcgggcccugcgaggccuccgugcgguacagcgagccgccccacggccugacgcgcaccuccgucaccgugagcgaccuggagccccacaugaacuacaccuucacggucgaggcccggaacggcguguccgggcucgugaccagccgcuccuuccggaccgccagcgucuccaucaaccagaccgagccgcccaaggugcgccuggagggccggagcacgaccucccugagcguguccuggagcaucccgccgccccagcagucccgcgucuggaaguacgaggugaccuaccgcaagaagggggacagcaacuccuacaacgugcggcgcaccgagggcuucagcgucacgcucgacgaccuggcccccgacaccaccuaccugguccaggugcaggcccucacccaggaggggcagggcgccggcuccaagguccacgaguuccagacgcugagccccgaggggagcggcaaccuggcggugaucgggggcguggccgucggcguggugcuccugcugguccucgccggggugggcuucuucauccaccggcgccggaagaaccagcgcgcccggcagucccccgaggacguguacuucagcaaguccgagcagcugaagccccugaagaccuacgucgacccccacaccuacgaggaccccaaccaggccgugcucaaguucaccacggagauccaccccagcugcgugacccgccagaaggucaucggggcgggcgaguucggggagguguacaagggcaugcugaagaccuccagcggcaagaaggaggugcccgucgccaucaagacccugaaggccggguacaccgagaagcagcggguggacuuccucggcgaggccgggaucaugggccaguucucccaccacaacaucauccgccuggagggggugaucagcaaguacaagcccaugaugaucaucacggaguacauggagaacggcgcgcuggacaaguuccugcgggagaaggacggcgaguucuccguccuccagcugguggggaugcugcgcggcaucgccgccgggaugaaguaccucgccaacaugaacuacgugcaccgggaccuggccgcgcgcaacauccuggucaacagcaaccucgugugcaagguguccgacuucggccugagccggguccuggaggacgacccggaggccaccuacaccaccuccgggggcaagauccccauccgcuggacggcccccgaggccaucagcuaccggaaguucaccuccgccagcgacgugugguccuucggcaucgugaugugggaggucaugaccuacggggagcgccccuacugggagcucagcaaccacgaggugaugaaggcgaucaacgacggcuuccggcugccgacccccauggacugccccagcgccaucuaccagcugaugaugcagugcuggcagcaggagcgcgcccgccggcccaaguucgccgacaucguguccauccucgacaagcugauccgcgccccggacagccugaagacgcucgcggacuucgacccccgggucuccauccgccugcccagcaccuccgggagcgagggcgugcccuuccggaccguguccgaguggcuggagagcaucaagaugcagcaguacaccgagcacuucauggccgccggguacacggccaucgagaaggucgugcagaugaccaacgacgacaucaagcgcaucggcgugcggcucccgggccaccagaagcgcaucgcguacucccugcuggggcucaaggaccaggucaacaccgugggcauccccaucuga

SEQ ID NO: 1162 - RNA, 2952 nt, Artificial Sequence
  AAG43576_variant
auggacugccagcugagcauccuccugcugcucuccugcagcgugcuggacuccuucggcgagcugaucccccagccgagcaacgaggucaaccuccuggacuccaagaccauccagggggagcugggcuggaucagcuaccccucccacgggugggaggagaucagcggcguggacgagcacuacacccccauccgcacguaccaggugugcaacgucauggaccacucccagaacaacuggcuccggaccaacugggugccccgcaacagcgcccagaagaucuacguggagcugaaguucacccugcgggacugcaacuccaucccgcucguccuggggaccugcaaggagacguucaaccuguacuacauggagagcgacgacgaccacggcgugaaguuccgcgagcaccaguucaccaagaucgacaccaucgccgcggacgaguccuucacccagauggaccucggcgaccggauccugaagcugaacacggagauccgcgagguggggcccgucaacaagaagggcuucuaccucgccuuccaggacgugggggccugcguggcccuggucagcgugcggguguacuucaagaagugccccuucaccgucaagaaccuggccauguuccccgacaccgugccgauggacucccagagccucguggagguccgcggcuccugcgugaacaacagcaaggaggaggacccgccccggauguacugcuccaccgagggggaguggcuggugcccaucggcaagugcagcugcaacgcgggcuacgaggagcgcggguucaugugccaggccugccggcccggcuucuacaaggcccuggacgggaacaugaagugcgccaagugcccgccccacagcuccacgcaggaggacggcagcaugaacugccgcugcgagaacaacuacuuccgggcggacaaggacccgcccuccauggccugcacccgcccgcccagcagcccccggaacgucaucuccaacaucaacgagaccuccgugauccucgacuggagcuggccccuggacaccggcgggcgcaaggacgugacguucaacaucaucugcaagaagugcggcuggaacaucaagcagugcgagcccugcucccccaacguccgguuccugccccgccaguucgggcucaccaacaccaccgugacggucaccgaccugcuggcccacaccaacuacaccuucgagaucgacgccgugaacggcgugagcgagcucuccagcccgccccggcaguucgccgcggucuccaucacgaccaaccaggccgcccccagccccgugcugaccaucaagaaggaccgcaccucccggaacagcaucucccugagcuggcaggagcccgagcaccccaacgggaucauccucgacuacgaggugaaguacuacgagaagcaggagcaggagacguccuacaccauccugcgcgcccgcggcaccaacgucaccaucagcagccugaagcccgacacgaucuacguguuccagauccgggcccgcaccgcggccggcuacgggaccaacucccggaaguucgaguucgagaccagcccggacuccuucagcaucuccggcgagagcucccagguggucaugaucgccaucagcgccgccguggcgaucauccuccugacgguggucaucuacgugcugaucgggcgcuucugcggcuacaaguccaagcacggggccgacgagaagcggcuccacuucggcaacggccaccugaagcugcccgggcuccgcaccuacguggacccccacaccuacgaggaccccacccaggccguccacgaguucgccaaggagcuggacgccaccaacaucagcaucgacaagguggugggcgcgggggaguucggcgaggucugcuccgggcggcugaagcucccgagcaagaaggagaucuccguggccaucaagacgcugaaggugggcuacaccgagaagcagcgccgggacuuccugggcgaggccagcaucauggggcaguucgaccaccccaacaucauccgccucgagggcgucgugaccaaguccaagcccgugaugaucgucaccgaguacauggagaacgggagccuggacuccuuccugcggaagcacgacgcccaguucacggugauccagcuggugggcaugcuccgcggcaucgcgagcgggaugaaguaccugagcgacaugggcuacguccaccgggaccuggccgcccgcaacauccucaucaacuccaaccuggugugcaaggugagcgacuucgggcugucccggguccucgaggacgaccccgaggccgccuacaccacccgcggcgggaagaucccgauccgguggaccagccccgaggcgaucgccuaccgcaaguucacguccgccagcgacgugugguccuacggcaucgugcugugggaggucaugagcuacggcgagcggcccuacugggagauguccaaccaggacgugaucaaggccguggacgagggguaccgccugcccccgcccauggacugccccgccgcgcucuaccagcugaugcuggacugcuggcagaaggaccgcaacaaccggcccaaguucgagcagaucgucagcauccucgacaagcugauccgcaacccgggcucccugaagaucaucaccagcgccgccgcccggcccuccaaccuccugcuggaccagagcaacguggacaucaccaccuuccgcacgaccggggacuggcucaacggcguguggaccgcccacugcaaggagaucuucaccggggucgaguacuccagcugcgacacgaucgcgaagaucuccaccgacgacaugaagaaggugggcgugaccgucgugggcccccagaagaagaucaucagcuccaucaaggcccuggagacccagagcaagaacgggcccgugccggucuga

SEQ ID NO: 1163 - RNA, 2952 nt, Artificial Sequence
  AAH63282_variant
auggacugccagcugagcauccuccugcugcucuccugcagcgugcuggacuccuucggcgagcugaucccccagccgagcaacgaggucaaccuccuggacuccaagaccauccagggggagcugggcuggaucagcuaccccucccacgggugggaggagaucagcggcguggacgagcacuacacccccauccgcacguaccaggugugcaacgucauggaccacucccagaacaacuggcuccggaccaacugggugccccgcaacagcgcccagaagaucuacguggagcugaaguucacccugcgggacugcaacuccaucccgcucguccuggggaccugcaaggagacguucaaccuguacuacauggagagcgacgacgaccacggcgugaaguuccgcgagcaccaguucaccaagaucgacaccaucgccgcggacgaguccuucacccagauggaccucggcgaccggauccugaagcugaacacggagauccgcgagguggggcccgucaacaagaagggcuucuaccucgccuuccaggacgugggggccugcguggcccuggucagcgugcggguguacuucaagaagugccccuucaccgucaagaaccuggccauguuccccgacaccgugccgauggacucccagagccucguggagguccgcggcuccugcgugaacaacagcaaggaggaggacccgccccggauguacugcuccaccgagggggaguggcuggugcccaucggcaagugcagcugcaacgcgggcuacgaggagcgcggguucaugugccaggccugccggcccggcuucuacaaggcccuggacgggaacaugaagugcgccaagugcccgccccacagcuccacgcaggaggacggcagcaugaacugccgcugcgagaacaacuacuuccgggcggacaaggacccgcccuccauggccugcacccgcccgcccagcagcccccggaacgucaucuccaacaucaacgagaccuccgugauccucgacuggagcuggccccuggacaccggcgggcgcaaggacgugacguucaacaucaucugcaagaagugcggcuggaacaucaagcagugcgagcccugcucccccaacguccgguuccugccccgccaguucgggcucaccaacaccaccgugacggucaccgaccugcuggcccacaccaacuacaccuucgagaucgacgccgugaacggcgugagcgagcucuccagcccgccccggcaguucgccgcggucuccaucacgaccaaccaggccgcccccagccccgugcugaccaucaagaaggaccgcaccucccggaacagcaucucccugagcuggcaggagcccgagcaccccaacgggaucauccucgacuacgaggugaaguacuacgagaagcaggagcaggagacguccuacaccauccugcgcgcccgcggcaccaacgucaccaucagcagccugaagcccgacacgaucuacguguuccagauccgggcccgcaccgcggccggcuacgggaccaacucccggaaguucgaguucgagaccagcccggacuccuucagcaucuccggcgagagcucccagguggucaugaucgccaucagcgccgccguggcgaucauccuccugacgguggucaucuacgugcugaucgggcgcuucugcggcuacaaguccaagcacggggccgacgagaagcggcuccacuucggcaacggccaccugaagcugcccgggcuccgcaccuacguggacccccacaccuacgaggaccccacccagaccguccacgaguucgccaaggagcuggacgccacgaacaucagcaucgacaagguggugggcgccggggaguucggcgaggucugcuccgggcggcugaagcucccgagcaagaaggagaucuccguggcgaucaagacccugaaggugggcuacaccgagaagcagcgccgggacuuccugggcgaggccagcaucauggggcaguucgaccaccccaacaucauccgccucgagggcgucgugaccaaguccaagcccgugaugaucgucacggaguacauggagaacgggagccuggacuccuuccugcggaagcacgacgcccaguucaccgugauccagcuggugggcaugcuccgcggcaucgccagcgggaugaaguaccugagcgacaugggcuacguccaccgggaccuggcggcccgcaacauccucaucaacuccaaccuggugugcaaggugagcgacuucgggcugucccggguccucgaggacgaccccgaggccgccuacaccacccgcggcgggaagaucccgauccgguggacgagccccgaggccaucgcguaccgcaaguucaccuccgccagcgacgugugguccuacggcaucgugcugugggaggucaugagcuacggcgagcggcccuacugggagauguccaaccaggacgugaucaaggccguggacgagggguaccgccugcccccgcccauggacugccccgccgcccucuaccagcugaugcuggacugcuggcagaaggaccgcaacaaccggcccaaguucgagcagaucgucagcauccucgacaagcugauccgcaacccgggcucccugaagaucaucaccagcgcggccgcccggcccuccaaccuccugcuggaccagagcaacguggacaucaccacguuccgcaccaccggggacuggcucaacggcguguggaccgcccacugcaaggagaucuucacgggggucgaguacuccagcugcgacaccaucgccaagaucuccaccgacgacaugaagaaggugggcgugaccgucgugggcccccagaagaagaucaucagcuccaucaaggcgcuggagacgcagagcaagaacgggcccgugccggucuga

SEQ ID NO: 1164 - RNA, 1389 nt, Artificial Sequence
  BAG54127_variant
augcccaugagcaccauccugccggugaccucccccugccuccccgccacgggcgucaccgugugggagcugaugaccuucggggccgagcccuacgcgggccugcgccucgccgaggugccggaccugcuggagaagggggagcggcucgcccagccccagaucugcaccaucgacgucuacauggugauggugaagugcuggaugaucgacgagaacauccgccccacguucaaggagcuggccaacgaguucacccggauggcccgcgacccgccccgguaccuggucaucaagcgcgagagcggccccgggaucgcgcccggccccgagccgcacggccucaccaacaagaagcuggaggagguggagcuggagcccgagcucgaccuggaccuggaccucgaggccgaggaggacaaccuggccaccacgacccugggguccgcccucagccugcccgugggcacccugaaccggccccgcgggucccagagccuccuguccccgagcuccggcuacaugcccaugaaccaggggaaccugggcgagagcugccaggaguccgcggucagcggcuccagcgagcggugcccccgccccgugucccuccacccgaugccccgggggugccuggccagcgaguccagcgagggccacgugaccggguccgaggccgagcugcaggagaaggucagcaugugccgcagccggucccgcagccggagcccccgcccccggggcgacuccgccuaccacucccagcgccacagccuccugacgccggugacgccccuguccccgcccggccucgaggaggaggacgugaacggguacgucaugcccgacacccaccugaagggcacccccagcucccgggaggggacccugagcuccgugggccucagcuccgugcuggggaccgaggaggaggacgaggacgaggaguacgaguacaugaaccgccggcgccgccacagcccgccccacccgccccggcccuccagccuggaggagcucggcuacgaguacauggacgucggcuccgaccugagcgccucccuggggagcacccagagcugcccccuccaccccgugcccaucaugcccaccgcgggcacgaccccggacgaggacuacgaguacaugaaccgccagcgggacgggggcgggcccggcggcgacuacgccgccaugggggccugccccgccuccgagcagggcuacgaggagaugcgcgcguuccaggggcccggccaccaggccccgcacgugcacuacgcccggcugaagacccugcgcagccucgaggccaccgacuccgccuucgacaaccccgacuacuggcacagccggcuguuccccaaggcgaacgcccagcgcacguga

SEQ ID NO: 1165 - RNA, 2766 nt, Artificial Sequence
  BAG57868_variant
augcgcgccaacgacgcccuccaggugcugggccugcuguucagccucgcgcggggguccgaggucggcaacagccaggccgugugccccgggacccugaacggccuguccgugaccggggacgccgagaaccaguaccagacgcucuacaagcuguacgagcgcugcgaggucgugaugggcaaccuggagaucgugcucaccggccacaacgccgaccugagcuuccugcaguggauccgggaggucaccggguacgugcucguggccaugaacgaguucuccacccugccgcugcccaaccuccgcgucgugcggggcacccagguguacgacgggaaguucgcgaucuucgucaugcugaacuacaacaccaacagcucccacgcccugcgccagcuccggcugacccagcugaccgagauccucagcggcgggguguacaucgagaagaacgacaagcugugccacauggacacgaucgacuggcgcgacaucgugcgggaccgcgacgccgagaucgucgugaaggacaacggccgguccugcccgcccugccacgaggugugcaagggccgcugcugggggcccggcagcgaggacugccagacccugaccaagaccaucugcgcgccccagugcaacgggcacugcuucggccccaaccccaaccagugcugccacgacgagugcgccggcgggugcuccggcccgcaggacacggacugcuucgccugccggcacuucaacgacagcggggccugcgucccccgcugcccccagccccucguguacaacaagcugaccuuccagcuggagccgaacccccacaccaaguaccaguacggcggggugugcgucgccuccugcccccacaacuucgugguggaccagaccagcugcguccgggccugcccgcccgacaagauggagguggacaagaacggccucaagaugugcgagcccugcggcgggcugugccccaaggcgugcgagggcacgggguccggcagccgcuuccagaccgucgacuccagcaacaucgacggguucgugaacugcaccaagauccugggcaaccucgacuuccugaucaccggccugaacggggaccccuggcacaagaucccggcccucgaccccgagaagcugaacguguuccggacgguccgcgagaucaccggcuaccugaacauccaguccuggccgccccacaugcacaacuucagcguguucagcaaccucaccaccaucgggggccggucccuguacaaccgcggguucagccugcucaucaugaagaaccugaacgugacgucccugggcuuccggagccucaaggagaucuccgccggccgcaucuacaucagcgccaaccgccagcugugcuaccaccacucccugaacuggaccaagguccuccgggggcccaccgaggagcgccuggacaucaagcacaaccggccccgccgggacugcguggccgagggcaaggugugcgacccccugugcagcuccgggggcugcuggggccccgggccgggccagugccucagcugccgcaacuacucccgcgggggcgucugcgugacccacugcaacuuccugaacggggagccccgggaguucgcgcacgaggccgagugcuucagcugccaccccgagugccagccgauggagggcacggcgaccugcaacggcuccgggagcgacacgugcgcccagugcgcccacuuccgggacggcccccacugcguguccagcugcccccacgggguccugggcgccaaggggcccaucuacaaguacccggacgugcagaacgagugccgccccugccacgagaacugcacccagggcugcaagggccccgagcugcaggacugccucgggcagacgcuggugcugaucggcaagacccaccucaccauggcccugaccgucaucgccgggcugguggugaucuucaugaugcucggcgggacguuccuguacuggcggggccgccggauccagaacaagcgcgccaugcggcgcuaccuggagcggggcgaguccaucgagccccucgacccgagcgagaaggccaacaagguccuggcgcgcaucuucaaggagaccgagcugcggaagcucaaggugcugggguccggcguguucgggaccguccacaagggcguguggauccccgagggggagagcaucaagauccccgugugcaucaaggucaucgaggacaagagcggccgccaguccuuccaggccgugaccgaccacaugcuggccaucggcagccucgaccacgcccacaucgugcgccugcuggggcucugccccggcuccagccugcagcuggucacccaguaccucccgcuggggucccugcucgaccacgugcggcagcaccgcggcgcgcugggcccccagcugcuccugaacuggggcgugcagaucgccaaggggauguacuaccuggaggagcacgggaugguccaccggaaccucgccgcccgcaacgugcugcucaagagccccucccaggugcaggucgccgacuucggcguggcggaccugcugcccccggacgacaagcagcugcucuacagcgaggccaagacgcccaucaaguggauggcccuggaguccauccacuucgggaaguacacccaccagagcgacgugugguccuacggccagugcaucuggaugcccagccugcccucccucgccccggucagcaaccugcccuucgagacccccuccuga

SEQ ID NO: 1166 - RNA, 3927 nt, Artificial Sequence
  AAB59446_variant
augaagcccgccaccggccugugggugugggucagccuccugguggccgcggggaccgugcagcccuccgacagccaguccgucugcgccggcacggagaacaagcugagcucccucagcgaccuggagcagcaguaccgcgcccugcggaaguacuacgagaacugcgagguggugauggggaaccucgagaucaccuccaucgagcacaaccgcgaccugagcuuccugcgguccguccgcgaggugaccggcuacgugcucgucgcccugaaccaguuccgguaccugccccucgagaaccugcgcaucauccgggggaccaagcuguacgaggaccgcuacgcccucgcgaucuuccugaacuaccggaaggacggcaacuucggccugcaggagcucgggcugaagaaccugacggagauccucaacggcgggguguacguggaccagaacaaguuccugugcuacgccgacaccauccacuggcaggacaucguccgcaaccccuggcccagcaaccugacccucguguccaccaacggcagcuccgggugcggccggugccacaagagcugcacgggccgcugcugggggccgaccgagaaccacugccagacccugacccggacggugugcgccgagcagugcgacggccgcugcuacgggcccuacgucuccgacugcugccaccgggagugcgccggcggcugcagcgggcccaaggacaccgacugcuucgcgugcaugaacuucaacgacuccggcgccugcgugacccagugcccccagaccuucguguacaacccgacgaccuuccagcuggagcacaacuucaacgccaaguacaccuacggggccuucugcgucaagaagugcccccacaacuucgugguggacagcuccagcugcguccgcgccugccccagcuccaagauggagguggaggagaacggcaucaagaugugcaagcccugcaccgacaucugcccgaaggcgugcgacgggaucggcacgggcagccucauguccgcccagaccguggacagcuccaacaucgacaaguucaucaacugcaccaagaucaacgggaaccugaucuuccuggucaccggcauccacggggaccccuacaacgccaucgaggccaucgaccccgagaagcucaacguguuccggacgguccgcgagaucaccggcuuccugaacauccagagcuggcccccgaacaugaccgacuucuccguguucagcaaccuggugaccaucgggggccggguccucuacuccggccugagccugcucauccugaagcagcaggggaucacgucccugcaguuccagagccucaaggagaucuccgccggcaacaucuacaucaccgacaacagcaaccugugcuacuaccacaccaucaacuggaccacgcuguucuccaccaucaaccagcgcaucgugauccgggacaaccgcaaggcggagaacugcaccgccgaggggauggugugcaaccaccucugcagcuccgacggcugcugggggcccggccccgaccagugccugagcugccgccgguucucccgcggccggaucugcaucgagagcugcaaccuguacgacggggaguuccgcgaguucgagaacggcagcaucugcgucgagugcgacccccagugcgagaagauggaggacgggcuccugaccugccacggcccgggccccgacaacugcacgaagugcucccacuucaaggacgggcccaacugcguggagaagugccccgacggccugcagggggccaacagcuucaucuucaaguacgccgacccggaccgggagugccaccccugccaccccaacugcacccagggcugcaacgggcccaccucccacgacugcaucuacuacccguggaccggccacagcacccucccccagcacgcccgcacgccccugaucgcggccggcgugaucgggggccuguucauccuggucaucguggggcucaccuucgccguguacguccggcgcaaguccaucaagaagaagcgggcccugcgccgguuccuggagaccgagcucguggagccgcugacccccagcggcacggcccccaaccaggcgcagcugcgcauccucaaggagaccgagcugaagcgggugaagguccugggguccggcgccuucggcaccguguacaaggggaucugggugcccgagggcgagaccgucaagaucccgguggccaucaagauccucaacgagacgaccgggcccaaggccaacguggaguucauggacgaggcgcugaucauggccagcauggaccacccccaccugguccgccuccugggcgugugccugucccccaccauccagcucgugacccagcugaugccgcacgggugccugcucgaguacguccacgagcacaaggacaacaucggcagccagcugcugcucaacuggugcgugcagaucgccaagggcaugauguaccuggaggagcggcgccuggugcaccgggaccucgccgcccgcaacguccuggugaagucccccaaccacgugaagaucacggacuucgggcuggcgcggcuccuggagggcgacgagaaggaguacaacgccgacgggggcaagaugcccaucaaguggauggcccuggagugcauccacuaccgcaaguucacccaccagagcgacgucugguccuacggggugaccaucugggagcucaugaccuucggcggcaagcccuacgacgggaucccgacgcgcgagauccccgaccugcuggagaagggcgagcggcucccccagcccccgaucugcaccaucgacguguacauggucauggugaagugcuggaugaucgacgccgacagccgccccaaguucaaggagcuggccgcggaguucucccggauggcccgcgacccccagcgguaccuggugauccagggggacgaccgcaugaagcuccccagcccgaacgacuccaaguucuuccagaaccugcuggacgaggaggaccucgaggacaugauggacgccgaggaguaccuggucccccaggccuucaacaucccgcccccgaucuacaccagccgggcccgcaucgacagcaaccgguccgagaucggccacagcccgccgcccgcguacacccccauguccggcaaccaguucguguaccgcgacgggggcuucgccgccgagcagggggugagcguccccuaccgggcccccacguccaccauccccgaggcgcccguggcccagggcgccaccgccgagaucuucgacgacagcugcugcaacgggacccugcgcaagcccguggcgccccacguccaggaggacuccagcacgcagcgguacuccgccgaccccaccguguucgcccccgagcgcagcccccggggcgagcucgacgaggagggcuacaugacccccaugcgcgacaagccgaagcaggaguaccugaaccccguggaggagaaccccuucgucucccggcgcaagaacggggaccugcaggcccucgacaaccccgaguaccacaacgccagcaacggcccgcccaaggccgaggacgaguacgugaacgagccccuguaccugaacaccuucgcgaacacgcucgggaaggccgaguaccugaagaacaacauccuguccaugcccgagaaggccaagaaggccuucgacaacccggacuacuggaaccacagccucccgccccgguccacccugcagcaccccgacuaccugcaggaguacagcaccaaguacuucuacaagcagaacggccgcauccggcccaucguggccgagaaccccgaguaccucuccgaguucagccugaagcccgggaccguccugcccccgccgcccuaccgccaccgcaacacggugguguga

SEQ ID NO: 1167 - RNA, 1461 nt, Artificial Sequence
  CCDS46648.1_variant
augauccagaccgugcccgacccggccgcccacaucaaggaggcgcugagcgucguguccgaggaccagagccucuucgagugcgccuacggcacgccccaccuggccaagaccgagaugaccgccuccagcuccagcgacuacgggcagaccuccaagaugagcccccgcgugccccagcaggacuggcugucccagccgcccgcccgggucaccaucaagauggagugcaaccccagccaggugaacggcucccgcaacagccccgacgagugcuccguggcgaagggcgggaagauggucgggagcccggacacggugggcaugaacuacggcuccuacauggaggagaagcacaugcccccgcccaacaugaccaccaacgagcggcgcgugaucguccccgccgaccccacccucuggagcacggaccacgugcggcaguggcuggagugggccgugaaggaguacgggcugcccgacgucaacauccuccuguuccagaacaucgacggcaaggagcugugcaagaugaccaaggacgacuuccagcgccucacccccuccuacaacgccgacauccugcugagccaccuccacuaccugcgggagaccccgcugccccaccucacguccgacgacguggacaaggcgcugcagaacagcccccgccugaugcacgcccggaacaccgggggcgccgccuucaucuuccccaacaccagcguguacccggaggccacccagcgcaucacgacccggcccgaccuccccuacgagcccccgcgccgguccgcguggaccgggcacggccaccccacgccccagagcaaggccgcccagcccuccccgagcaccguccccaagaccgaggaccagcgcccccagcuggacccguaccagauccugggccccaccuccagccggcucgccaaccccggguccggccagauccagcuguggcaguuccugcucgagcugcugagcgacuccagcaacuccagcugcaucaccugggaggggacgaacggcgaguucaagaugaccgaccccgacgagguggcccgccgguggggcgagcgcaaguccaagccgaacaugaacuacgacaagcucagccgggcgcugcgcuacuacuacgacaagaacaucaugaccaaggugcacgggaagcgguacgccuacaaguucgacuuccacggcaucgcccaggcccugcagccccacccgcccgaguccagccucuacaaguaccccuccgaccugcccuacauggggagcuaccacgcccacccccagaagaugaacuucgucgcgccccacccgcccgcccugcccgugaccuccagcagcuucuucgccgcccccaacccguacuggaacucccccacgggcgggaucuaccccaacacccgccuccccaccagccacaugccgucccaccugggcaccuacuacuga

SEQ ID NO: 1168 - RNA, 1359 nt, Artificial Sequence
  AAA19786_variant
augagcgagacccccgcccagugcuccaucaagcaggagcgcaucagcuacaccccgcccgagucccccgugcccagcuacgccuccagcacgccgcugcacguccccgugccccgggcgcuccgcauggaggaggacuccauccggcugcccgcccaccuccgccugcagccgaucuacuggagccgggacgacguggcccaguggcugaagugggccgagaacgaguucucccugcgccccaucgacagcaacaccuucgagaugaacggcaaggcccuccugcugcucaccaaggaggacuuccgguaccgcagcccccacuccggggacguccuguacgagcugcuccagcacauccugaagcagcggaagccccgcauccuguucuccccguucuuccaccccggcaacagcauccacacccagcccgaggugauccuccaccagaaccacgaggaggacaacugcgugcagcggacgccccgcccguccgucgacaacgugcaccacaacccgcccaccaucgagcugcugcaccggagccgcucccccaucaccaccaaccaccggcccagccccgaccccgagcagcgcccccuccgguccccgcuggacaacaugauccgccggcugagccccgcggagcgcgcccaggggccccggccccaccaggagaacaaccaccaggagagcuacccgcucuccgugagccccauggagaacaaccacugccccgccuccagcgagucccacccgaagcccagcagcccccgccaggaguccacgcgcgucauccagcugaugcccuccccgaucaugcacccccugauccucaacccccggcacagcguggacuucaagcagucccgccugagcgaggacggccugcaccgggaggggaagcccaucaaccucucccaccgcgaggaccuggccuacaugaaccacaucauggugagcgucuccccgcccgaggagcacgcgaugcccaucggccggaucgccgacugccgccugcucugggacuacguguaccagcugcugagcgacucccgguacgagaacuucauccgcugggaggacaaggagagcaagaucuuccggaucguggaccccaacggccucgcccgccugugggggaaccacaagaaccggaccaacaugaccuacgagaagaugucccgcgcccugcggcacuacuacaagcucaacaucauccgcaaggagccgggccagcggcugcuguuccgcuucaugaagacccccgacgagaucaugagcgggcggacggaccgccucgagcaccuggagagccaggagcuggacgagcagaucuaccaggaggacgagugcuga

SEQ ID NO: 1169 - RNA, 1971 nt, Artificial Sequence
  AAH04817_variant
auggccagcaccgacuacuccaccuacagccaggccgcggcccagcagggcuacuccgccuacacggcccagcccacccagggguacgcccagaccacccaggcguacggccagcagagcuacgggacguacggccagccgaccgacguguccuacacccaggcccagaccacggccaccuacgggcagaccgccuacgcgaccagcuacggccagccccccacgggcuacaccacccccaccgccccgcaggccuacucccagcccguccagggguacggcacgggggccuacgacaccaccaccgccacggugaccaccacccaggcgagcuacgccgcccaguccgccuacggcacgcagcccgccuaccccgcguacgggcagcagccggccgccaccgcccccacccgcccccaggacggcaacaagcccaccgagacgagccagccgcaguccagcaccggcggguacaaccagcccucccugggcuacgggcagagcaacuacuccuacccccaggugcccggcagcuacccgaugcagcccgucaccgccccccccuccuacccgcccaccagcuacuccagcacgcagcccaccagcuacgaccaguccagcuacucccagcagaacaccuacggccagcccagcuccuacgggcagcagagcuccuacggccagcagagcuccuacgggcagcagccgcccaccagcuaccccccccagacgggcuccuacagccaggcgccgucccaguacagccagcaguccagcuccuacgggcagcagagcuccuuccggcaggaccaccccagcagcaugggcguguacggccaggaguccgggggcuucagcgggcccggcgagaaccgcuccaugagcgggccggacaaccggggccgcggccgggggggcuucgaccgcgggggcaugucccgggggggccgcggcgggggccgggggggcaugggcagcgccggggagcgcggcggguucaacaagcccggcgggcccauggacgagggccccgaccucgaccugggcccgcccguggaccccgacgaggacuccgacaacagcgccaucuacguccaggggcugaacgacuccgugacccucgacgaccuggccgacuucuucaagcagugcggcguggucaagaugaacaagcggaccgggcagcccaugauccacaucuaccuggacaaggagaccggcaagccgaagggggacgccaccgugagcuacgaggacccccccacggcgaaggccgccguggagugguucgacggcaaggacuuccagggcuccaagcucaaggucagccuggcccgcaagaagcccccgaugaacuccaugcgggggggccugcccccccgcgaggggcggggcaugcccccgccccuccgcgggggccccggcgggcccggcgggccgggcgggcccaugggccggaugggcgggcgcggcggggaccggggcggcuuccccccccgcgggccgcggggcagccgcgggaaccccuccggcgggggcaacgugcagcaccgcgcgggcgacuggcagugccccaacccggggugcggcaaccagaacuucgccuggcggaccgagugcaaccagugcaaggcccccaagcccgagggguuccugcccccgcccuucccccccccgggcggggaccgcggccggggcgggcccggcgggaugcgcggcgggcggggcggccugauggaccgcgggggccccgggggcauguuccggggcgggcgcggcggggaccggggcggguuccgcggcggccgggggauggaccgcggcggguucggcgggggccggcgcggcgggcccggcgggccgcccggcccccucauggagcagauggggggccggcgcggcgggcggggcgggcccggcaagauggacaagggggagcaccgccaggagcggcgcgaccgcccguacuga

SEQ ID NO: 1170 - RNA, 1998 nt, Artificial Sequence
  AEA07595_variant
augggccagaccgggaagaaguccgagaagggccccgugugcuggcgcaagcgggucaagagcgaguacaugcgccugcggcagcucaagcgcuuccggcgcgccgacgaggucaagagcauguucuccagcaaccggcagaagauccuggagcgcaccgagauccugaaccaggaguggaagcagcggcgcauccagccggugcacauccucacguccgugagcucccugcgggggacccgcgagguggaggacgagaccgugcugcacaacauccccuacaugggcgacgagguccucgaccaggacgggaccuucaucgaggagcugaucaagaacuacgacggcaaggugcacggcgaccgggagugcggguucaucaacgacgagaucuucguggagcuggucaacgcccucggccaguacaacgacgacgacgacgacgacgacggggacgaccccgaggagcgcgaggagaagcagaaggaccuggaggaccaccgggacgacaaggagagccggcccccgcgcaaguuccccuccgacaagaucuucgaggcgaucagcuccauguuccccgacaagggcacggccgaggagcugaaggagaaguacaaggagcucaccgagcagcagcugcccggggcccugccgcccgagugcacccccaacaucgacggccccaacgccaagagcgugcagcgcgagcagucccuccacagcuuccacacccuguucugccggcgcugcuucaaguacgacugcuuccugcacccguuccacgccacgcccaacaccuacaagcggaagaacaccgagaccgcgcucgacaacaagcccugcggcccccagugcuaccagcaccuggagggggccaaggaguucgccgccgcgcugacggccgagcgcaucaagaccccgcccaagcgccccggcgggcggcgccggggccgccuccccaacaacuccagccggccguccacccccaccaucaacgugcuggagagcaaggacacggacuccgaccgcgaggccggcaccgagaccgggggcgagaacaacgacaaggaggaggaggagaagaaggacgagaccagcagcuccagcgaggccaacucccggugccagacgcccaucaagaugaagcccaacaucgagccgcccgagaacgucgaguggagcggggccgaggcguccauguuccgcgugcugaucggcaccuacuacgacaacuucugcgccaucgcccggcucaucgggaccaagaccugccgccagguguacgaguuccgggucaaggagagcuccaucaucgcccccgcccccgcggaggacguggacacgccgccccgcaagaagaagcggaagcaccgccugugggccgcccacugccggaagauccagcugaagaagggccagaaccgcuuccccggcugccggugcaaggcccagugcaacaccaagcagugcccgugcuaccucgccgugcgcgagugcgaccccgaccugugccugaccugcggggcggccgaccacugggacagcaagaacgucuccugcaagaacugcagcauccagcggggcuccaagaagcaccuccugcuggcccccagcgacguggccggguggggcaucuucaucaaggaccccgugcagaagaacgaguucaucuccgaguacugcggggagaucaucagccaggacgaggccgaccgccgcggcaaggucuacgacaaguacaugugcuccuuccucuucaaccugaacaacgacuucgugguggacgcgacccggaagggcaacaagauccgcuucgccaaccacagcgucaacccgaacugcuacgccaaggugaugauggucaacggggaccaccggaucggcaucuucgccaagcgcgcgauccagacgggggaggagcuguucuucgacuaccgguacucccaggccgacgcccucaaguacgugggcaucgagcgcgagauggagauccccuga

SEQ ID NO: 1171 - RNA, 1005 nt, Artificial Sequence
  EAW80068_variant
augggccagaccgggaagaaguccgagaagggccccgugugcuggcgcaagcgggucaagagcgaguacaugcgccugcggcagcucaagcgcuuccggcgcgccgacgaggucaagagcauguucuccagcaaccggcagaagauccuggagcgcaccgagauccugaaccaggaguggaagcagcggcgcauccagccggugcacauccucacguccgugagcucccugcgggggacccgcgagugcagcgugaccuccgaccuggacuuccccacccaggugaucccccucaagacgcugaacgccgucgcgagcgugcccaucauguacuccuggagcccgcugcagcagaacuucaugguggaggacgagaccguccuccacaacauccccuacaugggcgacgaggugcuggaccaggacgggaccuucaucgaggagcugaucaagaacuacgacggcaaggugcacggcgaccgggagugcggguucaucaacgacgagaucuucgucgagcucgugaacgcccugggccaguacaacgacgacgacgacgacgacgacggggacgaccccgaggagcgcgaggagaagcagaaggaccuggaggaccaccgggacgacaaggagucccggcccccgcgcaaguuccccagcgacaagaucuucgaggccaucuccagcauguuccccgacaagggcaccgccgaggagcucaaggagaaguacaaggagcugacggagcagcagcugcccggggcccucccgcccgagugcacccccaacaucgacggccccaacgcgaaguccgugcagcgcgagcagagccugcacuccuuccacacccuguucugccggcgcugcuucaaguacgacugcuuccuccacccguuccacgccacccccaacacguacaagcggaagaacaccgagaccgcccuggacaacaagcccugcggcccccagugcuaccagcaccucccgcugcugccccgcaacuga

SEQ ID NO: 1172 - RNA, 195 nt, Artificial Sequence
  CCO13726_variant
augccccuggugaacaucaugaugaugaccaugaugaugauggagaccauccucaagaaggagaagaagagccgcaagaucuggcggaucacggagaugaucaagaaggccgcccaccugggcaacuuccugcucaucaaguuccugaagccguucccccagugcuuccagauccgcgcgcagcagaagaacuga

SEQ ID NO: 1173 - RNA, 2241 nt, Artificial Sequence
  AAC51520_variant
augggccagaccgggaagaaguccgagaagggccccgugugcuggcgcaagcgggucaagagcgaguacaugcgccugcggcagcucaagcgcuuccggcgcgccgacgaggucaagagcauguucuccagcaaccggcagaagauccuggagcgcaccgagauccugaaccaggaguggaagcagcggcgcauccagccggugcacauccucacguccgugagcucccugcgggggacccgcgagugcagcgugaccuccgaccuggacuuccccacccaggugaucccccucaagacgcugaacgccgucgcgagcgugcccaucauguacuccuggagcccgcugcagcagaacuucaugguggaggacgagaccguccuccacaacauccccuacaugggcgacgaggugcuggaccaggacgggaccuucaucgaggagcugaucaagaacuacgacggcaaggugcacggcgaccgggagugcggguucaucaacgacgagaucuucgucgagcucgugaacgcccugggccaguacaacgacgacgacgacgacgacgacggggacgaccccgaggagcgcgaggagaagcagaaggaccuggaggaccaccgggacgacaaggagucccggcccccgcgcaaguuccccagcgacaagaucuucgaggccaucuccagcauguuccccgacaagggcaccgccgaggagcucaaggagaaguacaaggagcugacggagcagcagcugcccggggcccucccgcccgagugcacccccaacaucgacggccccaacgcgaaguccgugcagcgcgagcagagccugcacuccuuccacacccuguucugccggcgcugcuucaaguacgacugcuuccuccacccguuccacgccacccccaacacguacaagcggaagaacaccgagaccgcccuggacaacaagcccugcggcccccagugcuaccagcaccuggagggggccaaggaguucgcggccgcccucaccgccgagcgcaucaagacgccgcccaagcgccccggcgggcggcgccggggccgccugcccaacaacagcagccggccguccacccccaccaucaacguccuggagagcaaggacaccgacuccgaccgcgaggccggcacggagaccgggggcgagaacaacgacaaggaggaggaggagaagaaggacgagaccagcuccagcuccgaggcgaacagccggugccagacccccaucaagaugaagcccaacaucgagccgcccgagaacguggagugguccggggccgaggccagcauguuccgcgugcucaucggcacguacuacgacaacuucugcgccaucgcccggcugaucgggaccaagaccugccgccaggucuacgaguuccgggugaaggaguccagcaucaucgcgcccgccccggccgaggacguggacaccccgccccgcaagaagaagcggaagcaccgccugugggccgcccacugccggaagauccagcucaagaaggacggcuccagcaaccacgucuacaacuaccagcccugcgaccacccccgccagcccugcgacuccagcugccccugcgugaucgcgcagaacuucugcgagaaguucugccagugcuccagcgagugccagaaccgguuccccggcugccgcugcaaggcccagugcaacacgaagcagugcccgugcuaccuggccgugcgggagugcgaccccgaccugugccugaccugcggggccgccgaccacugggacuccaagaacgucagcugcaagaacugcagcauccagcgcggcuccaagaagcaccuccugcucgcgcccagcgacguggccggguggggcaucuucaucaaggaccccguccagaagaacgaguucaucuccgaguacugcggggagaucaucagccaggacgaggccgaccgccggggcaagguguacgacaaguacaugugcuccuuccuguucaaccugaacaacgacuucguggucgacgccacccgcaagggcaacaagauccgguucgcgaaccacagcgugaacccgaacugcuacgccaaggugaugauggucaacggggaccaccgcaucggcaucuucgccaagcgggccauccagaccggggaggagcuguucuucgacuaccgcuacucccaggccgacgcgcucaaguacgugggcaucgagcgggagauggagauccccuga

SEQ ID NO: 1174 - RNA, 2124 nt, Artificial Sequence
  AEN79481_variant
augggccagaccgggaagaaguccgagaagggccccgugugcuggcgcaagcgggucaagagcgaguacaugcgccugcggcagcucaagcgcuuccggcgcgccgacgaggucaagagcauguucuccagcaaccggcagaagauccuggagcgcaccgagauccugaaccaggaguggaagcagcggcgcauccagccggugcacauccucacguccgugagcucccugcgggggacccgcgagguggaggacgagaccgugcugcacaacauccccuacaugggcgacgagguccucgaccaggacgggaccuucaucgaggagcugaucaagaacuacgacggcaaggugcacggcgaccgggagugcggguucaucaacgacgagaucuucguggagcuggucaacgcccucggccaguacaacgacgacgacgacgacgacgacggggacgaccccgaggagcgcgaggagaagcagaaggaccuggaggaccaccgggacgacaaggagagccggcccccgcgcaaguuccccuccgacaagaucuucgaggcgaucagcuccauguuccccgacaagggcacggccgaggagcugaaggagaaguacaaggagcucaccgagcagcagcugcccggggcccugccgcccgagugcacccccaacaucgacggccccaacgccaagagcgugcagcgcgagcagucccuccacagcuuccacacccuguucugccggcgcugcuucaaguacgacugcuuccugcacccguuccacgccacgcccaacaccuacaagcggaagaacaccgagaccgcgcucgacaacaagcccugcggcccccagugcuaccagcaccuggagggggccaaggaguucgccgccgcgcugacggccgagcgcaucaagaccccgcccaagcgccccggcgggcggcgccggggccgccuccccaacaacuccagccggccguccacccccaccaucaacgugcuggagagcaaggacacggacuccgaccgcgaggccggcaccgagaccgggggcgagaacaacgacaaggaggaggaggagaagaaggacgagaccagcagcuccagcgaggccaacucccggugccagacgcccaucaagaugaagcccaacaucgagccgcccgagaacgucgaguggagcggggccgaggcguccauguuccgcgugcugaucggcaccuacuacgacaacuucugcgccaucgcccggcucaucgggaccaagaccugccgccagguguacgaguuccgggucaaggagagcuccaucaucgcccccgcccccgcggaggacguggacacgccgccccgcaagaagaagcggaagcaccgccugugggccgcccacugccggaagauccagcugaagaaggacggcagcuccaaccacguguacaacuaccagcccugcgaccacccgcgccagcccugcgacagcuccugccccugcgucaucgcccagaacuucugcgagaaguucugccagugcagcuccgagugccagaaccgguuccccggcugccgcugcaaggcccagugcaacaccaagcagugcccgugcuaccucgcggugcgggagugcgaccccgaccugugccugaccugcggggccgccgaccacugggacagcaagaacguguccugcaagaacugcagcauccagcgcggcuccaagaagcaccuccugcuggcccccagcgacgucgccggguggggcaucuucaucaaggaccccgugcagaagaacgaguucaucuccgaguacugcggggagaucaucagccaggacgaggcggaccgccggggcaagguguacgacaaguacaugugcagcuuccucuucaaccugaacaacgacuucgucguggacgccacccgcaagggcaacaagauccgguucgccaaccacuccgucaacccgaacugcuacgccaaggugaugauggugaacggggaccaccgcaucggcaucuucgcgaagcgggccauccagacgggggaggagcuguucuucgacuaccgcuacagccaggccgacgcccucaaguacgucggcaucgagcgggagauggagauccccuga

SEQ ID NO: 1175 - RNA, 399 nt, Artificial Sequence
  AAB87141_variant
augguggaggccuucugcgccaccuggaagcugaccaacagccagaacuucgacgaguacaugaaggcgcucggcgucggguucgccacgcgccaggugggcaacgugaccaagcccaccgucaucaucucccaggagggggacaagguggugauccggacccugagcacguucaagaacaccgagaucuccuuccagcugggcgaggaguucgacgagaccaccgccgacgaccgcaacugcaagagcgucgugucccucgacggggacaagcuggugcacauccagaagugggacggcaaggagacgaacuucguccgggagaucaaggacggcaagauggugaugacccugaccuucggggacguggucgccgugcgccacuacgagaaggccuga

SEQ ID NO: 1176 - RNA, 765 nt, Artificial Sequence
  CAA36870_variant
auguggcagcugcuccugcccaccgcccugcuccugcuggugagcgccggcaugcgcaccgaggaccucccgaaggcggucguguuccuggagccccagugguaccgggugcuggagaaggacuccgucacgcucaagugccagggggccuacagccccgaggacaacuccacccagugguuccacaacgagagccugaucuccagccaggccuccagcuacuucaucgacgccgccaccguggacgacuccggcgaguaccgcugccagaccaaccugagcacgcucuccgaccccgugcagcuggagguccacaucggguggcugcuccugcaggcgccgcgguggguguucaaggaggaggaccccauccaccuccgcugccacagcuggaagaacaccgcccugcacaaggugaccuaccugcagaacggcaaggggcggaaguacuuccaccacaacuccgacuucuacauccccaaggccacccugaaggacagcggcuccuacuucugccgcggccucuucgggagcaagaacgucuccagcgagacggugaacaucaccaucacccagggccuggccguguccaccaucagcagcuucuucccgcccggguaccaggucuccuucugccuggugauggugcuccuguucgcggucgacacgggccuguacuucagcgugaagaccaacauccgguccagcacccgcgacuggaaggaccacaaguucaaguggcggaaggacccccaggacaaguga

SEQ ID NO: 1177 - RNA, 873 nt, Artificial Sequence
  CCDS1232.1_variant
augggcgggggcgccggggagcgccuguucaccagcuccugccucgugggccuggucccccuggggcuccggaucagccuggugaccugcccccugcagugcggcaucauguggcagcuccugcugcccacggcccuccugcugcucguguccgcgggcaugcgcaccgaggaccugcccaaggccgucguguuccuggagccccagugguaccgggugcucgagaaggacagcgucacccugaagugccagggggccuacuccccggaggacaacagcacccagugguuccacaacgagucccugaucagcucccaggccagcuccuacuucaucgacgccgcgacgguggacgacagcggcgaguaccgcugccagaccaaccucuccacccugagcgaccccgugcagcuggagguccacaucggguggcuccugcugcaggcgccccgguggguguucaaggaggaggaccccauccaccuccgcugccacuccuggaagaacaccgcccugcacaaggugacguaccugcagaacggcaaggggcggaaguacuuccaccacaacagcgacuucuacaucccgaaggccacccucaaggacuccggcagcuacuucugccgcggccuguucggguccaagaacgucagcagcgagaccgugaacaucaccaucacgcagggccuggccguguccaccaucagcuccuucuucccgcccggguaccaggucagcuucugccucgugauggugcugcuguucgccgucgacaccggccucuacuucuccgugaagaccaacauccggagcuccacgcgcgacuggaaggaccacaaguucaaguggcggaaggacccccaggacaaguga

SEQ ID NO: 1178 - RNA, 807 nt, Artificial Sequence
  AAH74858_variant
augagccuguccuuccuccugcugcuguucuucagccaccugauccuguccgccugggcccacggcgagaagcgccucgcgcccaaggggcagccgggccccgccgccaccgaccggaacccccgcgggagcuccagccggcaguccagcuccagcgccauguccagcuccagcgccuccagcucccccgcggccagccugggcucccaggggagcggccuggagcagagcuccuuccaguggagcccguccggccgccggaccgggagccucuacugccgcgugggcaucggguuccaccuccagaucuaccccgacggcaaggucaacgggucccacgaggccaacaugcugagcgugcucgagaucuucgccgugucccagggcaucgucggcauccgcgggguguucagcaacaaguuccuggcgauguccaagaagggcaagcugcacgccagcgccaaguucacggacgacugcaaguuccgggagcgguuccaggagaacuccuacaacaccuacgccagcgccauccaccgcaccgagaagaccgggcgggagugguacguggcgcucaacaagcgcggcaaggccaagcggggcugcagcccccgcgucaagccccagcacaucuccacgcacuuccugccgcgguucaagcaguccgagcagcccgagcugagcuucaccgugaccgugcccgagaagaagaagcccccgucccccaucaagcccaagaucccccucagcgccccgcgcaagaacaccaacuccgucaaguaccggcugaaguuccgcuucggguga

SEQ ID NO: 1179 - RNA, 117 nt, Artificial Sequence
  AAB06462_variant
augagcacccgcugcggcgaggccgggcgggcccgcggcacccagccccaccggggguaccgcgcgcagaaccagcccuacaagaugcaccugggcccgccccggcucgaggaguga

SEQ ID NO: 1180 - RNA, 2466 nt, Artificial Sequence
  AAA59470_variant
auggugagcuggggccgcuucaucugccuggucguggugaccauggccacccucucccuggcccggcccagcuucucccuggucgaggacacgacccucgagccggaggagccgcccaccaaguaccagaucagccagcccgagguguacguggcggcccccggggagucccuggagguccgcugccugcucaaggacgccgccgugaucagcuggaccaaggacggcgugcaccuggggcccaacaaccggacgguccugaucggcgaguaccuccagaucaagggggccacgccccgcgacuccggccuguacgcgugcaccgccagccggaccguggacuccgagaccugguacuucauggugaacgucaccgacgccaucagcuccggcgacgacgaggacgacaccgacggggccgaggacuucgugagcgagaacuccaacaacaagcgcgcgcccuacuggaccaacacggagaagauggagaagcggcugcacgccgugccggccgccaacaccgucaaguuccgcugccccgccggcgggaaccccaugcccaccaugcgguggcucaagaacggcaaggaguucaagcaggagcaccgcaucgggggcuacaaggugcggaaccagcacuggagccugaucauggaguccguggucccgagcgacaagggcaacuacacgugcgugguggagaacgaguacggguccaucaaccacaccuaccaccuggacgucguggagcgcagcccccaccggcccauccuccaggcgggccugcccgccaacgccuccaccguggucgggggcgacguggaguucgucugcaagguguacagcgacgcccagccgcacauccaguggaucaagcacguggagaagaacggcagcaaguacgggcccgacggccugcccuaccucaagguccugaaggccgcgggggugaacaccaccgacaaggagaucgaggugcuguacauccgcaacgucacguucgaggacgccggcgaguacacgugccucgccgggaacuccaucggcaucagcuuccacuccgccuggcugaccgugcugcccgccccgggccgggagaaggagaucaccgcgagccccgacuaccucgagaucgccaucuacugcaucgggguguuccugaucgccugcauggucgugaccgugauccugugccgcaugaagaacaccaccaagaagcccgacuucuccagccagcccgccguccacaagcucaccaagcggaucccgcugcgccgccaggugacgguguccgccgagagcuccagcuccaugaacagcaacacgccccugguccggaucaccacccggcucuccagcaccgcggacacccccaugcuggccggcguguccgaguacgagcugcccgaggacccgaagugggaguucccccgcgacaagcucacccuggggaagccccugggcgaggggugcuucggccagguggucauggccgaggccgugggcaucgacaaggacaagccgaaggaggcggugaccgucgccgugaagaugcucaaggacgacgccacggagaaggaccugagcgaccugguguccgagauggagaugaugaagaugaucgggaagcacaagaacaucaucaaccuccugggcgccugcacccaggacgggccccuguacgucaucguggaguacgccagcaagggcaaccuccgcgaguaccugcgggcgcgccggccgcccgggauggaguacuccuacgacaucaaccgcgugcccgaggagcagaugaccuucaaggaccuggucagcugcaccuaccagcucgcccggggcauggaguaccuggccagccagaagugcauccaccgcgaccuggccgcccggaacgugcucgugaccgagaacaacgucaugaagaucgcggacuucggccuggcccgcgacaucaacaacaucgacuacuacaagaagacgaccaacgggcggcugcccgugaaguggauggcccccgaggcccuguucgaccgcguguacacccaccaguccgacgucuggagcuucggcgugcucaugugggagaucuucacccucgggggcucccccuacccgggcauccccguggaggagcuguucaagcugcugaaggaggggcaccggauggacaagcccgccaacugcacgaacgagcuguacaugaugaugcgcgacugcuggcacgcgguccccagccagcggccgaccuucaagcagcucguggaggaccuggaccgcauccugacccucaccacgaacgaggaguaccuggaccugucccagccccucgagcaguacagccccuccuaccccgacacccggagcuccugcagcuccggcgacgacagcguguucuccccggaccccaugcccuacgagcccugccugccgcaguacccccacaucaacgggagcgucaagaccuga

SEQ ID NO: 1181 - RNA, 1908 nt, Artificial Sequence
  EAW74574_variant
auggccccgccccugcuccugcugcuccuggccagcggcgcggccgccugcccccugcccugcgugugccagaaccucuccgagagccuguccacccugugcgcccaccgcgggcuccuguucgugcccccgaacgucgaccggcgcaccguggagcugcggcucgccgacaacuucauccaggcgcugggcccgcccgacuuccgcaacaugacggggcuggucgaccucacccugagccggaacgccaucacccgcaucggcgcccgggccuucggggaccuggagucccuccgcagccugcaccuggacggcaaccggcucguggagcugggcaccgggucccugcgcggccccgugaaccuccagcaccugauccugagcgggaaccagcucggccggaucgcgcccggggccuucgacgacuuccuggagucccuggaggaccucgaccugagcuacaacaaccugcgccagguccccugggccggcaucggcgccaugcccgcccuccacacgcugaaccuggaccacaaccucaucgacgcgcugcccccgggggccuucgcccagcugggccagcucucccggcuggaccugaccagcaaccgccucgccacccuggcccccgacccccuguucucccgggggcgcgacgcggaggccagccccgccccgcucgugcuguccuucagcggcaacccccugcacugcaacugcgagcuccuguggcugcggcgccuggcccggcccgacgaccucgagaccugcgccuccccgcccggccuggcggggcgcuacuucugggccgugcccgagggcgaguucagcugcgagccgccccugaucgcccggcacacgcagcgccucuggguccuggaggggcagcgcgccacccugcggugccgcgcccucggcgaccccgcgcccaccaugcacuggguggggcccgacgaccggcuggugggcaacuccagccgcgcccgggccuuccccaacggcacccuggagaucggggucacgggcgccggggacgcgggcggguacacgugcaucgccaccaaccccgccggcgaggccaccgcccgcguggagcuccgggugcuggcgcugccccacggcgggaacagcuccgccgagggcgggcgccccggcccgagcgacaucgccgccuccgcccggaccgcggccgagggggagggcacccucgagagcgagcccgccguccaggugaccgaggugaccgccacguccggccuggucagcugggggcccggccgccccgccgacccgguguggauguuccagauccaguacaacuccagcgaggacgagacccugaucuaccggaucgugcccgcguccagccaccacuuccuccugaagcaccugguccccggggccgacuacgaccucugccugcuggcccucucccccgccgcgggcccgagcgaccugaccgccacccgccugcucggcugcgcccacuucuccacgcugcccgccagcccccugugccacgcccuccaggcgcacgugcucgggggcacccugaccguggccgucgggggcgugcuggucgccgcccugcugguguucaccguggcccuccugguccgggggcgcggcgcgggcaacgggcggcugccccucaagcugucccacgugcagagccagacgaacggcgggccgucccccacccccaaggcccacccgccccgcagcccgccgccccggccccagcgcuccugcagccuggaccucggcgacgccgggugcuacggcuacgcccggcgccugggcggggccugggcgcgccggagccacuccgugcacggcgggcugcucggcgccgggugccgcggcgucggcgggagcgccgagcggcuggaggaguccgugguguga

SEQ ID NO: 1182 - RNA, 3297 nt, Artificial Sequence
  EAW96782_variant
augcccccgcgccagcccccccggcaggccggcgggggccugagccgcgaguucgggaagcuccugcccgcccugucccacagcccgcucggcgggcugggcuccggcagcggguccguggcgcccggccaggggcgggccggcgccauggggagccgcacccccgaguccccccugcacgccguccagcuccgguggggcccgcgccggcgccccccccugcugccccuccugcugcuccugcugccgccccccccccgggugggcggguucaaccucgacgccgaggcgccggccgugcugagcggcccccccggguccuucuucggcuucagcgucgaguucuaccgccccggcaccgacgggguguccgugcuggucggcgccccgaaggccaacacgagccagcccggggugcuccagggcggggcgguguaccugugccccuggggcgccucccccacccagugcaccccgaucgaguucgacagcaagggcucccggcugcucgagagcucccugagcuccagcgagggggaggagcccgucgaguacaagagccugcagugguucggcgccaccgugcgcgcccacggguccagcauccucgccugcgcgccccuguacuccuggcggacggagaaggagccccugagcgacccggugggcaccugcuaccucuccaccgacaacuucacccgcauccuggaguacgcccccugccggagcgacuucuccugggccgccgggcagggcuacugccagggcggguucagcgccgaguucacgaagaccggccgcgucgugcuggggggccccggguccuacuucuggcagggccagauccucagcgcgacccaggagcagaucgccgaguccuacuacccggaguaccugaucaaccuggugcagggccagcuccagacccggcaggccagcuccaucuacgacgacagcuaccugggguacuccgucgccgugggcgaguucagcggggacgacacggaggacuucguggccggcguccccaagggcaaccugaccuacggguacgugaccauccucaacggcuccgacauccgcagccuguacaacuucuccggggagcagauggcgagcuacuucggcuacgccguggccgccaccgacgucaacggggacggccuggacgaccuccuggugggcgccccccugcucauggaccggacgcccgacgggcgcccgcaggaggugggccgggucuacguguaccugcagcaccccgcggggaucgagcccacccccacccugacccucacgggccacgacgaguucgggcgcuucggcagcucccugaccccgcugggcgaccucgaccaggacggguacaacgacgucgccaucggcgcccccuucgggggcgagacccagcagggggugguguucgucuuccccggcggccccgggggccuggggagcaagccgucccaggugcugcagccccugugggccgcgagccacacccccgacuucuucggcuccgcccuccgcgggggccgggaccuggacggcaacggguaccccgaccugaucgugggcagcuucggggucgacaaggccgugguguaccgcggccggccgaucgucuccgccagcgccucccucacgaucuuccccgcgauguucaaccccgaggagcgcagcugcucccuggagggcaaccccguggccugcaucaaccugagcuucugccucaacgccuccgggaagcacguggccgacagcaucggcuucaccgucgagcugcagcuggacuggcagaagcagaaggggggcgugcggcgcgcccucuuccuggcgucccggcaggccacccugacccagacgcuccugauccagaacggggcccgcgaggacugccgggagaugaagaucuaccugcgcaacgagagcgaguuccgggacaagcucuccccgauccacaucgcccugaacuucagccuggacccccaggcccccguggacagccacggccuccgccccgcgcugcacuaccaguccaagagccggaucgaggacaaggcccagauccugcucgacugcggcgaggacaacaucugcgucccggaccugcagcuggagguguucggggagcagaaccacguguaccucggcgacaagaacgcccugaaccugaccuuccacgcccagaacgucggggagggcggggcguacgaggccgagcuccgcgugaccgccccccccgaggccgaguacuccggccuggugcggcacccgggcaacuucagcucccugagcugcgacuacuucgccgucaaccagucccgccuccuggugugcgaccuggggaaccccaugaaggcgggcgccagccucugggggggccugcgguucaccgugccccaccugcgcgacacgaagaagaccauccaguucgacuuccagauccucuccaagaaccugaacaacagccaguccgacgucgugagcuuccggcuguccguggaggcccaggcccaggucacccucaacggggugagcaagcccgaggccgugcuguucccggucuccgacuggcacccccgcgaccagccccagaaggaggaggaccugggccccgcggugcaccacguguacgagcucaucaaccagggcccgagcuccaucagccaggggguccuggagcuguccugcccccaggcccucgagggccagcagcugcuguacgugacccgcgugacggggcucaacugcaccaccaaccaccccaucaaccccaagggccuggagcuggacccggagggcagccuccaccaccagcagaagcgggaggcccccagccgcuccagcgccuccagcgggccccagauccugaagugccccgaggccgagugcuuccggcugcgcugcgagcucggcccgcugcaccagcaggagucccagagccugcagcuccacuuccgggucugggcgaagaccuuccugcagcgcgagcaccagcccuucucccugcagugcgaggccguguacaaggcccucaagaugcccuaccggauccugccccgccagcugccgcagaaggagcggcagguggccaccgcgguccaguggacgaaggccgaggggagcuacggcgugccccucuggaucaucauccuggccauccuguucgggcuccugcugcucggccugcugaucuacauccucuacaagcugggcuucuucaagcgcucccugcccuacgggaccgccauggagaaggcccagcucaagcccccggcgaccagcgacgccuga

SEQ ID NO: 1183 - RNA, 3597 nt, Artificial Sequence
  EAX08808_variant
auggccgagcacccgccccugcucgacaccacccagauccugagcuccgacaucagccugcucuccgcccccaucgugagcgcggacggcacgcagcaggucauccugguccaggugaaccccggggaggccuucaccauccgccgggaggacggccaguuccagugcaucaccgggcccgcccagguccccaugaugucccccaacggcagcgugccgcccaucuacgugccgcccggguacgcgccccaggucaucgaggacaacggcgugcgccggguggucguggugccccaggcccccgaguuccaccccggcucccacaccguccugcaccgcagcccccacccgccccuccccggguucauccccgugcccacgaugaugccgcccccgccccggcacauguacucccccgugaccggcgccggggacaugaccacccaguacaugccccaguaccagagcucccaggucuacggcgacguggacgcccacagcacgcacgggcgcuccaacuuccgggacgagcgcagcuccaagaccuacgagcggcugcagaagaagcugaaggaccgccagggcacccagaaggacaagaugagcuccccgcccagcagcccccagaagugccccucccccaucaacgagcacaacggccucaucaaggggcagaucgccggcgggaucaacaccggcagcgccaagaucaaguccggcaaggggaagggcgggacccagguggacacggagaucgaggagaaggacgaggagaccaaggcguucgaggcccugcugagcaacaucgucaagccgguggccuccgacauccaggcccggaccgugguccucacguggagcccgcccuccagccugaucaacggcgagaccgacgaguccagcgugcccgagcuguacggguacgaggugcucaucuccagcaccggcaaggacggcaaguacaaguccgucuacgugggggaggagaccaacaucacgcugaacgaccugaagcccgccauggacuaccacgcgaagguccaggccgaguacaacagcaucaagggcacccccuccgaggccgagaucuucaccacccucagcugcgagcccgacauccccaacccgccccgcaucgccaaccggacgaagaacucccugacccugcaguggaaggcccccagcgacaacggguccaagauccagaacuucgugcucgagugggacgagggcaaggggaacggcgaguucugccagugcuacaugggcagccagaagcaguucaagaucaccaagcugucccccgcgauggggugcaaguuccgccugagcgcccggaacgacuacggcaccagcggguucuccgaggaggugcucuacuacacgagcggcugcgccccguccaugcccgccagccccguccugaccaaggccgggaucaccuggcugucccuccaguggagcaagcccuccggcaccccgagcgacgagggcaucuccuacauccuggagauggaggaggagacgagcggguacggcuucaagcccaaguacgacggggaggaccuggcguacaccgugaagaaccuccgccgguccaccaaguacaaguucaaggugaucgccuacaacagcgagggcaaguccaaccccagcgaggucguggaguucaccacgugccccgacaagccgggcauccccgugaagcccuccgucaaggggaagauccacagccacuccuucaagaucaccugggacccgcccaaggacaacggcggggccaccaucaacaaguacgugguggagauggccgagggcagcaacgggaacaagugggagaugaucuacagcggcgccacccgcgagcaccugugcgaccggcugaaccccggcugcuucuaccgccuccgggucuacugcaucuccgacgggggccagagcgcgguguccgagagccugcuggugcagacccccgccgucccgcccgggcccugccugcccccgcgccuccagggccgccccaaggccaaggagauccagcugcggugggggccgccccucguggacggcggcucccccaucagcugcuacuccguggagaugagccccaucgagaaggacgagccccgcgaggucuaccagggguccgagguggagugcacggugagcucccugcugcccggcaagaccuacagcuuccggcuccgcgccgcgaacaagaugggguucggcccguucuccgagaagugcgacaucaccaccgcccccgggccgcccgaccagugcaagccgccccaggucacgugccggagcgcgaccugcgcccaggugaacugggaggugccccuguccaacggcaccgacgucaccgaguaccgccuggaguggggcgggguggagggcagcaugcagaucugcuacugcgggcccggccucuccuacgagaucaaggggcugagccccgccacgaccuacuacugccgggugcaggcccuguccgucgugggcgccggccccuucagcgagguggucgccugcgugaccccgcccagcgugcccgggaucgugaccugccuccaggagaucuccgacgacgagaucgagaacccccacuacagccccuccacgugccuggccaucagcugggagaagcccugcgaccacggcuccgagauccuggccuacagcaucgacuucggggacaagcagucccugaccgugggcaaggugaccagcuacaucaucaacaaccuccagccggacaccacguaccgcauccggauccaggcgcugaacucccugggcgccgggcccuucagccacaugaucaagcucaagaccaagccccugccgcccgacccgccccgccuggagugcgucgccuucucccaccagaaccucaagcugaaguggggcgaggggacccccaagacccugagcacggacuccauccaguaccaccuccagauggaggacaagaacggccgguucgugagccuguaccgcgggcccugccacaccuacaaggugcagcggcugaacgaguccaccagcuacaaguucugcauccaggccugcaacgaggccggcgagggcccccucucccaggaguacaucuucaccacgcccaagagcgucccggcggcccugaaggcccccaagaucgagaaggugaacgaccacaucugcgagaucaccugggagugccugcagcccaugaagggggaccccgugaucuacucccuccaggucaugcugggcaaggacagcgaguucaagcagaucuacaaggggccggacagcuccuuccgcuacagcucccugcagcucaacugcgaguaccgguuccgcgugugcgccauccggcagugccaggacagccugggccaccaggaccugguggggcccuacuccaccaccguccucuucaucagccagcgcacggagccgcccgcguccaccaaccgggacaccguggagagcacccgcacgcgccgggcccuguccgacgagcagugcgccgccgugauccugguccucuucgccuucuucagcauccugaucgcguucaucauccaguacuucgugaucaaguga

SEQ ID NO: 1184 - RNA, 3429 nt, Artificial Sequence
  EAX08809_variant
augagcggccccgcccaggugcccaugaugucccccaacgggagcgucccgcccaucuacgugccgcccggcuacgcgccccaggugaucgaggacaacgggguccgccgggugguggucgugccccaggcccccgaguuccaccccggcucccacaccgugcugcaccgcagcccccacccgccccuccccggguucauccccguccccaccaugaugccgcccccgccccggcacauguacucccccgugacgggcgccggcgacaugaccacccaguacaugccccaguaccagagcucccagguguacggggacgucgacgcccacagcacccacggccgcuccaacuuccgggacgagcgcagcuccaagacguacgagcggcugcagaagaagcugaaggaccgccaggggacccagaaggacaagaugagcuccccgcccagcagcccccagaagugccccucccccaucaacgagcacaacggccucaucaaggggcagaucgccggcggcaucaacaccggguccgccaagaucaagagcggcaaggggaagggcggcacccagguggacacggagaucgaggagaaggacgaggagaccaaggcguucgaggcccugcuguccaacaucgugaagcccgucgccagcgacauccaggcccggaccguggugcucaccuggagcccgcccuccagccugaucaacggggagacggacgaguccagcguccccgagcuguacggcuacgaggugcucaucuccagcaccgggaaggacggcaaguacaaguccguguacgucggggaggagaccaacaucacccugaacgaccugaagccggcgauggacuaccacgccaaggugcaggccgaguacaacagcaucaagggcacgcccuccgaggccgagaucuucaccacccucagcugcgagcccgacauccccaacccgccccgcaucgccaaccggaccaagaacucccugacgcugcaguggaaggcgcccagcgacaacggcuccaagauccagaacuucgugcucgagugggacgaggggaagggcaacggggaguucugccagugcuacaugggcagccagaagcaguucaagaucaccaagcugucccccgccauggggugcaaguuccgccugagcgcccggaacgacuacggcaccuccggcuucagcgaggagguccucuacuacaccuccgggugcgccccgagcaugcccgccagccccgugcugacgaaggcgggcaucaccuggcugucccuccaguggagcaagcccuccgggaccccgagcgacgagggcaucuccuacauccuggagauggaggaggagaccagcggguacggcuucaagcccaaguacgacggcgaggaccuggccuacacggucaagaaccuccgccgguccaccaaguacaaguucaaggugaucgccuacaacagcgaggggaaguccaaccccagcgagguggucgaguucacgaccugccccgacaagccgggcauccccgugaagcccuccgugaaggggaagauccacagccacuccuucaagaucaccugggacccgcccaaggacaacggcggcgccaccaucaacaaguacgucguggagauggccgaggggagcaacggcaacaagugggagaugaucuacuccggggcgacccgcgagcaccugugcgaccggcugaaccccggcugcuucuaccgccuccggguguacugcaucagcgacgggggccaguccgccgucagcgagagccugcuggugcagacccccgccgugcccccgggccccugccugcccccgcgccuccaggggcggcccaaggccaaggagauccagcugcgcuggggcccgccccucgucgacgggggcucccccaucagcugcuacuccguggagaugagccccaucgagaaggacgagccccgcgagguguaccagggguccgaggucgagugcacggugagcucccugcugcccggcaagaccuacagcuuccggcuccgcgccgcgaacaagaugggcuucgggccguucuccgagaagugcgacaucaccaccgcccccggcccgcccgaccagugcaagccgccccaggugaccugccggagcgccacgugcgcccaggucaacugggaggugccccuguccaacgggaccgacgugaccgaguaccgccuggaguggggcggggucgagggcagcaugcagaucugcuacugcggccccgggcucuccuacgagaucaagggccugagccccgcgaccacguacuacugccgggugcaggcccuguccguggucggggccggccccuucagcgaggugguggccugcgucaccccgcccuccgugcccgggaucgugaccugccuccaggagaucagcgacgacgagaucgagaacccccacuacucccccuccacgugccuggccaucagcugggagaagcccugcgaccacggcagcgagauccuggcguacagcaucgacuucggcgacaagcagucccucaccgucgggaaggugaccagcuacaucaucaacaaccugcagccggacaccaccuaccgcauccggauccaggcccugaacucccucggcgccgggcccuucagccacaugaucaagcugaagacgaagccccugcccccggacccgccccgccuggagugcguggccuucucccaccagaaccucaagcugaaguggggcgagggcacccccaagacccugagcaccgacuccauccaguaccaccuccagauggaggacaagaacgggcgguucgucagccuguaccgcggccccugccacacguacaaggugcagcggcugaacgaguccaccagcuacaaguucugcauccaggccugcaacgaggcgggggagggcccccucucccaggaguacaucuucaccacccccaagagcgugccggccgcccugaaggcccccaagaucgagaaggucaacgaccacaucugcgagaucacgugggagugccugcagcccaugaagggggaccccgugaucuacucccuccaggugaugcugggcaaggacagcgaguucaagcagaucuacaagggcccggacuccagcuuccgcuacuccagccugcagcucaacugcgaguaccgguuccgcgucugcgccauccggcagugccaggacagccuggggcaccaggaccuggugggccccuacuccaccaccguccucuucaucagccagcgcaccgagccgcccgcguccacgaaccgggacaccguggagagcacccgcacccggcgcgcccuguccgacgagcagugcgccgccgugauccugguccucuucgcguucuucagcauccugaucgccuucaucauccaguacuucgugaucaaguga

SEQ ID NO: 1185 - RNA, 1020 nt, Artificial Sequence
  EAW49214_variant
augcccccgagcaagccccacccgcccguggucggcaaggugacccaccacagcaucgagcuguacugggaccucgagaagaaggccaagcgccaggggccccaggagcagugguuccgguucagcaucgaggaggaggaccccaagaugcacaccuacggcaucaucuacacgggguacgccaccaagcacguggucgagggccuggagccccgcacccuguaccgguuccgccucaaggugaccucccccagcggggagugcgaguacuccccgcuggugagcgucuccacgacccgggagcccaucagcuccgagcaccuccaccgcgcggugagcgugaacgacgaggaccugcugguccggauccugcagggcggccgcgugaagguggacguccccaacaaguucggguucaccgcccucaugguggccgcccagaagggcuacacccggcuggugaagauccuggucuccaacgggacggacgugaaccucaagaacggcagcgggaaggacucccugaugcuggccugcuacgcgggccaccucgacguggucaaguaccugcgccggcacggcgccagcuggcaggcccgcgaccucgggggcugcaccgcccugcacugggcggccgacgggggccacugcuccgugaucgaguggaugaucaaggacggcugcgagguggacgucguggacaccgggagcggcuggacgccccugaugcggguguccgccgucagcgggaaccagcgcguggccucccugcucaucgacgccggcgcgaacgucaacgugaaggaccggaacgggaagaccccgcugaugguggccguccugaacaaccacgaggagcucgugcagcugcugcucgacaagggcgccgacgccagcgugaagaacgaguucggcaaggggguccuggagauggcccgcguguucgaccggcagagcguggucucccugcucgaggagcgcaagaagaagcagcggcccaagaaguccugcgugugcuga

SEQ ID NO: 1186 - RNA, 3150 nt, Artificial Sequence
  BAF84259_variant
augggcagccgcacccccgaguccccgcugcacgccgugcagcuccggugggggccccgccggcgccccccccugcugccgcuccugcugcuccugcugcccccccccccgcgggucggcggguucaaccucgacgccgaggcgcccgccgugcugagcggcccccccggguccuucuucggcuucagcguggaguucuaccgcccgggcaccgacggggucuccgugcuggugggcgcccccaaggccaacacgagccagcccgggguccuccagggcggggccguguaccugugccccuggggcgcguccccgacccagugcacccccaucgaguucgacagcaagggcucccggcugcucgagagcucccugagcuccagcgagggggaggagcccguggaguacaagucccugcagugguucggcgccaccguccgcgcccacgggagcuccauccucgccugcgcgccccuguacagcuggcggacggagaaggagccgcuguccgaccccgugggcaccugcuaccucagcaccgacaacuucacccgcauccuggaguacgcccccugccggagcgacuucuccugggccgccggccagggguacugccagggcggguucagcgccgaguucacgaagaccggccgcgugguccuggggggccccggcuccuacuucuggcaggggcagauccucagcgcgacccaggagcagaucgccgaguccuacuacccggaguaccugaucaaccuggugcagggccagcuccagacccggcaggccagcuccaucuacgacgacagcuaccugggguacuccguggccgucggcgaguucagcggggacgacacggaggacuucguggccggcgugcccaagggcaaccugaccuacggguacgucaccauccucaacggcuccgacauccgcagccuguacaacuucuccggggagcagauggcgagcuacuucgccuacgccguggccgccaccgacgugaacggcgacgggcuggacgaccuccuggucggcgcgccccugcucauggaccggacgcccgacggccgcccgcaggagguggggcggguguacgucuaccugcagcaccccgccggcaucgaguccacccccacccugacccucacggggcacgacgaguucggccgcuucggcagcucccugaccccgcugggggaccucgaccaggacggcuacaacgacguggccaucggggcccccuucggcggggagacccagcagggcgucguguucguguuccccggcgggcccggcgggcugggcagcaagccgucccagguccugcagccccucugggccgcgagccacacccccgacuucuucgggagcgcccugcggggcggccgcgaccuggacgggaacggcuaccccgaccucaucgugggguccuucggcguggacaaggccgucguguaccgggggcgcccgaucgugagcgccuccgcgagccugacgaucuuccccgccauguucaaccccgaggagcgcuccugcagccuggagggcaaccccgucgccugcaucaaccuguccuucugccucaacgccagcggcaagcacguggccgacuccaucggguucaccguggagcugcagcuggacuggcagaagcagaagggcgggguccggcgcgcgcucuuccuggccagccggcaggccacccugacccagacgcuccugauccagaacggcgcccgcgaggacugccgggagaugaagaucuaccugcgcaacgaguccgaguuccgggacaagcucagcccgauccacaucgcccugaacuucucccuggacccccaggcgcccguggacagccacgggcuccgccccgcccugcacuaccaguccaagagccggaucgaggacaaggcccagauccugcucggcugcggcgaggacaacaucugcgugccggaccugcagcuggaggucuucggggagcagaaccacguguaccucggcgacaagaacgcccugaaccugaccuuccacgcccagaacgugggggagggcggcgcguacgaggccgagcuccgcgucaccgccccccccgaggccgaguacuccgggcuggugcggcaccccggcaacuucagcagccuguccugcgacuacuucgcggugaaccagagccgccuccuggucugcgaccuggggaacccgaugaaggccggcgccucccucugggggggccugcgguucaccgugccccaccugcgcgacacgaagaagaccauccaguucgacuuccagauccucagcaagaaccugaacaacucccagagcgacguggucuccuuccggcugagcguggaggcccaggcccaggugacccucaacggcgucuccaagcccgaggcggugcuguuccccgugagcgacuggcacccgcgcgaccagccccaggaggaggaggaccuggggcccgccguccaccacguguacgagcucaucaaccagggcccguccagcaucucccagggggugcuggagcugagcugcccccaggcccucgagggccagcagcugcuguacgucacccgggugacggggcucaacugcaccaccaaccaccccaucaaccccaagggccuggagcuggacccggagggcucccuccaccaccagcagaagcgcgaggcccccagccgguccagcgccuccagcgggccccagauccugaagugccccgaggcggagugcuuccgccugcgcugcgagcucggcccgcugcaccagcaggagagccagucccugcagcuccacuuccgggugugggccaagaccuuccugcagcgcgagcaccagcccuucagccugcagugcgaggccgucuacaaggcccucaagaugcccuaccggauccugccccgccagcugccgcagaaggagcggcagguggccaccgcggugcaguggacgaaggccgagggguccuacggcgucccccucuggaucaucauccuggccauccuguucgggcuccugcugcucggccugcugaucuacauccucuacaagcugggcuucuucaagcgcagccugcccuacgggaccgccauggagaaggcgcagcucaagcccccggccaccuccgacgccuga

SEQ ID NO: 1187 - RNA, 3150 nt, Artificial Sequence
  BAG35324_variant
augggcagccgcacccccgaguccccgcugcacgccgugcagcuccggugggggccccgccggcgcccgccccugcugccccuccugcugcuccugcugcccccgccgccccgggucggcggguucaaccucgacgccgaggcgcccgccgugcugagcggcccgcccggguccuucuucggcuucagcguggaguucuaccgccccggcaccgacggggucuccgugcuggugggcgcccccaaggccaacacgagccagcccgggguccuccagggcggggccguguaccugugccccuggggcgcgucccccacccagugcacccccaucgaguucgacagcaagggcucccggcugcucgagagcucccugagcuccagcgagggggaggagcccguggaguacaagucccugcagugguucggcgccaccguccgcgcccacgggagcuccauccucgccugcgcgccccuguacagcuggcggacggagaaggagccgcuguccgaccccguggggaccugcuaccucagcaccgacaacuucacccgcauccuggaguacgcccccugccggagcgacuucuccugggccgccggccagggcuacugccagggcggguucagcgccgaguucacgaagaccggccgcgugguccucgggggccccggcuccuacuucuggcaggggcagauccugagcgcgacccaggagcagaucgccgaguccuacuacccggaguaccugaucaaccuggugcagggccagcuccagacccggcaggccagcuccaucuacgacgacagcuaccugggguacuccguggccgucggcgaguucagcggggacgacacggaggacuucguggccggcgugcccaagggcaaccugaccuacggguacgucaccauccucaacggcuccgacauccgcagccuguacaacuucuccggggagcagauggcgagcuacuucggcuacgccguggccgccaccgacgugaacggggacggccuggacgaccuccuggucggcgcgccccugcucauggaccggacgcccgacgggcgcccgcagggcguggggcggguguacgucuaccugcagcaccccgccggcaucgagcccaccccgacccugacccucacgggccacgacgaguucgggcgcuucggcuccagccugacgccccugggggaccucgaccaggacggcuacaacgacguggccaucggggcccccuucggcggcgagacccagcagggggucguguucguguuccccggcgggccgggcgggcugggcuccaagcugagccagguccuccagccccugugggccgccucccacacccccgacuucuucggcagcgcgcugcgcgggggccgggaccucgacgggaacggcuaccccgaccugaucguggggagcuucggcguggacaaggccgucguguaccggggccgcccgaucguguccgccagcgccucccugaccaucuuccccgcgauguucaaccccgaggagcgcagcugcucccuggaggggaaccccgucgccugcaucaaccucagcuucugccugaacgccuccggcaagcacguggccgacagcaucggguucaccguggagcugcagcucgacuggcagaagcagaagggcgggguccggcgcgcccuguuccuggcgucccggcaggccacccucacccagacgcugcugauccagaacggcgcccgcgaggacugccgggagaugaagaucuaccuccgcaacgagagcgaguuccgggacaagcuguccccgauccacaucgcccugaacuucagccucgacccccaggcccccguggacucccacggccugcgccccgcgcugcacuaccagagcaagucccggaucgaggacaaggcccagauccuccuggacugcggggaggacaacaucugcgugccggaccugcagcucgaggucuucggcgagcagaaccacguguaccugggggacaagaacgcccugaaccucaccuuccacgcccagaacgugggcgagggcggggccuacgaggcggagcugcgcgucaccgccccgcccgaggccgaguacagcggccuggugcggcaccccgggaacuucuccagccucagcugcgacuacuucgccgugaaccagucccgccugcuggucugcgaccucggcaaccccaugaaggcgggggccagccuguggggcggccugcgguucaccgugccccaccuccgcgacacgaagaagaccauccaguucgacuuccagauccuguccaagaaccugaacaacagccaguccgacguggucagcuuccggcucuccguggaggcccaggcccaggugacccugaacggggucagcaagcccgaggccgugcuguuccccguguccgacuggcacccgcgcgaccagccccagaaggaggaggaccucggccccgcgguccaccacguguacgagcugaucaaccaggggccgagcuccaucagccagggcgugcuggagcucuccugcccccaggcccuggaggggcagcagcugcucuacgucacccgggugacgggccugaacugcaccaccaaccaccccaucaaccccaagggccuggagcucgacccggaggggagccugcaccaccagcagaagcgcgaggcccccucccggagcuccgccagcuccggcccccagauccugaagugccccgaggccgagugcuuccgccuccgcugcgagcuggggccgcugcaccagcaggagagccagagccuccagcugcacuuccgggugugggcgaagaccuuccugcagcgcgagcaccagcccuucucccuccagugcgaggccgucuacaaggcccugaagaugcccuaccggauccugccccgccagcucccgcagaaggagcgccagguggccaccgccgugcaguggacgaaggcggagggcagcuacggggucccccuguggaucaucauccuggccauccucuucggccugcugcuccugggccugcucaucuacauccuguacaagcugggguucuucaagcggucccuccccuacggcaccgccauggagaaggcccagcugaagcccccggcgaccagcgacgccuga

SEQ ID NO: 1188 - RNA, 1401 nt, Artificial Sequence
  BAG54537_variant
augcugagccuccgccagcggaugaugcacgcccgcuuccggaacccccugucccgccagccggcccggcccagcuaccgccagggcuacaacgggcggcccaacguggagggcaagguccugcccggguccaacggcaagccgaacgggcagcgcaucaucaacggcccccagggcaccaagugggugguggaccucgaccgggggcugguccugaacgcggagggccgcuaccuccaggacagccacgggaacccccugcggaucaagcugggcggggacggccgcaccaucguggaccucgagggcacgcccguggucuccccggacgggcugccccuguucggccaggggcggcacggcacgccccucgccaacgcccaggacaagcccauccugagccugggcgggaagccgcucgugggccuggaggugaucaagaagaccacccacccgcccaccaccaccaugcagcccaccacgaccaccacgccccugcccaccaccaccacgccccgccccaccaccgccaccacccggcgcacgaccacccggcgcccgaccacgaccguccggaccaccacgcgcaccaccaccacgaccacccccaagcccaccacgcccaucccgaccugcccgcccgggacccucgagcggcacgacgacgacggcaaccugaucauguccagcaacgggauccccgagugcuacgccgaggaggacgaguucuccggccuggagaccgacaccgcggugcccacggaggaggccuacgugaucuacgacgaggacuacgaguucgagaccagccgcccgcccaccaccacggagcccuccaccaccgccaccacgccccgcgucauccccgaggagggcgccaucagcuccuuccccgaggaggaguucgaccucgcggggcggaagcgcuucguggccccguacgugaccuaccugaacaaggaccccagcgcccccugcucccugaccgacgcccucgaccacuuccaggucgacagccuggacgagaucauccccaacgaccugaagaaguccgaccucccgccccagcacgcgccccggaacaucaccgugguggccgucgagggcugccacagcuucgugaucguggacugggacaaggccacgcccggggacgucgugaccggcuaccugguguacuccgccagcuacgaggacuucauccgcaacaaguggagcacccaggccuccagcgucacccaccucccgaucgagaaccugaagcccaacacgcgguacuacuucaaggugcaggcccagaacccccacggguacggccccaucuccccgagcgucuccuucgugaccgagagcgacaacccccugcuggugguccgcccgcccggcggggagcccaucuga

SEQ ID NO: 1189 - RNA, 471 nt, Artificial Sequence
  BAG58437_variant
auggaggagcagcgcaacgaggagauccagagcuucaucuacucccugaagcagaugcuccugaacguggaggccaacagcgccaagguccaggaggaccuggaggcggaguuccagucccucuucagccugcuggaggagcucaaggagggcaugcugaugaagaucaagcaggaccgggccucccgcaccuacgagcugcagaaccagcucgccgccugcacccgggcccuggagagcuccgaggagcugcucgagacggcgaaccagacccugcaggccauggacagcgaggacuucccccaggccgccaagcagaucaaggacggggugaccauggcgccggccuuccgccugucccucaaggccaaggugagcgacaacaugucccaccugauggucgacuucgcccaggagcggcagaugcugcaggcccucaaguuccugcccggcgagcgcgggacccacuga

SEQ ID NO: 1190 - RNA, 921 nt, Artificial Sequence
  BAH14721_variant
augaucuucgaggagcacggcuuccgccggaccacgcccccgaccaccgccacccccauccgccaccggccccgccccuacccgcccaacguggggcaggaggcccugagccagaccacgaucuccugggcgcccuuccaggacaccagcgaguacaucaucuccugccaccccgucggcaccgacgaggagccgcuccaguuccgggugcccgggaccagcacguccgccacccugaccggccugacccgcggggccacguacaacaucaucguggaggcccucaaggaccagcagcggcacaagguccgcgaggagguggugaccgucggcaacagcgugaacgagggccugaaccagcccaccgacgacuccugcuucgaccccuacaccgugagccacuacgccgucggggacgagugggagcggauguccgagagcggcuucaagcugcucugccagugccugggguucggcuccgggcacuuccgcugcgacagcucccgguggugccacgacaacggcgugaacuacaagaucggcgagaagugggaccgccagggggagaacggccagaugaugagcugcacgugccuggggaacggcaagggcgaguucaagugcgacccgcacgaggcgaccugcuacgacgacgggaagaccuaccacgugggcgagcaguggcagaaggaguaccucggggccaucugcuccugcacgugcuucggcgggcagcggggcuggcgcugcgacaacugccggcgccccggcggggagcccagccccgagggcaccaccgggcaguccuacaaccaguacagccagcgguaccaccagcgcaccaacaccaacgucaacugcccgaucgagugcuucaugccccuggacgugcaggccgaccgggaggacucccgcgaguga

SEQ ID NO: 1191 - RNA, 1920 nt, Artificial Sequence
  BAG61560_variant
auggagaagauccuguucuaccucuuccugaucggcaucgccgugaaggcccagaucugccccaagcgcugcgucugccagauccugagcccgaaccucgcgacccugugcgccaagaaggggcuccuguucgugccgcccaacaucgaccggcgcaccguggagcugcggcuggccgacaacuucgucacgaacaucaagcgcaaggacuucgccaacaugaccucccucguggaccugacccugagccggaacaccaucuccuucaucacgccccacgccuucgcggaccuccgcaaccugcggagccugcaccucaacuccaaccgccugaccaagaucaccaacgacauguucagcggccuguccaaccuccaccaccugauccugaacaacaaccagcucacccugaucagcuccacggccuucgacgacguguucgcccuggaggagcucgaccugagcuacaacaaccuggagaccauccccugggacgccgucgagaagauggugucccuccacacccugagccuggaccacaacaugaucgacaacauccccaaggggaccuucucccaccuccacaagaugacgcggcuggacgugaccagcaacaagcugcagaagcucccgcccgacccccuguuccagcgcgcgcagguccuggccaccuccggcaucaucagccccuccaccuucgcccucagcuucgggggcaacccccugcacugcaacugcgagcugcucuggcugcggcgccugucccgggaguacgaccucgagacgugcgccagcccgccccugcugaccggccgcuacuucuggagcauccccgaggaggaguuccucugcgagccgccccugaucacccggcacacccacgagaugcgcgugcuggaggggcagcgggccacgcuccgcugcaaggcgcggggcgaccccgagcccgccauccacuggaucucccccgaggggaagcugaucagcaacgccacccgcucccugguguacgacaacggcacccuggacauccucaucaccacggucaaggacaccggggccuucacgugcaucgccagcaaccccgcgggcgaggccacccagaucguggaccugcacaucaucaagcugccgcaccuccugaacuccaccaaccacauccacgagcccgaccccggcagcuccgacaucagcaccuccaccaagagcggguccaacaccagcuccagcaacgacggcaucacgucccugaccgccacccggguggucgggugcauccaguucaccacggagcaggacuacgugcgcugccacuucaugcagagccaguuccucggcggcaccaugaucaucaucaucgggggcaucaucguggccuccguccugguguucaucaucauccugaugauccgcuacaaggugugcaacaacaacgggcagcacaaggucaccaaggugagcaacguguacucccagaccaacggcgcccagauccaggggugcagcgucacccucccccagagcguguccaagcaggcggucggccacgaggagaacgcccagugcugcaaggccacgagcgacaacgugauccaguccagcgagaccugcuccagccaggacuccgccaccaccacgagcgcccugccgcccuccuggaccagcuccaccagcgugucccagaagcagaagcggaagaccggcacgaagcccagcaccgagccccagaacgaggcggucaccaacguggagucccagaacaccaaccgcaacaacagcacggcccugcagcucgccucccggccgcccgacagcgugaccgaggggcccaccagcaagcgcgcccacaucaagccgaacgcgcugcugaccaacgucgaccagaucgugcaggagacgcagcggcucgagcugaucuga

SEQ ID NO: 1192 - RNA, 1014 nt, Artificial Sequence
  BAG61984_variant
augaucuucgaggagcacggcuuccgccggaccacgcccccgaccaccgccacccccauccgccaccggccccgccccuacccgcccaacgugggggaggagauccagaucggccacaucccccgggaggacgucgacuaccaccuguacccccacgggccgggccucaaccccaacgccagcaccgggcaggaggcccugucccagacgaccaucagcugggcccccuuccaggacaccuccgaguacaucaucagcugccaccccgugggcaccgacgaggagccgcugcaguuccgcgugcccggcacguccaccagcgccacccucaccgggcugacgcggggcgccaccuacaacaucaucgucgaggcccugaaggaccagcagcgccacaaggugcgggaggagguggucaccguggggaacuccgugaacgagggccucaaccagcccaccgacgacagcugcuucgaccccuacacggucucccacuacgcggugggggacgagugggagcgcaugagcgaguccggcuucaagcugcugugccagugccucggcuucgggagcggccacuuccggugcgacuccagccgcuggugccacgacaacggggugaacuacaagaucggcgagaagugggaccggcagggcgagaacgggcagaugauguccugcacgugccugggcaacgggaagggcgaguucaagugcgacccgcacgaggcgaccugcuacgacgacgggaagaccuaccacgucggcgagcaguggcagaaggaguaccugggcgccaucugcagcugcacgugcuucgggggccagcgcggguggcggugcgacaacugccgccggcccggcggggagcccucccccgagggcaccaccggccagagcuacaaccaguacucccagcgcuaccaccagcggaccaacaccaacgugaacugcccgaucgagugcuucaugccccucgacgugcaggccgaccgcgaggacagccgggaguga

SEQ ID NO: 1193 - RNA, 3045 nt, Artificial Sequence
  BAG62013_variant
augcgcgugaccugggcccccccgcccagcaucgaccugaccaacuuccucguccgguacucccccgugaagaacgaggaggacguggccgagcugagcaucucccccagcgacaacgcggucgugcugacgaaccuccugccgggcaccgaguacguggucuccgugagcuccguguacgagcagcacgagagcaccccccugcgcgggcggcagaagaccggccucgacucccccacggggaucgacuucagcgacaucaccggcaacuccuucaccguccacuggaucgccccccgcgccaccaucacgggguaccggauccgccaccacccggagcacuucagcggccggccccgcgaggaccgggugccccacucccgcaacagcaucacccugaccaaccugacccccggcacggaguacguggucuccaucguggcccucaacgggcgggaggagagcccgcugcugaucggccagcaguccaccgugagcgacgucccccgcgaccucgaggugguggccgcgacccccaccucccugcugaucagcugggacgcccccgccgucacggugcgguacuaccgcaucaccuacggggagaccggcgggaacagcccggugcaggaguucaccguccccggcuccaagagcacggccaccaucuccggccucaagcccgggguggacuacaccaucaccguguacgcggucacgggccggggggacagccccgccuccagcaagccgaucuccaucaacuaccgcaccgagaucgacaagcccagccagaugcaggugaccgacguccaggacaacuccaucagcgugaaguggcugcccuccagcucccccgugaccggcuaccgggucacgaccaccccgaagaacggccccgggcccaccaagacgaagaccgccggccccgaccagaccgagaugaccaucgaggggcugcagccgacgguggaguacguggucagcguguacgcccagaaccccuccggcgagagccagccccucgugcagaccgccgucaccaccaucccggcgcccaccgaccugaaguucacgcaggugacccccaccucccugagcgcccaguggacccccccgaacgugcagcucacgggguaccgcguccgggugacccccaaggagaagaccggccccaugaaggagaucaaccuggcccccgacuccagcagcguggucguguccggccugaugguggccaccaaguacgaggucagcguguacgcccucaaggacacgcugaccucccgcccggcgcaggggguggucaccacccuggagaacgugagccccccccggcgcgcccgcgugacggacgccaccgagaccaccaucacgaucuccuggcggaccaagaccgagaccaucacgggcuuccaggucgacgccgugcccgccaacgggcagaccccgauccagcgcaccaucaagcccgacgugcggagcuacaccaucacgggccuccagcccgggaccgacuacaagaucuaccuguacacccugaacgacaacgcgcgcuccagccccgucgugaucgacgccuccaccgccaucgacgccccgagcaaccuccgguuccuggccacgacccccaacucccugcucgugagcuggcagcccccccgcgcgcggaucaccggcuacaucaucaaguacgagaagccgggcucccccccccgcgaggucgugccccggccgcgccccggggugaccgaggccacgaucaccggccuggagcccgggaccgaguacaccaucuacgucaucgcccugaagaacaaccagaagagcgagccgcucaucggccggaagaagacggacgagcugccccagcuggugacccucccccaccccaaccugcacgggccggagauccuggacgugcccuccaccguccagaagacccccuucgugacccaccccggcuacgacacgggcaacgggauccagcucccgggcaccagcgggcagcagcccuccgugggccagcagaugaucuucgaggagcacggcuuccgccggaccaccccccccacgaccgccaccccgauccgccaccggccccgccccuaccccccgaacgucggggaggagauccagaucggccacaucccccgggaggacguggacuaccaccuguacccccacgggcccggccugaacccgaacgcgagcaccgggcaggaggcccucagccagacgaccaucuccugggcccccuuccaggacaccagcgaguacaucaucuccugccaccccgugggcaccgacgaggagccccugcaguuccgcgucccgggcacgagcaccuccgccacccugaccgggcucacgcggggcgccaccuacaacaucaucguggaggcgcugaaggaccagcagcgccacaaggugcgcgaggaggucgugaccguggggaacagcgucaacgagggccugaaccagcccaccgacgacuccugcuucgaccccuacacggugagccacuacgccgugggggacgagugggagcggauguccgagagcggcuucaagcugcucugccagugccugggcuucggguccggccacuuccgcugcgacagcucccgguggugccacgacaacggggucaacuacaagaucggcgagaagugggaccgccagggggagaacggccagaugaugagcugcaccugccugggcaacgggaagggcgaguucaagugcgacccccacgaggccaccugcuacgacgacgggaagaccuaccacgugggcgagcaguggcagaaggaguaccucggggccaucugcuccugcacgugcuucggcggccagcggggguggcgcugcgacaacugccggcgcccgggcggggagcccagccccgagggcaccaccggccaguccuacaaccaguacagccagcgguaccaccagcgcaccaacacgaacgucaacugcccgaucgagugcuucaugccccuggacgugcaggccgaccgggaggacucccgcgaguga

SEQ ID NO: 1194 - RNA, 2685 nt, Artificial Sequence
  BAG62178_variant
augcgcgugaccugggcgcccccgcccagcaucgaccugaccaacuuccucguccgguacucccccgugaagaacgaggaggacguggccgagcugagcaucucccccagcgacaacgccgucgugcugacgaaccuccugccgggcaccgaguacguggucuccgugagcuccguguacgagcagcacgagagcacgccccugcgcgggcggcagaagaccggccucgacucccccaccgggaucgacuucagcgacaucaccgccaacuccuucaccguccacuggaucgcgccccgcgccaccaucacgggcuaccggauccgccaccacccggagcacuucagcgggcggccccgcgaggaccgggugccccacucccgcaacagcaucacccugaccaaccugacccccggcacggaguacguggucuccaucguggcccucaacggccgggaggagagcccgcugcugaucgggcagcaguccaccgugagcgacgucccccgcgaccucgaggugguggccgccacccccaccucccugcugaucagcugggacgcccccgccgucacggugcgguacuaccgcaucaccuacggcgagaccgggggcaacagcccggugcaggaguucaccguccccggguccaagagcacggcgaccaucuccggccucaagcccggcguggacuacaccaucaccguguacgccgucacggggcggggcgacagccccgccuccagcaagccgaucuccaucaacuaccgcaccgagaucgacaagcccagccagaugcaggucaccgacguccaggacaacuccaucagcgugaaguggcugcccuccagcucccccgugaccggguaccgggucacgaccaccccgaagaacggccccggccccaccaagacgaagaccgccgggcccgaccagaccgagaugaccaucgagggccugcacccgacgguggaguacguggugagcguguacgcccagaaccccuccggggagagccagccccucgugcagaccgccgucaccaccaucccggcccccaccgaccugaaguucacccaggugacccccaccucccugagcgcccaguggacgcccccgaacgugcagcucaccggcuaccgcguccgggugacccccaaggagaagaccgggcccaugaaggagaucaaccuggcccccgacuccagcagcguggucguguccggccugaugguggccaccaaguacgaggucagcguguacgcgcucaaggacacgcugaccucccgcccggcccagggcguggucaccacccuggagaacgugagcccgccccggcgcgcccgcgugacggacgccaccgagaccaccaucacgaucuccuggcggaccaagaccgagaccaucacgggguuccaggucgacgccgugcccgcgaacggccagaccccgauccagcgcaccaucaagcccgacgugcggagcuacaccaucacggggcuccagcccggcaccgacuacaagaucuaccuguacacccugaacgacaacgcccgcuccagccccgucgugaucgacgccuccaccgccaucgacgccccgagcaaccuccgguuccuggcgacgacccccaacucccugcucgugagcuggcagccgccccgcgcccggaucaccggguacaucaucaaguacgagaagcccggcuccccgccccgcgaggucgugccccggccccgccccggcgugaccgaggccacgaucaccgggcuggagcccggcaccgaguacaccaucuacgucaucgcccugaagaacaaccagaaguccgagccgcucaucgggcggaagaagacgggccaggaggcgcugagccagaccaccaucagcugggcccccuuccaggacaccuccgaguacaucaucagcugccaccccguggggaccgacgaggagccccugcaguuccgcgugccgggcacgagcaccuccgccacccucaccggccugacgcgcggggccaccuacaacaucaucgucgaggcccugaaggaccagcagcggcacaaggugcgggaggaggugaucaccgucggcaacagcgugaacgaggggcucaaccagcccaccgacgacuccugcuucgaccccuacacggugagccacuacgcggucggcgacgagugggagcgcauguccgagagcggcuucaagcugcugugccagugccucggguucggcuccgggcacuuccggugcgacagcucccgcuggugccacgacaacggcgugaacuacaagaucggggagaagugggaccggcagggcgagaacggccagaugaugagcugcacgugccuggggaacggcaagggggaguucaagugcgacccccacgaggcgaccugcuacgacgacggcaagaccuaccacgugggggagcaguggcagaaggaguaccugggcgccaucugcuccugcacgugcuucggcgggcagcgcggcuggcgcugcgacaacugccggcgccccgggggcgagcccagccccgaggggaccaccggccaguccuacaaccaguacagccagcgguaccaccagcgcaccaacacgaacgucaacugccccaucgagugcuucaugccgcucgacgugcaggccgaccgggaggacucccgcgaguga

SEQ ID NO: 1195 - RNA, 1152 nt, Artificial Sequence
  BAH12351_variant
auggccagcgccuuccgccugucccucaagcccaaggugagcgacaacaugacccaccugauggucgacuucucccaggagcggcagaugcugcagacccucaaguuccugccggugcccaaggcgcccgagaucgaccccguggagugccuggucgccgacaacagcgugacgguggccuggcgcaugccggaggaggacaacaagaucgaccacuucauccucgagcaccggaagaccaacuucgacggccugccccgcgucaaggacgagcggugcugggagaucaucgacaacaucaaggggaccgaguacacccuguccggccucaaguucgacagcaaguacaugaacuuccgcgugcgggccugcaacaaggccguggcgggggaguacuccgaccccgucacgcuggagaccaaggcccugaacuucaaccucgacaacagcuccagccaccugaaccugaagguggaggacacgugcguggagugggaccccaccggcgggaagggccaggaguccaagaucaagggcaaggagaacaaggggagcguccacgugaccucccucaagaagcacaccagcggcaccccgucccccaagcgcaccagcguggggucccggccgcccgccguccgcggcagccgggaccgcuucacgggggaguccuacaccgugcugggcgacaccgccaucgagagcggccagcacuacugggaggugaaggcgcagaaggacugcaagagcuacuccgucgggguggccuacaagacccugggcaaguucgaccagcucgggaagacgaacaccagcuggugcauccacgugaacaacuggcugcagaacaccuucgccgccaagcacaacaacaaggucaaggcccuggacgugaccgugcccgagaagaucggcgucuucugcgacuucgacggcgggcagcucuccuucuacgacgcgaacagcaagcagcugcuguacuccuucaagacgaaguucacccagcccgugcuccccggcuucauggucuggugcgggggccugagccuguccaccgggaugcagguccccagcgccgugcggacccuccagaaguccgagaacggcaugacgggcagcgccuccagccugaacaacguggugacccaguga

SEQ ID NO: 1196 - RNA, 441 nt, Artificial Sequence
  BAH14175_variant
augcccccgagcaagccccacccgcccguggucggcaaggugacccaccacuccaucgagcuguacugggaccucgagaagaaggccaagcgccaggggccccaggagcagugguuccgguucagcaucgaggaggaggaccccaagaugcacaccuacggcaucaucuacacgggguacgccaccaagcacguggucgagggccuggagccccgcacccuguaccgguuccgccucaaggugaccucccccagcggggagugcgaguacuccccgcuggugagcgucuccacgaccagcgaguacuccgaccggccccacagcccccugucccgcagcauggagaugaccuccaaccucgagaagaucuucugccugagcuucggccugacccggucccgcaacgacacgaucuucaagcacugcaacaacaucugcuga

SEQ ID NO: 1197 - RNA, 2055 nt, Artificial Sequence
  EAX08810_variant
auggccgagcacccgccccugcucgacaccacccagauccugagcuccgacaucagccugcucuccgcccccaucgugagcgcggacggcacgcagcaggucauccugguccaggugaaccccggggaggccuucaccauccgccgggaggacggccaguuccagugcaucaccgggcccgcccaggugccgaugaugucccccaacggcagcgugccgcccaucuacgugccgcccggguacgcgccccaggucaucgaggacaacggcgugcgccggguggucguggugccccaggcccccgaguuccaccccggcucccacaccguccugcaccgcagcccccacccgccccuccccggguucauccccgugcccacgaugaugccgcccccgccccggcacauguacucccccgugaccggcgccggggacaugaccacccaguacaugccccaguaccagagcucccaggucuacggcgacguggacgcccacagcacgcacgggcgcuccaacuuccgggacgagcgcagcuccaagaccuacgagcggcugcagaagaagcugaaggaccgccagggcacccagaaggacaagaugagcuccccgcccagcagcccccagaagugccccucccccaucaacgagcacaacggccucaucaaggggcagaucgccggcgggaucaacaccggcagcgccaagaucaaguccggcaaggggaagggcgggacccagguggacacggagaucgaggagaaggacgaggagaccaaggcguucgaggcccugcugagcaacaucgucaagccgguggccuccgacauccaggcccggaccgugguccucacguggagcccgcccuccagccugaucaacggcgagaccgacgaguccagcgugcccgagcuguacggguacgaggugcucaucuccagcaccggcaaggacggcaaguacaaguccgucuacgugggggaggagaccaacaucacgcugaacgaccugaagcccgccauggacuaccacgcgaagguccaggccgaguacaacagcaucaagggcacccccuccgaggccgagaucuucaccacccucagcugcgagcccgacauccccaacccgccccgcaucgccaaccggacgaagaacucccugacccugcaguggaaggcccccagcgacaacggguccaagauccagaacuucgugcucgagugggacgagggcaaggggaacggcgaguucugccagugcuacaugggcagccagaagcaguucaagaucaccaagcugucccccgcgauggggugcaaguuccgccugagcgcccggaacgacuacggcaccagcggguucuccgaggaggugcucuacuacacgagcggcugcgccccguccaugcccgccagccccguccugaccaaggccgggaucaccuggcugucccuccaguggagcaagcccuccggcaccccgagcgacgagggcaucuccuacauccuggagauggaggaggagacgagcggguacggcuucaagcccaaguacgacggggaggaccuggcguacaccgugaagaaccuccgccgguccaccaaguacaaguucaaggugaucgccuacaacagcgagggcaaguccaaccccagcgaggucguggaguucaccacgugccccgacaagccgggcauccccgugaagcccuccgucaaggggaagauccacagccacuccuucaagaucaccugggacccgcccaaggacaacggcggggccaccaucaacaaguacgugguggagauggccgagggcagcaacgggaacaagugggagaugaucuacagcggcgccacccgcgagcaccugugcgaccggcugaaccccggcugcuucuaccgccuccgggucuacugcaucuccgacgggggccagagcgcgguguccgagagccugcuggugcagacccccgccgucccgcccgggcccugccugcccccgcgccuccagggccgccccaaggccaaggagauccagacgcccuccggguga

SEQ ID NO: 1198 - RNA, 492 nt, Artificial Sequence
  AAG35520_variant
augagcgaguccggcuucaagcugcucugccagugccugggguucggcagcgggcacuuccgcugcgacuccagccgguggugccacgacaacggcgugaacuacaagaucggggagaagugggaccgccagggcgagaacggccagaugauguccugcacgugccuggggaacggcaagggggaguucaagugcgacccccacgaggcgaccugcuacgacgacggcaagaccuaccacgucggggagcaguggcagaaggaguaccucggcgccaucugcagcugcacgugcuucggcgggcagcggggcuggcgcugcgacaacugccggcgccccgggggcgagccgucccccgagggcaccaccgggcagagcuacaaccaguacucccagcgguaccaccagcgcaccaacaccaacgugaacugccccaucgagugcuucaugccgcuggacgugcaggccgaccgggaggacagccgcgaguga

SEQ ID NO: 1199 - RNA, 1143 nt, Artificial Sequence
  AAA52471_variant
augauguucagcggcuucaacgccgacuacgaggccuccagcucccgcugcagcuccgcgagccccgccggggacucccugagcuacuaccacuccccggccgacagcuucuccagcaugggcucccccgugaacgcccaggacuucugcaccgaccucgccgucagcuccgcgaacuucauccccaccgugacggccaucagcaccucccccgaccugcaguggcuggugcagccggcccucgucagcuccguggcccccagccagacccgggcgccccaccccuucggggugccggcccccagcgccggcgccuacucccgcgccggggucgugaagaccaugacgggcggccgggcgcagagcaucgggcgccggggcaagguggagcagcugucccccgaggaggaggagaagcgccggauccgccgggagcgcaacaagauggccgccgccaagugccggaaccgccggcgcgagcugaccgacacccuccaggccgagaccgaccagcuggaggacgagaaguccgcgcugcagacggagaucgccaaccuccugaaggagaaggagaagcuggaguucauccucgccgcccaccggcccgccugcaagaucccggacgaccugggguuccccgaggagaugagcgucgcgagccuggaccucaccggcgggcugcccgagguggccacccccgaguccgaggaggccuucacccugccgcuccugaacgaccccgagcccaagcccagcguggagccggucaaguccaucagcuccauggagcugaagacggagcccuucgacgacuuccucuuccccgccagcucccgccccagcggcuccgagaccgcccggagcgugccggacauggaccuguccggcagcuucuacgcggccgacugggagccccugcacuccgggagccucggcauggggcccauggccaccgagcuggagccccugugcaccccgguggucacgugcacccccagcugcaccgccuacaccuccagcuucguguucacguaccccgaggcggacuccuucccgagcugcgccgccgcccaccgcaagggcuccagcuccaacgagcccagcuccgacagccucuccagccccacccugcuggcccucuga

SEQ ID NO: 1200 - RNA, 1296 nt, Artificial Sequence
  AAG53607_variant
augcccaacccgcgccccggcaagcccagcgcccccucccuggcccucgggccgagccccggcgcgucccccagcuggcgggccgcccccaaggccuccgaccugcugggggcccgcggccccgggggcaccuuccagggccgggaccuccgcgggggcgcgcacgccagcuccagcucccugaaccccaugccgcccagccagcugcagcucccgacccugccccuggugauggucgcccccuccggggcccggcucggcccccugccgcaccuccaggcgcugcugcaggaccgcccccacuucaugcaccagcugagcacgguggacgcccacgcccggacccccgugcuccagguccacccccuggaguccccggccaugaucagccugaccccgcccaccacggccaccgggguguucucccucaaggcgcgccccggccugccgcccggcaucaacguggccagccuggagugggucucccgggagcccgcccuccugugcaccuuccccaaccccagcgcgccccgcaaggacuccacccugagcgccgugccccagagcuccuacccgcuccuggccaacggggugugcaaguggcccggcugcgagaaggucuucgaggagcccgaggacuuccugaagcacugccaggccgaccaccuccuggacgagaaggggcgggcccagugccugcuccagcgcgagauggugcagagccuggagcagcagcuggugcucgagaaggagaagcuguccgccaugcaggcccaccuggcgggcaagauggcccucacgaaggccagcuccgucgccagcuccgacaagggcagcugcugcaucguggccgcggggucccagggccccguggucccggccuggagcgggccccgggaggcccccgacucccuguucgccgugcgccggcaccuguggggcagccacgggaacuccaccuuccccgaguuccuccacaacauggacuacuucaaguuccacaacaugcgcccgcccuucaccuacgcgacccugauccggugggccauccuggaggcccccgagaagcagcgcacgcucaacgagaucuaccacugguucacccggauguucgccuucuuccgcaaccaccccgccaccuggaagaacgcgauccggcacaaccugagccugcacaagugcuucgugcgcgucgaguccgagaagggcgccguguggaccguggacgagcucgaguuccgcaagaagcggagccagcgcccgucccggugcagcaaccccacgcccggccccuga

SEQ ID NO: 1201 - RNA, 1098 nt, Artificial Sequence
  AAA52639_variant
auguggcugcgcagccaccggcagcucugccuggccuuccugcucgugugcguccuguccgugaucuucuuccugcacauccaccaggacagcuucccccacggccucgggcuguccauccugugcccggaccgccggcucgugaccccgcccgucgccaucuucugccugcccggcaccgcgauggggcccaacgccagcuccagcugcccccagcaccccgccucccugagcggcacguggaccguguaccccaacgggcgcuucggcaaccagaugggccaguacgccacccuccuggcccuggcgcagcucaacgggcggcgcgccuucauccugccggccaugcacgccgcgcuggcccccguguuccggaucacccuccccguccuggcccccgagguggacucccgcacgccguggcgggagcugcagcuccacgacuggaugagcgaggaguacgccgaccugcgcgaccccuuccugaagcucuccggcuuccccugcagcuggaccuucuuccaccaccuccgggagcagauccgccgggaguucacccugcacgaccaccuccgcgaggaggcccaguccgugcuggggcagcugcggcugggccgcaccggggaccggccccgcacguucgucggcgugcacgugcggcgcggcgacuaccugcaggucaugccgcagcgguggaaggggguggugggcgacagcgcguaccugcgccaggccauggacugguuccgcgcccggcacgaggcccccgucuucguggugaccuccaacgggauggaguggugcaaggagaacaucgacaccagccagggcgacgucaccuucgccggcgacgggcaggaggcgacgcccuggaaggacuucgcccuccugacccagugcaaccacaccaucaugaccaucggcacguucggguucugggccgccuaccuggccggcggggacaccguguaccucgcgaacuucacccugcccgacuccgaguuccugaagaucuucaagccggaggccgccuuccuccccgagugggugggcaucaacgccgaccugagcccccuguggacccucgccaagcccuga

SEQ ID NO: 1202 - RNA, 1380 nt, Artificial Sequence
  EAW58359_variant
auggcgccccugugcccgagccccuggcucccccugcugauccccgccccggcccccggccucaccgugcagcugcugcucucccugcugcuccugguccccgugcacccccagcgccugccgcggaugcaggaggacagcccccucgggggcggguccagcggcgaggacgacccccugggggaggaggaccugcccuccgaggaggacagcccgcgcgaggaggacccgcccggcgaggaggaccuccccggcgaggaggaccugcccggggaggaggaccugcccgaggugaagcccaaguccgaggaggagggcagccucaagcuggaggaccugcccaccgucgaggccccgggggacccccaggagccccagaacaacgcccaccgggacaaggagggcgacgaccagucccacuggcgcuacgggggcgacccgcccuggccccgggugagccccgccugcgccggccgcuuccagucccccguggacauccggccgcagcucgcggccuucugccccgcccugcgcccccuggagcuccugggguuccagcugccgccccuccccgagcugcggcugcgcaacaacggccacagcguccagcucacgcugcccccggggcuggagauggcccucggccccggccgggaguaccgcgcgcugcagcugcaccuccacuggggcgccgccgggcggcccggguccgagcacaccguggagggccaccgcuuccccgccgagauccacgugguccaccugagcaccgccuucgcgcggguggacgaggcccuggggcgcccgggcggccucgccgugcuggccgccuuccuggaggaggggcccgaggagaacuccgcguacgagcagcuccugagccggcuggaggagaucgccgaggagggcuccgagacccagguccccgggcucgacaucagcgcccugcugcccuccgacuucagccgcuacuuccaguacgagggcagccucacgaccccgcccugcgcccagggggugaucuggaccguguucaaccagaccgucaugcuguccgccaagcagcugcacacgcugagcgacacccucuggggccccggcgacucccggcugcagcugaacuuccgcgcgacccagccccucaacgggcgggugaucgaggccagcuucccggccggcguggacuccagcccccgcgccgccgagcccguccagcugaacuccugccuggcggccggggacauccucgcccugguguucggccuccuguucgccgugaccagcgucgcguuccuggugcagaugcgccggcagcaccgccgggggacgaagggcggcguguccuaccgccccgccgaggucgccgagaccggggccuga

SEQ ID NO: 1203 - RNA, 417 nt, Artificial Sequence
  U19142.1_variant
augagcuggcgcggccgguccaccuaccgcccccggccgcgccgguacguggagccgcccgagaugaucgggcccaugcgccccgagcaguucagcgacgaggucgagcccgccacccccgaggagggcgagcccgccacgcagcggcaggacccggcggccgcccaggagggggaggacgagggcgccuccgccgggcagggccccaagcccgaggcggacagccaggagcagggccacccccagaccgggugcgagugcgaggacggcccggacgggcaggagauggacccgcccaaccccgaggaggugaagacccccgaggaggagaugcgcucccacuacguggcccagaccggcauccuguggcuccugaugaacaacugcuuccugaaccucagcccccggaagcccuga

SEQ ID NO: 1204 - RNA, 351 nt, Artificial Sequence
  AAH69397_variant
augagcuggcgcggccgguccaccuaccgcccccggccgcgccgguacguggagccgcccgagaugaucgggcccaugcgccccgagcaguucagcgacgaggucgagcccgccacccccgaggagggcgagcccgccacgcagcggcaggacccggcggccgcccaggaggggcaggacgagggcgccuccgccgggcagggccccaagcccgaggcgcacagccaggagcagggccacccccagaccgggugcgagugcgaggacggcccggacgggcaggagauggacccgcccaaccccgaggaggugaagacccccgaggagggcgagaagcagucccagugcuga

SEQ ID NO: 1205 - RNA, 357 nt, Artificial Sequence
  AAA82746_variant
augaaccugagccgcggcaaguccaccuacuacuggccccggccgcgccgguacgugcagccgcccgaggucaucgggcccaugcgccccgagcaguucagcgacgagguggagcccgccacccccgaggagggcgagcccgccacgcagcggcaggacccggcggccgcccaggagggggaggacgagggcgccuccgccgggcagggccccaagcccgaggcggacagccaggagcagggccacccccagaccgggugcgagugcgaggacggcccggacgggcaggagauggacccgcccaaccccgaggaggugaagacccccgaggagggcgagaagcagucccagugcuga

SEQ ID NO: 1206 - RNA, 354 nt, Artificial Sequence
  AAH69470_variant
augagcuggcgcggccgguccaccuacuacuggccccgcccgcggcgcuacgugcagccgcccgagaugaucgggcccaugcggcccgagcaguucagcgacgaggucgagcccgccacccccgaggagggcgagcccgccacgcagcgccaggacccggcggccgcccaggagggggaggacgagggcgccuccgccgggcagggccccaagcccgaggcggacagccaggagcagggccacccccagaccgggugcgagugcgaggacggcccggacgggcaggagauggacccgcccaaccccgaggaggugaagacccccgaggagggcgaggggcagucccagugcuga

SEQ ID NO: 1207 - RNA, 354 nt, Artificial Sequence
  AAA82748_variant
augagcuggcgcggccgguccaccuacuacuggccccgcccgcggcgcuacgugcagccgcccgaggucaucgggcccaugcggcccgagcaguucagcgacgagguggagcccgccacccccgaggagggcgagcccgccacgcagcgccaggacccggcggccgcccaggagggggaggacgagggcgccuccgccgggcagggccccaagcccgaggcggacagccaggagcagggccacccccagaccgggugcgagugcgaggacggcccggacgggcaggagauggacccgcccaaccccgaggaggugaagacccccgaggagggcgagaagcagucccagugcuga

SEQ ID NO: 1208 - RNA, 354 nt, Artificial Sequence
  AAA82749_variant
augagcuggcgcggccgguccaccuacuacuggccccgcccgcggcgcuacgugcagccgcccgaggucaucgggcccaugcggcccgagcaguucagcgacgagguggagcccgccacccccgaggagggcgagcccgccacgcagcgccaggacccggcggccgcccaggagggggaggacgagggcgccuccgccgggcagggccccaagcccgaggcggacagccaggagcagggccacccccagaccgggugcgagugcgaggacggcccggacgggcaggagguggacccgcccaaccccgaggaggucaagacccccgaggagggcgagaagcagucccagugcuga

SEQ ID NO: 1209 - RNA, 354 nt, Artificial Sequence
  AAC25989_variant
augagcuggcgcggccgguccaccuacuacuggccccgcccgcggcgcuacgugcagccgcccgagaugaucgggcccaugcggcccgagcaguucagcgacgaggucgagcccgccacccccgaggagggcgagcccgccacgcagcgccaggacccggcggccgcccaggagggggaggacgagggcgccuccgccgggcagggccccaagcccgaggcgcacagccaggagcagggccacccccagaccgggugcgagugcgaggacggcccggacgggcaggagauggacccgcccaaccccgaggaggugaagacccccgaggagggcgagaagcagucccagugcuga

SEQ ID NO: 1210 - RNA, 351 nt, Artificial Sequence
  AAC33676_variant
augagcuggcgcggccgguccaccuaccgcccccggccgcgccgguacguggagccgcccgagaugaucgggcccaugcgccccgagcaguucagcgacgaggucgagcccgccacccccgaggagggcgagcccgccacgcagcggcaggacccggcggccgcccaggagggggaggacgagggcgccuccgccgggcagggccccaagcccgaggcggacagccaggagcagggccacccccagaccgggugcgagugcgaggacggcccggacgggcaggagauggacccgcccaaccccgaggaggugaagacccccgaggagggcgagaagcagucccagugcuga

SEQ ID NO: 1211 - RNA, 1344 nt, Artificial Sequence
  AAA35657_variant
auggagcugcucaagcugaaccgcagcgugcagggcaccgggcccggcccgggggccucccugugccggcccggcgcgccccuccugaacagcuccagcgucgggaaccuguccugcgagcccccgcgcauccggggcgccggcacccgcgagcucgagcuggccauccggaucacgcuguacgccgugaucuuccucaugagcgucgggggcaacaugcugaucaucguggugcuggggcucucccgccggcugcgcaccgugaccaacgccuuccugcucagccuggccgucuccgaccugcuccuggcgguggccugcaugcccuucacccugcuccccaaccugaugggcacguucaucuucgggaccgugaucugcaaggccgucagcuaccugaugggcguguccgugagcgucuccacccucagccugguggccaucgcgcuggagcgguacuccgccaucugccgcccccuccaggcccggguguggcagacccgcagccacgccgcccgggucaucguggcgacguggcugcuguccggccuccugauggugccguaccccgucuacaccguggugcagcccgucgggccccgcgugcugcagugcgugcaccgguggccgagcgcccgcguccggcagaccugguccgugcuccugcugcuccugcuguucuucauccccggcgucgugauggccguggccuacgggcucaucagccgcgagcuguaccugggccuccgguucgacggcgacagcgacuccgacagccagucccgcguccggaaccagggcgggcugcccggggccgugcaccagaacggccgcugccgccccgagaccggggcggugggcgaggacagcgacggcugcuacguccagcugccgcggucccgccccgcccucgagcugacggcccugaccgcccccgggcccggcagcgggucccggccgacccaggccaagcuccuggcgaagaagcgcguggugcggaugcugcuggucaucguggugcuguucuuccugugcuggcugcccgucuacagcgccaacaccuggcgcgccuucgacggccccggggcccaccgggcccucuccggcgcgcccaucagcuucauccaccuccuguccuacgccagcgccugcgugaacccgcucguguacugcuucaugcaccgccgguuccgccaggccugccuggagacgugcgcgcggugcugcccccgcccgccccgggcccgcccccgggcccugcccgacgaggacccgcccacccccuccaucgccagccucucccgccugagcuacaccaccaucuccacgcugggccccggguga

SEQ ID NO: 1212 - RNA, 2226 nt, Artificial Sequence
  AAD22449_variant
auggcccuguucacccccuggaagcucagcucccagaagcugggguucuuccuggugaccuucggguucaucuggggcaugaugcuccugcacuucacgauccagcagcgcacccagccggagagcuccagcaugcugcgggagcagauccucgaccuguccaagcgcuacaucaaggcccuggcggaggagaaccggaacgucguggacgggcccuacgccggcgugaugaccgccuacgaccucaagaagacccuggccguccugcucgacaacauccugcagcgcaucgggaagcuggagagcaagguggacaaccucguggucaacggcacgggcaccaacuccaccaacagcaccacggccgugcccucccugguggcgcuggagaagaucaacgucgccgacaucaucaacggggcccaggagaagugcgugcugcccccgauggacggcuacccccacugcgaggggaagaucaaguggaugaaggacauguggcggagcgaccccugcuacgccgacuacggcguggacggguccacgugcagcuucuucaucuaccuguccgaggucgagaacuggugcccccaccucccguggcgcgcgaagaaccccuacgaggaggccgaccacaacagccucgccgagauccggaccgacuucaacauccuguacuccaugaugaagaagcacgaggaguuccgcuggaugcggcugcgcauccggcgcauggccgacgccuggauccaggcgaucaagagccucgccgagaagcagaaccuggagaagcggaagcgcaagaaggugcuggugcaccucggccugcugaccaaggaguccggcuucaagaucgccgagaccgccuucagcgggggcccccucggggagcugguccagugguccgaccugaucaccagccucuaccugcugggccacgacauccggaucagcgccucccucgcggagcugaaggagaucaugaagaagguggugggcaaccgcagcgggugccccaccgucggcgaccggaucguggagcugaucuacaucgacaucguggggcucgcccaguucaagaagacccugggcccguccuggguccacuaccagugcaugcugcgcgugcucgacagcuucgggacggagcccgaguucaaccacgccaacuacgcccaguccaagggccacaagacccccuggggcaaguggaaccugaacccccagcaguucuacaccauguucccgcacacccccgacaacagcuuccugggguucguggucgagcagcaccucaacuccagcgacauccaccacaucaacgagaucaagcggcagaaccagucccugguguacggcaaggucgacagcuucuggaagaacaagaagaucuaccuggacaucauccacacguacauggaggugcacgccaccguguacggguccagcaccaagaacauccccuccuacgucaagaaccacggcauccucagcgggcgcgaccugcaguuccugcugcgggagaccaagcuguucgugggccugggcuuccccuacgaggggccggcgccccuggaggccaucgccaacggcugcgccuuccucaaccccaaguucaacccgcccaaguccagcaagaacacggacuucuucaucgggaagcccacccugcgcgagcugaccucccagcaccccuacgccgagguguucaucggccgcccccacgucuggaccguggaccucaacaaccaggaggagguggaggacgcggucaaggccauccugaaccagaagaucgagccguacaugcccuacgaguucacgugcgaggggaugcugcagcggaucaacgccuucaucgagaagcaggacuucugccacggccaggugauguggcccccgcucagcgcccuccaggugaagcuggcggagcccggccaguccugcaagcaggucugccaggagagccagcucaucugcgagcccagcuucuuccagcaccugaacaaggacaaggacaugcugaaguacaaggugaccugccaguccagcgagcucgccaaggacauccuggugcccuccuucgacccgaagaacaagcacugcgucuuccagggggaccugcuccuguucagcugcgccggcgcccacccccgccaccagcgggugugccccugccgcgacuucaucaagggccagguggcccugugcaaggacugccucuga

SEQ ID NO: 1213 - RNA, 1743 nt, Artificial Sequence
  EAX11770_variant
auggccggcaccgugcgcaccgccugccuggucguggcgaugcuccugagccuggacuuccccgggcaggcccagccgcccccgccgccgcccgacgccacgugccaccaggugcgguccuucuuccagcgccuccagcccggccugaaguggguccccgagacccccgugcccgggagcgaccuccaggugugccugcccaagggcccgaccugcugcucccggaagauggaggagaaguaccagcugaccgcccgccugaacauggagcagcuccugcagagcgccuccauggagcugaaguuccucaucauccagaacgcggccgucuuccaggaggccuucgagaucguggugcggcacgccaagaacuacacgaacgcgauguucaagaacaacuaccccagccugacgccccaggccuucgaguucgucggggaguucuucaccgacgugucccuguacauccucggcagcgacaucaacguggacgacauggucaacgagcuguucgacucccuguuccccgugaucuacacccagcucaugaaccccggccugccggacagcgcccuggacaucaacgagugccuccgcggggcccggcgcgaccugaagguguucggcaacuuccccaagcugaucaugacccaggucuccaagagccuccaggugacccggaucuuccugcaggcccugaaccucgggaucgaggugaucaacaccaccgaccaccugaaguucuccaaggacugcggccgcaugcugacgcggaugugguacugcagcuacugccaggggcucaugauggucaagcccugcggcggcuacugcaacguggugaugcaggggugcauggcgggcgucguggagaucgacaaguacuggcgcgaguacauccugucccuggaggagcucgugaacgggauguaccggaucuacgacauggagaacguccugcugggccucuucagcaccauccacgacuccauccaguacgugcagaagaacgccggcaagcugaccaccacgaucgggaagcugugcgcccacagccagcagcgccaguaccgguccgccuacuaccccgaggaccucuucaucgacaagaagguccugaagguggcccacguggagcacgaggagacccugagcagccgccggcgcgagcucauccagaagcugaaguccuucaucagcuucuacuccgcgcugcccggcuacaucugcagccacucccccgucgccgagaacgacacccucugcuggaacgggcaggagcugguggagcgguacagccagaaggccgcccgcaacggcaugaagaaccaguucaaccugcacgagcucaagaugaaggggcccgagcccguggucucccagaucaucgacaagcugaagcacaucaaccagcugcugcggaccaugagcaugccgaagggccgcgugcucgacaagaaccuggacgaggagggcuucgaguccggggacugcggcgacgacgaggacgagugcaucgggggcagcggggacggcaugaucaaggugaagaaccagcugcgcuuccucgccgagcuggcguacgaccuggacgucgacgacgcccccggcaacucccagcaggccacgcccaaggacaacgagaucagcaccuuccacaaccucgggaacgugcacagcccccugaagcugcucaccuccauggccaucuccguggucugcuucuucuuccuggugcacuga

SEQ ID NO: 1214 - RNA, 1743 nt, Artificial Sequence; identical to SEQ ID NO: 1213
  AAA93471_variant

SEQ ID NO: 1215 - RNA, 1743 nt, Artificial Sequence
  AAH35972_variant
auggccggcaccgugcgcaccgccugccuggucguggcgaugcuccugagccuggacuuccccgggcaggcccagccgcccccgccgccgcccgacgccacgugccaccaggugcgguccuucuuccagcgccuccagcccggccugaaguggguccccgagacccccgugcccgggagcgaccuccaggugugccugcccaagggcccgaccugcugcucccggaagauggaggagaaguaccagcugaccgcccgccugaacauggagcagcuccugcagagcgccuccauggagcugaaguuccucaucauccagaacgcggccgucuuccaggaggccuucgagaucguggugcggcacgccaagaacuacacgaacgcgauguucaagaacaacuaccccagccugacgccccaggccuucgaguucgucggggaguucuucaccgacgugucccuguacauccucggcagcgacaucaacguggacgacauggucaacgagcuguucgacucccuguuccccgugaucuacacccagcucaugaaccccggccugccggacagcgcccuggacaucaacgagugccuccgcggggcccggcgcgaccugaagguguucggcaacuuccccaagcugaucaugacccaggucuccaagagccuccaggugacccggaucuuccugcaggcccugaaccucgggaucgaggugaucaacaccaccgaccaccugaaguucuccaaggacugcggccgcaugcugacgcggaugugguacugcagcuacugccaggggcucaugauggucaagcccugcggcggcuacugcaacguggugaugcaggggugcauggcgggcgucguggagaucgacaaguacuggcgcgaguacauccugucccuggaggagcucgugaacgggauguaccggaucuacgacauggagaacguccugcugggccucuucagcaccauccacgacuccauccaguacgugcagaagaacgccggcaagcugaccaccacgaucgggaagcugugcgcccacagccagcagcgccaguaccgguucgccuacuaccccgaggaccucuucaucgacaagaagguccugaagguggcccacguggagcacgaggagacccuguccagccgccggcgcgagcucauccagaagcucaagagcuucaucuccuucuacagcgcgcugcccggcuacaucugcucccacagccccgucgccgagaacgacacccugugcuggaacgggcaggagcugguggagcgguacucccagaaggccgcccgcaacggcaugaagaaccaguucaaccugcacgagcucaagaugaaggggcccgagcccguggucagccagaucaucgacaagcugaagcacaucaaccagcugcugcggaccauguccaugccgaagggccgcgugcucgacaagaaccuggacgaggagggcuucgagagcggggacugcggcgacgacgaggacgagugcaucgggggcuccggggacggcaugaucaaggugaagaaccagcugcgcuuccucgccgagcuggcguacgaccuggacgucgacgacgcccccggcaacagccagcaggccacgcccaaggacaacgagaucuccaccuuccacaaccucgggaacgugcacagcccccugaagcugcucaccuccauggccaucagcguggucugcuucuucuuccuggugcacuga

SEQ ID NO: 1216 - RNA, 1683 nt, Artificial Sequence
  EAW93784_variant
auggagugccuguacuacuuccucggcuuccugcugcucgccgcccgccugccccuggacgcggccaagcgguuccacgacgugcucgggaacgagcgcccgagcgccuacaugcgggagcacaaccagcugaacggcugguccagcgacgagaacgacuggaacgagaagcuguaccccgucuggaagcgcggggacaugcgguggaagaacuccuggaagggcgggcgcgugcaggccgugcucaccagcgacucccccgcccuggucggcagcaacaucaccuucgcggugaaccugaucuucccccggugccagaaggaggacgccaacggcaacaucguguacgagaagaacugccgcaacgaggccgggcucuccgccgacccguacgucuacaacuggacggcguggagcgaggacuccgacggcgagaacgggaccggccagagccaccacaacguguuccccgacgggaagcccuucccccaccacccgggcuggcggcgcuggaacuucaucuacguguuccacacccugggccaguacuuccagaagcuggggcggugcuccguccgcgugagcgugaacaccgccaacgucacgcucggcccccagcugauggaggugaccguguaccggcgccacgggcgggccuacguccccaucgcccaggugaaggacguguacgucgugaccgaccagauccccguguucgucaccauguuccagaagaacgaccgcaacuccagcgacgagacguuccugaaggaccucccgaucauguucgacgugcugauccacgaccccucccacuuccugaacuacagcaccaucaacuacaagugguccuucggcgacaacaccggccucuucgugagcaccaaccacacggucaaccacaccuacgugcugaacgggaccuucucccugaaccucaccgucaaggccgcggcccccggccccugcccgcccccgccgcccccgccccggcccagcaagcccacgcccagccuggggcccgccggcgacaacccccuggagcucucccgcauccccgacgagaacugccagaucaaccgguacgggcacuuccaggccaccaucaccaucguggagggcauccuggaggugaacaucauccagaugaccgacguccugaugcccgugcccuggccggagagcucccucaucgacuucguggucacgugccagggcagcauccccaccgaggugugcaccaucaucuccgacccgaccugcgagaucacgcagaacaccgugugcagccccgucgacguggacgagaugugccugcugaccgugcgccggaccuucaacggguccggcacguacugcgucaaccucacccugggggacgacaccagccuggcccucaccuccacgcugaucagcgugcccgaccgcgaccccgcgagcccccugcgcauggccaacuccgcccucaucuccgugggcugccuggccaucuucgucaccgugaucagccugcucguguacaagaagcacaaggaguacaaccccaucgagaacuccccggggaacgucgugcggagcaagggccuguccguguuccugaaccgcgccaaggcggucuucuuccccggcaaccaggagaaggacccccuccugaagaaccaggaguucaagggggugagcuga

SEQ ID NO: 1217 - RNA, 1719 nt, Artificial Sequence
  AAH32783_variant
auggagugccuguacuacuuccucggcuuccugcugcucgccgcccgccugccccuggacgcggccaagcgguuccacgacgugcucgggaacgagcgcccgagcgccuacaugcgggagcacaaccagcugaacggcugguccagcgacgagaacgacuggaacgagaagcuguaccccgucuggaagcgcggggacaugcgguggaagaacuccuggaagggcgggcgcgugcaggccgugcucaccagcgacucccccgcccuggucggcagcaacaucaccuucgcggugaaccugaucuucccccggugccagaaggaggacgccaacggcaacaucguguacgagaagaacugccgcaacgaggccgggcucuccgccgacccguacgucuacaacuggacggcguggagcgaggacuccgacggcgagaacgggaccggccagagccaccacaacguguuccccgacgggaagcccuucccccaccacccgggcuggcggcgcuggaacuucaucuacguguuccacacccugggccaguacuuccagaagcuggggcggugcuccguccgcgugagcgugaacaccgccaacgucacgcucggcccccagcugauggaggugaccguguaccggcgccacgggcgggccuacguccccaucgcccaggugaaggacguguacgucgugaccgaccagauccccguguucgucaccauguuccagaagaacgaccgcaacuccagcgacgagacguuccugaaggaccucccgaucauguucgacgugcugauccacgaccccucccacuuccugaacuacagcaccaucaacuacaagugguccuucggcgacaacaccggccucuucgugagcaccaaccacacggucaaccacaccuacgugcugaacgggaccuucucccugaaccucaccgucaaggccgcggcccccggccccugcccgcccccgccgcccccgccccggcccagcaagcccacgcccagccuggccaccacccugaaguccuacgacagcaacacccccgggcccgccggcgacaacccccucgagcugucccgcauccccgacgagaacugccagaucaaccgguacgggcacuuccaggccacgaucaccaucguggagggcauccuggaggugaacaucauccagaugaccgacguccucaugcccgugccguggcccgagagcucccugaucgacuucguggugaccugccagggcagcauccccacggaggucugcaccaucaucuccgacccgaccugcgagaucacccagaacacggugugcagccccgucgacguggacgagaugugccugcucaccgugcgccggaccuucaacggguccggcaccuacugcgucaaccugacgcugggggacgacaccagccucgcgcugaccuccacccugaucagcgugcccgaccgcgaccccgccagcccccuccgcauggccaacuccgcccugaucuccgugggcugccuggccaucuucgucacggugaucagccuccugguguacaagaagcacaaggaguacaacccgaucgagaacucccccgggaacgucgugcggagcaagggccuguccguguuccucaaccgcgcgaaggccgucuucuuccccggcaaccaggagaaggacccccugcugaagaaccaggaguucaagggggugagcuga

SEQ ID NO: 1218 - RNA, 621 nt, Artificial Sequence
  CAD43718_variant
auggagugccuguacuacuuccucggcuuccugcugcucgccgcccgccugccccuggacgcggccaagcgguuccacgacgugcucgggaacgagcgcccgagcgccuacaugcgggagcacaaccagcugaacggcugguccagcgacgagaacgacuggaacgagaagcuguaccccgucuggaagcgcggggacaugcgguggaagaacuccuggaagggcgggcgcgugcaggccgugcucaccagcgacucccccgcccuggucggcagcaacaucaccuucgcggugaaccugaucuucccccggugccagaaggaggacgccaacggcaacaucguguacgagaagaacugccgcaacgaggccgggcucuccgccgacccguacgucuacaacuggacggcguggagcgaggacuccgacggcgagaacgggaccggccagagccaccacaacguguuccccgacgggaagcccuucccccaccacccgggcuggcggcgcuggaacuucaucuacguguuccacacccuggacuggcugcuccagacccccaagcugcugcucuaccugucccugaaguuccagcccagccucuuccugcuguacaacuga

SEQ ID NO: 1219 - RNA, 621 nt, Artificial Sequence
  AAH11595_variant
auggagugccuguacuacuuccucggcuuccugcugcucgccgcccgccugccccuggacgcggccaagcgguuccacgacgugcucgggaacgagcgcccgagcgccuacaugcgggagcacaaccagcugaacggcugguccagcgacgagaacgacuggaacgagaagcuguaccccgucuggaagcgcggggacaugcgguggaagaacuccuggaagggcgggcgcgugcaggccgugcucaccagcgacucccccgcccuggucggcagcaacaucaccuucgcggugaaccugaucuucccccggugccagaaggaggacgccaacggcaacaucguguacgagaagaacugccgcaacgaggccgggcucuccgccgacccguacgucuacaacuggacggcguggagcgaggacuccgacggcgagaacgggaccggccagagccaccacaacguguuccccgacgggaagcccuucccccaccacccgggcuggcggcgcuggaacuucaucuacguguuccacacccugggcuggcugcuccagacccccaagcugcugcucuaccugucccugaaguuccagcccagccucuuccugcuguacaacuga

SEQ ID NO: 1220 - RNA, 2640 nt, Artificial Sequence
  CCDS5600.1_variant
augaagaugcugacccgccuccaggugcugacccuggcccucuucagcaagggcuuccugcugucccucggggaccacaacuuccugcggcgcgagaucaagaucgagggcgaccugguccucgggggccuguuccccaucaacgagaaggggacgggcaccgaggagugcggccggaucaacgaggaccgcgggauccagcggcuggaggccaugcuguucgcgaucgacgagaucaacaaggacgacuaccuccugccgggcgugaagcucggggugcacauccuggacacgugcagccgcgacaccuacgcccuggagcagucccucgaguucguccgggccagccugaccaagguggacgaggccgaguacaugugccccgacggcuccuacgccauccaggagaacaucccccugcucaucgcgggggugaucggcggcagcuacuccagcgucuccauccagguggccaaccugcugcgccucuuccagaucccccagaucagcuacgccuccaccagcgccaagcuguccgacaagagccgguacgacuacuucgcgcgcaccgugccgcccgacuucuaccaggccaaggccauggccgagauccugcgguucuucaacuggaccuacgucuccacgguggccagcgagggggacuacggcgagaccgggaucgaggcguucgagcaggaggcccgccuccggaacaucugcaucgccaccgccgagaaggugggccgcuccaacauccgcaagagcuacgacuccgucauccgggagcugcugcagaagcccaacgcccggguggugguccucuucaugcgcagcgacgacagccgggagcugaucgcggccgccucccgcgccaacgccagcuucaccuggguggcguccgacggcuggggcgcccaggagagcaucaucaagggguccgagcacguggccuacggggccaucacgcuggagcucgccagccagcccguccggcaguucgaccgcuacuuccagucccugaacccguacaacaaccaccgcaaccccugguuccgggacuucugggagcagaaguuccagugcagccugcagaacaagcgcaaccaccggcgcgugugcgacaagcaccucgcgaucgacuccagcaacuacgagcaggaguccaagaucauguucguggucaacgccguguacgccauggcccacgcgcugcacaagaugcagcggacccugugccccaacaccaccaagcucugcgacgccaugaagauccuggacggcaagaagcuguacaaggacuaccuccugaagaucaacuucacggcccccuucaacccgaacaaggacgccgacagcaucgugaaguucgacaccuucggggacggcaugggccgcuacaacgucuucaacuuccagaacgucgggggcaaguacuccuaccugaagguggggcacugggccgagacccucagccuggacgugaacuccauccacuggagccggaacuccgugcccaccagccagugcuccgaccccugcgcgcccaacgagaugaagaacaugcagccgggcgacgucugcugcuggaucugcauccccugcgagcccuacgaguaccuggccgacgaguucacgugcauggacugcgggagcggccaguggcccaccgccgaccucaccggcugcuacgaccugccggaggacuacauccgcugggaggacgccugggccaucgggcccgugaccaucgcgugccugggcuucaugugcacgugcaugguggucaccguguucaucaagcacaacaacacgccccuggugaaggccagcgggcgggagcucugcuacauccugcuguucggcgucgggcucuccuacugcaugaccuucuucuucaucgccaagcccagcccggugaucugcgcccugcgccggcugggccucggcuccagcuucgccaucugcuacuccgcgcugcugaccaagaccaacugcaucgcccgcaucuucgacggggugaagaacggcgcccagcggcccaaguucaucagccccuccagccaggucuucaucugccucgggcugauccuggugcagaucgugauggucuccguguggcucauccuggaggcccccggcacccgccgguacacccuggcggagaagcgcgagacggugauccucaagugcaacgucaaggacagcuccaugcugaucagccugaccuacgacgugauccucgugauccugugcaccgucuacgccuucaagacccggaagugcccggagaacuucaacgaggccaaguucaucggcuucacgauguacacgaccugcaucaucuggcuggccuuccuccccaucuucuacgugaccuccagcgacuaccgcgugcagaccaccaccaugugcaucuccgucagccuguccggguucguggugcugggcugccucuucgcccccaagguccacaucauccuguuccagccgcagaagaacguggugacccaccggcugcaccucaaccgcuucagcgucagcgggaccggcacgaccuacucccagagcuccgcgagcaccuacgugcccaccgugugcaacgggcgcgagguccuggacuccacgaccagcucccuguga

SEQ ID NO: 1221 - RNA, 1947 nt, Artificial Sequence
  CCDS4977.1_variant
augagccaccacggcggggcccccaaggccuccaccuggguggucgcgagccgccgguccagcaccgugucccgcgccccggagcggcgccccgccgaggagcugaaccggacgggccccgagggguacagcgugggccgcgggggccgguggcgcggcaccucccggcccccggaggccgucgccgcggggcacgaggagcucccccugugcuucgcccucaagagccacuucgugggcgccgugaucgggcgcggcggguccaagaucaagaacauccagagcaccaccaacacgaccauccagaucauccaggagcagcccgagucccuggucaagaucuucggcagcaaggccaugcagaccaaggcgaaggccgugaucgacaacuucgugaagaagcuggaggagaacuacaacuccgagugcggcaucgacaccgccuuccagcccagcgucgggaaggacggcuccacggacaacaacgugguggccggggaccggccgcugaucgacugggaccagauccgcgaggagggccucaaguggcagaagaccaagugggccgaccugccgcccaucaagaagaacuucuacaaggagagcaccgcgaccuccgccaugagcaaggucgaggccgacuccuggcggaaggagaacuucaacaucacgugggacgaccugaaggacggcgagaagcgccccauccccaacccgaccugcaccuucgacgacgccuuccagugcuaccccgaggugauggagaacaucaagaaggccggguuccagaagcccacccccauccagagccaggcguggcccaucgugcuccagggcaucgaccugaucggggucgcccagacgggcaccgggaagacccugugcuaccucaugcccggcuucauccaccuggugcugcagcccagccucaagggccagcggaaccgcccggggaugcuggugcugacccccacgcgggagcucgcccugcaggucgagggcgagugcugcaaguacuccuacaaggggcugcgcagcgugugcguguacggcgggggcaaccgggacgagcagaucgaggagcucaagaagggcgucgacaucaucaucgccacccccgggcgccugaacgaccugcagauguccaacuucgugaaccucaagaacaucaccuaccuggugcuggacgaggccgacaagaugcucgacaugggcuucgagccccagaucaugaagauccugcuggacguccggccggaccgccagaccgugaugacgagcgcgaccuggccccacuccguccaccgccucgcccagagcuaccugaaggagcccaugaucguguacguggggacccuggaccucgucgccguguccagcgugaagcagaacaucaucgucaccacggaggaggagaaguggucccacaugcagaccuuccugcagagcauguccagcaccgacaaggugaucguguucgucucccggaaggccguggccgaccaccugagcuccgaccucauccugggcaacaucagcguggagucccugcacggggaccgcgagcagcgggaccgcgagaaggcgcucgagaacuucaagaccggcaagguccggauccugaucgccacggaccuggccagccgcggccucgacgugcacgacgugacccacgucuacaacuucgacuucccccggaacaucgaggaguacgugcaccgcaucgggcggaccggccgcgccgggcggaccggcguguccaucacgacccugacccgcaacgacuggcgggucgcgagcgagcugaucaacauccucgagcgcgccaaccagagcaucccggaggagcugguguccauggccgagcgguucaaggcccaccagcagaagcgcgagauggagcggaagauggagcgcccccagggccggcccaagaaguuccacuga

SEQ ID NO: 1222 - RNA, 1209 nt, Artificial Sequence
  ACD02430_variant
auggcccagaaggagggcgggcgcaccgugcccugcugcagccggccgaaggucgccgcgcugaccgccggcacgcuccugcugcucaccgccaucggggccgccuccugggcgaucguggccgugcugcugcgcagcgaccaggagccccucuaccccguccagguguccagcgccgacgcccggcugaugguguucgacaagaccgagggcaccuggcgccugcucugcuccagccgguccaacgcgcgcgucgccgggcugagcugcgaggagaugggcuuccugcgggcccucacgcacuccgagcuggacgugcgcaccgccggcgccaacgggaccagcggcuucuucugcguggacgaggggcggcugccccacacccagcgccuccuggaggucaucuccgugugcgacugcccgcggggccgcuuccuggcggccaucugccaggacugcgggcggcgcaagcuccccguggaccggaucgucggcggccgcgacacgagccuggggcgguggcccuggcaggucucccugcgcuacgacggcgcccaccucugcgggggcagccugcuguccggcgacugggugcucaccgccgcccacugcuuccccgagcggaaccgcgugcugagccgguggcgcguguucgcgggggccguggcccaggccuccccgcacggccugcagcucgggguccaggccgugguguaccacggcggguaccugcccuuccgcgaccccaacagcgaggagaacuccaacgacaucgcgcugguccaccucagcagcccccugccgcugaccgaguacauccagcccgugugccuccccgccgccggccaggcccugguggacggcaagaucugcaccgucacgggguggggcaacacccaguacuacgggcagcaggccggcgugcugcaggaggcgcggguccccaucaucuccaacgacgugugcaacggggccgacuucuacggcaaccagaucaagccgaagauguucugcgccggcuaccccgagggcgggaucgacgccugccagggggacagcggcgggcccuucgugugcgaggacuccaucagccgcacgccccgguggcgccucugcggcaucgucuccuggggcaccgggugcgcgcuggcccagaagccgggcguguacaccaaggugagcgacuuccgggaguggaucuuccaguga

SEQ ID NO: 1223 - RNA, 1254 nt, Artificial Sequence
  AAA36013_variant
auggcccagaaggagggcgggcgcaccgugcccugcugcagccggccgaaggucgccgcgcugaccgccggcacgcuccugcugcucaccgccaucggggccgccuccugggcgaucguggccgugcugcugcgcagcgaccaggagccccucuaccccguccagguguccagcgccgacgcccggcugaugguguucgacaagaccgagggcaccuggcgccugcucugcuccagccgguccaacgcgcgcgucgccgggcugagcugcgaggagaugggcuuccugcgggcccucacgcacuccgagcuggacgugcgcaccgccggcgccaacgggaccagcggcuucuucugcguggacgaggggcggcugccccacacccagcgccuccuggaggucaucuccgugugcgacugcccgcggggccgcuuccuggcggccaucugccaggacugcgggcggcgcaagcuccccguggaccggaucgucggcggccgcgacacgagccuggggcgguggcccuggcaggucucccugcgcuacgacggcgcccaccucugcgggggcagccugcuguccggcgacugggugcucaccgccgcccacugcuuccccgagcggaaccgcgugcugagccgguggcgcguguucgcgggggccguggcccaggccuccccgcacggccugcagcucgggguccaggccgugguguaccacggcggguaccugcccuuccgcgaccccaacagcgaggagaacuccaacgacaucgcgcugguccaccucagcagcccccugccgcugaccgaguacauccagcccgugugccuccccgccgccggccaggcccugguggacggcaagaucugcaccgucacgggguggggcaacacccaguacuacgggcagcaggccggcgugcugcaggaggcgcggguccccaucaucuccaacgacgugugcaacggggccgacuucuacggcaaccagaucaagccgaagauguucugcgccggcuaccccgagggcgggaucgacgccugccagggggacagcggcgggcccuucgugugcgaggacuccaucagccgcacgccccgguggcgccucugcggcaucgucuccuggggcaccgggugcgcgcuggcccagaagccgggcguguacaccaaggugagcgacuuccgggaguggaucuuccaggccaucaagacccacuccgaggccagcgggauggucacccagcuguga

SEQ ID NO: 1224 - RNA, 2940 nt, Artificial Sequence
  BAG62073_variant
auggagcuggccgcccucugccgcuggggccugcugcucgcgcugcugcccccgggggccgccagcacccaggacaacuaccucuccaccgacgugggcagcugcacgcuggucugcccccugcacaaccaggaggugaccgccgaggacgggacccagcggugcgagaagugcuccaagcccugcgcccgcgugugcuacggccucgggauggagcaccuccgggagguccgcgcggugaccagcgccaacauccaggaguucgccggcugcaagaagaucuucggcucccuggccuuccugcccgagagcuucgacggggacccggcguccaacacggcgccccugcagcccgagcagcuccagguguucgagacccuggaggagaucaccggcuaccuguacaucagcgccuggcccgacucccugccggaccucagcgucuuccagaaccuccaggugauccgggggcgcauccugcacaacggcgccuacucccugacccugcaggggcugggcaucagcuggcucggccugcggucccugcgcgagcucgggagcggccuggcccugauccaccacaacacgcaccucugcuucgugcacaccguccccugggaccagcuguuccggaacccccaccaggcccugcuccacaccgccaaccgccccgaggacgagugcgugggggagggccuggccugccaccagcugugcgcccggggccacugcugggggccgggccccacccagugcgugaacugcucccaguuccuccgcgggcaggagugcgucgaggagugccgggugcugcagggccugccccgcgaguacgugaacgcccggcacugccuccccugccacccggagugccagccccagaacgggagcgucacgugcuucggccccgaggcggaccagugcguggccugcgcccacuacaaggacccgcccuucugcguggcccgcugccccuccggcgucaagcccgaccugagcuacaugcccaucuggaaguuccccgacgaggagggggccugccagcccugccccaucaacugcacccacuccugcguggaccuggacgacaagggcugccccgcggagcagcgggccagcccgcucaccagcaucaucuccgccguggucgggauccugcugguggugguccucggcguggucuucgggauccugaucaagcgccggcagcagaagauccgcaaguacaccaugcggcgccugcuccaggagacggagcugguggagccccugacccccagcggcgccaugccgaaccaggcccagaugcgcauccugaaggagaccgagcuccggaaggugaagguccugggcuccggggcguucggcaccguguacaaggggaucuggauccccgacggcgagaacgugaagauccccgucgccaucaaggugcugcgcgagaacacgagccccaaggccaacaaggagauccucgacgaggccuacgugauggcgggggucggcuccccguacgugagccggcugcugggcaucugccucaccuccaccgugcagcuggucacccagcugaugcccuacgggugccuccuggaccacgugcgcgagaaccggggccgccuggggagccaggaccuccugaacuggugcaugcagaucgccaagggcauguccuaccuggaggacgugcggcucguccaccgcgaccuggccgcccggaacgugcuggucaagagccccaaccacgugaagaucacggacuucggccucgcccgccugcuggacaucgacgagaccgaguaccacgcggacgggggcaaggugcccaucaaguggauggcccucgaguccauccugcggcgccgguucacccaccagagcgacgugugguccuacggggucaccgugugggagcugaugacguucggcgccaagccguacgacgggauccccgcccgcgagauccccgaccuccuggagaagggcgagcggcugccccagccgcccaucugcaccaucgacguguacaugaucauggucaagugcuggaugaucgacagcgagugccgcccccgguuccgcgagcucguguccgaguucagccggauggcccgcgacccccagcgcuucguggucauccagaacgaggaccugggcccggcgagcccccuggacuccaccuucuaccggucccuccuggaggacgacgacaugggggaccugguggacgccgaggaguaccucgugccccagcagggcuucuucugccccgacccggcccccggggccggcgggaugguccaccaccgccaccggagcagcuccacccgcagcggcggcggggaccugacgcugggccucgagcccuccgaggaggaggcgccccggagcccgcuggcccccuccgagggggccggcagcgacguguucgacggggaccugggcaugggcgccgccaaggggcuccagucccugcccacccacgacccgagcccccugcagcgcuacuccgaggaccccaccgugccccucccgagcgagaccgacggcuacgucgcgccccugacgugcuccccgcagcccgaguacgugaaccagcccgacgugcggccccagccgcccagcccccgcgaggggccccugcccgccgcccggcccgccggcgccacccucgagcgcccgaagacccugucccccgggaagaacggcgucgugaaggacguguucgcguucggcggggccgucgagaaccccgaguaccugacgccccagggcggggccgccccgcagccccacccgccgcccgccuucagccccgcguucgacaaccucuacuacugggaccaggacccgcccgagcggggcgccccgcccuccaccuucaagggcacccccaccgccgagaaccccgaguaccuggggcuggacgugcccguguga

SEQ ID NO: 1225 - RNA, 264 nt, Artificial Sequence
  CCQ43016_variant
augaugcgcaugaagaccuucgugaugauccacuuccaccugaugaacggcgggaaggccaagcucuacagccggccccacgccaagcugcugccggagcagcgcgucaccgacaagacgggcgcgcccguggaguggcccgggcagacccagugcuccaccgagacccagacgcucgccgccaugcccgcccaggccgugaugcgggugaccugcaccgucguggacaugcacaagagcgagugcgcgccggcccagaccuga

SEQ ID NO: 1226 - RNA, 3768 nt, Artificial Sequence
  AAI67147_variant
auggagcuggccgcccucugccgcuggggccugcugcucgcgcugcugcccccgggggccgccagcacccaggugugcaccggcacggacaugaagcuccggcugcccgccucccccgagacccaccuggacaugcuccgccaccuguaccaggggugccaggucgugcagggcaaccuggagcucaccuaccugcccaccaacgccagccuguccuuccuccaggacauccaggaggugcagggguacguccugaucgcgcacaaccaggugcgccaggugccgcugcagcggcuccggaucguccgcggcacgcagcuguucgaggacaacuacgcccuggccgugcucgacaacggcgacccccugaacaacaccacccccgugaccggggccagccccggcgggcugcgggagcuccagcugcgcucccugacggagauccucaagggcgggguccugauccagcggaacccgcagcugugcuaccaggacaccauccucuggaaggacaucuuccacaagaacaaccagcuggcgcugacccucaucgacaccaaccgcagccgggccugccaccccugcucccccaugugcaagggcagccgcugcuggggcgaguccagcgaggacugccagucccugacgcggaccgugugcgccgggggcugcgcccgcugcaaggggccccugccgaccgacugcugccacgagcagugcgccgcgggcugcaccggccccaagcacagcgacugccucgccugccugcacuucaaccacuccgggaucugcgagcugcacugccccgcccucgugacguacaacaccgacaccuucgagagcaugcccaacccggagggccgguacaccuucggggccuccugcgucacggccugccccuacaacuaccugagcaccgacgugggcuccugcacccuggugugcccccuccacaaccaggaggucaccgcggaggacgggacgcagcgcugcgagaagugcagcaagcccugcgcccgggugugcuacggccugggcauggagcaccuccgcgaggugcgggccgucaccuccgccaacauccaggaguucgccgggugcaagaagaucuucggcagccuggcguuccugccggagagcuucgacggggaccccgccuccaacaccgcgccccugcagcccgagcagcuccagguguucgagacccuggaggagaucacgggcuaccuguacaucagcgccuggccggacucccugcccgaccucagcguguuccagaaccugcaggucauccgcgggcggauccugcacaacggcgccuacucccucacccugcagggccuggggaucagcuggcucggccugcgcucccugcgcgagcucgggagcggccuggcccugauccaccacaacacccaccucugcuucgugcacaccgugcccugggaccagcuguuccggaacccccaccaggcccugcuccacacggccaaccgccccgaggacgagugcgucggggagggccuggccugccaccagcugugcgcgcggggccacugcugggggcccggccccacccagugcgugaacugcucccaguuccuccgcgggcaggagugcgucgaggagugccgggugcugcagggccugccgcgcgaguacgugaacgcccggcacugccuccccugccaccccgagugccagccccagaacggcagcgugaccugcuucgggccggaggccgaccagugcguggccugcgcccacuacaaggacccgcccuucugcguggcgcgcugccccuccggcgucaagcccgaccugagcuacaugcccaucuggaaguuccccgacgaggagggggccugccagcccugcccgaucaacugcacccacuccugcguggaccuggacgacaagggcugccccgccgagcagcgggccagcccccucacguccaucaucagcgccguggucgggauccugcugguggugguccucggcgugguguucggcauccugaucaagcgccggcagcagaagauccgcaaguacaccaugcggcgccugcuccaggagaccgagcuggucgagccccugaccccguccggggcgaugcccaaccaggcccagaugcggauccucaaggagaccgagcugcgcaaggugaaggugcugggcagcggggccuucggcacggucuacaaggggaucuggauccccgacggcgagaacgugaagauccccguggccaucaagguccuccgggagaacaccuccccgaaggccaacaaggagauccuggacgaggcguacgugauggccggcguggggagccccuacgucagccgccugcucggcaucugccugaccuccaccgugcagcuggugacgcagcucaugcccuacgggugccugcuggaccacguccgggagaaccgcggccgccucgggagccaggaccugcugaacuggugcaugcagaucgccaagggcauguccuaccucgaggacgugcggcuggugcaccgcgaccuggccgcgcggaacguccucgucaagagccccaaccacgugaagaucaccgacuucggccuggcccgccugcucgacaucgacgagaccgaguaccacgccgacgggggcaaggucccgaucaaguggauggcccuggaguccauccugcggcgccgguucacccaccagagcgacgugugguccuacggggugacggucugggagcucaugaccuucggcgccaagcccuacgacgggauccccgcgcgcgagaucccggaccugcuggagaagggcgagcggcucccccagccgcccaucugcaccaucgacguguacaugaucauggugaagugcuggaugaucgacagcgagugccgcccccgguuccgcgagcuggucuccgaguucagccggauggcccgcgacccccagcgguucguggugauccagaacgaggaccugggccccgccagcccccucgacuccaccuucuaccgcucccugcuggaggacgacgacaugggggaccucgucgacgccgaggaguaccuggugccgcagcagggcuucuucugccccgaccccgcccccggggcgggcggcauggugcaccaccggcaccgcagcuccagcacgcgguccgggggcggggaccugacccucggccuggagccgagcgaggaggaggcgccccgcagcccccuggcccccuccgagggggccggcagcgacgucuucgacggcgaccucgggaugggcgccgccaaggggcugcagucccugccgacccacgaccccagcccccuccagcgguacuccgaggaccccaccgugccgcugcccagcgagacggacggcuacguggcgccccugaccugcuccccgcagcccgaguacgucaaccagcccgacgugcgcccccagcccccgagcccccgcgaggggccccucccggccgcccggcccgccggcgccacccuggagcgccccaagacccugucccccggcaagaacgggguggucaaggacguguucgccuucggcggggccgucgagaacccggaguaccucacgccccagggcggggccgcgccccagccccacccgccgcccgccuucagccccgccuucgacaaccuguacuacugggaccaggacccgcccgagcggggcgccccgcccuccaccuucaagggcacccccaccgccgagaaccccgaguaccuggggcucgacgugcccguguga

SEQ ID NO: 1227 - RNA, 1260 nt, Artificial Sequence
  AAD56009_variant
auggagcuggccgcccucugccgcuggggccugcugcucgcccugcugcccccgggggccgccagcacccaggugugcaccggcacggacaugaagcuccggcugcccgccucccccgagacccaccuggacaugcuccgccaccuguaccaggggugccaggucgugcagggcaaccuggagcucaccuaccugcccaccaacgccagccuguccuuccuccaggacauccaggaggugcagggguacguccugaucgcgcacaaccaggugcgccaggugccgcugcagcggcuccggaucguccgcggcacgcagcuguucgaggacaacuacgcccuggccgugcucgacaacggcgacccccugaacaacaccacccccgugaccggggccagccccggcgggcugcgggagcuccagcugcgcucccugacggagauccucaagggcgggguccugauccagcggaacccgcagcugugcuaccaggacaccauccucuggaaggacaucuuccacaagaacaaccagcuggcgcugacccucaucgacaccaaccgcagccgggccugccaccccugcucccccaugugcaagggcagccgcugcuggggcgaguccagcgaggacugccagucccugacgcggaccgugugcgccgggggcugcgcccgcugcaaggggccccugccgaccgacugcugccacgagcagugcgccgcgggcugcaccggccccaagcacagcgacugccucgccugccugcacuucaaccacuccgggaucugcgagcugcacugccccgcccucgugacguacaacaccgacaccuucgagagcaugcccaacccggagggccgguacaccuucggggccuccugcgucacggccugccccuacaacuaccugagcaccgacgugggcuccugcacccuggugugcccccuccacaaccaggaggucaccgcggaggacgggacgcagcgcugcgagaagugcagcaagcccugcgcccggggcacccacucccugccgccccgccccgccgccgugcccgugccgcugcggaugcagcccggccccgcccaccccguccucagcuuccugcgcccgagcugggaccugguguccgcguucuacagccucccccuggcgccccuguccccgaccagcgugcccaucucccccgucagcguggggcggggccccgacccggacgcccacguggccgucgaccugucccgcuacgagggguga

SEQ ID NO: 1228 - RNA, 546 nt, Artificial Sequence
  U70863.1_variant
ggcagccacuccaugcgcuacuucuucaccagcgugucccggcccgggcgcggcgagccgcgguucaucgccgucggguacguggacgacacccaguucgugcgcuucgacagcgacgccgcgucccagcggauggagccccgcgcccccuggaucgagcaggagggccccgaguacugggacggggagacgcggaaggucaaggcccacagccagacccaccgcguggaccugggcacccuccggggcuacuacaaccaguccgaggccgggagccacaccgugcagcgcauguacggcugcgacgucggguccgacuggcgguuccugcgcggcuaccaccaguacgccuacgacgggaaggacuacaucgcgcugaaggaggaccuccggagcuggacggccgccgacauggccgcgcagaccaccaagcacaagugggagaccgcccacguggccgagcagcugcgcgccuaccuggagggcacgugcguggaguggcuccggcgcuaccuggagaacggcaaggagacccugcagcggacc

SEQ ID NO: 1229 - RNA, 543 nt, Artificial Sequence
  AH009136.2_variant
agccacuccaugcgcuacuucuucaccagcgugucccggcccggccgcggggagccgcgguucaucgccgucggcuacguggacgacacccaguucgugcgcuucgacagcgacgccgcgucccagcggauggagccccgcgcccccuggaucgagcaggaggggcccgaguacugggacggcgagacgcggaaggucaaggcccacagccagacccaccgcguggaccuggggacccuccggggcuacuacaaccaguccgaggccggcagccacaccgugcagcgcauguacgggugcgacgucggcuccgacuggcgguuccugcgcggguaccaccaguacgccuacgacggcaaggacuacaucgcgcugaaggaggaccuccggagcuggacggccgccgacauggccgcgcagaccaccaagcacaagugggaggccgcccacguggccgagcagcugcgcgccuaccuggaggggaccugcguggaguggcuccggcgcuaccuggagaacggcaaggagacgcugcagcggacc

SEQ ID NO: 1230 - RNA, 705 nt, Artificial Sequence
  AAG09781_variant
augcugcgcgugcccgagccgcggcccggcgaggccaaggccgagggggcggccccgcccacccccagcaagccccucaccuccuuccugauccaggacauccugcgcgacggcgcccagcggcagggcgggcgcacgagcucccagcggcagcgcgaccccgagcccgagccggagcccgagcccgagggcgggcggagccgcgccggcgcccagaacgaccagcucuccaccgggccccgggcggccccggaggaggccgagacccuggccgagaccgagcccgagcgccaccugggcagcuaccuccuggacuccgagaacacgagcggggcgcugccccggcucccccagaccccgaagcagccccagaagcgcucccgggccgccuucagccacacccaggucaucgagcuggagcgcaaguucucccaccagaaguaccugagcgcccccgagcgggcccaccucgcgaagaaccugaagcugaccgagacccaggugaagaucugguuccagaaccgccgguacaagacgaagcgcaagcagcucuccagcgagcugggcgaccuggagaagcacuccagccuccccgcccugaaggaggaggccuucucccgggccagccugguguccgucuacaacagcuacccguacuaccccuaccucuacugcguggggagcuggucccccgccuucugguga

SEQ ID NO: 1231 - RNA, 942 nt, Artificial Sequence
  BAG37303_variant
auggccagcuuccgcaagcugacccucuccgagaaggugcccccgaaccaccccagccggaagaaggucaacuuccuggacaugucccuggacgacaucaucaucuacaaggagcucgagggcaccaacgccgaggaggagaagaacaagcgccagaaccacagcaagaaggagucccccagccggcagcaguccaaggcgcaccgccaccggcaccgccgggacuacagccgcugccgguccaacagcgaggaggggaaccacgacaagaagcccucccagaagccgagcggcuucaaguccgggcagcacccccugaacggccagccccugaucgagcaggagaagugcagcgacaacuacgaggcccaggccgagaagaaccaggggcaguccgagggcaaccagcaccagagcgagggcaaccccgacaaguccgaggagagccaggggcagccggaggagaaccaccacuccgagcgcagccggaaccaccucgagcgcagccugucccagagcgaccggucccagggccagcugaagcgccaccacccccaguacgagcggagccacgggcaguacaagcgcucccacggccagagcgagcggucccacgggcacagcgagcgcucccacggccacagcgagcggucccacggccacagcgagcgcucccacgggcacagcaagcggucccgcagccagggcgaccucguggacacgcaguccgaccugaucgccacccagcgcgaccugaucgccacccagaaggaccucaucgcgacccagcgggaccugaucgccacgcagcgcgaccugaucgugacccagcgggaccucgucgccaccgagcgcgaccugaucaaccagagcgggcggucccacggccagagcgagcgccaccagcgguacagcaccggcaagaacacgaucaccaccuga

SEQ ID NO: 1232 - RNA, 942 nt, Artificial Sequence
  AAI28135_variant
auggccagcuuccgcaagcugacccucuccgagaaggugcccccgaaccaccccagccggaagaaggucaacuuccuggacaugucccuggacgacaucaucaucuacaaggagcucgagggcaccaacgccgaggaggagaagaacaagcgccagaaccacagcaagaaggagucccccagccggcagcaguccaaggcgcaccgccaccggcaccgccggggguacagccgcugccgguccaacagcgaggagggcaaccacgacaagaagcccucccagaagccgagcggguucaaguccggccagcacccccugaacgggcagccccugaucgagcaggagaagugcagcgacaacuacgaggcccaggccgagaagaaccagggccaguccgagggcaaccagcaccagagcgaggggaaccccgacaaguccgaggagagccagggccagccggaggagaaccaccacuccgagcgcagccggaaccaccucgagcgcagccugucccagagcgaccggucccaggggcagcugaagcgccaccacccccaguacgagcggagccacggccaguacaagcgcucccacgggcagagcgagcggucccacggccacagcgagcgcucccacggccacagcgagcggucccacgggcacagcgagcgcucccacggccacagcaagcggucccgcagccagggggaccucguggacacgcaguccgaccugaucgccacccagcgcgaccugaucgccacccagaaggaccucaucgcgacccagcgggaccugaucgccacgcagcgcgaccugaucgugacccagcgggaccucgucgccaccgagcgcgaccugaucaaccagagcggccggucccacggccagagcgagcgccaccagcgguacagcaccgggaagaacacgaucaccaccuga

SEQ ID NO: 1233 - RNA, 384 nt, Artificial Sequence
  12543784_variant
augaucaagaagaaccugaagaagcucggcaucgaggagaccuaccugaacaucaucaaggccaucuacgaccgccccaccgccagcauccagaagacggagaaccuguccaccaagaccgggaccagccaggaguaccaccucuccccgcugugguucuacaucgugcuggagauccucgcgagcacgauccggcaggagaagaaccugaaggacauccacaccgagaaggaggaggucaagcugucccucuucgccgacgccaugauccuguaccugaagaagcccaacgacagcacccgcaagcuccuggagcugaucaagaagauccacuccagcugccggaucaagaucaacauccacuucgccuucugcucccaguga

SEQ ID NO: 1234 - RNA, 1926 nt, Artificial Sequence
  AAA63226_variant
auggccaaggccgcggccaucggcaucgaccuggggaccaccuacagcugcgugggcguguuccagcacgggaagguggagaucaucgccaacgaccagggcaaccgcacgacccccuccuacguggccuucaccgacaccgagcggcucaucggggacgccgcgaagaaccaggucgcccugaacccgcagaacacgguguucgacgccaagcgccugaucggccggaaguucggcgaccccgugguccagagcgacaugaagcacuggcccuuccaggugaucaacgacggggacaagcccaaggugcaggucuccuacaagggcgagaccaaggccuucuacccggaggagaucagcuccauggugcucaccaagaugaaggagaucgcggaggccuaccugggguaccccgugaccaacgccgucaucacggugcccgccuacuucaacgacagccagcgccaggccaccaaggacgcgggcgugaucgccgggcugaacguccuccggaucaucaacgagcccaccgccgccgccaucgcguacggccuggaccgcaccggcaagggggagcggaacgugcugaucuucgaccucggcgggggcacguucgacguguccauccugaccaucgacgacggcaucuucgaggucaaggccaccgccggggacacccaccugggcggggaggacuucgacaaccgccucgugaaccacuucguggaggaguucaagcggaagcacaagaaggacaucagccagaacaagcgcgccguccggcgccugcggacggccugcgagcgcgcgaagcggacccuguccagcuccacccaggccagccucgagaucgacucccuguucgagggcaucgacuucuacaccagcaucacgcgcgcccgguucgaggagcugugcuccgaccucuuccgcagcacccuggagccgguggagaaggcccugcgggacgccaagcucgacaaggcgcagauccacgaccuggugcuggucgggggcuccacccgcauccccaaggugcagaagcuccugcaggacuucuucaacggccgggaccugaacaagagcaucaaccccgacgaggccgucgccuacggggccgcggugcaggccgccauccucaugggcgacaaguccgagaacgugcaggaccugcugcuccuggacgucgcgccccugagccucgggcuggagaccgccggcggggugaugacggcccugaucaagcgcaacagcaccaucccgaccaagcagacccagaucuucacgaccuacuccgacaaccagcccggcgugcucauccaggucuacgagggcgagcgcgccaugaccaaggacaacaaccugcuggggcgguucgagcucagcggcaucccgcccgcgccccgcggggugccccagaucgaggugaccuucgacaucgacgccaacggcauccugaacgucacggccaccgacaaguccaccgggaaggccaacaagaucaccaucacgaacgacaagggccggcugagcaaggaggagaucgagcgcauggugcaggaggccgagaaguacaaggccgaggacgaggugcagcgggagcgcgucuccgccaagaacgcccucgagagcuacgcguucaacaugaaguccgccguggaggacgagggccugaaggggaagaucagcgaggccgacaagaagaaggugcuggacaagugccaggaggucaucuccuggcucgacgccaacacccuggcggagaaggacgaguucgagcacaagcggaaggagcuggagcaggucugcaaccccaucaucagcggccucuaccagggggccggcggccccgggccgggcggguucggcgcccaggggcccaagggcggcuccgggagcggccccaccaucgaggagguggacuga

SEQ ID NO: 1235 - RNA, 1926 nt, Artificial Sequence; identical to SEQ ID NO: 1234
  AAA63227_variant

SEQ ID NO: 1236 - RNA, 627 nt, Artificial Sequence
  AAI21098_variant
auggcccugggccagaagcuguucaucaccaugagccgcggggccggccggcugcaggggacccugugggcgcucguguuccugggcauccuggucgggaugguggugcccuccccggccggcacgcgcgccaacaacacccuccuggacagccggggcugggggacccugcucucccgcagccgggccggccuggccggggagaucgcgggcgucaacugggaguccggguaccuggugggcaucaagcgccagcggcgccucuacugcaacgugggcaucggguuccaccuccagguccugcccgacggccggaucagcgggacccacgaggagaaccccuacucccuccuggagaucagcacgguggagcgcggcguggucucccuguucggcgugcggagcgcccucuucguggccaugaacuccaaggggcgccuguacgccacccccagcuuccaggaggagugcaaguuccgggagacccugcucccgaacaacuacaacgcguacgaguccgaccuguaccagggcaccuacaucgcccugagcaaguacgggcgcgucaagcggggcuccaaggugagccccaucaugacggugacccacuuccucccccgcaucuga

SEQ ID NO: 1237 - RNA, 1569 nt, Artificial Sequence
  BAA74724_variant
augccccgcgccccgcggugccgcgccgugcggagccugcuccgcucccacuaccgggagguccugccccuggcgaccuucgugcgccggcucggcccccagggguggcgccuggugcagcggggcgaccccgccgccuuccgcgcccuggucgcccagugccucgugugcgugccgugggacgcgcggcccccgcccgccgcccccagcuuccgccaggucuccugccugaaggagcugguggcccgggugcuccagcgccugugcgagcgcggggcgaagaacguccuggccuucggcuucgcccuccuggacggggcccggggcggcccgcccgaggccuucaccacgagcgugcgguccuaccugcccaacaccgugaccgacgcgcuccgcgggagcggcgccugggggcugcugcuccggcgcgucggcgacgacgugcuggugcaccuccucgcccggugcgcccuguucguccugguggcccccuccugcgcguaccaggugugcgggccgccccucuaccagcugggcgccgccacccaggcccgcccgccgccccacgccagcggcccccgccggcgccuggggugcgagcgggcguggaaccacuccguccgcgaggccggcgugccccuggggcugcccgcccccggcgcccggcgccggggcgggagcgccucccgcagccugccccuccccaagcggccccgccggggcgcggcccccgagcccgagcgcacgcccguggggcagggcuccugggcccacccggggcggacccgcggccccagcgaccggggcuucugcgucgugucccccgcccgcccggcggaggaggccaccagccuggagggggcccuguccggcacccggcacagccaccccuccguggggcgccagcaccacgccggcccgcccagcacgagccggccgccccgccccugggacacccccugcccgcccgucuacgccgagaccaagcacuuccucuacuccagcggggacaaggagcagcugcgccccuccuuccugcucagcucccugcggcccauccugaccggcgcgcgccggcucguggagacgaucuuccugggcagcucccccgggugccagggccugcccgccgggugccccgccugccccagcgccaccggcaagugcgggccgugcuucugguccugccucggcaccacccgcagcgcccccacgggcugcuccagccggcgcaccgcgcggugcgagcugcgcagcccccagcagcccgucuccgugccggggcggagcccccgcgcccuguggcggccgccccgccggcgcacccagacccccguggccuggugcuccugcuccgccagcacggcgccccucgccggcguccggcugcgcgccgggcugcccgccccggccggcgcgccccggccccucggccugcaggcccagcgccggcgcuuccugcggaacaccaagaaguucaucucccuggggaagcacgccaagcucagccugcaggagcugaccuggaagaugagcgugcgcgacugcgccuggcuccgccgguccccc

SEQ ID NO: 1238 - RNA, 1680 nt, Artificial Sequence
  BAA23606_variant
augcgccugcaccggcuccgcgcccggcugagcgccguggcgugcggccugcuccugcugcucguccgcgggcagggccaggacuccgccagccccauccggaccacccacacgggccaggugcuggggucccuggugcacgucaagggggccaacgccggcgugcagaccuuccucggcaucccguucgccaagccgccccuggggccccugcgcuucgcgccgcccgagccgcccgagagcugguccggcgugcgggacgggaccacccaccccgccaugugccuccaggaccugacggccgucgagagcgaguuccugucccaguucaacaugaccuuccccagcgacuccaugagcgaggacugccucuaccuguccaucuacacccccgcccacagccacgagggcuccaaccugcccgugaugguguggauccacgggggcgcgcucgucuucggcauggccagccuguacgacggguccaugcuggccgcccucgagaacgugguggucgugaucauccaguaccgccugggcgugcugggguucuucagcaccggcgacaagcacgccacgggcaacuggggguaccucgaccaggucgcggcccugcggugggugcagcagaacaucgcccacuucggcgggaaccccgaccgcgugaccaucuucggcgaguccgccgggggcaccagcgucuccagccugguggugagccccaucucccagggccucuuccacggggccaucauggagagcggcgucgcgcugcugcccgggcucaucgccuccagcgccgacgugaucuccaccguggucgccaaccugagcgccugcgaccagguggacuccgaggcgcuggucggcugccuccggggcaagagcaaggaggagauccuggccaucaacaagcccuucaagaugaucccgggggugguggacggcgucuuccugccccgccacccccaggagcuccuggccuccgccgacuuccagcccgugccgagcaucgugggggucaacaacaacgaguucggcuggcugauccccaaggugaugcggaucuacgacacgcagaaggagauggaccgcgaggccucccaggcggcccuccagaagaugcugacccugcucaugcugccgcccaccuucggggaccugcuccgggaggaguacaucggcgacaacggggacccccagacccugcaggcccaguuccaggagaugauggccgacagcauguucgugauccccgcgcugcaggucgcccacuuccagugcucccgcgcccccguguacuucuacgaguuccagcaccagcccagcuggcucaagaacauccggccgccccacaugaaggccgaccacggcgacgagcugcccuucguguuccgcuccuucuucggcgggaacuacaucaaguucacggaggaggaggagcagcugagccggaagaugaugaaguacugggccaacuucgcgcgcaacggcaacccgaacggggagggccugccccacuggccccucuucgaccaggaggagcaguaccugcagcugaaccuccagcccgccgucggccgggcccugaaggcccaccgccugcaguucuggaagaaggcccucccgcagaagauccaggagcuggaggagcccgaggagcgccacaccgagcuguga

SEQ ID NO: 1239 - RNA, 1740 nt, Artificial Sequence
  AAH65269_variant
augaacaagcuguacaucggcaaccucagcgagaacgccgcccccuccgaccuggagagcaucuucaaggacgcgaagaucccgguguccgggcccuuccuggucaagaccggcuacgccuucguggacugccccgacgagagcugggcccucaaggccaucgaggcccuguccgggaagaucgagcugcacggcaagcccaucgagguggagcacagcgucccgaagcgccagcggauccgcaagcuccagauccggaacaucccgccccaccuccagugggaggugcuggacucccugcuggugcaguacggggucguggagagcugcgagcaggucaacaccgacuccgagacggcgguggugaacgugaccuacagcuccaaggaccaggcccgccaggcccuggacaagcucaacggcuuccagcuggagaacuucacccugaaggucgccuacauccccgacgagauggcggcccagcagaacccccuccagcagccccggggccgccgggggcugggccagcgcgggagcucccggcagggcagccccggguccgugagcaagcagaagcccugcgaccugccgcuccgccugcuggugcccacccaguucgucggcgccaucaucggcaaggagggggccacgauccggaacaucaccaagcagacccaguccaagaucgacgugcaccgcaaggagaacgccggcgcggccgagaaguccaucaccauccucagcacgcccgaggggaccagcgccgccugcaagagcauccuggagaucaugcacaaggaggcccaggacaucaaguucaccgaggagaucccccugaagauccucgcgcacaacaacuucgugggccggcugaucggcaaggaggggcgcaaccugaagaagaucgagcaggacaccgacacgaagaucaccaucuccccgcuccaggagcugacccuguacaaccccgagcggaccaucacggucaagggcaacguggagaccugcgccaaggccgaggaggagaucaugaagaagauccgcgagagcuacgagaacgacaucgccuccaugaaccuccaggcccaccugauccccgggcugaaccucaacgcgcugggccuguucccgcccaccagcgggaugcccccgcccaccuccggcccgcccagcgccaugacgccgcccuacccccaguucgagcaguccgagaccgagaccgugcaccucuucauccccgcccugagcgucggcgccaucaucgggaagcagggccagcacaucaagcagcugucccgguucgccggggcgagcaucaagaucgcccccgccgaggcccccgacgcgaaggugcgcauggugaucaucaccggcccgcccgaggcccaguucaaggcccaggggcggaucuacggcaagaucaaggaggagaacuucgucucccccaaggaggaggugaagcucgaggcccacauccgcguccccagcuucgccgcgggccgggugaucgggaagggcgggaagacggugaacgagcugcagaaccuguccagcgccgaggucguggugccccgcgaccagacccccgacgagaacgaccaggucguggugaagaucaccggccacuucuacgccugccaggucgcccagcgcaagauccaggagauccucacccaggugaagcagcaccagcagcagaaggcccugcaguccgggcccccgcagagccggcgcaaguga

SEQ ID NO: 1240 - RNA, 537 nt, Artificial Sequence
  AAA63207_variant
augcacagcuccgcccugcucugcugccuggugcugcucaccggcgugcgcgccagccccgggcagggcacccaguccgagaacagcugcacgcacuucccggggaaccugcccaacaugcugcgggaccuccgcgacgcguucucccgggugaagaccuucuuccagaugaaggaccagcuggacaaccugcuccugaaggagagccugcucgaggacuucaagggcuaccuggggugccaggcccuguccgagaugauccaguucuaccucgaggaggugaugccccaggccgagaaccaggaccccgacaucaaggcccacgucaacagccugggcgagaaccugaagacccuccgccugcggcugcgccggugccaccgcuuccucccgugcgagaacaaguccaaggccguggagcaggucaagaacgcguucaacaagcugcaggagaagggcaucuacaaggccaugagcgaguucgacaucuucaucaacuacaucgaggccuacaugaccaugaagauccggaacuga

SEQ ID NO: 1241 - RNA, 1143 nt, Artificial Sequence
  AAB17170_variant
auggccuucgugugccuggccaucggcugccucuacaccuuccugaucagcaccacguucgggugcaccuccagcuccgacaccgagaucaaggucaacccgccccaggacuucgagaucguggaccccggcuaccugggguaccucuaccugcaguggcagccgccccugagccucgaccacuucaaggagugcaccguggaguacgagcugaaguaccgcaacaucggcuccgagacguggaagaccaucaucaccaagaaccugcacuacaaggacggguucgaccucaacaagggcaucgaggcgaagauccacacccugcugcccuggcagugcacgaacggcagcgagguccaguccagcugggccgagaccaccuacuggaucagcccccaggggauccccgagaccaaggugcaggacauggacugcguguacuacaacuggcaguaccuccugugcuccuggaagcccggcaucgggguccugcucgacacgaacuacaaccuguucuacugguacgagggccuggaccacgcccuccagugcguggacuacaucaaggccgacgggcagaacaucggcugccgguucccguaccuggaggccuccgacuacaaggacuucuacaucugcgugaacggcagcuccgagaacaagcccauccgcagcuccuacuucaccuuccagcugcagaacaucgucaagccccugcccccgguguaccucaccuucacccgggagagcuccugcgagaucaagcugaaguggagcaucccccucgggcccauccccgcgcgcugcuucgacuacgagaucgagauccgggaggacgacacgacccuggugaccgccaccgucgagaacgagacguacacccugaagaccaccaacgagacgcgccagcucugcuucguggugcgguccaaggucaacaucuacugcagcgacgacggcaucuggagcgagugguccgacaagcagugcugggagggggaggaccugagcaagaagacccugcuccgcuucuggcugccguucggcuucauccugauccucgugaucuucgugaccggccugcugcuccggaagcccaacaccuaccccaagaugauccccgaguucuucugcgacacguga

SEQ ID NO: 1242 - RNA, 819 nt, Artificial Sequence
  AAA67527_variant
auggacagcuaccugcucauguggggccugcugaccuucaucauggugcccgggugccaggccgagcucugcgacgacgacccgcccgagaucccccacgccaccuucaaggcgauggccuacaaggagggcacgaugcugaacugcgagugcaagcgcggguuccggcgcaucaaguccggcagccuguacaugcucugcaccgggaacuccagccacuccagcugggacaaccagugccagugcaccuccagcgccacccggaacacgaccaagcaggucacgccccagccggaggagcagaaggagcgcaagaccaccgagaugcagucccccaugcagcccguggaccaggccagccugcccggccacugccgggagccgccgcccugggagaacgaggccaccgagcgcaucuaccacuucguggucggccagaugguguacuaccagugcgugcagggguaccgggcgcugcaccgcggccccgccgaguccgucugcaagaugacccacgggaagacccgguggacgcagccccagcucaucugcaccggcgagauggagaccagccaguuccccggggaggagaagccccaggccucccccgagggccgcccggagagcgagaccuccugccuggugacgaccaccgacuuccagauccagaccgagauggccgcgacgauggagaccagcaucuucaccaccgaguaccagguggccgucgccggcugcguguuccugcucaucuccgugcugcugcucagcgggcugacguggcagcggcgccagcggaagucccgccggaccaucuga

SEQ ID NO: 1243 - RNA, 1656 nt, Artificial Sequence
  AAA59143_variant
auggccgcccccgcgcugagcuggcgccucccgcugcugauccuccugcugccccucgccaccuccugggccagcgccgccgugaacggcaccucccaguucacgugcuucuacaacagccgggcgaacaucuccugcgucuggagccaggacggggcccugcaggacaccuccugccaggugcacgccuggcccgaccgccggcgcuggaaccagaccugcgagcugcuccccgugagccaggccuccugggcgugcaaccugauccugggcgccccggacagccagaagcucaccacggucgacaucgugacccugcgggugcugugccgcgaggggguccgguggcgcgugauggccauccaggacuucaagcccuucgagaaccuccggcugauggcccccaucucccuccaggugguccacguggagacccaccgcugcaacaucagcugggagaucucccaggccagccacuacuucgagcggcaccuggaguucgaggcgcgcacccugucccccggccacacgugggaggaggccccgcugcucacccugaagcagaagcaggaguggaucugccuggagacccucacccccgacacgcaguacgaguuccaggugcgggucaagccccugcagggggaguucaccaccuggagccccuggucccagccgcuggccuuccgcaccaagcccgccgcccucggcaaggacacgauccccuggcugggccaccuccugguggggcugagcggcgcguucggguucaucauccugguguaccuccugaucaacugccggaacaccggccccuggcugaagaagguccucaagugcaacaccccggaccccuccaaguucuucagccagcugagcuccgagcacgggggcgacgugcagaaguggcugagcucccccuuccccagcuccagcuucuccccgggcgggcucgcccccgagaucagcccccuggaggugcuggagcgcgacaaggucacccagcuccugcugcagcaggacaaggugcccgagccggccucccucagcuccaaccacagccugacguccugcuucaccaaccagggcuacuucuucuuccaccuccccgacgcccuggagaucgaggccugccagguguacuucaccuacgaccccuacagcgaggaggaccccgacgagggggucgcgggcgccccgaccggcuccagcccccagccccugcagccgcuguccggggaggacgacgccuacugcacguuccccagccgggacgaccugcuccuguucucccccagccugcucggcgggcccagcccgcccuccaccgcccccggcgggagcggcgccggcgaggagcgcaugcccccgucccugcaggagcgggugccccgcgacugggacccccagccccuggggccgcccacccccggcgugcccgaccucgucgacuuccagccgccgcccgagcuggugcugcgggaggcgggggaggagguccccgacgccggcccccgcgagggggugagcuuccccuggucccgcccgcccggccagggcgaguuccgggcccucaacgcccgccugccccugaacaccgacgcguaccucagccugcaggagcugcaggggcaggaccccacgcaccucguguga

SEQ ID NO: 1244 - RNA, 1110 nt, Artificial Sequence
  AAA59145_variant
augcugaagcccagccucccguucaccucccugcuguuccuccagcugccccugcucggcguggggcugaacaccacgauccugacccccaacggcaacgaggacaccaccgccgacuucuuccucacgaccaugcccaccgacagccuguccgucagcacccugccgcuccccgaggugcagugcuucguguucaacgucgaguacaugaacugcacguggaacuccagcuccgagccccagcccaccaaccugacccugcacuacugguacaagaacagcgacaacgacaaggugcagaagugcucccacuaccucuucagcgaggagaucaccuccgggugccagcugcagaagaaggagauccaccuguaccagacguucgugguccagcuccaggacccgcgcgagccccggcgccaggccacccagaugcugaagcugcagaaccucgugauccccugggcgcccgagaaccugacccugcacaagcucagcgagucccagcuggagcugaacuggaacaaccgguuccucaaccacugccuggagcaccuggugcaguaccgcaccgacugggaccacagcuggacggagcaguccgucgacuaccggcacaaguucagccucccguccguggacggccagaagcgcuacaccuuccgggugcgcagccgguucaacccccugugcggguccgcccagcacuggagcgaguggagccaccccauccacuggggcuccaacaccagcaaggagaaccccuuccuguucgcccucgaggccgucgugaucuccgugggcagcauggggcugaucaucucccugcucugcgucuacuucuggcuggagcgcaccaugccgcggauccccacgcugaagaaccucgaggaccuggugaccgaguaccacggcaacuucagcgccugguccggggugagcaagggccuggcggagucccuccagcccgacuacagcgagcgccugugccuggucuccgagaucccgcccaagggcggggcccucggcgaggggcccggcgccagccccugcaaccagcacucccccuacugggccccgcccugcuacacccugaagcccgagaccuga

SEQ ID NO: 1245 - RNA, 405 nt, Artificial Sequence
  AAA74469_variant
augcgcaugcugcuccaccugagccugcucgcccugggcgccgcguacguguacgccauccccaccgagaucccgaccuccgcccuggucaaggagacgcucgcccugcugagcacccaccggacccuccugaucgccaacgagacccugcgcauccccgugcccgugcacaagaaccaccagcucugcacggaggagaucuuccaggggaucggcacccuggagucccagaccguccagggcgggaccguggagcggcuguucaagaaccucagccugaucaagaaguacaucgacgggcagaagaagaagugcggcgaggagcgccggcgcgugaaccaguuccuggacuaccuccaggaguuccugggcgucaugaacacggaguggaucaucgaguccuga

SEQ ID NO: 1246 - RNA, 555 nt, Artificial Sequence
  AAH06487_variant
auggugcgcaagcugaaguuccacgagcagaagcuccugaagcaggucgacuuccugaacugggaggugaccgaccacaaccuccacgagcugcgggugcugcgccgguaccgccuccagcggcgcgaggacuacacccgguacaaccagcugagccgcgccguccgggagcuggcccgccggcuccgcgaccugcccgagcgggaccaguuccgcgugcgggcguccgccgcccugcucgacaagcuguacgcccugggccucgugccgacgcgcgggagccuggagcugugcgacuucgucaccgccuccagcuucugccggcgccggcuccccaccgugcugcugaagcuccgcauggcgcagcaccuccaggccgccguggccuucgucgagcagggccacgugcggguggggcccgacgucgugaccgaccccgcguuccuggugacgcgcuccauggaggacuucgucaccuggguggacagcuccaagaucaagcgccacgugcuggaguacaacgaggagcgggacgacuucgaccuggaggccuga

SEQ ID NO: 1247 - RNA, 3150 nt, Artificial Sequence
  AAH08786_variant
augggcagccgcacccccgaguccccgcugcacgccgugcagcuccggugggggccccgccggcgccccccccugcugccgcuccugcugcuccugcugcccccccccccgcgggucggcggguucaaccucgacgccgaggcgcccgccgugcugagcggcccccccggguccuucuucggcuucagcguggaguucuaccgcccgggcaccgacggggucuccgugcuggugggcgcccccaaggccaacacgagccagcccgggguccuccagggcggggccguguaccugugccccuggggcgcguccccgacccagugcacccccaucgaguucgacagcaagggcucccggcugcucgagagcucccugagcuccagcgagggggaggagcccguggaguacaagucccugcagugguucggcgccaccguccgcgcccacgggagcuccauccucgccugcgcgccccuguacagcuggcggacggagaaggagccgcuguccgaccccgugggcaccugcuaccucagcaccgacaacuucacccgcauccuggaguacgcccccugccggagcgacuucuccugggccgccggccagggguacugccagggcggguucagcgccgaguucacgaagaccggccgcgugguccuggggggccccggcuccuacuucuggcaggggcagauccucagcgcgacccaggagcagaucgccgaguccuacuacccggaguaccugaucaaccuggugcagggccagcuccagacccggcaggccagcuccaucuacgacgacagcuaccugggguacuccguggccgucggcgaguucagcggggacgacacggaggacuucguggccggcgugcccaagggcaaccugaccuacggguacgucaccauccucaacggcuccgacauccgcagccuguacaacuucuccggggagcagauggcgagcuacuucggcuacgccguggccgccaccgacgugaacggggacggccuggacgaccuccuggucggcgccccccugcucauggaccggacgcccgacgggcgcccgcaggaggugggccggguguacgucuaccugcagcaccccgcggggaucgagcccaccccgacccugacccucacgggccacgacgaguucggccgcuucggguccagccugaccccccugggcgaccucgaccaggacggguacaacgacguggccaucggcgcccccuucgggggcgagacccagcagggcgucguguucguguuccccgggggcccggggggccugggguccaagcccagccagguccugcagccccucugggccgccucccacacccccgacuucuucggcagcgcgcugcggggcgggcgcgaccuggacggcaacggguacccggaccucaucgugggcagcuucgggguggacaaggccgucguguaccggggccgccccaucguguccgccagcgccucccugacgaucuuccccgcgauguucaaccccgaggagcgcagcugcucccuggagggcaacccggucgccugcaucaaccugagcuucugccucaacgccuccgggaagcacguggccgacagcaucggcuucaccguggagcugcagcuggacuggcagaagcagaaggggggcguccggcgcgcccucuuccuggcgucccggcaggccacccugacccagacgcuccugauccagaacggggcccgcgaggacugccgggagaugaagaucuaccugcgcaacgagagcgaguuccgggacaagcucucccccauccacaucgcccugaacuucagccuggacccccaggcccccguggacucccacggccuccgcccggcgcugcacuaccagagcaagucccggaucgaggacaaggcccagauccugcucgacugcggcgaggacaacaucugcgugcccgaccugcagcuggaggucuucggggagcagaaccacguguaccucggcgacaagaacgcccugaaccugaccuuccacgcccagaacgugggggagggcggcgccuacgaggcggagcuccgcgucaccgccccccccgaggccgaguacagcgggcuggugcggcacccgggcaacuucuccagccugagcugcgacuacuucgccgugaaccagucccgccuccuggucugcgaccuggggaaccccaugaaggcgggcgccagccucugggggggccugcgguucaccgugccccaccugcgcgacacgaagaagaccauccaguucgacuuccagauccucuccaagaaccugaacaacagccaguccgacguggucagcuuccggcuguccguggaggcccaggcccaggugacccucaacggcgucagcaagcccgaggccgugcuguucccgguguccgacuggcacccccgcgaccagccccagaaggaggaggaccuggggccggcgguccaccacguguacgagcucaucaaccagggccccagcuccaucagccagggggugcuggagcuguccugcccccaggcccucgagggccagcagcugcuguacgucacccgggugacggggcucaacugcaccaccaaccaccccaucaacccgaagggccuggagcuggaccccgagggcagccuccaccaccagcagaagcgcgaggcccccucccggagcuccgccagcuccgggccccagauccugaagugcccggaggccgagugcuuccgccugcgcugcgagcucggcccccugcaccagcaggagagccagagccugcagcuccacuuccgggugugggcgaagaccuuccugcagcgcgagcaccagcccuucucccugcagugcgaggccgucuacaaggcccucaagaugcccuaccggauccugccgcgccagcugccccagaaggagcggcagguggccaccgccgugcaguggacgaaggcggaggggagcuacggcgucccccucuggaucaucauccuggccauccuguucgggcuccugcugcucggccugcugaucuacauccucuacaagcugggcuucuucaagcgcucccugcccuacgggaccgccauggagaaggcccagcucaagccgcccgcgaccagcgacgccuga

SEQ ID NO: 1248 - RNA, 2397 nt, Artificial Sequence
  AAH20057_variant
augaaccugcagcccaucuucuggaucggccucaucagcuccgugugcugcgucuucgcccagaccgacgagaaccgcugccugaaggccaacgccaagagcugcggggagugcauccaggcgggcccgaacugcggguggugcaccaacuccacguuccugcaggagggcaugcccaccagcgcccggugcgacgaccucgaggcccugaagaagaaggggugcccgcccgacgacaucgagaacccccgcggcuccaaggacaucaagaagaacaagaacgugaccaaccggagcaagggcaccgccgagaagcugaagcccgaggacaucacgcagauccagccccagcagcucgugcugcgccugcgguccggggagccccagaccuucacccucaaguucaagcgcgcggaggacuacccgaucgaccuguacuaccugauggaccucagcuacuccaugaaggacgaccuggagaacgucaagagccugggcaccgaccucaugaacgagaugcggcgcaucacguccgacuuccggaucggguucggcagcuucguggagaagaccgugaugcccuacaucuccaccacccccgccaagcugcgcaaccccugcacgagcgagcagaacugcaccuccccguucagcuacaagaacguccugucccucaccaacaagggggagguguucaacgagcuggugggcaagcagcggaucagcggcaaccuggacucccccgagggcggguucgacgccaucaugcaggucgccgugugcgggagccucaucggcuggcgcaacgugacccggcugcuggucuucagcacggacgcgggcuuccacuucgccggggacggcaagcucgggggcaucgugcugcccaacgacgggcagugccaccuggagaacaacauguacaccaugucccacuacuacgacuaccccagcaucgcccaccucgugcagaagcuguccgagaacaacauccagaccaucuucgccgucaccgaggaguuccagccgguguacaaggagcugaagaaccucauccccaagagcgccgugggcacgcuguccgcgaacagcuccaacgucauccagcugaucaucgacgccuacaacagccucuccagcgaggugauccuggagaacggcaagcuguccgagggggugaccaucagcuacaaguccuacugcaagaacggcgucaacgggaccggcgagaacgggcgcaagugcagcaacaucuccaucggcgacgaggugcaguucgagaucagcaucaccuccaacaagugccccaagaaggacagcgacuccuucaagauccggccccucggcuucacggaggagguggaggucauccugcaguacaucugcgagugcgagugccagagcgaggggaucccggagagccccaagugccacgagggcaacgggaccuucgagugcggcgccugccgcugcaacgaggggcgggugggccgccacugcgagugcuccaccgacgaggucaacagcgaggacauggacgccuacugccggaaggagaacuccagcgagaucugcuccaacaacggcgagugcgugugcgggcagugcgugugccgcaagcgggacaacaccaacgagaucuacagcggcaaguucugcgagugcgacaacuucaacugcgaccgcuccaacgggcugaucugcggcggcaacggggucugcaagugccgcgugugcgagugcaaccccaacuacacgggcagcgccugcgacugcucccucgacaccagcacgugcgaggcguccaacgggcagaucugcaacggccgggggaucugcgagugcggcgugugcaagugcaccgaccccaaguuccagggccagaccugcgagaugugccagaccugccugggggucugcgccgagcacaaggagugcgugcagugccgcgccuucaacaagggcgagaagaaggacacgugcacccaggagugcagcuacuucaacaucaccaagguggagucccgggacaagcugccgcagcccguccagcccgaccccgugagccacugcaaggagaaggacguggacgacugcugguucuacuucaccuacuccgucaacgggaacaacgaggugauggugcacgucguggagaacccggagugccccaccggccccgacaucaucccgaucguggccggggucguggccggcaucgugcucaucggccuggcgcugcuccugaucuggaagcugcucaugaucauccacgaccgccgggaguucgccaaguucgagaaggagaagaugaacgccaagugggacaccggggagaaccccaucuacaagagcgccgucaccacgguggugaaccccaaguacgagggcaaguga

SEQ ID NO: 1249 - RNA, 2367 nt, Artificial Sequence
  AAA36122_variant
augggcaucgagcugcucugccuguucuuccuguuccucgggcgcaacgaccacgugcagggcgggugcgcccugggcggggccgagaccugcgaggacugccugcucaucggcccccagugcgcguggugcgcccaggagaacuucacccacccgagcggcgucggggagcggugcgacacgcccgccaaccugcuggccaagggcugccagcucaacuucaucgagaaccccgugucccagguggagauccugaagaacaagccccugagcgucgggcgccagaagaacuccagcgacaucgugcagaucgccccgcagucccucauccugaagcugcggcccggcggggcgcagacccuccaggugcacguccgccagaccgaggacuaccccguggaccuguacuaccugauggaccucagcgccuccauggacgacgaccugaacaccaucaaggagcugggcagccggcucuccaaggagaugagcaagcugacguccaacuuccgccugggcuucgggagcuucguggagaagcccgucuccccguucgugaagaccacccccgaggagaucgccaaccccugcagcuccauccccuacuucugccucccgaccuucggcuucaagcacauccugccccugacgaacgacgccgagcgguucaacgagaucgugaagaaccagaagaucagcgcgaacaucgacacccccgagggcggguucgacgccaucaugcaggccgccgucugcaaggagaagaucggcuggcgcaacgacucccuccaccuccugguguucgugagcgacgccgacucccacuucgggauggacagcaagcuggcgggcaucgucauccccaacgacgggcugugccaccuggacagcaagaacgaguacuccaugagcaccgugcucgaguacccgaccaucggccagcugaucgacaagcuggugcagaacaacguccuccugaucuucgccgugacgcaggagcagguccaccuguacgagaacuacgccaagcucauccccggggccaccgugggccugcugcagaaggacuccggcaacauccuccagcugaucaucagcgccuacgaggagcugcgguccgagguggagcucgaggugcugggggacaccgagggccugaaccucagcuucaccgcgaucugcaacaacgggacgcuguuccagcaccagaagaagugcucccacaugaaggucggcgacaccgccagcuucuccgugaccgucaacaucccccacugcgagcgccggagccgccacaucaucaucaagcccguggggcugggcgacgcccuggagcuccugguguccccggagugcaacugcgacugccagaaggaggucgaggugaacagcuccaagugccaccacggcaacgggagcuuccagugcggcgugugcgccugccaccccgggcacaugggcccccggugcgagugcggggaggacaugcuguccaccgacagcugcaaggaggcccccgaccacccguccugcagcggccgcggcgacugcuacugcgggcagugcaucugccaccucucccccuacggcaacaucuacgggcccuacugccagugcgacaacuucagcugcguccggcacaagggccugcugugcggcgggaacggcgacugcgacugcggggagugcgugugccgcagcggcuggacgggggaguacugcaacugcaccaccuccaccgacagcugcguguccgaggacggcguccucugcagcggccgcggggacugcgugugcggcaagugcgugugcacgaaccccggggcguccggcccgaccugcgagcggugcccgaccugcggggaccccugcaacagcaagcgguccugcaucgagugccaccugagcgccgccggccaggcccgcgaggagugcgucgacaagugcaagcuggccggcgcgaccaucuccgaggaggaggacuucagcaaggacggguccgugagcugcucccuccagggcgagaacgagugccugaucacguuccugaucaccaccgacaacgaggggaagaccaucauccacagcaucaacgagaaggacugccccaagccgcccaacauccccaugaucaugcucggcgugucccuggccauccugcucaucggggucgugcugcugugcaucuggaagcuccuggugagcuuccacgaccggaaggaggucgccaaguucgaggccgagcgcuccaaggcgaaguggcagacgggcaccaacccccuguaccgcggcagcaccagcaccuucaagaacgugacguacaagcaccgggagaagcagaagguggaccucuccaccgacugcuga

SEQ ID NO: 1250 - RNA, 786 nt, Artificial Sequence
  EAW71937_variant
augugggaccuggugcucagcaucgcccuguccgucggcugcaccggggccgugccccugauccagagccgcaucgugggcgggugggagugcgagaagcacucccagccguggcaggucgcgguguacagccacggcugggcccacugcgggggcgugcucguccacccccagugggugcugaccgccgcccacugccugaagaagaacucccagguguggcucggccggcacaaccuguucgagcccgaggacacggggcagcgcguccccgugagccacuccuucccgcacccccuguacaacaugagccuccugaagcaccagucccugcggcccgacgaggacagcucccacgaccucaugcugcugcgccucagcgagcccgccaagaucaccgacguggucaaggugcugggccugccgacccaggagcccgcgcucgggaccacgugcuacgccuccggcugggggagcaucgagcccgaggaguuccugcggccccgcucccugcagugcgugagccuccaccuccuguccaacgacaugugcgcccgggccuacagcgagaaggucaccgaguucaugcugugcgcgggccuguggaccggcgggaaggacacgugcggcggggacuccggcggcccgcuggugugcaacggggugcuccagggcaucaccagcugggggcccgagcccugcgcccugcccgagaagccggccgucuacaccaagguggugcacuaccgcaaguggaucaaggacaccaucgccgccaaccccuga

SEQ ID NO: 1251 - RNA, 672 nt, Artificial Sequence
  EAW71938_variant
augugggaccuggugcucagcaucgcccuguccgucggcugcaccggggccgugccccugauccagagccgcaucgugggcgggugggagugcgagaagcacucccagccguggcaggucgcgguguacagccacggcugggcccacugcgggggcgugcucguccacccccagugggugcugaccgccgcccacugccugaagaagaacucccagguguggcucggccggcacaaccuguucgagcccgaggacaccgggcagcgcguccccgugagccacuccuucccgcacccccuguacaacaugagccuccugaagcaccagucccugcggcccgacgaggacagcucccacgaccucaugcugcugcgccucagcgagcccgccaagaucaccgacguggucaaggugcugggccugccgacccaggagcccgcgcucgggaccacgugcuacgccuccggcugggggagcaucgagcccgaggaguuccugcggccccgcucccugcagugcgugagccuccaccuccuguccaacgacaugugcgcccgggccuacagcgagaaggucaccgaguucaugcugugcgcgggccuguggaccggcgggaaggacacgugcggcgugucccacccguacagccagcaccuggaggggaagggcuga

SEQ ID NO: 1252 - RNA, 189 nt, Artificial Sequence
  BAF98781_variant
augagccugcucaagcaccagucccugcgccccgacgaggacagcucccacgaccugaugcuccugcggcugagcgagccggccaagaucaccgacguggucaaggugcucggccugcccacccaggagcccgcccuggggacgaccugcuacgcguccggcugggggagcaucgagcccgaggaguga

SEQ ID NO: 1253 - RNA, 735 nt, Artificial Sequence
  BAG62239_variant
augggcacccugugggggugccccggcgccccgcccgugggggcccacagcugcccccuccccaaggaggucucccgcacccugggcagcggggagggcauggcggugucccaccggaacaacagcggcaugcugccgcccgggucccuccugcgcaacagccagguguggcugggccggcacaaccucuucgagcccgaggacacggggcgccggguccccgugucccacagcuucccgcacccccuguacaacaugucccugcucaagcaccagagccugcgccccgacgaggacuccagccacgaccugaugcuccugcggcuguccgagcccgccaagaucaccgacguggucaaggugcucggccugccgacccaggagcccgcccuggggaccacgugcuacgccagcggcuggggcuccaucgagcccgaggaguuccuccgcccccggagccugcagugcgugucccugcaccuccugagcaacgacaugugcgcccgcgcguacuccgagaaggucaccgaguucaugcugugcgccgggcucuggaccggcgggaaggacacgugcggcggcgacagcgggggcccgcuggugugcaacggggugcugcagggcaucaccagcugggggcccgagcccugcgcccuccccgagaagccggccgucuacaccaagguggugcacuaccggaaguggaucaaggacaccaucgcggccaaccccuga

SEQ ID NO: 1254 - RNA, 786 nt, Artificial Sequence; identical to SEQ ID NO: 1250
  AAA74454_variant

SEQ ID NO: 1255 - RNA, 150 nt, Artificial Sequence
  AAR10469_variant
augugggaccuggugcucagcaucgcccuguccgucggcugcaccgggaucgcccgcagcggcuggguggggaccacgugccugucccucaagacccaggcgcggggcagccuguccgccaccgccagccacacccgcuccacgaucuga

SEQ ID NO: 1256 - RNA, 543 nt, Artificial Sequence
  AAR10468_variant
augugggaccuggugcucagcaucgcccuguccgucggcugcaccggggccgugccccugauccagagccgcaucgugggcgggugggagugcgagaagcacucccagccguggcaggucgcgguguacagccacggcugggcccacugcgggggcgugcucguccacccccagugggugcugaccgccgcccacugccugaagaagaacucccagguguggcucggccggcacaaccuguucgagcccgaggacacggggcagcgcguccccgugagccacuccuucccgcacccccuguacaacaugagccuccugaagcaccagucccugcggcccgacgaggacagcucccacgaccucaugcugcugcgccucagcgagcccgccaagaucaccgacguggucaaggugcugggccugccgacccaggagcccgcgcucgggaccacgugcuacgccuccggcugggggagcaucgagcccgaggagugcacccccggcccggacggcguggccgggucccccgacgccugggucuga

SEQ ID NO: 1257 - RNA, 765 nt, Artificial Sequence
  EAW71943_variant
auggccaccgccggcaaccccugggggugguuccugggcuaccucauccuggggguggcgggcagccuggucuccgggagcugcucccagaucaucaacggcgaggacugcagcccgcacucccagcccuggcaggccgcccucgugauggagaacgagcuguucugcagcggcgugcugguccacccccagugggugcucuccgccgcccacugcuuccagaacagcuacaccaucgggcugggccugcacucccucgaggcggaccaggagcccgggagccagaugguggaggccucccugagcguccgccacccggaguacaaccggccccugcucgccaacgaccugaugcugaucaagcucgacgaguccgugagcgaguccgacacgauccgcagcaucuccaucgccagccagugccccaccgcgggcaacuccugccuggugagcggguggggccugcucgccaacggccggaugcccaccguccugcagugcgugaacgugagcgucguguccgaggaggugugcagcaagcuguacgacccgcucuaccaccccuccauguucugcgccgggggcgggcaggaccagaaggacagcugcaacggcgacuccggcgggccccugaucugcaacggcuaccugcaggggcucgucagcuucggcaaggcccccugcggccaggugggggugccgggcgucuacaccaaccugugcaaguucacggaguggaucgagaagaccgugcaggccuccuga

SEQ ID NO: 1258 - RNA, 228 nt, Artificial Sequence
  AAX30051_variant
auggccaccgccggcaaccccugggggugguuccugggcuaccucauccuggggguggcgggcagccuggucuccgggagcugcucccagaucaucaacggcgaggacugcagcccgcacucccagcccuggcaggccgcccucgugauggagaacgagcuguucugcagcggcgugcugguccacccccagugggugcucuccgccgcccacugcuuccagaaguga

SEQ ID NO: 1259 - RNA, 588 nt, Artificial Sequence
  AAL14782_variant
auggccaccgccggcaaccccugggggugguuccugggcuaccucauccuggggguggcgggcagccuggucuccgggagcugcucccagaucaucaacggcgaggacugcagcccgcacucccagcccuggcaggccgcccucgugauggagaacgagcuguucugcagcggcgugcugguccacccccagugggugcucuccgccgcccacugcuuccagaacagcuacaccaucgggcugggccugcacucccucgaggcggaccaggagcccgggagccagaugguggaggccucccugagcguccgccacccggaguacaaccggccccugcucgccaacgaccugaugcugaucaagcucgacgaguccgugagcgaguccgacacgauccgcagcaucuccaucgccagccagugccccaccgcgggcaacuccugccuggugagcggguggggccugcucgccaacggcgagcugaccggggucugccugcccagcucccggcgcagcuccgcccagagccggggccucacccaguccagcgccucccaggccgagugccugccgugcugcagcgcguga

SEQ ID NO: 1260 - RNA, 480 nt, Artificial Sequence
  AAL14781_variant
auggccaccgccggcaaccccugggggugguuccugggcuaccucauccuggggguggcgggcagccuggucuccgggagcugcucccagaucaucaacggcgaggacugcagcccgcacucccagcccuggcaggccgcccucgugauggagaacgagcuguucugcagcggcgugcugguccacccccagugggugcucuccgccgcccacugcuuccagaacagcuacaccaucgggcugggccugcacucccucgaggcggaccaggagcccgggagccagaugguggaggccucccugagcguccgccacccggaguacaaccggccccugcucgccaacgaccugaugcugaucaagcucgacgaguccgugagcgaguccgacacgauccgcagcaucuccaucgccagccagugccccaccgcgggcaacuccugccuggugagcggguggggccugcucgccaacggcuga

SEQ ID NO: 1261 - RNA, 765 nt, Artificial Sequence
  AAD21580_variant
auggccaccgccggcaaccccugggggugguuccugggcuaccucauccuggggguggcgggcagccuggucuccgggagcugcucccagaucaucaacggcgaggacugcagcccgcacucccagcccuggcaggccgcccucgugauggagaacgagcuguucugcagcggcgugcugguccacccccagugggugcucuccgccgcccacugcuuccagaacagcuacaccaucgggcugggccugcacucccucgaggcggaccaggagcccgggagccagaugguggaggccucccugagcguccgccacccggaguacaaccggccccugcucgccaacgaccugaugcugaucaagcucgacgaguccgugagcgaguccgacacgauccgcagcaucuccaucgccagccagugccccaccgcgggcaacuccugccuggugagcggguggggccugcucgccaacggccggaugcccaccguccugcagugcgugaacgugagcgucguguccgaggaggugugcagcaagcuguacgacccgcucuaccaccccuccauguucugcgccgggggcgggcacgaccagaaggacagcugcaacggcgacuccggcgggccccugaucugcaacggcuaccugcaggggcucgucagcuucggcaaggcccccugcggccaggugggggugccgggcgucuacaccaaccugugcaaguucacggaguggaucgagaagaccgugcaggccuccuga

SEQ ID NO: 1262 - RNA, 2673 nt, Artificial Sequence
  AAC83230_variant
augagccagggcauccuguccccgcccgccgggcuccugagcgacgacgacguggucgugucccccauguucgagagcaccgccgcggaccugggcuccgugguccgcaagaaccuccugagcgacugcuccguggugagcaccucccuggaggacaagcagcagguccccagcgaggacuccauggagaaggugaagguguaccuccggguccgcccccugcugccgagcgagcucgagcggcaggaggaccaggggugcgugcgcaucgagaacguggagacgcugguccugcaggcccccaaggacuccuucgcccucaagagcaacgagcggggcaucgggcaggccacccaccgcuucaccuucucccagaucuucggccccgaggugggccaggccagcuucuucaaccugaccgugaaggagauggucaaggacgugcugaaggggcagaacuggcucaucuacacguacggcgugaccaacuccgggaagacccacaccauccagggcacgaucaaggacgggggcauccugccccggagccuggcgcucaucuucaacucccugcagggccagcugcacccgacccccgaccucaagccccugcugagcaacgaggucaucuggcucgacagcaagcagauccgccaggaggagaugaagaagcugucccugcucaacgggggccugcaggaggaggagcugagcaccucccucaagcggagcguguacaucgagucccgcaucgggaccagcacguccuucgacagcggcaucgccggccuguccagcaucucccagugcaccagcuccagccagcuggacgagaccucccaccggugggcccagcccgacaccgccccgcuccccgugcccgcgaacauccgcuucagcaucuggaucuccuucuucgagaucuacaacgagcugcuguacgaccuccuggagcccccgagccagcagcggaagcgccagacgcugcggcucugcgaggaccagaacgggaaccccuacgucaaggaccugaacuggauccacgugcaggacgccgaggaggccuggaagcugcucaaggugggccgcaagaaccaguccuucgccagcacccaccugaaccagaacagcucccggagccacuccaucuucagcauccgcauccugcaccuccagggggagggcgacaucguccccaagaucuccgagcugagccugugcgaccucgccggguccgagcggugcaaggaccagaaguccggcgagcgccugaaggaggcgggcaacaucaacaccucccugcacacccuggggcggugcaucgccgcccuccgccagaaccagcagaaccgcagcaagcagaaccuggugcccuuccgggacuccaagcugacgcgcgucuuccagggcuucuucaccgggcggggccgcagcugcaugaucgugaacgugaacccgugcgccuccaccuacgacgagacccuccacgucgccaaguucagcgcgaucgccucccagcuggugcacgccccgcccaugcagcugggguuccccagccuccacuccuucaucaaggagcacagccuccaggugagccccucccuggagaagggcgccaaggccgacacgggccuggacgacgacaucgagaacgaggcggacaucagcauguacgggaaggaggagcugcugcaggucguggaggccaugaagacccuccugcugaaggagcggcaggagaagcuccagcuggagaugcaccuccgcgacgagaucugcaacgagaugguggagcagaugcagcagcgggagcaguggugcuccgagcaccuggacacccagaaggagcugcuggaggagauguacgaggagaagcucaacauccugaaggagagccugaccuccuucuaccaggaggagauccaggagcgcgacgagaagaucgaggagcucgaggcccugcugcaggaggcccggcagcagagcgucgcccaccagcaguccggcagcgagcucgcgcugcgccggucccagcgccuggccgccagcgccuccacgcagcagcuccaggaggugaaggcgaagcugcagcagugcaaggccgagcugaacagcaccaccgaggagcuccacaaguaccagaagaugcuggagcccccgcccuccgccaagcccuucaccaucgacguggacaagaagcuggaggaggggcagaagaacauccggcuccugcgcacggagcugcagaagcucggcgagagccugcaguccgccgagcgggccugcugccacagcaccggggcgggcaagcugcgccaggcccucacgaccugcgacgacauccugaucaagcaggaccagacccuggccgagcuccagaacaacaugguccuggugaagcuggaccuccggaagaaggccgccugcaucgcggagcaguaccacaccgugcugaagcugcagggccaggucuccgccaagaagcgccucgggaccaaccaggagaaccagcagcccaaccagcagcccccgggcaagaagcccuuccugcggaaccugcucccccgcaccccgaccugccagagcuccacggacugcagccccuacgcccgcauccugcggagccgccggagcccccugcucaagagcgggcccuucggcaagaaguacuga

SEQ ID NO: 1263 - RNA, 1113 nt, Artificial Sequence
  AAH34621_variant
auggccaucacccuggaggaggcccccuggcucggcuggcugcuggugaaggcgcucaugcgcuucgccuucauggucgugaacaaccugguggccaucccgagcuacaucugcuacgucaucauccugcagccccuccgggugcuggacuccaagcgcuucugguacaucgaggggaucauguacaaguggcugcucggcaugguggccagcugggggugguacgccggcuacaccgucauggaguggggcgaggacaucaaggcgguguccaaggacgaggccgugaugcuggucaaccaccaggccacgggggacgugugcacccugaugaugugccuccaggacaagggccugguggucgcccagaugauguggcugauggaccacaucuucaaguacaccaacuucgggaucgugagccucgugcacggcgacuucuucauccggcaggggcgcuccuaccgggaccagcagcugcugcuccugaagaagcaccuggagaacaacuaccgcagccgggaccgcaaguggaucguccucuuccccgagggcggguuccugcggaagcgccgggagaccucccaggcguucgccaagaagaacaaccugcccuuccucacgaacgugacccugccgcgcagcggcgccaccaagaucauccugaacgcccucguggcccagcagaagaacggcucccccgccgggggcgacgcgaaggagcuggacagcaaguccaaggggcugcaguggaucaucgacaccacgaucgccuaccccaaggccgagcccaucgacauccagaccuggauccucggcuaccggaagccgaccgucacccacgugcacuaccgcaucuuccccaucaaggacgugccccuggagacggacgaccugaccaccuggcucuaccagcgguucgucgagaaggaggaccugcugagccacuucuacgagaccggcgccuucccgcccuccaaggggcacaaggaggcggugagccgcgagaugacgcucuccaaccuguggaucuuccugauccagagcuucgccuuccucuccggcuacaugugguacaacaucauccaguacuucuaccacugccuguucuga

SEQ ID NO: 1264 - RNA, 2178 nt, Artificial Sequence
  AAH14924_variant
auggccauggacagcucccugcaggcccgccucuuccccggccuggcgaucaagauccagcggagcaacgggcugauccacuccgccaacgugcgcaccgucaaccucgagaaguccugcgugagcguggagugggccgagggcggggccaccaagggcaaggagaucgacuucgacgacgucgccgcgaucaacccggagcugcugcagcuccugccccugcaccccaaggacaaccucccccugcaggagaacgugacgauccagaagcagaagcggcgcagcgugaacuccaagaucccggcccccaaggagagccugcggucccgcagcacccggauguccaccgucagcgagcuccgcaucaccgcccaggagaacgacauggagguggagcugcccgccgcggccaacucccggaagcaguucagcgugcccccggcccccacgcgccccuccugccccgccgucgccgagaucccgcugcggauggugagcgaggagauggaggagcagguccacuccauccgcgggagcuccagcgcgaaccccgugaacagcgugcggcgcaaguccugccucgugaaggaggucgagaagaugaagaacaagcgggaggagaagaaggcccagaacagcgagaugcgcaugaagcgggcccaggaguacgacuccagcuuccccaacugggaguucgcccgcaugaucaaggaguuccgggccacccuggagugccacccccugaccaugaccgacccgaucgaggagcaccgcaucugcgugugcgugcggaagcgcccccucaacaagcaggagcuggcgaagaaggagaucgacgucaucuccauccccagcaagugccugcuccuggugcacgagcccaagcugaagguggaccucacgaaguaccuggagaaccaggccuucugcuucgacuucgccuucgacgagaccgccuccaacgaggucguguaccgcuucaccgcccggccgcuggugcagaccaucuucgagggcggcaaggcgacgugcuucgccuacgggcagaccggcagcgggaagacccacaccaugggcggggaccucuccggcaaggcccagaacgccagcaagggcaucuacgccauggcgucccgcgacgucuuccugcugaagaaccagcccugcuaccggaagcucgggcuggagguguacgucacguucuucgagaucuacaacggcaagcuguucgaccuccugaacaagaaggccaagcugcgcgugcucgaggacgggaagcagcagguccagguggugggccugcaggagcaccuggugaacagcgccgacgacgucaucaagaugaucgacaugggcuccgccugccggaccagcgggcagaccuucgcgaacuccaacagcucccgcagccacgccugcuuccagaucauccuccgggccaagggccgcaugcacgggaaguucucccugguggaccuggccggcaacgagcgcggggccgacaccagcagcgcggaccggcagacgcggauggagggcgccgagaucaacaagucccuccuggcccugaaggagugcauccgcgcccucggccagaacaaggcccacacccccuuccgggagagcaagcugacccaggugcugcgcgacuccuucaucggggagaacagccggaccugcaugaucgcgacgaucucccccggcaucagcuccugcgaguacacccucaacacccugcgcuacgccgaccgggucaaggagcugagcccgcacuccgggcccagcggcgagcagcugauccagauggagaccgaggagauggaggccugcuccaacggggcccucauccccggcaaccugagcaaggaggaggaggagcuguccagccagauguccagcuucaacgaggccaugacgcagauccgcgagcucgaggagaaggcgauggaggagcugaaggagaucauccagcagggccccgacuggcuggagcucuccgagaugaccgagcagccggacuacgaccuggagaccuucgugaacaaggccgagagcgcccuggcccagcaggcgaagcacuucagcgcccuccgggacgugaucaaggcccugcgccuggccaugcagcucgaggagcaggccucccgccagaucagcuccaagaagcggccccaguga

SEQ ID NO: 1265 - RNA, 342 nt, Artificial Sequence
  AAH62223_variant
augaacuucuaccugcuccuggccagcuccauccugugcgcccucaucguguucuggaaguaccgccgguuccagcgcaacaccggcgagaugagcuccaacagcaccgcgcuggcccugguccggcccuccagcuccgggcucaucaacagcaacacggacaacaaccuggccguguacgaccugucccgcgacauccucaacaacuucccgcacagcaucgcccggcagaagcgcauccuggugaaccuguccauggucgagaacaagcucguggagcuggagcacacccugcucagcaagggcuuccgcggggccagcccccaccggaaguccaccuga

SEQ ID NO: 1266 - RNA, 2583 nt, Artificial Sequence
  AAA56833_variant
augggccccuggggguggaagcugcgcuggaccguggcccuccugcuggccgcggccggcaccgccgucggggaccggugcgagcgcaacgaguuccagugccaggacggcaagugcaucagcuacaagugggugugcgacggguccgccgagugccaggacggcagcgacgagucccaggagacgugccucagcgugaccugcaaguccggcgacuucagcugcgggggccgggucaaccgcugcaucccgcaguucuggcggugcgacggccagguggacugcgacaacggguccgacgagcaggggugcccgcccaagaccugcagccaggacgaguuccgcugccacgacggcaagugcaucucccggcaguucgugugcgacagcgaccgcgacugccuggacggcuccgacgaggccagcugccccguccugaccugcgggcccgcguccuuccagugcaacagcuccacgugcaucccccagcucugggccugcgacaacgaccccgacugcgaggacggcagcgacgaguggccccagcggugccgcgggcuguacguguuccagggcgacuccagcccgugcuccgccuucgaguuccacugccugagcggcgagugcauccacagcuccuggcggugcgacgggggccccgacugcaaggacaagagcgacgaggagaacugcgccguggcgaccugccgccccgacgaguuccagugcuccgacgggaacugcauccacggcagccggcagugcgaccgcgaguacgacugcaaggacauguccgacgaggucgggugcgugaacgugacccucugcgagggccccaacaaguucaagugccacagcggcgagugcaucacccuggacaaggucugcaacauggcccgggacugccgcgacugguccgacgagccgaucaaggagugcgggacgaacgagugccuggacaacaacggcgggugcagccacgugugcaacgaccucaagaucggcuacgagugccugugccccgacggguuccagcugguggcccagcggcgcugcgaggacaucgacgagugccaggaccccgacacgugcucccagcucugcgucaaccuggagggcggcuacaagugccagugcgaggagggguuccagcuggacccccacaccaaggccugcaaggccgugggcagcaucgcguaccucuucuucaccaaccggcacgaggugcgcaagaugacgcuggaccgguccgaguacaccagccugaucccgaaccuccgcaacgucguggcccuggacaccgagguggccuccaaccgcaucuacuggagcgaccugucccagcggaugaucugcagcacccagcucgaccgcgcccacggggucuccagcuacgacacggugaucucccgggacauccaggcccccgacggccuggcgguggacuggauccacagcaacaucuacuggaccgacagcguccuggggaccguguccgucgccgacaccaagggcgugaagcgcaagacccucuuccgggagaacggcagcaagccccgcgccaucguggucgaccccgugcacggguucauguacuggaccgacuggggcaccccggccaagaucaagaagggcgggcugaacggcguggacaucuacucccuggucaccgagaacauccaguggcccaacgggaucacgcucgaccugcugagcggccggcucuacuggguggacuccaagcugcacagcaucuccagcaucgacgugaacgggggcaaccgcaagaccauccuggaggacgagaagcggcucgcccaccccuucucccuggcggucuucgaggacaagguguucuggaccgacaucaucaacgaggccaucuucagcgccaaccgccugaccggguccgacgugaaccuccuggccgagaaccugcucagccccgaggacaugguccuguuccacaaccugacgcagccgcggggcgugaacuggugcgagcgcaccacccucuccaacggcgggugccaguaccugugccugcccgcgccccagaucaacccccacagcccgaaguucacgugcgccugccccgacggcaugcuccuggcccgggacaugcgcuccugccugaccgaggccgaggccgcgguggccacccaggagaccagcaccguccggcugaagguguccagcacggccgugcgcacccagcacaccaccacccggcccgucccggacacgagccgccuccccggggccacccccggccugaccaccguggagaucgugacgaugucccaccaggcccugggggacgucgcgggccggggcaacgagaagaagcccagcuccgugcgcgcccucagcaucgugcugccgaucguccugcucguguuccugugccuggggguguuccuccuguggaagaacuggcgccugaagaacaucaacuccaucaacuucgacaaccccgucuaccagaagaccaccgaggacgaggugcacaucugccacaaccaggacggcuacagcuaccccucccggcagauggugagccucgaggacgacgucgccuga

SEQ ID NO: 1267 - RNA, 1302 nt, Artificial Sequence
  CAA70989_variant
augguguggaaggucgccguguuccugagcguggcccucggcaucggggcgguccccaucgacgacccggaggacggcgggaagcacuggguggugaucgucgccggcuccaacgggugguacaacuaccgccaccaggccgacgccugccacgccuaccagaucauccaccggaacggcauccccgacgagcagaucguggugaugauguacgacgacaucgcguacagcgaggacaaccccacccccggcaucgucaucaaccgcccgaacgggaccgacguguaccagggcgugcccaaggacuacacgggggaggacgucacgccccagaacuuccuggccgugcugcggggcgacgccgaggccgugaaggggaucggcuccggcaagguccucaagagcgggccccaggaccacguguucaucuacuucaccgaccacggcuccaccgggauccugguguucccgaacgaggaccugcacgucaaggaccucaacgagaccauccacuacauguacaagcacaagauguaccgcaagaugguguucuacaucgaggcgugcgagagcggcuccaugaugaaccaccuccccgacaacaucaacguguacgccaccaccgccgccaacccccgggagagcuccuacgccugcuacuacgacgagaagcgcagcaccuaccugggcgacugguacuccgucaacuggauggaggacagcgacguggaggaccugacgaaggagacccugcacaagcaguaccaccuggugaagucccacaccaacaccagccacgucaugcaguacgggaacaagacgaucuccaccaugaaggugaugcaguuccagggcaugaagcggaaggcgagcucccccgucccgcucccgcccgugacccaccuggaccugacccccagccccgacgugccccucacgaucaugaagcgcaagcugaugaacaccaacgaccuggaggagucccggcagcucaccgaggagauccagcgccaccuggacgcccggcaccugaucgagaaguccguccgcaagaucgugagccuccuggccgccagcgaggccgagguggagcagcugcucagcgagcgggcgccccugaccgggcacuccugcuaccccgaggcccugcuccacuuccgcacgcacugcuucaacuggcacagcccgaccuacgaguacgcccugcggcaccuguacguccucgugaaccugugcgagaagcccuacccccugcaccgcaucaagcucuccauggaccacgugugccugggccacuacuga

SEQ ID NO: 1268 - RNA, 1797 nt, Artificial Sequence
  AAL36991_variant
augacccccaucgugaccguccugaucugccucggccugagccuggggccgcgcacgcacgugcagaccggcaccauccccaagcccacccucugggccgagcccgacuccgugaucacgcaggggagcccggucacccuguccugccagggcagccuggaggcccaggaguaccggcucuaccgcgagaagaaguccgcgagcuggaucacccggauccgccccgagcuggugaagaacgggcaguuccacauccccuccaucaccugggagcacacgggccgguacggcugccaguacuacagccgcgcccggugguccgagcugagcgacccccucgugcuggucaugaccggggccuacccgaagcccacccuguccgcccagcccagccccguggugaccuccggcgggcgcgucacgcuccagugcgagagccagguggccuucggcggguucauccugugcaaggagggcgaggaggagcacccgcagugccugaacucccagccccacgcgcggggcagcucccgcgccaucuucagcguggggcccgucucccccaaccggcgcuggagccaccggugcuacggcuacgaccucaacagcccguacgugugguccagccccuccgaccugcuggagcuccuggugcccggggucagcaagaagcccucccugagcgugcagccgggccccguggucgcccccggcgagucccucacccugcagugcgugagcgacgugggguacgaccgcuucguccuguacaaggagggcgagcgggaccuccgccagcugcccgggcggcagccgcaggccggccugucccaggcgaacuucacccucgggcccgugagccgcuccuacggcggccaguaccggugcuacggggcccacaaccugagcuccgagugcagcgcccccuccgacccccuggacauccucaucaccggccagauccgcgggacgccguucaucagcgugcagcccggccccaccgucgccuccggggagaacgugacccugcugugccagagcuggcggcaguuccacaccuuccuccugacgaaggccggcgcggccgacgccccgcugcgccuccgcuccauccacgaguaccccaaguaccaggccgaguuccccaugagccccgucaccagcgcccacgcgggcaccuaccggugcuacgggucccugaacagcgacccguaccugcucucccaccccagcgagccccuggagcuggugguguccggccccagcaugggguccagcccgccgcccaccggccccaucuccacgcccgccgggcccgaggaccagccccucacccccaccggcagcgacccgcaguccggccuggggcgccaccugggcgucgugaucgggauccucguggccgucgugcugcugcuccugcugcugcuccugcuguuccucauccugcggcaccgccggcagggcaagcacuggaccagcacgcagcgcaaggccgacuuccagcaccccgccggcgcgguggggcccgagcccaccgaccggggccugcaguggcgcuccagcccggccgccgacgcccaggaggagaaccucuacgccgcggucaaggacacccagcccgaggacgggguggagauggacacccgggccgccgccuccgaggcgccccaggacgugacguacgcccagcugcacagccugacccuccgccggaaggccaccgagcccccgcccucccaggagcgcgagcccccggccgagcccagcaucuacgccacccuggcgauccacuga

SEQ ID NO: 1269 - RNA, 498 nt, Artificial Sequence
  CCDS6385.2_variant
auggcccugcucgcccugcugcucguggucgcgcugccccgcguguggaccgacgccaaccugaccgcccggcagcgcgacccggaggacagccagcggacggacgagggcgacaaccgcguguggugccacgucugcgagcgggagaacaccuucgagugccagaacccccgccggugcaaguggaccgagcccuacugcgugaucgccgccgugaagaucuucccccgcuucuucauggucgcgaagcagugcuccgccgggugcgccgccauggagcggccgaagcccgaggagaagcgcuuccuccuggaggagcccaugcccuucuucuaccugaagugcugcaagauccgguacugcaaccucgagggcccgcccaucaacagcuccguguucaaggaguacgcggggagcaugggcgaguccugcgggggccuguggcuggccauccuccugcugcucgccagcaucgccgccggccugucccugagcuga

SEQ ID NO: 1270 - RNA, 375 nt, Artificial Sequence
  AAA68873_variant
augagccuggagcagaagucccagcacugcaagcccgaggagggccucgacacccaggaggaggcccuggggcuggugggcguccaggccgcgaccacggaggagcaggaggccgugagcuccagcuccccgcucgugcccgggacccugggcgagguccccgccgccgggagccccggcccgcugaaguccccgcagggcgccagcgcgauccccaccgccaucgacuucacccucuggcgccaguccaucaaggggagcuccaaccaggaggaggagggccccagcacgucccccgaccccgagagcguguuccgggccgcccuguccaagaagguggcggaccugauccacuuccuccugcugaaguacuga

SEQ ID NO: 1271 - RNA, 957 nt, Artificial Sequence
  AAH02455_variant
augcugcucggccagaagucccagcgcuacaaggccgaggaggggcugcaggcccagggcgaggcgcccgggcugauggacgugcagaucccgaccgccgaggagcagaaggccgccagcagcuccagcacccucaucaugggcacgcuggaggaggucaccgacuccgggagccccuccccgccccagagccccgagggcgccuccagcucccugaccgugaccgacagcacgcucuggucccagagcgacgagggcuccagcuccaacgaggaggaggggcccagcaccucccccgaccccgcgcaccuggagagccuguuccgggaggcccucgacgagaagguggccgagcugguccgcuuccugcuccggaaguaccagaucaaggagccggugaccaaggccgagaugcuggagagcgugaucaagaacuacaagaaccacuuccccgacaucuucuccaaggcgagcgagugcaugcaggucaucuucggcaucgacgugaaggagguggaccccgccgggcacuccuacauccuggugaccugccucggccugagcuacgacgggcugcucggcgacgaccaguccacgcccaagaccggccugcugaucaucguccucgggaugauccugauggagggcagccgcgccccggaggaggccaucugggaggcccuguccgugauggggcucuacgacggccgggagcacagcgucuacuggaagcugcgcaagcugcucacccaggagugggugcaggagaacuaccuggaguaccggcaggcgcccggcuccgaccccgugcgcuacgaguuccugugggggccccgggcccucgccgagaccagcuacgucaaggugcuggagcacgugguccgcgugaacgcccgggugcgcaucuccuacccgagccugcacgaggaggcccucggcgaggagaagggggucuga

SEQ ID NO: 1272 - RNA, 1290 nt, Artificial Sequence
  AAH04479_variant
auggagacccaguuccgccggggcgggcugggcugcagccccgccuccaucaagcgcaagaagaagcgggaggacagcggggacuucggccuccagguguccaccauguucagcgaggacgacuuccaguccacggagcgcgccccguacgggccccagcugcaguggagccaggaccugccccggguccagguguuccgcgagcaggcgaaccucgaggaccggagcccccgccggacccagcgcaucaccggcggcgagcagguccugugggggccgaucacccagaucuuccccacggugcggcccgccgaccugacccgcgugaucaugccccucgagcagcggucccagcacugcaagccggaggagggccugcaggcccaggaggaggaccuggggcucgugggcgcccaggcccugcaggcggaggagcaggaggccgccuucuucuccagcacccugaacgucgggacccucgaggagcugcccgccgcggagucccccagcccgccgcagagcccccaggaggaguccuucucccccacggccauggacgccaucuucggcagccuguccgacgagggcagcgggucccaggagaaggagggccccagcaccagcccggaccucaucgaccccgaguccuucagccaggacauccugcacgacaagaucaucgaccuggugcaccuccugcugcgcaaguaccgggugaaggggcucaucaccaaggccgagaugcugggcuccgucaucaagaacuacgaggacuacuuccccgagaucuuccgcgaggccagcgugugcaugcagcuccuguucggcaucgacgugaaggaggucgaccccaccucccacagcuacgugcuggugacgucccugaaccucagcuacgacgggauccagugcaacgagcaguccaugcccaagagcggccugcugaucaucguccucggggugaucuucauggagggcaacugcauccccgaggaggugaugugggagguccuguccaucauggggguguacgcgggccgggagcacuuccuguucggcgagcccaagcgccuccugacccagaacugggugcaggagaaguaccuggucuaccgccaggugcccgggaccgacccggccugcuacgaguuccucuggggcccccgggcccacgccgagaccagcaagaugaaggugcuggaguacaucgccaacgcgaacgggcgggaccccacguccuaccccagccuguacgaggacgcccuccgcgaggagggcgagggggucuga

SEQ ID NO: 1273 - RNA, 1110 nt, Artificial Sequence
  EAW99421_variant
augccccgcgccccgaagcggcagcgcugcaugcccgaggaggaccugcagagccaguccgagacccagggccucgagggggcccaggcgccccuggccguggaggaggacgccagcuccagcaccuccacgagcuccagcuuccccuccagcuucccguccagcuccagcuccagcuccagcuccugcuacccccugauccccagcacccccgaggaggucagcgccgacgacgagaccccgaacccgccccaguccgcccagaucgcgugcagcucccccagcgugguggccucccucccccuggaccagagcgacgagggcuccagcucccagaaggaggagagccccuccacccugcagguccuccccgacagcgagucccugccccggagcgagaucgacgagaaggugacggaccuggugcaguuccuccuguucaaguaccagaugaaggagccgaucaccaaggccgagauccuggaguccgucaucaagaacuacgaggaccacuucccccuccuguucagcgaggccuccgagugcaugcugcucguguucgggaucgacgugaaggaggucgaccccaccggccacagcuucgugcuggugaccucccuggggcucacguacgacggcaugcugagcgacguccagagcaugcccaagaccggcauccugauccucauccuguccaucaucuucaucgagggguacugcaccccggaggaggugaucugggaggcgcugaacaugaugggccucuacgacgggauggagcaccugaucuacggcgagccccgcaagcugcucacccaggacugggugcaggagaacuaccuggaguaccggcagguccccgggagcgaccccgcccgcuacgaguuccuguggggcccgcgggcccacgccgagauccgcaagaugucccuccugaaguuccuggccaaggugaacggcagcgacccccgguccuucccccucugguacgaggaggcgcugaaggacgaggaggagcgcgcccaggaccggaucgccacgaccgacgacaccaccgccauggccagcgcguccagcuccgccacggggagcuucuccuaccccgaguga

SEQ ID NO: 1274 - RNA, 945 nt, Artificial Sequence
  AAH03408_variant
augccccuggagcagcgcagccagcacugcaagccggaggagggccucgaggcccagggggaggcccugggccuggugggggcgcaggcccccgccaccgaggagcaggagaccgccuccagcuccagcacgcucgucgaggugacccugcgggaggugcccgccgcggagucccccagcccgccccacagcccccagggcgccuccacccugcccaccacgaucaacuacacccucuggucccagagcgacgagggguccagcaacgaggagcaggagggcccguccaccuuccccgaccuggagaccagcuuccaggucgcccugucccgcaagauggccgagcucgugcacuuccugcugcucaaguaccgggcgcgcgagcccuucacgaaggccgagaugcugggcagcgugauccggaacuuccaggacuucuuccccgucaucuucuccaaggccagcgaguaccugcagcucguguucgggaucgagguggucgagguggugcgcaucggccaccuguacauccuggugaccugccucgggcuguccuacgacggccugcucggggacaaccagaucgucccgaagaccggccugcugaucaucgugcucgccaucaucgccaaggagggcgacugcgcgcccgaggagaagaucugggaggagcugagcguccuggaggccagcgacgggcgggaggacuccguguucgcccacccccgcaagcuccugacccaggaccuggugcaggagaacuaccucgaguaccggcagguccccggcagcgacccggccugcuacgaguuccugugggggccccgcgcccugguggagacguccuacgugaagguccuccaccaccuccugaagaucagcggcggcccccacaucuccuacccgccccugcacgagugggcguuccgggagggggaggaguga

SEQ ID NO: 1275 - RNA, 930 nt, Artificial Sequence
  AAA03229_variant
augagccuggagcagcgcucccuccacugcaagcccgaggaggcccuggaggcccagcaggaggcgcugggccucgugugcguccaggccgccaccagcuccagcuccccgcuggugcuggggacccucgaggaggugcccacggccggcagcaccgacccgccccaguccccgcagggggccagcgcguuccccaccaccaucaacuucacgcggcagcgccagcccuccgagggcagcuccagccgggaggaggaggggcccuccaccagcugcauccuggagucccuguuccgcgccgucaucaccaagaagguggccgaccucgugggcuuccugcugcucaaguaccgggcccgcgagcccgucaccaaggcggagaugcuggagagcgugaucaagaacuacaagcacugcuuccccgagaucuucggcaaggccuccgagagccugcagcucguguucgggaucgacgucaaggaggccgaccccacgggccacuccuacgugcuggugaccugccuggggcucagcuacgacggccugcugggggacaaccagaucaugcccaagaccggcuuccucaucaucguccuggugaugaucgccauggagggcgggcacgccccggaggaggagaucugggaggagcugagcgugauggaggucuacgacggccgggagcacuccgcguacggggagccccgcaagcuccugacccaggaccuggugcaggagaaguaccucgaguaccgccaggugcccgacagcgaccccgcccgguacgaguuccuguggggcccgcgggcccuggccgagacguccuacgucaaggugcucgaguacgugaucaaggucagcgcccgcgugcgguucuucuuccccucccugcgcgaggcggcccugcgggaggaggaggagggcguguga

SEQ ID NO: 1276 - RNA, 945 nt, Artificial Sequence
  AAA17729_variant
augccccuggagcagcgcagccagcacugcaagccggaggagggccucgaggcccgcggggaggcccugggccuggugggggcgcaggcccccgccaccgaggagcagcagaccgccuccagcuccagcacgcucgucgaggugacccugggcgaggugcccgccgcggacucccccagcccgccccacagcccccagggggccuccuccuucagcaccaccaucaacuacacgcuguggcggcaguccgacgagggcagcuccaaccaggaggaggagggcccccggauguucccggaccucgagagcgaguuccaggccgccaucucccgcaagauggucgagcuggugcacuuccugcuccugaaguaccgggcgcgcgagcccgugaccaaggccgagaugcuggagagcguccuccggaacugccaggacuucuuccccgugaucuucuccaaggccagcgaguaccugcagcugguguucgggaucgaggucguggaggugguccccaucucccaccucuacauccuggugaccugccugggccucagcuacgacgggcugcugggcgacaaccaggugaugccgaagaccgggcuccugaucaucguccuggccaucaucgccaucgagggcgacugcgcgcccgaggagaagaucugggaggagcucagcaugcuggagguguucgagggccgcgaggacuccguguucgcccacccccggaagcugcucaugcaggaccugguccaggagaacuaccuggaguaccgccaggugcccgggagcgacccggccugcuacgaguuccucuggggcccccgggcccugaucgagacguccuacgugaagguccugcaccacacccucaagaucgggggcgagccccacaucagcuacccgccccugcacgagcgcgcccugcgggagggcgaggaguga

SEQ ID NO: 1277 - RNA, 945 nt, Artificial Sequence
  AAA17446_variant
augccccuggagcagcgcagccagcacugcaagcccgaggagggccucgaggcccgcggggaggcccugggccuggugggggcgcaggcccccgccaccgaggagcaggaggccgccuccagcuccagcacccucgucgaggugacgcugggcgaggugcccgcggccgagucccccgacccgccccagagcccccagggggccuccagccugcccaccaccaugaacuacccgcucuggucccagagcuacgaggacuccagcaaccaggaggaggagggccccuccaccuuccccgaccuggagagcgaguuccaggccgcgcugucccggaaggucgccgagcucgugcacuuccugcugcucaaguaccgggcccgcgagcccgugacgaaggccgagaugcugggcagcgucguggggaacuggcaguacuucuucccggugaucuucuccaaggccagcuccagccugcagcucgucuucggcaucgagcugauggagguggaccccaucgggcaccuguacaucuucgcgaccugccucggccugagcuacgacgggcugcucggcgacaaccagaucaugcccaaggccggccugcugaucaucgugcucgccaucaucgcccgggagggggacugcgcccccgaggagaagaucugggaggagcuguccguccuggagguguucgagggccgcgaggacagcauccucggggacccgaagaagcugcugacccagcacuucgugcaggagaacuaccucgaguaccggcagguccccggcuccgaccccgcgugcuacgaguuccuguggggcccccgcgcccugguggagaccagcuacgugaagguccuccaccacauggugaagaucuccgggggcccgcacaucagcuacccgccccugcacgagugggugcugcgggagggggaggaguga

SEQ ID NO: 1278 - RNA, 954 nt, Artificial Sequence
  EAW99410_variant
augagcuccgagcagaagucccagcacugcaagcccgaggagggcguggaggcccaggaggaggcccuggggcucgucggcgcgcaggccccgaccaccgaggagcaggaggccgccgugagcagcuccagcccccuggugcccgggacgcuggaggagguccccgccgcggaguccgccggcccgccccagagcccccagggggccuccgcccuccccaccaccaucagcuucacgugcuggcgccagccgaacgagggcuccagcucccaggaggaggagggccccagcaccucccccgacgcggagagccuguuccgggaggcccuguccaacaagguggacgagcucgcccacuuccugcugcgcaaguaccgggccaaggagcucgugaccaaggccgagaugcuggagcgcgucaucaagaacuacaagcggugcuuccccgugaucuucgggaaggcgagcgagucccugaagaugaucuucggcaucgacgugaaggaggucgacccggccagcaacaccuacacccucgugacgugccuggggcugagcuacgacggccuccuggggaacaaccagaucuuccccaagaccggccugcucaucaucgugcugggcaccaucgccauggagggggacuccgccagcgaggaggagaucugggaggagcugggcgucauggggguguacgacggccgcgagcacaccguguacggcgagccccggaagcuccugacgcaggacuggguccaggagaacuaccuggaguaccgccaggugcccggguccaacccggcccgguacgaguuccucuggggcccccgcgcgcuggccgagaccagcuacgugaagguccuggagcacguggugcgggucaacgcccgcgugcggaucgccuaccccucccuccgcgaggccgcgcugcuggaggaggaggaggggguguga

SEQ ID NO: 1279 - RNA, 954 nt, Artificial Sequence; identical to SEQ ID NO: 1278
  AAA68871_variant

SEQ ID NO: 1280 - RNA, 954 nt, Artificial Sequence
  AAY27261_variant
augagcuccgagcagaagucccagcacugcaagcccgaggagggcguggaggcccaggaggaggcccuggggcucgucggcgcgcaggccccgaccaccgaggagcaggaggccgccgugagcagcuccagcccccuggugcccgggacgcuggaggagguccccgccgcggaguccgccggcccgccccagagcccccagggggccuccgcccuccccaccaccaucagcuucacgugcuggcgccagccgaacgagggcuccagcucccaggaggaggagggccccagcaccucccccgacgcggagagccuguuccgggaggcccuguccaacaagguggacgagcucgcccacuuccugcugcgcaaguaccgggccaaggagcucgugaccaaggccgagaugcuggagcgcgucaucaagaacuacaagcggugcuuccccgugaucuucgggaaggcgagcgagucccugaagaugaucuucggcaucgacgugaaggaggucgacccgaccagcaacaccuacacgcucgugaccugccuggggcugagcuacgacggccuccuggggaacaaccagaucuuccccaagaccggccugcucaucaucgugcugggcaccaucgccauggagggggacuccgccagcgaggaggagaucugggaggagcugggcgucauggggguguacgacggccgcgagcacacgguguacggcgagccccggaagcuccugacccaggacuggguccaggagaacuaccuggaguaccgccaggugcccggguccaacccggcccgguacgaguuccucuggggcccccgcgcccuggcggagaccagcuacgugaagguccuggagcacguggugcgggucaacgcccgcgugcggaucgccuaccccucccuccgcgaggccgcccugcuggaggaggaggaggggguguga

SEQ ID NO: 1281 - RNA, 945 nt, Artificial Sequence
  BAF82126_variant
augccccuggagcagcgcagccagcacugcaagccggaggagggccucgaggcccgcggggaggcccugggccuggugggggcgcaggcccccgccaccgaggagcaggaggccgccuccagcuccagcacccucgucgaggugacgcugggcgaggugcccgcggccgagucccccgacccgccccagagcccccagggggccuccagccugcccaccaccaugaacuacccgcucuggucccagagcuacgaggacuccagcaaccaggaggaggagggccccuccaccuuccccgaccuggagagcgaguuccaggccgcgcugucccggaagcucgccaagcugguccacuuccugcuccugaaguaccgggcccgcgagcccgugacgaaggccgagaugcugggcagcguggucgggaacuggcaguacuucuucccggugaucuucuccaaggccagcgacucccuccagcugguguucggcaucgagcugauggaggucgaccccaucgggcacguguacaucuucgcgaccugccucggccugagcuacgacgggcugcucggcgacaaccagaucaugcccaagaccggcuuccugaucaucauccuggccaucaucgccaaggagggggacugcgcccccgaggagaagaucugggaggagcucagcgugcuggaggucuucgagggccgggaggacaucaucuucggggacccgaagaagcugcucacccaguacuucgugcaggagaacuaccuggaguaccgccaggugcccggcuccgaccccgccugcuacgaguuccuguggggcccccgggcgcucaucgagacgagcuacgucaaggugcugcaccacauggugaagaucuccgggggcccgcgcaucagcuacccccugcuccacgagugggcccugcgggagggggaggaguga

SEQ ID NO: 1282 - RNA, 945 nt, Artificial Sequence
  AAA19006_variant
augccccuggagcagcgcagccagcacugcaagccggaggagggccucgaggcccgcggggaggcccugggccuggugggggcgcaggcccccgccaccgaggagcaggaggccgccuccagcuccagcacccucgucgaggugacgcugggcgaggugcccgcggccgagucccccgacccgccccagagcccccagggggccuccagccugcccaccaccaugaacuacccgcucuggucccagagcuacgaggacuccagcaaccaggaggaggagggccccuccaccuuccccgaccuggagagcgaguuccaggccgcgcugucccggaaggucgccaagcucgugcacuuccugcugcucaaguaccgggcccgcgagcccgugacgaaggccgagaugcugggcagcgucguggggaacuggcaguacuucuucccggugaucuucuccaaggccagcgacucccugcagcucgucuucggcaucgagcugauggagguggaccccaucgggcacguguacaucuucgcgaccugccugggccucagcuacgacgggcugcugggcgacaaccagaucaugcccaagaccggcuuccucaucaucauccuggccaucaucgccaaggagggggacugcgcccccgaggagaagaucugggaggagcugagcguccucgagguguucgagggccgggaggacuccaucuucggggacccgaagaagcugcugacccaguacuucgugcaggagaacuaccucgaguaccgccagguccccggcagcgaccccgccugcuacgaguuccuguggggcccccgggcgcugaucgagacguccuacgugaaggugcuccaccacauggucaagaucagcgggggcccgcgcaucuccuacccccugcugcacgagugggcccuccgggagggggaggaguga

SEQ ID NO: 1283 - RNA, 945 nt, Artificial Sequence
  CAG46567_variant
augccccuggagcagcgcagccagcacugcaagccggaggagggccucgaggcccgcggggaggcccugggccuggugggggcgcaggcccccgccaccgaggagcaggaggccgccuccagcuccagcacccucgucgaggugacgcugggcgaggugcccgcggccgagucccccgacccgccccagagcccccagggggccuccagccugcccaccaccaugaacuacccgcucuggucccagagcuacgaggacuccagcaaccaggaggaggagggccccuccaccuuccccgaccuggagagcgaguuccaggccgcgcugucccggaaggucgccaagcucgugcacuuccugcugcucaaguaccgggcccgcgagcccgugacgaaggccgagaugcugggcagcgucguggggaacuggcaguacuucuucccggugaucuucuccaaggccagcgacucccugcagcucgucuucggcaucgagcugauggagguggaccccaucgggcacguguacaucuucgcgaccugccugggccucagcuacgacgggcugcugggcgacaaccagaucaugcccaagaccggcuuccucaucaucauccuggccaucaucgccaaggagggggacugcgcccccgaggagaagaucugggaggagcugagcguccucgagguguucgagggccgggaggacuccaucuucggggacccgaagaagcugcugacccaguacuucgugcaggagaacuaccucgaguaccgccagguccccggcagcgaccccgccugcuacgaguuccuguggggcccccgggcgcugaucgagacguccuacgugaaggugcuccaccacauggucaagaucagcgggggcccgcgcaucuccuacccccugcugcacgagugggccuuccgggagggggaggaguga

SEQ ID NO: 1284 - RNA, 948 nt, Artificial Sequence
  AAA68877_variant
augagccuggagcagcgcagcccccacugcaagccggacgaggaccucgaggcccagggcgaggaccuggggcugaugggcgcccaggagcccaccggggaggaggaggagaccacguccuccagcgacuccaaggaggaggaggugagcgcggccggcuccagcuccccgccccagagcccccagggcggggccuccagcuccaucagcgucuacuacacccucuggucccaguucgacgagggcagcuccagccaggaggaggaggagcccuccagcagcguggaccccgcccagcuggaguucauguuccaggaggcccugaagcucaagguggcggagcugguccacuuccugcuccacaaguaccgggugaaggagcccgugaccaaggccgagaugcuggaguccgucaucaagaacuacaagcgcuacuucccggugaucuucgggaaggccagcgaguucaugcaggucaucuucggcaccgacgugaaggagguggaccccgccgggcacuccuacauccuggugacggcgcucggccugagcugcgacuccaugcugggggacggccacagcaugcccaaggccgcccuccugaucaucguccugggcgugauccucaccaaggacaacugcgcccccgaggaggugaucugggaggcccuguccgucauggggguguacgugggcaaggagcacauguucuacggggagccgcggaagcugcucacccaggacuggguccaggagaacuaccuggaguaccgccaggugcccggcagcgaccccgcgcacuacgaguuccuguggggcuccaaggcccacgccgagaccagcuacgagaaggugaucaacuaccucgucaugcugaacgcccgggagcccaucugcuacccgucccuguacgaggaggugcucggggaggagcaggagggcguguga

SEQ ID NO: 1285 - RNA, 1044 nt, Artificial Sequence
  AAI01309_variant
augccccgcggccagaaguccaagcugcgggcccgcgagaagcggcgccaggcccgcgggggccucgaggaccugaucgacgcgcuggacauccucgaggaggaggaggagagcccgcccagcgccuccgccugccugaaggacguguuccagagcucccuggacggggccagcaacaacccccacggccuccgggaggcccaguccaccagcaccuccgcgacggccgccagccacacccggcaccccgagggggugaacgaccagauggaggagcgcccgaucugcacccaggaccuggaggccaccgacuccuucccccggggccccguggacgagaaggugaucauccugguccacuaccuccuguacaaguaccagaugaaggagcccaucacgaaggcggacaugcugcgcaacgugacccagaugagcaagucccaguucccggugauccucagccgggccuccgagcaccuggagcugaucuucggccucgaccugaaggaggucgagcccaacaagcacaucuacgugcuggugaacaagcucgaccuggggugcgacgccaagcugagcgacgagaccggcguccccaagaccgggcuccugaugacggugcugggcaucaucuucaccaacgggaacugcguggccgaggaggaggucuggaagguguucaacaccaugggccucuacgacggcaucgagcacuucauguucggggagccccgcaagcugcugaccaaggaccucgugaaggagaacuaccuggaguaccagcaggucccgaacuccgacccgccccgguaccaguuccuguggggcccccgcgcccacgcggagacgagcaagaugaaggugcucgaguuccuggccaaggugaacgacaccgcccccuccgaguucagcaacugguacaccgaggcccugcaggacgaggaggagcgggcccgcgcgcgggucgccgccaaggcccgcgugagcgccaccgcgggggcccgguccaaggucaagagcuccaagagcucccagcuccaguga

SEQ ID NO: 1286 - RNA, 975 nt, Artificial Sequence
  CCDS43927.1_variant
augagccaggaccaggagagcccccgcugcacccacgaccagcaccuccagaccuucuccgagacgcagucccuggagguggcccaggucagcaaggcccuggagaagacccugcucuccagcucccacccgcuggugcccggcaagcugaaggaggcgcccgccgccaaggccgagagcccccucgaggugccgcaguccuucugcagcuccagcaucgccgucaccaccacguccagcuccgagagcgacgaggcguccagcaaccaggaggaggaggacucccccagcagcuccgaggacaccagcgacccccggaacgugcccgccgacgcccuggaccagaagguggccuuccuggucaacuucaugcuccacaagugccagaugaagaagccgaucaccaaggcggacaugcugaagaucaucaucaaggacgacgagucccacuucagcgagauccugcuccgcgccuccgagcaccuggagaugaucuucgggcuggacgugguggaggucgaccccaccacgcacugcuacggccucuucaucaagcuggggcugaccuacgacggcaugcucagcggggagaagggcgugcccaagaccggccugcugaucaucgugcucggggucaucuucaugaagggcaaccgggccaccgaggaggaggugugggaggugcugaaccugacgggggucuacuccggcaagaagcacuucaucuucggggagccccgcaugcucaucaccaaggacuucgugaaggagaaguaccuggaguaccagcaggucgccaacagcgacccggcccgguacgaguuccuguggggcccccgcgcgaaggccgagaccuccaagaugaaggugcucgaguucguggccaaggugcacggcagcuacccccacuccuuccccagccaguacgccgaggcccugaaggaggaggaggagcgggcgcgcgcccggaucuga

SEQ ID NO: 1287 - RNA, 1011 nt, Artificial Sequence
  CCDS59524.1_variant
augccccgcggccaggccagcaagcggcgcgcccgggagaagcgccggcaggcgcgcggggaggaccagugccugggcggggcccaggccaccgccgccgagaaggagaagcucccguccagcuccagccccgcgugccaguccccgccccagagcuuccccaacgccggcaucccccaggagucccagcgggccagcuaccccuccagccccgccuccgcggugagccugaccuccagcgacgagggggccaagggccagaagggcgaguccccgaacagcuuccacgggcccuccagcuccgagagcacgggccgcgaccugcucaacaccaagaccggggagcugguccaguuccugcucaacaaguacauccggaaggagcccaucacccgcgaggccaugcugaaggugaucaaccggaaguacaagcagcacuuccccgagauccugcgccggagcacggagaacguggaggucguguucggccucuaccugaaggagauggacccgucccgccagagcuacgugcuggucgggaagcucgacuuccccaaccagggcucccugagcgacggcgggggcuucccccuguccgggcuccugauggugcugcucagcaccaucuucaugcacggcaaccgggccaccgaggaggagaugugggagugccugaacgcccugggcauguacaaggggcgcaagcacuucaucuacggcgagccccaggagcucgugaccaaggaccugguccgggagggguaccuggaguaccagcaggucccguccagcgacccgccccgcuacgaguuccucuggggcccccgggcgcgcgccgagacguccaagaugaaggugcuggaguucguggccaagcugaacgacaccguggccagcaccuacaagucccgguacgaggaggcccuccgcgaggaggaggagcaggcgcgcgcccgggccguggcccgcgacagcgcccgggcgcgcgccucccggagcuuccagcccuga

SEQ ID NO: 1288 - RNA, 1044 nt, Artificial Sequence
  AAC23616_variant
augccccgcggccagaaguccaagcugcgggcccgcgagaagcggcgcaaggcccgggaggagacccaggggcucaaggugcgccacgcgaccgccgccgagaaggaggagugcccgagcagcucccccguccugggcgacacgcccaccagcucccccgccgccgggaucccgcagaagccccagggcgcgccgcccaccaccacggccgccgccgcggugagcugcaccgaguccgacgagggggccaagugccagggcgaggagaacgccagcuucucccaggccaccaccagcacggaguccagcgugaaggaccccgucgccugggaggcgggcaugcugaugcacuucauccuccggaaguacaagaugcgcgagcccaucaugaaggccgacaugcugaaggugguggacgagaaguacaaggaccacuucaccgagauccugaacggggccucccggcgccucgagcuggucuucggccuggaccucaaggaggacaaccccagcucccacaccuacacccuggugagcaagcugaaccucacgaacgacgggaaccuguccaacgacugggacuucccccggaacggccugcucaugccgcugcugggggugaucuuccucaagggcaacagcgccaccgaggaggagaucuggaaguucaugaacguccugggcgccuacgacggggaggagcaccugaucuacggcgagccccgcaaguucaucacccaggaccucgugcaggagaaguaccugaaguacgagcagguccccaacuccgacccgccccgguaccaguuccugugggggccccgcgcguacgccgagaccacgaagaugaaggugcucgaguuccuggccaagaugaacggcgccacgccccgggacuuccccagccacuacgaggaggcccugcgcgacgaggaggagcgggcccaggugcgcagcuccgugcgggcgcgccggcgcaccaccgccaccaccuuccgcgcccggagccgcgccccguucucccggagcucccaccccauguga

SEQ ID NO: 1289 - RNA, 960 nt, Artificial Sequence
  AAD10635_variant
augccccgcggccagaaguccaagcugcgggcccgcgagaagcggcgcaaggcccgggacgagacccgcgggcucaacgugccgcaggucaccgaggcggaggaggaggaggcccccugcugcagcagcuccgugagcggcggggccgccuccagcucccccgccgcgggcaucccccaggagccgcagcgggcccccacgaccgccgccgcggccgccgccggggugagcuccaccaagagcaagaagggcgccaagucccaccagggcgagaagaacgcgagcuccagccaggccuccaccagcacgaagucccccagcgaggacccccugacccgcaaguccgggagccugguccaguuccuccuguacaaguacaagaucaagaaguccgugaccaagggcgagaugcugaagaucguggggaagcgguuccgcgagcacuucccggagauccucaagaaggccagcgagggccugagcgucguguucgggcuggagcucaacaaggugaaccccaacggccacaccuacacguucaucgacaaggucgaccugaccgacgaggagucccugcucagcuccugggacuucccccggcgcaagcugcugaugccccuccugggcgugaucuuccugaacgggaacagcgccaccgaggaggagaucugggaguuccucaacaugcugggcguguacgacggggaggagcacuccgucuucggcgagccguggaagcugaucaccaaggaccucgugcaggagaaguaccuggaguacaagcagguccccagcuccgacccgccccgguuccaguuccuguggggcccccgcgccuacgcggagacgagcaagaugaaggugcucgaguuccuggccaaggugaacgggaccacccccugcgccuuccccacccacuacgaggaggcccugaaggacgaggagaaggccggcguguga

SEQ ID NO: 1290 - RNA, 1041 nt, Artificial Sequence
  AAD10636_variant
augccccgcggccagaaguccacccugcacgcccgggagaagcgccagcagacccgggggcagacgcaggaccaccagggcgcccagaucaccgcgaccaacaagaagaaggugagcuucagcuccccgcucauccugggggccaccauccagaagaaguccgccggccgcagccggagcgcccugaagaagccccagcgcgcccucuccacgaccaccagcgucgacguguccuacaagaaguccuacaagggggcgaacagcaagaucgagaagaagcagagcuucucccagggccugagcuccaccgugcagagccggacggacccccugaucaugaagaccaacaugcucguccaguuccugauggagauguacaagaugaagaagcccaucaugaaggccgacaugcugaagaucgugcagaagucccacaagaacugcuucccggagauccucaagaaggccagcuucaacauggagguggucuucggcguggaccugaagaagguggacuccaccaaggacagcuacguccuggugagcaagauggaccuccccaacaacgggaccgugacgcgcggccggggguuccccaagaccggccugcugcucaaccugcugggggucaucuucaugaagggcaacugcgccaccgaggagaagaucugggaguuccucaacaagaugcgcaucuacgacggcaagaagcacuucaucuucggggagccccggaagcugaucacccaggaccuggugaagcucaaguaccuggaguaccgccaggugccgaacuccaaccccgcgcgguacgaguuccuguggggcccccgcgcccacgccgagacgagcaagaugaagguccucgaguucugggccaaggugaacaagaccgugcccuccgccuuccaguucugguacgaggaggcgcugcgggacgaggaggagcgcguccaggccgccgccaugcugaacgacgggagcuccgccaugggccggaagugcagcaaggcgaaggccuccagcuccagccacgccuga

SEQ ID NO: 1291 - RNA, 1041 nt, Artificial Sequence
  AAC23619_variant
augccccgcggccagaaguccaagcugcgggcccgcgagaagcggcagcgcacccgggggcagacccaggaccucaaggugggccagccgacggccgcggagaaggaggagagccccagcuccagcuccagcguccugcgcgacaccgccuccagcucccuggccuucgggaucccccaggagccccagcgggagccgcccaccaccagcgccgccgcggccauguccugcacgggcagcgacaagggggacgagucccaggacgaggagaacgccagcuccagccaggccuccaccagcaccgagcgcucccucaaggacagccugacccggaagacgaagaugcuggugcaguuccuccuguacaaguacaagaugaaggagcccaccaccaaggcggagaugcugaagaucaucagcaagaaguacaaggagcacuuccccgagaucuuccgcaaggugucccagcggaccgagcucgucuucggccuggcccugaaggaggugaacccgacgacccacagcuacauccucguguccaugcugggccccaacgacgggaaccagagcuccgccuggacccugccccgcaacggccuccugaugccccugcucagcgucaucuuccugaacgggaacugcgcccgggaggaggagaucugggaguuccugaacaugcucggcaucuacgacgggaagcgccaccugaucuucggcgagccgcggaagcugaucacccaggaccucgugcaggagaaguaccuggaguaccagcagguccccaacuccgacccgccccgcuaccaguuccuguggggcccccgggcccacgcggagacgagcaagaugaaggugcucgaguuccuggccaaggugaacgacaccacccccaacaacuucccccugcucuacgaggaggcccugcgcgacgaggaggagcgggccggggcccgcccccggguggcggcccgccgcggcaccacggccaugaccuccgccuacagccgggccaccuccagcuccagcucccagccgauguga

SEQ ID NO: 1292 - RNA, 828 nt, Artificial Sequence
  CCDS65233.1_variant
augaccagcgccggcguguucaacgccggguccgacgagcgcgcgaacagccgggacgaggaguaccccugcuccagcgaggucuccccgagcaccgaguccagcugcuccaacuucaucaacaucaaggugggccugcucgagcaguuccugcuguacaaguucaagaugaagcagcgcauccucaaggaggacaugcugaagaucgugaacccccgguaccagaaccaguucgccgagauccaccgccgggccagcgagcacaucgaggucguguucgccguggaccugaaggaggucaaccccacgugccaccucuacgaccugguguccaagcugaagcuccccaacaacgggcgcauccacgugggcaagguccugccgaagaccgggcugcucaugaccuuccugguggugaucuuccugaagggcaacugcgccaacaaggaggacaccuggaaguuccucgacaugaugcagaucuacgacggcaagaaguacuacaucuacggggagccccggaagcugaucacgcaggacuucguccgccugaccuaccucgaguaccaccaggugcccugcagcuaccccgcgcacuaccaguuccuguggggcccgcgggccuacaccgagaccuccaagaugaaggugcuggaguaccucgccaaggucaacgacaucgcccccggggcguucagcucccaguacgaggaggcccugcaggacgaggaggagagccccucccagcgcugcagccggaacuggcacuacugcuccggccaggacugccugcgcgccaaguucagcagcuucucccagcccuacuga

SEQ ID NO: 1293 - RNA, 1224 nt, Artificial Sequence
  AAH67286_variant
augccccgcggccacaagagcaagcugcggaccugcgagaagcgccaggagaccaacgggcagccgcagggccucacggggccccaggccaccgccgagaagcaggaggagucccacagcuccagcuccagcucccgggcgugccugggcgacugccgccggagcuccgacgccagcaucccccaggagucccagggggugagccccaccggcuccccggacgccgucgugagcuacuccaagagcgacguggccgccaacggccaggacgagaagucccccagcaccucccgcgacgcgagcgucccccaggagagccagggggccucccccacgggcagcccggacgccgggguguccggcagcaaguacgacguggccgcgaacgggcaggacgagaagucccccagcaccucccacgacgucagcgugccccaggagucccagggcgccagccccaccggcuccccggacgccggggugagcggcuccaaguacgacgucgccgccgagggggaggacgaggagagcguguccgcgagccagaaggccaucaucuucaagcggcuguccaaggacgccgugaagaagaaggccugcacccucgcccaguuccugcagaagaaguucgagaagaaggagagcauccugaaggcggacaugcucaagugcguccgccgggaguacaagcccuacuucccccagauccugaaccgcacgucccagcaccuggugguggccuucggcgucgagcucaaggagauggacagcagcggcgaguccuacacccuggugagcaagcuggggcuccccuccgagggcauccugagcggggacaacgcccugccgaaguccggccuccugaugagccugcucguggucaucuucaugaacgggaacugcgccaccgaggaggaggugugggaguuccugggccugcucggcaucuacgacgggauccugcacuccaucuacggcgacgcccggaagaucaucaccgaggaccuggugcaggacaaguacgucguguaccgccaggugugcaacagcgacccgcccugcuacgaguuccucugggggccccgggcguacgccgagacgaccaagaugcgcguccugcgggugcuggccgacuccagcaacaccucccccggccucuacccccaccuguacgaggacgcccugaucgacgaggucgagcgcgcccuccggcugcgcgcguga

SEQ ID NO: 1294 - RNA, 3429 nt, Artificial Sequence
  CCDS35417.1_variant
augggcgacaaggacaugcccaccgccgggaugccgagccugcuccaguccagcuccgagagcccccaguccugccccgagggcgaggacagccagagcccccugcagaucccgcagagcucccccgagagcgacgacacccuguacccccuccagagcccccagucccgcuccgagggggaggacagcuccgacccgcugcagcggccgcccgagggcaaggacagccagagcccccugcagaucccccaguccucccccgagggggacgacacgcagagcccccuccagaacagccaguccagccccgagggcaaggacucccugagcccgcuggagaucucccagagcccgcccgagggcgaggacgugcagagcccccuccagaaccccgccuccuccuucuucagcuccgcgcugcugagcaucuuccaguccagccccgaguccacccagagccccuucgagggguucccccaguccguccuccagaucccggugagcgccgccuccagcagcacccugguguccaucuuccagagcucccccgagagcacccagucccccuucgagggcuucccccagagcccgcugcagauccccgucucccgcagcuucuccagcacgcuccuguccaucuuccagagcucccccgagcggacccagagcaccuucgagggguucgcccaguccccgcugcagauccccgugagccccuccagcagcuccacccuccugagccuguuccaguccuucagcgagcgcacgcaguccaccuucgagggcuucgcccagagcucccuccagauccccgugagcccguccuucagcuccacccuggucagccuguuccaguccagccccgagcggacccaguccacguucgagggguucccccagagcccccuccagaucccgguguccagcuccagcagcuccacccugcugagccucuuccaguccagccccgagcgcacccacuccaccuucgagggcuucccccagagccugcugcagauccccaugacguccagcuucuccagcacccuccuguccaucuuccagagcuccccggagagcgcgcaguccaccuucgagggcuucccccagagcccccugcagauccccggguccccgagcuucuccagcacccuccugagccuguuccaguccagccccgagcggacgcacuccaccuucgagggcuucccccagagcccccuccagaucccgaugaccuccagcuucuccagcacccugcuguccauccuccagagcucccccgagagcgcccaguccgccuucgagggguucccccagagcccccugcagaucccgguguccagcuccuucagcuacacgcugcucucccuguuccagagcagccccgagcgcacccacuccaccuucgagggcuucccccagagcccgcugcagauccccgucuccagcuccagcuccagcuccacccuccugagccuguuccaguccagccccgagugcacgcaguccaccuucgagggcuucccccagagcccgcuccagaucccccaguccccgcccgagggggagaacacccacagcccccugcagaucgugcccucccugcccgagugggaggacagccugagcccccacuacuucccgcaguccccgccccagggcgaggacagccucagcccccacuacuucccccaguccccgccccagggggaggacucccugagcccccacuacuucccccagagcccccagggcgaggacucccugagcccccacuacuucccccaguccccgccccagggggaggacuccaugagcccccucuacuucccccaguccccgcugcagggcgaggaguuccagagcucccugcagagccccguguccaucugcagcuccagcacccccuccagccucccgcagagcuuccccgaguccagccaguccccgcccgagggccccguccagagcccccugcacagcccccaguccccgcccgaggggaugcacucccagagcccccugcagucccccgaguccgcccccgagggcgaggacucccucagcccgcugcagaucccccagagcccccuggagggggaggacucccucuccagccugcacuucccccaguccccgcccgagugggaggacagccugagcccccuccacuucccccaguucccgccccagggcgaggacuuccaguccagccugcagucccccgugagcaucugcuccagcuccacgagccugucccucccccagagcuucccggagagcccccaguccccgcccgaggggcccgcgcagagcccccugcagcggcccguguccuccuucuucagcuacacccuggccucccuccugcagagcucccacgagagcccgcagagcccgcccgagggccccgcccagagcccccugcagucccccgucuccagcuuccccuccagcaccuccagcucccucagccaguccagccccguguccagcuucccguccagcaccuccagcucccugagcaagagcucccccgagagcccccugcagucccccgugaucagcuucuccagcuccacgagccucuccccguucagcgaggaguccagcucccccgucgacgaguacaccagcuccagcgacacccugcuggaguccgacagccucaccgacuccgagagccugaucgagagcgagccccuguucaccuacacgcucgacgagaagguggacgagcuggcccgcuuccugcuccugaaguaccaggugaagcagcccaucaccaaggccgagaugcugaccaacgucaucucccgguacaccggcuacuucccggugaucuuccgcaaggcgcgggaguucaucgagauccucuucgggaucagccugcgcgagguggaccccgacgacuccuacgucuucgugaacacgcuggaccucaccagcgagggcugccuguccgacgagcaggggaugagccagaaccggcugcucauccugauccuguccaucaucuucaucaagggcaccuacgccagcgaggaggucaucugggacgugcucuccgggaucggcgugcgcgccggccgggagcacuucgccuucggggagccccgcgagcugcugaccaaggucugggugcaggagcacuaccucgaguaccgggaggugcccaacagcuccccgccccgcuacgaguuccuguggggcccccgggcccacagcgaggucaucaagcgcaaggugguggaguuccuggcgaugcucaagaacacgguccccaucaccuucccguccagcuacaaggacgcccugaaggacguggaggagcgcgcccaggccaucaucgacaccaccgacgacuccacggccaccgagagcgcguccagcuccgugaugagccccagcuucuccagcgaguga

SEQ ID NO: 1295 - RNA, 1122 nt, Artificial Sequence
  AAF07210_variant
augccgcccgugcccggcguccccuuccgcaacguggacaacgacagccccaccuccguggagcuggaggacugggucgacgcccagcaccccaccgacgaggaggaggaggaggccagcuccgcgagcuccacgcucuaccugguguucagccccuccagcuucuccaccagcuccagccugauccucgggggccccgaggaggaggaggugcccuccggggucaucccgaaccugaccgagagcauccccuccagcccgccccagggcccgccccaggggcccucccagagcccccuguccagcugcugcagcuccuucagcugguccagcuucuccgaggagagcuccagccagaagggcgaggacaccggcacgugccaggggcucccggacuccgagagcuccuucaccuacacccuggacgagaagguggccgagcugguggaguuccuccugcugaaguacgaggccgaggagcccgucaccgaggccgagaugcucaugaucgugaucaaguacaaggacuacuuccccgugauccugaagcgggcccgcgaguucauggagcuccuguucggccuggcgcugaucgaggucgggcccgaccacuucugcguguucgccaacacggugggccucaccgacgaggggagcgacgacgagggcaugccggagaacucccugcugaucaucauccucagcgucaucuucaucaagggcaacugcgccuccgaggaggugaucugggaggugcugaacgccgucgggguguacgcgggccgggagcacuucguguacggggagccccgcgagcugcucaccaaggucugggugcagggccacuaccuggaguaccgggaggugccccacagcuccccgcccuacuacgaguuccuguggggcccccgcgcccacagcgaguccaucaagaagaagguccucgaguuccuggccaagcugaacaacaccgugcccagcagcuuccccuccugguacaaggacgcccucaaggacgucgaggagcgggugcaggccacgaucgacaccgcggacgacgccaccgugauggccagcgagucccugagcgucauguccagcaacguguccuucagcgaguga

SEQ ID NO: 1296 - RNA, 1932 nt, Artificial Sequence
  AAM08355_variant
augcugcuccccugccacugggugcuggacgccaccuucagcgacggcucccuggggcagugggucaagaacaccugcgccacguacgcgcucagcccgguggugcugcccccccagccccagccgcgcaagaaggccaccgacaaggacuacuccgccuuccaccugggccaccuccgggagguccgccuguuccugcgggggggcaccagcgaccagcgcauggacucccucgugcugugccccaccuacuucaagcuguggcggacgcucagcgggucccccggccugcagcugagcgaccuccacuucggcucccagcccgaggggaaguucagccugcgccgggccguguccgucaagcagcgcgaggagccgcaggacuggccccugaacgagaagcggacccucuggaaggacagcgaccugcccaccuggcgccggggcaccggguacacgcugucccuccccgccgugagcccgggcaagcgccuguggggggagaaggcgggcucccugcccgagagcgagccccucuucaccuacacccuggacgagaagguggacaagcugguccaguuccuccugcugaaguaccaggccaaggagccccucacccgggccgagaugcagaugaacgugaucaacacguacaccggcuacuucccgaugaucuuccgcaaggcccgggaguucaucgagauccuguucgggaucucccugaccgagguggaccccgaccacuucuacgucuucgugaacacccucgaccugacgugcgagggcagccuguccgacgagcaggggaugccccagaaccgccuccugauccugauccucagcgugaucuucaucaagggcaacugcgcgagcgaggaggucaucugggaggugcugaacgccaucggccccugguccgcccuggccggguucgccgacgugcucagccggcuggcgcugugggaguccgagggcccggaggccuucugcgaggagagcgggcuccgcuccgccgagggcagcguccuggaccuggccaacccccaggggcucgccggccaccggcaggaggacggccgccgggggcugaccgaggcguccccccagcagaagaagggcggggaggacgaggacaugcccgccgccggcaugccgccccugccccagagccccccggagauccccccccaggggccgcccaagaucuccccccagggccccccgcagagccccccccaguccccccuggacagcugcuccagcccgcuccuguggacccgccuggacgaggaguccagcuccgaggaggaggacaccgccacguggcacgcccuccccgagagcgagucccugccccgcuacgcgcuggacgagaagguggccgagcucgugcaguuccugcugcucaaguaccagaccaaggagcccgucaccaaggccgagaugcugaccacggugaucaagaaguacaaggacuacuucccgaugaucuucggcaaggcccacgaguucaucgagcugaucuucgggaucgcccucaccgacauggaccccgacaaccacagcuacuucuucgaggacacccuggaccugaccuacgagggcagccucaucgacgaccaggggaugcccaagaacugccugcugauccucauccuguccaugaucuucaucaagggcagcugcgugcccgaggaggucaucugggaggugcuguccgcgaucgggccgauccagcggcccgcccgcgagguccucgaguuccugagcaagcuguccagcaucauccccuccgccuuccccagcugguacauggacgcccucaaggacauggaggaccgggcgcaggccaucaucgacacgaccgacgacgccaccgccauggccuccgcgagcccguccgugaugagcaccaacuucugccccgaguga

SEQ ID NO: 1297 - RNA, 2337 nt, Artificial Sequence
  AAG23757_variant
auggcccagaagauggacugcggcgccgggcugcucggcuuccaggcggaggccagcguggaggacuccgcccugcugaugcagacccucauggaggccauccagaucagcgaggcccccccgaccaaccaggcgacggccgccgccuccccccagagcucccagccccccaccgcgaacgagauggccgacauccaggucagcgccgccgccgcgcgcccgaaguccgccuucaaggugcagaacgccaccaccaaggggcccaacggcguguacgacuucagccaggcccacaacgccaaggacguccccaacacgcagcccaaggcggccuucaagucccagaacgccaccccgaaggggcccaacgccgccuacgacuucagccaggcggccaccaccggcgagcuggccgccaacaaguccgagauggccuucaaggcgcagaacgccacgaccaaggugggccccaacgccaccuacaacuucagccagucccugaacgccaacgaccucgcgaacagccggcccaagaccccguucaaggccuggaacgacacgaccaaggcccccaccgccgacacccagacgcagaacgugaaccaggccaagauggcgaccucccaggccgacaucgagaccgaccccgggaucagcgagcccgacggcgccaccgcccagacguccgccgacgggagccaggcgcagaaccuggagucccgcaccaucauccggggcaagcgcacccggaagaucaacaaccugaacgucgaggagaacagcagcggggaccagcgccgggccccgcucgccgccggcaccuggcgcuccgcccccgugcccgugacgacccagaaccccccgggcgcgccccccaacguccuguggcagaccccccuggccuggcagaacccgagcggguggcagaaccagaccgcccggcagacgccccccgcccgccagucccccccggcgcggcagaccccccccgccuggcagaacccgguggccuggcagaaccccgugaucuggcccaaccccgucaucuggcagaacccggugaucuggcccaaccccaucguguggcccggcccggucguguggcccaacccccucgccuggcagaaccccccgggguggcagaccccccccggcuggcagacccccccgggcuggcaggggccccccgacuggcagggccccccggacuggccccugccccccgacuggccgcugccccccgacuggccgcuccccacggacuggccccugcccccggacuggauccccgccgacuggcccauccccccggacuggcagaaccugcgccccagccccaaccuccggcccuccccgaacagccgcgcgucccagaaccccggggccgcccagccccgggacguggcccugcugcaggagcgcgccaacaagcucgucaaguaccugaugcugaaggacuacaccaaggugcccaucaagcggagcgagaugcuccgcgacaucauccgggaguacaccgacguguacccggagaucaucgagcgcgcgugcuucguccuggagaagaaguucggcauccagcugaaggagaucgacaaggaggagcaccucuacauccugaucuccacccccgagagccuggccgggauccucggcacgaccaaggacacccccaagcugggccugcuccuggugauccugggggugaucuucaugaacggcaaccgggccuccgaggccguccucugggaggcccugcgcaagauggggcugcgccccggcgugcggcacccgcuccugggggaccugcgcaagcuccugaccuacgaguucgucaagcagaaguaccuggacuaccggcgcgugcccaacagcaacccccccgaguacgaguuccucuggggccugcgguccuaccacgagaccagcaagaugaaggugcugcgcuucaucgcggagguccagaagcgggacccgcgcgacuggacggcccaguucauggaggccgccgacgaggcgcucgacgcccuggacgccgccgccgcggaggccgaggcccgggccgaggcccgcacccggaugggcaucggggacgaggcgguguccggccccuggagcugggacgacaucgaguucgagcugcugaccugggacgaggagggggacuucggcgaccccuggucccgcauccccuucaccuucugggcccgguaccaccagaacgcccgcagccgguucccgcagacguucgccgggcccaucaucggccccggcgggaccgccuccgcgaacuucgccgccaacuucggcgccaucggguucuucuggguggaguga

SEQ ID NO: 1298 - RNA, 1821 nt, Artificial Sequence
  AAD28598_variant
augagcgacaccuccgagagcggcgccgggcugacccgcuuccaggccgaggcguccgagaaggacagcuccagcaugaugcagacgcugcugaccgugacccagaacgucgaggugcccgagaccccgaaggccuccaaggcccuggaggugagcgaggacgucaagguguccaaggccagcggcguguccaaggccacggaggucagcaagacccccgaggcgcgggaggcccccgccacccaggccuccagcaccacgcagcucaccgacacccaggugcuggcggccgagaacaagucccuggccgccgacaccaagaagcagaacgccgacccccaggcggugacgaugccggccaccgagaccaagaaggucagccacguggccgacaccaaggugaacacgaaggcccaggagaccgaggccgcgcccucccaggcccccgccgacgagcccgagccggagagcgccgccgcgcagucccaggagaaccaggacacccgccccaaggucaaggccaagaaggcccggaaggugaagcaccucgacggggaggaggacggcagcagcgaccagucccaggccagcgggaccacgggcggccgccggguguccaaggcccugauggcgagcauggcccgccgggccucccgcgggcccaucgccuucugggcgcggcgcgccagccggacccgccuggccgccugggcccggcgcgcgcuccugucccugcggagccccaaggcccgccggggcaaggcccgccggcgcgccgccaagcuccaguccagccaggagccggaggcgcccccgccccgggacgucgcccugcugcaggggcgcgccaacgaccucgugaaguaccugcuggccaaggaccagaccaagauccccaucaagcgcuccgacaugcucaaggacaucaucaaggaguacaccgacguguaccccgagaucaucgagcgggccggcuacagccuggagaaggucuucgggauccagcugaaggagaucgacaagaacgaccaccucuacauccugcuguccacgcucgagcccaccgacgcgggcauccugggcaccaccaaggacagccccaagcuggggcuccugauggugcugcucuccaucaucuucaugaacggcaaccgcagcuccgaggccgugaucugggagguccugcggaagcuggggcuccgcccgggcauccaccacagccuguucggcgacgugaagaagcugaucacggacgaguucgugaagcagaaguaccucgacuacgcccggguccccaacuccaacccgcccgaguacgaguucuucugggggcugcgcagcuacuacgagaccagcaagaugaaggugcugaaguucgccugcaagguccagaagaaggaccccaaggagugggcggcccaguaccgggaggccauggaggccgaccucaaggccgcggccgaggccgccgccgaggcgaaggcccgcgccgagauccgggcccgcaugggcaucgggcugggcuccgagaacgccgcggggcccugcaacugggacgaggccgacaucggccccugggccaaggcccggauccaggcgggcgccgaggccaaggccaaggcccaggagagcggguccgcgagcaccggcgccuccaccagcacgaacaacuccgccagcgccuccgccagcaccuccgggggcuucagcgcgggggccucccugaccgccacccucacguucggccuguucgccggccucgggggcgccggggcgagcaccuccggcagcuccggggccugcggcuucagcuacaaguga

SEQ ID NO: 1299 - RNA, 2226 nt, Artificial Sequence
  AAH63838_variant
auggccgagggcagcuucuccgugcagagcgaguccuacagcgucgaggacauggacgagggguccgacgaggugggcgaggaggagaugguggaggggaacgacuacgaggaguucggcgccuucgggggcuacggcacccugaccagcuucgacauccacauccuccgcgcguucgggucccugggccccgggcugcggauccucagcaacgagccgugggagcuggagaaccccguccuggcccagacgcucguggaggcccugcagcuggaccccgagacccucgccaacgagaccgccgcgcgcgccgccaacguggcccgggcggccgccuccaaccgcgccgcccgggcggccgccgccgccgcgcgcaccgccuucagccaggucguggccucccaccggguggccacgccccaggucagcggcgaggacacccagccgaccaccuacgccgcggaggcccaggggcccacgcccgagcccccgcuggccagcccccagaccagccagaugcuggugaccuccaagauggccgcccccgaggcgcccgccaccagcgcccagucccagacgggcagcccggcccaggaggcggccaccgagggccccuccagcgccugcgccuucagccaggcccccugcgcgcgcgagguggacgccaaccggcccuccaccgccuuccucgggcagaacgacgucuucgacuucacccagccggccggcgugagcgggauggccuucccccgccccaagcggcccgcgccggcccaggaggccgccacggagggccccuccgccgcgagcggcgugccccagaccgggcccggccgcgaggucgccgccacccggccgaagaccacgaaguccgggaaggcccuggcgaagacccgcuggguggagccccagaacguggucgccgccgccgccgcgaaggccaagauggccaccagcauccccgagcccgagggcgccgccgcggccaccgcccagcacuccgccgagccgugggcccggaugggcgggaagcgcacgaagaaguccaagcaccuggacgacgaguacgaguccagcgaggaggagcgggagacccccgcggugcccccgaccuggcgcgccucccagcccagccucaccgugcgggcccagcuggccccgcgcccgcccauggcgccccggucccagauccccagccgccacguccugugccucccgccccgcaacgugacgcugcugcaggagcgggccaacaagcucgugaaguaccugaugaucaaggacuacaagaagauccccaucaagcgcgccgacaugcugaaggacgucauccgggaguacgacgagcacuuccccgagaucaucgagcgcgccaccuacacccucgagaagaaguucggcauccaccugaaggagaucgacaaggaggagcaccuguacauccucgugugcacccgggacuccagcgcccgccugcuggggaagacgaaggacacgccccggcucucccugcugcucgucauccugggcgugaucuucaugaacgggaaccgcgcgagcgaggccgugcugugggaggcccuccggaagaugggccugcgccccgggguccggcaccccuuccugggcgaccuccgcaagcugaucaccgacgacuucgugaagcagaaguaccuggaguacaagaagauccccaacuccaacccgcccgaguacgaguuccucuggggccugcgggcccgccacgagaccagcaagaugcgggugcugcgcuucaucgcccagaaccagaaccgggacccccgcgaguggaaggcgcacuuccucgaggccgucgacgacgccuucaagaccauggacguggacauggccgaggagcacgcccgggcgcagaugcgcgcccagaugaacaucggggacgaggcccugaucggccgcuggagcugggacgacauccagguggagcugcucaccugggacgaggacggggacuucggcgacgccugggcccggauccccuucgcguucugggcccgcuaccaccaguacauccugaacuccaaccgggccaaccgccgggccaccuggcgcgcgggggucagcuccggcaccaacggcggggccagcaccuccgugcuggacggccccagcacguccagcaccauccggacccgcaacgccgcccgggccggggcguccuucuucagcuggauccagcaccgcuga

SEQ ID NO: 1300 - RNA, 1122 nt, Artificial Sequence
  CAG33449_variant
augccgcccgugcccggcguccccuuccgcaacguggacaacgacagccccaccuccguggagcuggaggacugggucgacgcccagcaccccaccgacgaggaggaggaggaggccagcuccgcgagcuccacgcucuaccugguguucagccccuccagcuucuccaccagcuccagccugauccucgggggccccgaggaggaggaggugcccuccggggucaucccgaaccugaccgagagcauccccuccagcccgccccagggcccgccccaggggcccucccagagcccccuguccagcugcugcagcuccuucagcugguccagcuucuccgaggagagcuccagccagaagggcgaggacaccggcacgugccaggggcucccggacuccgagagcuccuucaccuacacccuggacgagaagguggccgagcugguggaguuccuccugcugaaguacgaggccgaggagcccgucaccgaggccgagaugcucaugaucgugaucaaguacaaggacuacuuccccgugauccugaagcgggcccgcgaguucauggagcuccuguucggccuggcgcugaucgaggucgggcccgaccacuucugcguguucgccaacacggugggccucaccgacgaggggagcgacgacgagggcaugccggagaacucccugcugaucaucauccucagcgucaucuucaucaagggcaacugcgccuccgaggaggugaucugggaggugcugaacgccgucgggguguacgcgggccgggagcacuucguguacggggagccccgcgagcugcucaccaaggucugggugcagggccacuaccuggaguaccgggaggugccccacagcuccccgcccuacuacgaguuccuguggggcccccgcgcccacagcgaguccaucaagaagaagguccucgaguuccuggccaagcugaacaacaccgugcccagcagcuuccccuccugguacaaggacgcccucaaggacgucgaggagcgggugcaggccacgaucgacaccgcggacgacgccaccgugauggccagcgagucccugagcgucauguccagcaacguguccuucagcgacuga

SEQ ID NO: 1301 - RNA, 2874 nt, Artificial Sequence
  AAM08354_variant
augagccuggugucccagaacagccgccggcgccggcgccgggucgccaaggccaccgcgcacaacuccagcuggggcgagaugcaggcccccaacgccccggggcuccccgccgacgugcccggcuccgacgugccccaggggccgagcgacucccagauccugcagggccugugcgccagcgaggggcccuccaccagcguccuccccacguccgcggagggccccagcaccuucgugccgcccaccaucuccgaggccagcuccgccagcggccagcccaccaucuccgaggggcccggcacgagcgugcugccgacccccuccgaggggcugagcaccagcggcccgcccaccaucuccaaggggcucugcacgagcgucacccuggccgcguccgagggccgcaacaccagccggccgcccaccuccagcgaggagcccuccacgagcgugccgcccaccgccuccgaggugcccagcaccucccugccgcccacccccggcgaggggacgagcaccuccgucccgcccaccgccuacgagggccccagcaccuccguggugcccacgcccgacgaggggcccagcaccuccguccuccccacccccggcgagggccccgggaccagcgugccccuggccgccacggagggccuguccaccagcgugcaggcgaccccggacgaggggcccagcaccuccgucccgcccacggccaccgagggccucagcacccccgugccgcccacccgcgacgaggggcccuccacgagcgugcccgccacccccggcgagggccccuccaccagcguccugcccgccgccuccgacgggcagagcaucucccuggugccgacccggggcaaggggagcuccacgagcgugccgcccaccgcgaccgagggccucuccaccagcguccagcccaccgccggggagggcuccagcacguccgugccgcccacccccggcgggggccugagcaccagcgugccgcccaccgccacggaggagcuguccaccagcgucccgcccacccccggggagggccccuccaccagcgugcuccccauccccggggagggccuguccacgagcgucccgcccaccgccuccgacggcagcgacaccuccgugccgcccacccccggggagggcgccagcacgcuggugcagcccaccgcgcccgacgggcccggcuccagcguccuccccaaccccggcgaggggcccuccacccuguucagcuccagcgccuccguggaccgcaaccccagcaagugcucccuggugcucccgagcccccgggucaccaaggccagcguggacuccgacagcgagggccccaagggggccgagggccccaucgaguucgaggugcugcgcgacugcgaguccccgaacagcaucuccaucauggggcugaacacgagccgggucgccaucacccucaagccccaggaccccauggagcagaacguggcggagcugcugcaguuccuccuggugaaggaccaguccaaguaccccauccgcgagagcgagaugcgggaguacaucgucaaggaguaccgcaaccaguucccggagauccugcggcgcgccgccgcccaccucgagugcaucuuccgguucgagcugcgcgagcuggaccccgaggcgcacaccuacauccuccugaacaagcugggccccgugcccuucgagggccucgaggaguccccgaacgggcccaagaugggccugcugaugaugauccucgggcagaucuuccugaacggcaaccaggccaaggaggccgagaucugggagaugcuguggcggaugggggugcagcgcgagcgccggcucagcaucuucggcaaccccaagcgccugcuguccgucgaguucguguggcagcgguaccucgacuaccgcccggugaccgacugcaagcccgucgaguacgaguucuucuggggcccccggagccaccuggagacgaccaagaugaagauccugaaguucauggccaagaucuacaacaaggaccccauggacuggccggagaaguacaacgaggcccuggaggaggacgcggcccgcgccuucgccgagggguggcaggcccucccccacuuccggcgccccuucuucgaggaggcggccgccgaggugcccuccccggacagcgagguguccagcuacuccagcaaguacgcgccccacuccuggcccgagagccggcuggagagcaaggcccgcaagcugguccagcuguuccuccugauggacuccaccaagcuccccaucccgaagaagggcauccuguacuacaucgggcgggagugcagcaagguguuccccgaccugcucaaccgcgccgcccggacccugaaccacguguacggcacggagcuggucgugcucgacccccgcaaccacuccuacacccuguacaaccggcgcgagauggaggagaccgaggagaucguggacagccccaaccggccggggaacaacuuccugaugcagguccucuccuucaucuucaucaugggcaaccacgcccgcgagagcgccgugugggcguuccugcggggccugggggugcaggccggccgcaagcacgucaucacgugccgcuaccucucccagcgguacaucgacagccugcgcgugcccgacuccgaccccgugcaguacgaguucgucugggggccccgggcccgccuggagaccagcaagaugaaggcccuccgguacguggcccgcauccaccggaaggagccgcaggacuggccccagcaguaccgcgaggcgauggaggacgaggccaaccgggccgacgugggccaccgccagaucuucguccacaacuuccgguga

SEQ ID NO: 1302 - RNA, 1572 nt, Artificial Sequence
  AAH93964_variant
augagccuggugucccagaacgcccgccacugcagcgccgagaucaccgcggacuacggcgacgggcggggcgagauccaggccaccaacgccuccgggagccccacguccaugcucgucguggacgccccgcagugcccccaggcccccaucaacagccagugcgugaacaccucccaggcgguccaggaccccaacgaccuggaggugcugaucgacgagcagagccgccggcucggcgcccugcgcgugcacgacccgcuggaggaccgguccaucgcccucgucaacuucaugcgcaugaagucccagaccgaggggagcauccagcagagcgagaugcuggaguuccugcgggaguacuccgaccaguuccccgagauccuccgccgggccagcgcgcaccuggaccagguguucggccugaaccuccgcgugaucgacccccaggccgacaccuacaaccuggucuccaagcggggcuuccagaucacggaccgcaucgccgagagccuggacaugcccaaggccucccuccuggcccuggugcucgggcacauccugcugaacggcaaccgggcgcgcgaggccagcaucugggaccuccugcugaagguggacaugugggacaagccgcagcggaucaacaaccucuucgggaacacccgcaaccugcugaccaccgacuucgucugcaugcgguuccucgaguacuggcccguguacggcacgaacccccuggaguucgaguuccugugggggucccgcgcccaccgggagaucaccaagauggaggcccucaaguucgugagcgacgcccacgacgaggagcccuggagcuggccggaggaguacaacaaggcgcuggagggcgacaagaccaaggagcgcucccugaccgccggccucgaguucuggagcgaggacacgaugaacgacaaggccaacgaccugguccagcuggccaucuccgugaccgaggagaugcuccccauccaccaggacgagcugcuggcccacaccgggaaggaguucgaggacguguuccccaacauccucaaccgggcgacccugauccuggacauguucuacggccucagccugaucgaggucgacacguccgagcacaucuaccugcucgugcagcagcccgagagcgaggaggagcaggucaugcuggagucccuggggcgcccgacccaggaguacgugaugcccauccucggccugaucuuccugaugggcaaccgcgugaaggaggccaacguguggaaccugcuccggcgcuucagcgucgacguggggcggaagcacuccaucacccgcaagcugaugcggcagcgcuaccuggagugccggccccucagcuacuccaaccccgucgaguacgagcugcuguggggcccgcgcgcccaccacgagaccaucaagaugaaggugcucgaguacauggcccggcuguaccgcaagcggccccagaacuggcccgagcaguaccgcgaggccguggaggacgaggaggcgcgggccaagagcgaggccacgaucauguucuuccuggaccccaccuga

SEQ ID NO: 1303 - RNA, 924 nt, Artificial Sequence
  CCDS3269.1_variant
augcugcagacccccgagagccgcggccucccggugccccaggccgagggggagaaggacggcgggcacgacggcgagacccgggcccccacggcgucccaggagcgccccaaggaggagcugggggccggccgggaggagggcgccgccgagccggcccugacccgcaagggggcgcgggcccucgccgccaaggcgcuggcccgccggcgcgccuaccggcgccugaaccggaccgucgccgagcucgugcaguuccugcuggugaaggacaagaagaagucccccaucacccgcagcgagauggucaaguacgugaucggcgaccucaagauccuguuccccgacaucaucgcccgggcggccgagcaccuccgcuacguguucggguucgagcugaagcaguucgaccggaagcaccacacguacauccugaucaacaagcugaagccccucgaggaggaggaggaggaggaccugggcggggacggcccgcgccugggccuccugaugaugauccuggggcucaucuacaugcggggcaacagcgcccgcgaggcccaggucugggagaugcugcggcgccugggggugcagcccuccaaguaccacuuccucuucggcuaccccaagcggcugaucauggaggacuucgugcagcagcgcuaccugagcuaccgccgggucccccacaccaacccgcccgaguacgaguucuccuggggcccccgcagcaaccucgagaucuccaagauggaggugcugggguucguggccaagcugcacaagaaggagccccagcacuggccgguccaguaccgggaggcgcucgccgacgaggccgaccgcgcccgggccaaggcgcgcgccgaggccagcaugcgggcccgcgccuccgcgcgggccggcauccaccugugguga

SEQ ID NO: 1304 - RNA, 660 nt, Artificial Sequence
  AAD31314_variant
augccccgcggccgcaagagccggcggcgccggaacgcccgcgccgcggaggagaaccggaacaaccgcaagauccaggccuccgaggccagcgagaccccgauggccgccuccguggucgcgagcacccccgaggacgaccuguccgggcccgaggaggaccccagcacgccggaggaggccuccaccacccccgaggaggccagcuccaccgcccaggcgcagaagcccagcgugccccgguccaacuuccagggcacgaagaagucccuccugaugagcauccuggcccucaucuucaucauggggaacagcgccaaggaggcccugguguggaagguccugggcaagcucgggaugcagccgggccgccagcacuccaucuucggcgaccccaagaagaucgugaccgaggaguucgugcggcgcggguaccugaucuacaagcccgucccccggagcuccccgguggaguacgaguucuucuggggcccccgcgcccacguggagagcuccaagcugaaggucaugcacuucguggcgcgggugcgcaaccggugcagcaaggacuggcccugcaacuacgacugggacagcgacgacgacgccgaggucgaggccauccucaacuccggggcccgcggcuacagcgcccccuga

SEQ ID NO: 1305 - RNA, 3750 nt, Artificial Sequence
  CCDS73700.1_variant
augagccagcuguccaagaaccucggcgacagcucccccccggccgaggcccccaagccccccguguacagccgcccgaccguccugaugcgggcgccccccgccuccagccgcgcccccccggugcccugggacccccccccgaucgaccugcaggccucccucgccgcguggcaggccccccagcccgccugggaggccccccaggggcagcugccggcgcccgugguccccaugacccagcccccggcccugggcgggcccaucgugcccgcccccccgcucggcgggcccaugggcaagccccccacgccgggcgugcugaugguccacccccccccgcccggggcccccauggcccagcccccgacccccggcgugcugauggugcaccccagcgcgcccggggccccgauggcccaccccccccccccgggcacccccaugucccacccccccccgcccgggacccccauggcccaccccccgccccccggcacgcccauggcccacccgccccccccgggcacccccaugguccacccccccccgcccgggacccccauggcgcaccccccgccccccggcacccccauggcccacccgcccccccccgggacgccgauggcccaccccccccccccgggcacccccauggcccacccccccccgcccggcacccccauggcccagcccccggcgcccggggugcucauggcccagccccugaccccgggcgugcugaugguccagcccgccgcccccggggcccccauggugcagccgccccccgcggccaugaugacgcagccccagccgagcggcgcccccauggccaagccccccgggccgggcgugcucaugauccacccccccggcgcgcgggcccccaugacccagccgcccgccuccggggcccccauggcccagcccgcggccccgcccgcccagcccauggcccccccggcccagcccauggcgagcugggccccccaggcccagccccugauccugcagauccagucccaggucauccgcgccccgccccaggugccccagggcccgcaggccccccccgcgcagcucgccacccccccgggguggcaggccaccagccccggcuggcaggccacgcagcagggguggcaggcgaccccccugaccuggcagaccacgcaggugaccuggcaggcccccgccgucaccuggcaggugccgccccccaugcggcagggccccccgcccauccgccccggccccccgcccauccggcccgggcccccgcccgugcgccaggcccccccccugauccggcaggccccgcccgucauccgccaggcgcccccggugauccggcaggccccccccgugauccgccaggcccccgccgucauccggcaggccccgcccgugauccgccaggcgccccccgucauccggcaggccccgcccgugauccgccaggcccccccccucauccggcaggccccgccccccauccgccccgccccgcaggugcuggcgacccagcccccccuguggcaggcccuccccccgccccccccccugcggcaggccccgcaggcccgccugcccgcgccccagguccaggccgccccccaggugccgacggccccccccgccacccaggugccggcggccccccccgccggcccccaggucccgcagcccgugcuccccgccccccuguccgccccgcugagcgcgccccaggccgugcacugccccuccaucaucuggcaggcccccaaggggcagccgcccgucccccacgagauccccaccagcauggaguuccaggaggugcagcagacccaggcccucgccuggcaggcgcagaaggccccgacgcacaucuggcagccccugcccgcccaggaggcccagcggcaggcccccccgcuggugcagcucgagcagcccuuccagggcgcgccccccucccagaaggccguccagauccagcugccgccccagcaggcccaggccagcgggccccaggcggaggugcccacccugccgcuccagcccagcuggcaggcccccccggccgugcugcaggcccagcccggcccccccgucgccgcggccaacuucccgcugggcuccgccaagagccucaugacccccuccggggagugccgcgccagcuccaucgaccgccggggcagcuccaaggagcgccggaccagcuccaaggagcgccgggcccccagcaaggaccgcaugaucuucgcggccacguucugcgcccccaaggccguguccgccgcgcgggcccaccugccggccgccuggaagaaccugcccgcgacccccgagaccuucgcccccagcuccagcguguucccggccaccucccaguuccagcccgccagccucaacgccuucaaggggcccuccgcggccagcgagacgcccaagucccugccguacgcccugcaggaccccuucgccugcgucgaggcccuccccgcggugcccugggugccgcagcccaacaugaacgccagcaaggccagccaggccguccccaccuuccugauggccaccgcggccgccccccaggccaccgcgaccacgcaggaggccuccaagaccagcguggagccgccccgccgguccggcaaggccacccgcaagaagaagcaccuggaggcccaggaggacagccggggccacacccucgccuuccacgacuggcaggggccccgccccugggagaaccugaaccuguccgacugggaggugcagagcccgauccaggucuccggcgacugggagcaccccaacacgccccgggggcucagcggcugggaggggccguccaccagccgcauccuguccggcugggagggccccagcgcguccugggcccugagcgccugggaggggcccuccaccagccgggcccugggccucuccgagagccccgggagcucccugccggugguggucagcgagguggccuccgugagccccggcuccagcgcgacccaggacaacuccaaggucgaggcccagccccugagcccccucgacgagcgcgccaacgcccuggugcaguuccugcucgugaaggaccaggccaaggucccggugcagcgguccgagauggugaaggucauccugcgcgaguacaaggacgagugccuggacaucaucaaccgggcgaacaacaagcucgagugcgccuucggguaccagcugaaggagaucgacacgaagaaccacgccuacaucaucaucaacaagcugggcuaccacaccggcaaccucguggccagcuaccuggaccgccccaaguucgggcugcucauggugguccugucccugaucuucaugaagggcaacugcgugcgcgaggaccucaucuucaacuuccuguucaagcuggggcucgacgugcgggagaccaacggccuguucgggaacaccaagaagcugaucacggaggucuucgugcgccagaaguaccucgaguaccggcgcauccccuacaccgagcccgccgaguacgaguuccuguggggcccgcgggcguuccuggagaccagcaagaugcucgugcugcgcuuccuggccaagcuccacaagaaggacccccaguccuggcccuuccacuaccuggaggcccuggccgagugcgagugggaggacaccgacgaggacgagcccgacacgggcgacagcgcgcacgggccgaccucccggccccccccccgcuga

SEQ ID NO: 1306 - RNA, 282 nt, Artificial Sequence
  AAC39608_variant
augaagcugcucauggugcugaugcuggccgcccucagccagcacugcuacgcgggcuccgggugcccgcugcuggagaacgucaucagcaagaccaucaacccccagguguccaagaccgaguacaaggagcuccugcaggaguucaucgacgacaacgccacgaccaacgccaucgacgagcugaaggagugcuuccucaaccagaccgacgagacccugagcaacguggaggucuucaugcagcugaucuacgacuccagccucugcgaccuguucuga

SEQ ID NO: 1307 - RNA, 363 nt, Artificial Sequence
  AAH67220_variant
augaagcugcucauggugcugaugcuggccgcccucagccagcacugcuacgcgggcuccgggugcccccugcuggagaacgucaucagcaagaccaucaacccccagguguccaagaccgaguacaaggagcuccugcaggaguucaucgacgacaacgccacgaccaacgccaucgacgagcugaaggagugcuuccucaaccagaccgacgagacccugagcaacguggaggucuucauggugaucuccuucagcuccuacaagcuguucaagagcccggaccagggccaggugggguccagcuuccucacggacaacgccaaggccaccuccgagcaggcguucagcuacaucggcuga

SEQ ID NO: 1308 - RNA, 357 nt, Artificial Sequence
  AAA19238_variant
augccccgcgaggacgcccacuucaucuacggcuaccccaagaaggggcacggccacagcuacaccaccgccgaggaggcggccgggaucggcauccugacggugauccucgggguccugcugcucaucggcugcugguacugccggcgccggaacggcuaccgcgcccugauggacaagucccugcacguggggacccagugcgcccucacccggcgcugcccccaggagggcuucgaccaccgggacagcaaggugucccugcaggagaagaacugcgagcccgucgugcccaacgccccgcccgcguacgagaagcugagcgccgagcaguccccgccgcccuacagccccuga

SEQ ID NO: 1309 - RNA, 1482 nt, Artificial Sequence
  EAW93427_variant
augcugccccgcugggagcucgcccuguaccugcucgccagccugggcuuccacuucuacuccuucuacgagguguacaaggucagccgggagcacgaggaggagcuggaccaggaguucgagcucgagaccgacacccuguucgggggccugaagaaggacgcgacggacuucgagugguccuucuggauggagugggggaagcaguggcucguguggcugcugcucggccacaugguggucagccagauggccacccugcuggcccgcaagcaccggccguggauccucaugcuguacgggaugugggccugcuggugcgugcugggcacccccggcguggccaugguccuccugcacaccacgaucuccuucugcguggcgcaguuccgcagccagcugcucaccuggcugugcucccugcuccugcugagcacccuccggcugcaggggguggaggaggucaagcgccggugguacaagaccgagaacgaguacuaccugcuccaguucacgcugaccgugcgcugccuguacuacaccuccuucagccucgagcugugcuggcagcagcugcccgccgccuccaccagcuacuccuuccccuggaugcucgccuacguguucuacuacccgguccugcacaacggccccauccugagcuucuccgaguucaucaagcagaugcagcagcaggagcacgacagccucaaggcgucccugugcgugcuggcccucgggcugggccggcugcucugcuggugguggcuggccgagcugauggcccaccucauguacaugcacgccaucuacagcuccaucccccugcuggagacggugagcugcuggacccucgggggccuggcgcuggcccagguccuguucuucuacgugaaguaccucgugcuguucggcguccccgcccugcucaugcgccuggacgggcugaccccgcccgcccucccccggugcgugagcaccauguucuccuucacgggcauguggcgcuacuucgacguggggcugcacaacuuccugauccgguacgucuacauccccgugggcggcagccagcacgggcuccugggcacccuguucuccaccgccaugaccuucgcguucgugagcuacuggcacgggggcuacgacuaccucuggugcugggccgcccugaacuggcugggggucacgguggagaacggcguccgccggcucguggagaccccgugcauccaggacucccuggcccgcuacuucagcccccaggcccggcgccgguuccacgcggcccuggccuccugcagcaccuccaugcucauccugagcaaccugguguuccucggcgggaacgaggucggcaagaccuacuggaaccgcaucuucauccagggguggcccugggugacgcuguccgugcugggcuuccucuacugcuacagccacgucgggaucgccugggcccagaccuacgcgaccgacuga

SEQ ID NO: 1310 - RNA, 954 nt, Artificial Sequence
  AAD41349_variant
auggccgugcagggcagccagcgccggcugcucgggucccugaacagcacccccaccgccaucccccagcugggccucgcggccaaccagacgggggcccgcugccuggaggucuccaucagcgacggccuguuccucucccuggggcuggugagccucguggagaacgcccuggucguggccaccaucgcgaagaaccggaaccugcacucccccauguacugcuucaucugcugccucgcccugagcgaccugcucguguccggcagcaacguccuggagaccgccgugauccugcuccuggaggccggcgcgcugguggcccgcgccgccguccuccagcagcuggacaacgugaucgacgugaucacgugcuccagcaugcuguccagccucugcuuccugggggccaucgcggucgaccgguacaucuccaucuucuacgcccugcgcuaccacagcaucgugacccucccccgggcccgccgggccguggccgcgaucugggucgccuccgugguguucagcacccuguucaucgccuacuacgaccacgucgccgugcugcucugccugguggucuucuuccuggccaugcucgugcugauggcggugcuguacguccacaugcucgcccgcgccugccagcacgcccagggcaucgcccggcugcacaagcgccagcggcccgugcaccagggguucggccugaagggggcggucacccucaccauccugcugggcaucuucuuccucugcuggggcccguucuuccugcaccugacgcucaucgugcugugccccgagcacccgaccugcgggugcaucuucaagaacuucaaccuguuccucgcccugaucaucugcaacgccaucaucgacccccugaucuacgccuuccacucccaggagcugcgccggacccucaaggaggugcugaccugcagcugguga

SEQ ID NO: 1311 - RNA, 954 nt, Artificial Sequence; identical to SEQ ID NO: 1310
  AHC09522_variant

SEQ ID NO: 1312 - RNA, 954 nt, Artificial Sequence
  AHC09804_variant
auggccgugcagggcagccagcgccggcugcucgggucccugaacagcacccccaccgccaucccccagcugggccucgcggccaaccagacgggggcccgcugccuggaggucuccaucagcgacggccuguuccucucccuggggcuggugagccucguggagaacgcccuggucguggccaccaucgcgaagaaccggaaccugcacucccccauguacugcuucaucugcugccucgcccugagcgaccugcucguguccggcagcaacguccuggagaccgccgugauccugcuccuggaggccggcgcgcugguggcccgcgccgccguccuccagcagcuggacaacgugaucgacgugaucacgugcuccagcaugcuguccagccucugcuuccugggggccaucgcggucgaccgguacaucuccaucuucuacgcccugcgcuaccacagcaucgugacccucccccgggcccgccaggccguggccgcgaucugggucgccuccgugguguucagcacccuguucaucgccuacuacgaccacgucgccgugcugcucugccugguggucuucuuccuggccaugcucgugcugauggcggugcuguacguccacaugcucgcccgggccugccagcacgcccagggcaucgcccgccugcacaagcggcagcgccccgugcaccagggguucggccugaagggggcggucacccucaccauccugcugggcaucuucuuccucugcuggggcccguucuuccugcaccugacgcucaucgugcugugccccgagcacccgaccugcgggugcaucuucaagaacuucaaccuguuccucgcccugaucaucugcaacgccaucaucgacccccugaucuacgccuuccacucccaggagcugcggcgcacccucaaggaggugcugaccugcagcugguga

SEQ ID NO: 1313 - RNA, 954 nt, Artificial Sequence
  BAE94313_variant
auggccgugcagggcagccagcgccggcugcucgggucccugaacagcacccccaccgccaucccccagcugggccucgcggccaaccagacgggggcccgcugccuggaggucuccaucagcgacggccuguuccucucccuggggcuggugagccucguggagaacgcccuggucguggccaccaucgcgaagaaccggaaccugcacucccccauguacugcuucaucugcugccucgcccugagcgaccugcucguguccggcagcaacguccuggagaccgccgugauccugcuccuggaggccggcgcgcugguggcccgcgccgccguccuccagcagcuggacaacgugaccgacgugaucacgugcuccagcaugcuguccagccucugcuuccugggggccaucgcggucgaccgguacaucuccaucuucuacgcccugcgcuaccacagcaucgugacccucccccgggcccgccgggccguggccgcgaucugggucgccuccgugguguucagcacccuguucaucgccuacuacgaccacgucgccgugcugcucugccugguggucuucuuccuggccaugcucgugcugauggcggugcuguacguccacaugcucgcccgcgccugccagcacgcccagggcaucgcccggcugcacaagcgccagcggcccgugcaccagggguucggccugaagggggcggucacccucacgauccugcugggcaucuucuuccucugcuggggcccguucuuccugcaccugacccucaucgugcugugccccgagcacccgaccugcgggugcaucuucaagaacuucaaccuguuccucgcccugaucaucugcaacgccaucaucgacccccugaucuacgccuuccacucccaggagcugcgccggacccucaaggaggugcugacgugcagcugguga

SEQ ID NO: 1314 - RNA, 954 nt, Artificial Sequence
  AHC09531_variant
auggccgugcagggcagccagcgccggcugcucgggucccugaacagcacccccaccgccaucccccagcugggccucgcggccaaccagacgggggcccgcugccuggaggucuccaucagcgacggccuguuccucucccuggggcuggugagccucguggagaacgcccuggucguggccaccaucgcgaagaaccggaaccugcacucccccauguacugcuucaucugcugccucgcccugagcgaccugcucguguccggcagcaacaugcuggagaccgccgucauccugcuccuggaggccggcgcgcugguggcccgcgccgccgugcuccagcagcuggacaacgucaucgacgugaucacgugcuccagcaugcuguccagccucugcuuccugggggccaucgcgguggaccgguacaucuccaucuucuacgcccugcgcuaccacagcaucgucacccucccccgggcccgccgggccguggccgcgaucuggguggccuccgucguguucagcacccuguucaucgccuacuacgaccacguggccguccugcucugccuggugguguucuuccuggccaugcucguccugauggcggugcuguacgugcacaugcucgcccgcgccugccagcacgcccagggcaucgcccggcugcacaagcgccagcggcccguccaccagggguucggccugaagggggcggugacccucaccauccugcugggcaucuucuuccucugcuggggcccguucuuccugcaccugacgcucaucguccugugccccgagcacccgaccugcgggugcaucuucaagaacuucaaccuguuccucgcccugaucaucugcaacgccaucaucgacccccugaucuacgccuuccacucccaggagcugcgccggacccucaaggaggugcugaccugcagcugguga

SEQ ID NO: 1315 - RNA, 954 nt, Artificial Sequence
  BAE94311_variant
auggccgugcagggcagccagcgccggcugcucgggucccugaacagcacccccaccgccaucccccagcugggccucgcggccaaccagacgggggcccgcugccuggaggucuccaucagcgacggccuguuccucucccuggggcuggugagccucguggagaacgcccuggucguggccaccaucgcgaagaaccagaaccugcacucccccauguacugcuucaucugcugccucgcccugagcgaccugcucguguccggcagcaacguccuggagaccgccgugauccugcuccuggaggccggcgcgcugguggcccgggccgccguccuccagcagcuggacaacgugaucgacgugaucacgugcuccagcaugcuguccagccucugcuuccugggggccaucgcggucgaccgcuacaucuccaucuucuacgcccugcgguaccacagcaucgugacccucccccgcgcccggcaggccguggccgcgaucugggucgccuccgugguguucagcacccuguucaucgccuacuacgaccacgucgccgugcugcucugccugguggucuucuuccuggccaugcucgugcugauggcggugcuguacguccacaugcucgcccgcgccugccagcacgcccagggcaucgcccggcugcacaagcgccagcggcccgugcaccagggguucggccugaagggggcggucacccucaccauccugcugggcaucuucuuccucugcuggggcccguucuuccugcaccugacgcucaucgugcugugccccgagcacccgaccugcgggugcaucuucaagaacuucaaccuguuccucgcccugaucaucugcaacgccaucaucgacccccugaucuacgccuuccacucccaggagcugcgccggacccucaaggaggugcugaccugcagcugguga

SEQ ID NO: 1316 - RNA, 954 nt, Artificial Sequence
  BAE94309_variant
auggccgugcagggcagccagcgccggcugcucgggucccugaacagcacccccaccgccaucccccagcugggccucgcggccaaccagacgggggcccgcugccuggaggucuccaucagcgacggccuguuccucucccuggggcuggugagccucguggagaacgcccuggucguggccaccaucgcgaagaaccggaaccugcacucccccauguacugcuucaucugcugccucgcccugagcgaccugcucguguccggcagcaacguccuggagaccgccgugauccugcuccuggaggccggcgcgcugguggcccgcgccgccguccuccagcagcuggacaacgugaucgacgugaucacgugcuccagcaugcuguccagccucugcuuccugggggccaucgcggucgaccgguacaucuccaucuucuacgcccugcgcuaccacagcaucgugacccucccccgggcccgccaggccgugggcgccaucugggucgcguccgugguguucagcacccuguucaucgccuacuacgaccacgucgccgugcugcucugccugguggucuucuuccuggccaugcucgugcugauggccgugcuguacguccacaugcucgcgcgggccugccagcacgcccaggggaucgcccgccugcacaagcggcagcgccccgugcaccagggcuucgggcugaagggcgccgucacccucaccauccugcugggcaucuucuuccucugcugggggccguucuuccugcaccugacgcucaucgugcugugccccgagcacccgaccugcggcugcaucuucaagaacuucaaccuguuccucgcgcugaucaucugcaacgccaucaucgacccccugaucuacgccuuccacucccaggagcugcggcgcacccucaaggaggugcugaccugcagcugguga

SEQ ID NO: 1317 - RNA, 954 nt, Artificial Sequence
  BAE94308_variant
auggccgugcagggcagccagcgccggcugcucgggucccugaacagcacccccaccgccaucccccagcugggccucgcggccaaccagacgggggcccgcugccuggaggucuccaucagcgacggccuguuccucucccuggggcuggugagccucguggagaacgcccuggucguggccaccaucgcgaagaaccggaaccugcacucccccauguacugcuucaucugcugccucgcccugagcgaccugcucguguccggcagcaacguccuggagaccgccgugauccugcuccuggaggccggcgcgcugguggcccgcgccgccguccuccagcagcuggacaacgugaccgacgugaucacgugcuccagcaugcuguccagccucugcuuccugggggccaucgcggucgaccgguacaucuccaucuucuacgcccugcgcuaccacagcaucgugacccucacccgggcccgccgggccguggccgcgaucugggucgccuccgugguguucagcacccuguucaucgccuacuacgaccacgucgccgugcugcucugccugguggucuucuuccuggccaugcucgugcugauggcggugcuguacguccacaugcucgcccgcgccugccagcacgcccagggcaucgcccggcugcacaagcgccagcggcccgugcaccagggguucggccugaagggggcggucacgcucaccauccugcugggcaucuucuuccucugcuggggccccuucuuccugcaccugacccucaucgugcugugcccggagcacccgaccugcgggugcaucuucaagaacuucaaccuguuccucgcccugaucaucugcaacgccaucaucgacccccugaucuacgccuuccacucccaggagcugcgccggacgcucaaggaggugcugaccugcagcugguga

SEQ ID NO: 1318 - RNA, 954 nt, Artificial Sequence
  BAE94307_variant
auggccgugcagggcagccagcgccggcugcucgggucccugaacagcacccccaccgccaucccgcagcugggccucgcggccaaccagacgggggcccgcugccuggaggucuccaucagcgacggccuguuccucucccuggggcuggugagccucguggagaacgcccuggucguggccaccaucgcgaagaaccggaaccugcacucccccauguacugcuucaucugcugccucgcccugagcgaccugcucguguccggcagcaacaugcuggagaccgccgucauccugcuccuggaggccggcgcgcugguggcccgcgccgccgugcuccagcagcuggacaacgucaucgacgugaucacgugcuccagcaugcuguccagccucugcuuccugggggccaucgcgguggaccgguacaucuccaucuucuacgcccugcgcuaccacagcaucgucauccucccccgggcccgccgggccguggccgcgaucuggguggccuccgucguguucagcacccuguucaucgccuacuacgaccacguggccguccugcucugccuggugguguucuuccuggccaugcucguccugauggcggugcuguacgugcacaugcucgcccgcgccugccagcacgcccagggcaucgcccggcugcacaagcgccagcggcccguccaccagggguucggccugaagggggcggugacccucaccauccugcugggcaucuucuuccucugcuggggcccguucuuccugcaccugacccucaucguccugugccccgagcaccccacgugcgggugcaucuucaagaacuucaaccuguuccucgcccugaucaucugcaacgccaucaucgacccccugaucuacgccuuccacucccaggagcugcgccggacccucaaggaggugcugaccugcagcugguga

SEQ ID NO: 1319 - RNA, 951 nt, Artificial Sequence
  BAE94306_variant
auggccgugcagggcagccagcgccggcugcucgggucccugaacagcacccccaccgccaucccccagcugggccucgcggccaaccagacgggggcccgcugccuggaggucuccaucagcgacggccuguuccucucccuggggcuggugagccucguggagaacgcccuggucguggccaccaucgcgaagaaccggaaccugcacucccccauguacugcuucaucugcugccucgcccugagcgaccugcucguguccggcagcaacguccuggagaccgccgugauccugcuccuggaggccggcgcgcugguggcccgcgccgccguccuccagcagcuggacaacgugaucgacgugaucacgugcuccagcaugcuguccagccucugcuuccugggggccaucgcggucgaccgguacaucuccaucuacgcccugcgcuaccacagcaucgugacccucccccgggcccgccaggccguggccgcgaucugggucgccuccgugguguucagcacccuguucaucgccuacuacgaccacgucgccgugcugcucugccugguggucuucuuccuggccaugcucgugcugauggcggugcuguacguccacaugcucgcccgggccugccagcacgcccagggcaucgcccgccugcacaagcggcagcgccccgugcaccagggguucggccugaagggggcggucacccucaccauccugcugggcaucuucuuccucugcuggggcccguucuuccugcaccugacgcucaucgugcugugccccgagcacccgaccugcgggugcaucuucaagaacuucaaccuguuccucgcccugaucaucugcaacgccaucaucgacccccugaucuacgccuuccacucccaggagcugcggcgcacccucaaggaggugcugaccugcagcugguga

SEQ ID NO: 1320 - RNA, 954 nt, Artificial Sequence
  AAQ62977_variant
auggccgugcagggcagccagcgccggcugcucgggucccugaacagcacccccaccgccaucccccagcugggccucgcggccaaccagacgggggcccgcugccuggaggucuccaucagcgacggccuguuccucucccuggggcuggugagccucguggagaacgcccuggucguggccaccaucgcgaagaaccggaaccugcacucccccauguacugcuucaucugcugccucgcccugagcgaccugcucguguccggcagcaacguccuggagaccgccgugauccugcuccuggaggccggcgcgcugguggcccgcgccgccguccuccagcagcuggacaacgugaucgacgugaucacgugcuccagcaugcuguccagccucugcuuccugggggccaucgcggucgaccgguacaucuccaucuucuacgcccugcgcuaccacagcaucgugacccucccccgggcccgccgggccguggccgcgaucugggucgccuccgugguguucagcacccuguucaucgccuacuacgaccacgucgccgugcugcucugccugguggucuucuuccuggccaugcucgugcugauggcggugcuguacguccacaugcucgcccgcgccugccagcacgcccagggcaucgcccggcugcacaagcgccagcggcccgugcaccagggguucggccugaagggggcggucacccucaccauccugcugggcaucuucuuccucugcuggggcccguucuuccugcaccugacgcucaucauccugugccccgagcacccgaccugcgggugcaucuucaagaacuucaaccuguuccucgcccugaucaucugcaacgccaucaucgacccccugaucuacgccuuccacucccaggagcugcgccggacccucaaggaggugcugaccugcagcugguga

SEQ ID NO: 1321 - RNA, 954 nt, Artificial Sequence
  AAQ62975_variant
auggccgugcagggcagccagcgccggcugcucgggucccugaacagcacccccaccgccaucccccagcugggccucgcggccaaccagacgggggcccgcugccuggaggucuccaucagcgacggccuguuccucucccuggggcuggugagccucguggagaacgcccuggucguggccaccaucgcgaagaaccggaaccugcacucccccauguacugcuucaucugcugccucgcccugagcgaccugcucguguccggcagcaacguccuggagaccgccgugauccugcuccuggaggccggcgcgcugguggcccgcgccgucgugcuccagcagcuggacaacgugaucgacgucaucacgugcuccagcaugcuguccagccucugcuuccugggggccaucgccguggaccgguacaucuccaucuucuacgcgcugcgcuaccacagcaucgugacccucccccgggcccgccgggccgucgccgccaucuggguggcguccguggucuucagcacccuguucaucgccuacuacgaccacguggccgugcugcucugccuggucguguucuuccuggccaugcucgugcugauggccguccuguacgugcacaugcucgcgcgcgccugccagcacgcccagggcaucgcccggcugcacaagcgccagcggcccguccaccagggguucggccugaagggggccgugacccucaccauccugcugggcaucuucuuccucugcuggggcccguucuuccugcaccugacgcucaucgugcugugccccgagcacccgaccugcgggugcaucuucaagaacuucaaccuguuccucgcgcugaucaucugcaacgccaucaucgacccccugaucuacgccuuccacucccaggagcugcgccggacccucaaggagguccugaccugcagcugguga

SEQ ID NO: 1322 - RNA, 954 nt, Artificial Sequence
  AAQ62974_variant
auggccgugcagggcagccagcgccggcugcucgggucccugaacagcacccccaccgccaucccccagcugggccucgcggccaaccagacgggggcccgcugccuggaggucuccaucagcgacggccuguuccucucccuggggcuggugagccucguggagaacgcccuggucguggccaccaucgcgaagaaccggaaccugcacucccccauguacugcuucaucugcugccucgcccugagcgaccugcucguguccggcagcaacguccuggagaccgccgugauccugcuccuggaggccggcgcgcugguggcccgcgccgccguccuccagcagcuggacaacgugaucgacgugaucacgugcuccagcaugcuguccagccucugcuuccugggggccaucgcggucgaccgguacaucuccaucuucuacgcccugcgcuaccacagcaucgugacccucccccgggcccgccgggccguggccgcgaucugggucgccuccgugguguucagcacccuguucaucgccuacuacgaccacgucgccgugcugcucugccugguggucuucuuccuggccaugcucgugcugauggcggugcuguacguccacaugcucgcccgcgccugccagcacgcccagggcaucgcccggcugcacaagcgccagcggcccgugcaccagggguucggccugaagggggcggucacccucaccauccugcugggcaucuucuuccucugcuggggcccguucuuccugcaccugacgcucaucgugcugugccccgagcacccgaccugcgggugcaucuucaagaacuucaaccuguuccucgcccugaucaucugcaacgccaucaucgacccccugaucuacgccuuccacucccaggagcugcgccggacccucaaggaggugcugacccgcagcugguga

SEQ ID NO: 1323 - RNA, 954 nt, Artificial Sequence
  AAQ62973_variant
auggccgugcagggcagccagcgccggcugcucgggucccugaacagcacccccaccgccaucccccagcugggccucgcggccaaccagacgggggcccgcugccuggaggucuccaucagcgacggccuguuccucucccuggggcuggugagccucguggagaacgcccuggucguggccaccaucgcgaagaaccggaaccugcacucccccauguacugcuucaucugcugccucgcccugagcgaccugcucguguccggcagcaacguccuggagaccgccgugauccugcuccuggaggccggcgcgcugguggcccgcgccgccguccuccagcagcuggacaacgugaucgacgugaucacgugcuccagcaugcuguccagccucugcuuccugggggccaucgcggucgaccgguacaucuccaucuucuacgcccugcgcuaccacagcaucgugacccucccccgggcccgccgggccguggccgcgaucugggucgccuccgugguguucagcacccuguucaucgccuacuacgaccacgucgccgugcugcucugccugguggucuucuuccuggccaugcucgugcugauggcggugcuguacguccacaugcucgcccgcgccugccagcacgcccagggcaucgcccggcugcacaagcgccagcggcccgugcaccagggguucggccugaagggggcggucacccucaccauccugcugggcaucuucuuccucugcuggggcccguucuuccugcaccugacgcucaucgugcugugccccgagcacccgaccugcgggugcaucuucaagaacuucaaccuguuccucgcccugaucaucugcaacgccaucaucgacccccugaucuacgccuuccacucccaggagcugcgccggaugcucaaggaggugcugaccugcagcugguga

SEQ ID NO: 1324 - RNA, 954 nt, Artificial Sequence
  AAQ62972_variant
auggccgugcagggcagccagcgccggcugcucgggucccugaacagcacccccaccgccaucccccagcugggccucgcggccaaccagacgggggcccgcugccuggaggucuccaucagcgacggccuguuccucucccuggggcuggugagccucguggagaacgcccuggucguggccaccaucgcgaagaaccggaaccugcacucccccauguacugcuucaucugcugccucgcccugagcgaccugcucguguccggcagcaacguccuggagaccgccgugauccugcuccuggaggccggcgcgcugguggcccgcgccgccguccuccagcagcuggacaacgugaucgacgugaucacgugcuccagcaugcuguccagccucugcuuccugggggccaucgcggucgaccgguacaucuccaucuucuacgcccugcgcuaccacagcaucgugacccucccccgggcccgccgggccguggccgcgaucugggucgccuccgugguguucagcacccuguucaucgccuacuacgaccacgucgccgugcugcucugccugguggucuucuuccuggccaugcucgugcugauggcggugcuguacguccacaugcucgccugggccugccagcacgcccagggcaucgcccgccugcacaagcggcagcgccccgugcaccagggguucggccugaagggggcggucacccucaccauccugcugggcaucuucuuccucugcuggggcccguucuuccugcaccugacgcucaucgugcugugccccgagcacccgaccugcgggugcaucuucaagaacuucaaccuguuccucgcccugaucaucugcaacgccaucaucgacccccugaucuacgccuuccacucccaggagcugcggcgcacccucaaggaggugcugaccugcagcugguga

SEQ ID NO: 1325 - RNA, 954 nt, Artificial Sequence
  AAQ62971_variant
auggccgugcagggcagccagcgccggcugcucgggucccugaacagcacccccaccgccaucccccagcugggccucgcggccaaccagacgggggcccgcugccuggaggucuccaucagcgacggccuguuccucucccuggggcuggugagccucguggagaacgcccuggucguggccaccaucgcgaagaaccggaaccugcacucccccauguacugcuucaucugcugccucgcccugagcgaccugcucguguccggcagcaacguccuggagaccgccgugauccugcuccuggaggccggcgcgcugguggcccgcgccgccguccuccagcagcuggacaacgugaucgacgugaucacgugcuccagcaugcuguccagccucugcuuccugggggccaucgcggucgaccgguacaucuccaucuucuacgcccugcgcuaccacagcaucgugacccucccccaggcccggcgcgccguggccgcgaucugggucgccuccgugguguucagcacccuguucaucgccuacuacgaccacgucgccgugcugcucugccugguggucuucuuccuggccaugcucgugcugauggcggugcuguacguccacaugcucgcccgggccugccagcacgcccagggcaucgcccgccugcacaagcggcagcgccccgugcaccagggguucggccugaagggggcggucacccucaccauccugcugggcaucuucuuccucugcuggggcccguucuuccugcaccugacgcucaucgugcugugccccgagcacccgaccugcgggugcaucuucaagaacuucaaccuguuccucgcccugaucaucugcaacgccaucaucgacccccugaucuacgccuuccacucccaggagcugcggcgcacccucaaggaggugcugaccugcagcugguga

SEQ ID NO: 1326 - RNA, 954 nt, Artificial Sequence
  AAQ62970_variant
auggccgugcagggcagccagcgccggcugcucgggucccugaacagcacccccaccgccaucccccagcugggccucgcggccaaccagacgggggcccgcugccuggaggucuccaucagcgacggccuguuccucucccuggggcuggugagccucguggagaacgcccuggucguggccaccaucgcgaagaaccggaaccugcacucccccauguacugcuucaucugcugccucgcccugcuggaccuccuggugagcggcuccaacguccuggagaccgccgugauccuccugcuggaggccggcgcgcucguggcccgcgccgccguccugcagcagcuggacaacgugaucgacgugaucacgugcagcuccaugcucagcucccugugcuuccugggggccaucgcggucgaccgguacaucagcaucuucuacgcccuccgcuaccacuccaucgugacccugccccgggcccgccgggccguggccgcgaucugggucgccagcgugguguucuccacccuguucaucgccuacuacgaccacgucgccgugcuccugugccugguggucuucuuccucgccaugcuggugcugauggcggugcucuacguccacaugcuggcccgcgccugccagcacgcccagggcaucgcccggcugcacaagcgccagcggcccgugcaccagggguucggccucaagggggcggucacccugaccauccugcucggcaucuucuuccugugcuggggcccguucuuccugcaccucacgcugaucgugcugugccccgagcacccgaccugcgggugcaucuucaagaacuucaaccucuuccuggcccugaucaucugcaacgccaucaucgacccccugaucuacgccuuccacagccaggagcuccgccggacccugaaggaggugcugaccugcuccugguga

SEQ ID NO: 1327 - RNA, 954 nt, Artificial Sequence
  AAQ62969_variant
auggccgugcagggcagccagcgccggcugcucgggucccugaacagcacccccaccgccaucccccagcugggccucgcggccaaccagacgggggcccgcugccuggaggucuccaucagcgacggccugcuccugucccuggggcucgugagccugguggagaacgcccuggucguggccaccaucgcgaagaaccggaaccuccacucccccauguacugcuucaucugcugccuggcccugagcgaccuccugguguccggcagcaacguccuggagaccgccgugauccuccugcuggaggccggcgcgcucguggcccgcgccgccguccugcagcagcuggacaacgugaucgacgugaucacgugcuccagcaugcucuccagccugugcuuccugggggccaucgcggucgaccgguacaucuccaucuucuacgcccuccgcuaccacagcaucgugacccugccccgggcccgccgggccguggccgcgaucugggucgccuccgugguguucagcacccuguucaucgccuacuacgaccacgucgccgugcuccugugccugguggucuucuuccucgccaugcuggugcugauggcggugcucuacguccacaugcuggcccgcgccugccagcacgcccagggcaucgcccggcugcacaagcgccagcggcccgugcaccagggguucggccucaagggggcggucacccugaccauccugcucggcaucuucuuccugugcuggggcccguucuuccugcaccucacgcugaucgugcugugccccgagcacccgaccugcgggugcaucuucaagaacuucaaccucuuccuggcccugaucaucugcaacgccaucaucgacccccugaucuacgccuuccacucccaggagcuccgccggacccugaaggaggugcugaccugcagcugguga

SEQ ID NO: 1328 - RNA, 954 nt, Artificial Sequence
  AAO21073_variant
auggccgugcagggcagccagcgccggcuccucgggucccugaacagcacccccaccgccaucccccagcugggccucgcggccaaccagacgggggcccgcugccuggaggucuccaucagcgacggccuguuccucucccuggggcuggugagccucguggagaacgcccuggucguggccaccaucgcgaagaaccggaaccugcacucccccauguacugcuucaucugcugccucgcccugagcgaccugcucguguccggcagcaacguccgcgagaccgccgugauccugcugcucgaggccggcgcgcugguggcccgggccgccguccugcagcagcucgacaacgugaucgacgugaucacgugcuccagcaugcuguccagccugugcuuccucggggccaucgcggucgaccgcuacaucuccaucuucuacgcccugcgguaccacagcaucgugacccugccccgcgcccggcgcgccguggccgcgaucugggucgccuccgugguguucagcacccucuucaucgccuacuacgaccacgucgccgugcugcugugccucguggucuucuuccuggccaugcuggugcucauggcggugcuguacguccacaugcuggcccgggccugccagcacgcccagggcaucgcccgccuccacaagcggcagcgccccgugcaccagggguucggccugaagggggcggucacccugaccauccuccugggcaucuucuuccugugcuggggcccguucuuccuccaccugacgcugaucgugcucugccccgagcacccgaccugcgggugcaucuucaagaacuucaaccuguuccuggcccucaucaucugcaacgccaucaucgacccccugaucuacgccuuccacucccaggagcugcggcgcacccugaaggaggugcugaccugcagcugguga

SEQ ID NO: 1329 - RNA, 954 nt, Artificial Sequence
  AHC09567_variant
auggccgugcagggcagccagcgccggcugcucgggucccugaacagcacccccaccgccaucccgcagcugggccucgcggccaaccagacgggggcccgcugccuggaggucuccaucagcgacggccuguuccucucccuggggcuggugagccucguggagaacgcccuggucguggccaccaucgcgaagaaccggaaccugcacucccccauguacugcuucaucugcugccucgcccugcccgaccugcucgugagcggcuccaacguccuggagaccgccgugauccugcuccuggaggccggcgcgcugguggcccgcgccgccguccuccagcagcuggacaacgugaucgacgugaucacgugcagcuccaugcugagcucccucugcuuccugggggccaucgcggucgaccgguacaucagcaucuucuacgcccugcgcuaccacuccaucgugacccucccccgggcccgccgggccguggccgcgaucugggucgccagcgugguguucuccacccuguucaucgccuacuacgaccacgucgccgugcugcucugccugguggucuucuuccuggccaugcucgugcugauggcggugcuguacguccacaugcucgcccgcgccugccagcacgcccagggcaucgcccggcugcacaagcgccagcggccggugcaccagggguucggccugaagggggcggucacccucaccauccugcugggcaucuucuuccucugcuggggccccuucuuccugcaccugacgcucaucgugcugugccccgagcacccgaccugcgggugcaucuucaagaacuucaaccuguuccucgcccugaucaucugcaacgccaucaucgacccccugaucuacgccuuccacagccaggagcugcgccggacccucaaggaggugcugaccugcuccugguga

SEQ ID NO: 1330 - RNA, 954 nt, Artificial Sequence
  AHC09812_variant
auggccgugcagggcagccagcgccggcugcucgggucccugaacagcacccccaccgccaucccccagcugggccucgcggccaaccagacgggggcccgcugccuggaggucuccaucagcgacggccuguuccucucccuggggcuggugagccucguggagaacgcccuggucguggccaccaucgcgaagaaccggaaccugcacucccccauguacugcuucaucugcugccucgcccugagcgaccugcucguguccggcagcaacguccuggagaccgccgugauccugcuccuggaggccggcgcgcugguggcccgcgccgccguccuccagcagcuggacaacgugaucgacgugaucacgugcuccagcaugcuguccagccucugcuuccugggggccaucgcggucgaccgguacaucuccaucuucuacgcccugcgcuaccacagcaucgugacccucccccgggcccgccgggccguggccgcgaucugggucgccuccgugguguucagcacccuguucaucgccuacuacgaccacgucgccgugcugcucugccugaugguguucuuccuggccaugcucguccugauggcggugcuguacgugcacaugcucgcccgcgccugccagcacgcccagggcaucgcccggcugcacaagcgccagcggcccguccaccagggguucggccugaagggggcggugacccucaccauccugcugggcaucuucuuccucugcuggggcccguucuuccugcaccugacgcucaucguccugugccccgagcacccgaccugcgggugcaucuucaagaacuucaaccuguuccucgcccugaucaucugcaacgccaucaucgacccccugaucuacgccuuccacucccaggagcugcgccggacccucaaggaggugcugaccugcagcugguga

SEQ ID NO: 1331 - RNA, 954 nt, Artificial Sequence
  AHC10192_variant
auggccgugcagggcagccagcgccggcugcucgggucccugaacagcacccccaccgccaucccccagcugggccucgcggccaaccagacgggggcccgcugccuggaggucuccaucagcgacggccuguuccucucccuggggcuggugagccucguggagaacgcccuggucguggccaccaucgcgaagaaccggaaccugcacucccccauguacugcuucaucugcugccucgcccugagcgaccugcucguguccggcagcaacguccuggagaccgccgugauccugcuccuggaggccggcgcgcugguggcccgcgccgccguccuccagcagcuggacaacgugaucgacgugaucacgugcuccagcaugcuguccagccucugcuuccugggggccaucgcggucgaccgguacaucuccaucuucuacgcccugcgcuaccacagcaucgugacccucccccgggcccgccgggccguggccgcgaucugggucgccuccgugguguucagcacccuguucaucgccuacuacgaccacgucgccgugcugcucugccugguggucuucuuccuggccaugcucgugcugauggcggugcuguacguccacaugcucgcccgcgccugccagcacgcccagggcaccgcccggcugcacaagcgccagcggcccgugcaccagggguucggccugaagggggcggucacccucacgauccugcugggcaucuucuuccucugcuggggcccguucuuccugcaccugacccucaucgugcugugccccgagcacccgaccugcgggugcaucuucaagaacuucaaccuguuccucgcccugaucaucugcaacgccaucaucgacccccugaucuacgccuuccacucccaggagcugcgccggacccucaaggaggugcugacgugcagcugguga

SEQ ID NO: 1332 - RNA, 954 nt, Artificial Sequence
  AHC09641_variant
auggccgugcagggcagccagcgccggcugcucgggucccugaacagcacccccaccgccaucccccagcugggccucgcggccaaccagacgggggcccgcugccuggaggucuccaucagcgacggccuguuccucucccuggggcuggugagccucguggagaacgcccuggucguggccaccaucgcgaagaaccggaaccugcacucccccauguacugcuucaucugcugccucgcccugagcgaccugcucguguccggcagcaacguccuggagaccgccgugauccugcuccuggaggccggcgcgcugguggcccgcgccgccguccuccagcagcuggacaacgugaucgacgugaucacgugcuccagcaugcuguccagccucugcuuccugggggccaucgcggucgaccgguacaucuccaucuucuacgcccugcgcuaccacagcaccgugacccucccccgggcccgccgggccguggccgcgaucugggucgccuccgugguguucagcacccuguucaucgccuacuacgaccacgucgccgugcugcucugccugguggucuucuuccuggccaugcucgugcugauggcggugcuguacguccacaugcucgcccgcgccugccagcacgcccagggcaucgcccggcugcacaagcgccagcggcccgugcaccagggguucggccugaagggggcggucacccucacgauccugcugggcaucuucuuccucugcuggggcccguucuuccugcaccugacccucaucgugcugugccccgagcacccgaccugcgggugcaucuucaagaacuucaaccuguuccucgcccugaucaucugcaacgccaucaucgacccccugaucuacgccuuccacucccaggagcugcgccggacccucaaggaggugcugacgugcagcugguga

SEQ ID NO: 1333 - RNA, 954 nt, Artificial Sequence
  AHC10044_variant
auggccgugcagggcagccagcgccggcugcucgggucccugaacagcacccccaccgccaucccccagcugggccucgcggccaaccagacgggggcccgcuaccuggaggucuccaucagcgacggccuguuccucucccuggggcuggugagccucguggagaacgcccuggucguggccaccaucgcgaagaaccggaaccugcacucccccauguacugcuucaucugcugccucgcccugagcgaccugcucguguccggcagcaacguccuggagaccgccgugauccugcuccuggaggccggcgcgcugguggcccgcgccgccguccuccagcagcuggacaacgugaucgacgugaucacgugcuccagcaugcuguccagccucugcuuccugggggccaucgcggucgaccgguacaucuccaucuucuacgcccugcgcuaccacagcaucgugacccucccccgggcccgccgggccguggccgcgaucugggucgccuccgugguguucagcacccuguucaucgccuacuacgaccacgucgccgugcugcucugccugguggucuucuuccuggccaugcucgugcugauggcggugcuguacguccacaugcucgcccgcgccugccagcacgcccagggcaucgcccggcugcacaagcgccagcggcccgugcaccagggguucggccugaagggggcggucacccucaccauccugcugggcaucuucuuccucugcuggggcccguucuuccugcaccugacgcucaucgugcugugccccgagcacccgaccugcgggugcaucuucaagaacuucaaccuguuccucgcccugaucaucugcaacgccaucaucgacccccugaucuacgccuuccacucccaggagcugcgccggacccucaaggaggugcugaccugcagcugguga

SEQ ID NO: 1334 - RNA, 954 nt, Artificial Sequence
  AHC09532_variant
auggccgugcagggcagccagcgccggcugcucgggucccugaacagcacccccaccgccaucccccagcugggccucgcggccaaccagacgggggcccgcugccuggaggucuccaucagcgacggccuguuccucucccuggggcuggugagccucguggagaacgcccugguccuggccaccaucgcgaagaaccggaaccuccacucccccauguacugcuucaucugcugccuggcccugagcgaccuccugguguccggcagcaacgugcuggagaccgccgucauccuccugcuggaggccggcgcgcucguggcccgcgccgccgugcugcagcagcuggacaacgucaucgacgugaucacgugcuccagcaugcucuccagccugugcuuccugggggccaucgcgguggaccgguacaucuccaucuucuacgcccuccgcuaccacagcaucgucacccugccccgggcccgccgggccguggccgcgaucuggguggccuccgucguguucagcacccuguucaucgccuacuacgaccacguggccguccuccugugccuggugguguucuuccucgccaugcugguccugauggcggugcucuacgugcacaugcuggcccgcgccugccagcacgcccagggcaucgcccggcugcacaagcgccagcggcccguccaccagggguucggccucaagggggcggugacccugaccauccugcucggcaucuucuuccugugcuggggcccguucuuccugcaccucacgcugaucguccugugccccgagcacccgaccugcgggugcaucuucaagaacuucaaccucuuccuggcccugaucaucugcaacgccaucaucgacccccugaucuacgccuuccacucccaggagcuccgccggacccugaaggaggugcugaccugcagcugguga

SEQ ID NO: 1335 - RNA, 954 nt, Artificial Sequence
  AHC11042_variant
auggccgugcagggcagccagcgccggcugcucgggucccugaacagcacccccaccgccaucccgcagcugggccucgcggccaaccagacgggggcccgcugccuggaggucuccaucagcgacggccuguuccucucccuggggcuggugagccucguggagaacgcccuggucguggccaccaucgcgaagaaccggaaccugcacucccccauguacugcuucaucugcugccucccccugagcgaccugcucguguccggcagcaacguccuggagaccgccgugauccugcuccuggaggccggcgcccugguggcgcgcgccgccguccuccagcagcuggacaacgugaucgacgugaucacgugcuccagcaugcuguccagccucugcuuccugggggccaucgccgucgaccgguacaucuccaucuucuacgcgcugcgcuaccacagcaucgugacccucccccgggcccgccgggccguggccgccaucugggucgcguccgugguguucagcacccuguucaucgccuacuacgaccacgucgccgugcugcucugccugguggucuucuuccuggccaugcucgugcugauggccgugcuguacguccacaugcucgcgcgcgccugccagcacgcccagggcaucgcccggcugcacaagcgccagcggccggugcaccagggguucggccugaagggggccgucacccucaccauccugcugggcaucuucuuccucugcuggggccccuucuuccugcaccugacgcucaucgugcugugccccgagcacccgaccugcgggugcaucuucaagaacuucaaccuguuccucgcgcugaucaucugcaacgccaucaucgacccccugaucuacgccuuccacucccaggagcugcgccggacccucaaggaggugcugaccugcagcugguga

SEQ ID NO: 1336 - RNA, 954 nt, Artificial Sequence
  AHC10733_variant
auggccgugcagggcagccagcgccggcugcucgggucccugaacagcacccccaccgccaucccccagcugggccucgcggccaaccagacgggggcccgcugccuggaggucuccaucagcgacggccuguuccucucccuggggcuggugagccucguggagaacgcccuggucguggccaccaucgcgaagaaccggaaccugcacucccccauguacugcuucaucugcugccucgcccugagcgaccugcucguguccggcagcaacguccuggagaccgccgugauccugcuccuggaggccggcgcgcugguggcccgcgccgccguccuccagcagcuggacaacgugaucgacgugaucacgugcuccagcaugcuguccagccucugcuuccugggggccaucgcggucgaccgguacaucuccaucuucuacgcccugcgcuaccacagcaucgugacccucccccgggcccgccgggccguggccgcgaucugggucgccuccgugguguucagcacccuguucaucgccuacuacgaccacgucgccgugcugcucugccugguggucuucuuccuggccaugcucgugcugauggcggugcuguacguccacaugcucgcccgcgccugccagcacgcccagggcaucgcccggcugcacaagcgccagcggcccgugcaccagggguucggccugaagggggcggucacccucaccauccugcugggcaucuucuuccucugcuggggcccguucuuccugcaccugacgcucaucgugcugugccccgagcacccgaccugcgggugcaucuucaagaacuucucccuguuccucgcccugaucaucugcaacgccaucaucgacccccugaucuacgccuuccacagccaggagcugcgccggacccucaaggaggugcugaccugcagcugguga

SEQ ID NO: 1337 - RNA, 954 nt, Artificial Sequence
  AHC10696_variant
auggccgugcagggcagccagcgccggcugcucgggucccugaacagcacccccaccgccaucccccagcugggccucgcggccaaccagacgggggcccgcugccuggaggucuccaucagcgacggccuguuccucucccuggggcuggugagccucguggagaacgcccuggucguggccaccaucgcgaagaaccggaaccugcacucccccauguacugcuucaucugcugccucgcccugagcgaccugcucguguccggcagcaacguccuggagaccgccgugauccugcuccuggaggccggcgcgcugguggcccgcgccgccguccuccagcagcuggacaacgugaucgacgugaucacgugcuccagcaugcuguccagccucugcuuccugggggccaucgcggucgaccgguacaucuccaucuucuacgcccugcgcuaccacagcaucgugacccucccccgggcccgccgggccguggccgcgaucugggucgccuccgugguguucagcacccuguucaucgccuacuacgaccacgucgccgugcugcucugccugguggucuucuuccuggccaugcucgugcugauggcggugcuguacguccacaugcucgcccgcgccugccagcacgcccagggcaucgcccggcugcacaagcgccagcggcccgugcaccagggguucggccugaagggggcggucacccucaccauccugcugggcaucuucuuccucugcuggggcccguucuuccugcaccugacgcucaucgugcugugccccgagcacccgaccugcgggugcaucuucaagaacuucaaccuguuccucgcccugaucaucugcaacgccaucaucgacccccugauccacgccuuccacucccaggagcugcgccggacccucaaggaggugcugaccugcagcugguga

SEQ ID NO: 1338 - RNA, 954 nt, Artificial Sequence
  AHC09527_variant
auggccgugcagggcagccagcgccggcugcucgggucccugaacagcacccccaccgccaucccccagcugggccucgcggccaaccagacgggggcccgcugccuggaggucuccaucagcgacggccuguuccucucccuggggcuggugagccucguggagaacgcccuggucguggccaccaucgcgaagaaccggaaccugcacucccccauguacugcuucaucugcugccucgcccugagcgaccugcucguguccggcagcaacguccuggagaccgccgugauccugcuccuggaggccggcgcgcugguggcccgcgccgccguccuccagcagcuggacaacgugaucgacgugaucacgugcuccagcaugcuguccagccucugcuuccugggggccaucgcggucgaccgguacaucuccaucuucuacgcccugcgcuaccacagcaucgugacccucccccgggcccgccgggccguggccgcgaucugggucgccuccgugguguucagcacccuguucaucgccuacuacgaccacgucgccgugcugcucugccugguggucuucuuccuggccaugcucgugcugauggcggugcuguacguccacaugcucgcccgcgccugccagcacgcccagggcaucgcccggcugcacaagcgccagcggcccgugcaccagggguucggccugaagggggcggucacccucaccauccugcugggcaucuucuuccucugcuggggcccguucuuccugcaccugacgcucaucgugcugugccccgagcacccgaccugcgggugcaucuucaagaacuucaaccuguuccucgcccugaucaucugcaacgccaucauccacccccugaucuacgccuuccacucccaggagcugcgccggacccucaaggaggugcugaccugcagcugguga

SEQ ID NO: 1339 - RNA, 954 nt, Artificial Sequence
  AHC10869_variant
auggccgugcagggcagccagcgccggcugcucgggucccugaacagcacccccaccgccaucccccagcugggccucgcggccaaccagacgggggcccgcugccuggaggucuccaucagcgacggccuguuccucucccuggggcuggugagccucguggagaacgcccuggucguggccaccaucgcgaagaaccggaaccugcacucccccauguacugcuucaucugcugccucgcccugagcgaccugcucguguccggcagcaacguccuggagaccgccgugauccugcuccuggaggccggcgcgcugguggcccgcgccgccguccuccagcagcuggacaacgugaucgacgugaucacgugcuccagcaugcuguccagccucugcuuccugggggccaucgcggucgaccgguacaucuccaucuucuacgcccugcgcuaccacagcaucgugacccucccccgggcccgccgggccguggccgcgaucugggucgccuccgugguguucagcacccuguucaucgccuacuacgaccacgucgccgugcugcucugccugguggucuucuuccuggccaugcucgugcugauggcggugcuguacguccacaugcucgcccgcgccugccagcacgcccagggcaucgcccggcugcacaagcgccagcaccccgugcaccagggguucggccugaagggggcggucacccucaccauccugcugggcaucuucuuccucugcuggggcccguucuuccugcaccugacgcucaucgugcugugccccgagcacccgaccugcgggugcaucuucaagaacuucaaccuguuccucgcccugaucaucugcaacgccaucaucgacccccugaucuacgccuuccacucccaggagcugcggcgcacccucaaggaggugcugaccugcagcugguga

SEQ ID NO: 1340 - RNA, 954 nt, Artificial Sequence
  AHC11615_variant
auggccgugcagggcagccagcgccggcugcucgggucccugaacagcacccccaccgccaucccccagcugggccucgcggccaaccagacgggggcccgcugccuggaggucuccaucagcgacggccuguuccucucccuggggcuggugagccucguggagaacgcccuggucguggccaccaucgcgaagaaccggaaccugcacucccccauguacugcuucaucugcugccucgcccugagcgaccugcucguguccggcagcaacguccuggagaccgccgugauccugcuccuggaggccggcgcgcugguggcccgcgccgccguccuccagcagcuggacaacgugaucgacgugaucacgugcuccagcaugcuguccagccucugcuuccugggggccaucgcggucgaccgguacaucuccaucuucuacgcccugcgcuaccacagcaucgugacccucccccgggcccgccgggccguggccgcgaucugggucgccuccgugguguucagcacccuguucaucgccuacuacgaccacgucgccgugcugcucugccugguggucuucuuccuggccaugcucgugcugauggcggugcuguacguccacaugcucgcccgcgccugccagcacgcccagggcaucgcccggcugcacaagcgccagcggcccgugcaccagggguucggccugaagggggcggucacccucaccauccugcugggcaucuucuuccucugcuggggcccguucuuccugcaccugacgcucaucgugcugugccccgagcacccgaccugcgggugcaucuucaagaacuucaaccuguuccucacccugaucaucugcaacgccaucaucgacccccugaucuacgccuuccacucccaggagcugcgccggacccucaaggaggugcugacgugcagcugguga

SEQ ID NO: 1341 - RNA, 954 nt, Artificial Sequence
  AHC09535_variant
auggccgugcagggcagccagcgccggcugcucgggucccugaacagcacccccaccgccaucccccagcugggccucgcggccaaccagacgggggcccgcugccuggaggucuccaucagcgacggccuguuccucucccuggggcuggugagccucguggagaacgcccuggucguggccaccaucgcgaagaaccggaaccugcacucccccauguacugcuucaucugcugccucgcccugagcgaccugcucguguccggcagcaacguccuggagaccgccgugauccugcuccuggaggccggcgcgcugguggcccgcgccgccguccuccagcagcuggacaacgugaucgacgugaucacgugcuccagcaugcuguccagccucugcuuccugggggccaucgcggucgaccacuacaucuccaucuucuacgcccugcgguaccacagcaucgugacccucccccgcgcccggcgcgccguggccgcgaucugggucgccuccgugguguucagcacccuguucaucgccuacuacgaccacgucgccgugcugcucugccugguggucuucuuccuggccaugcucgugcugauggcggugcuguacguccacaugcucgcccgggccugccagcacgcccagggcaucgcccgccugcacaagcggcagcgccccgugcaccagggguucggccugaagggggcggucacccucaccauccugcugggcaucuucuuccucugcuggggcccguucuuccugcaccugacgcucaucgugcugugccccgagcacccgaccugcgggugcaucuucaagaacuucaaccuguuccucgcccugaucaucugcaacgccaucaucgacccccugaucuacgccuuccacucccaggagcugcggcgcacccucaaggaggugcugaccugcagcugguga

SEQ ID NO: 1342 - RNA, 954 nt, Artificial Sequence
  AHC11840_variant
auggccgugcagggcagccagcgccggcugcucgggucccugaacagcacccccaccgccaucccccagcugggccucgcggccaaccagacgggggcccgcugccuggaggucuccaucagcgacggccuguuccucucccuggggcuggugagccucguggagaacgcccuggucguggccaccaucgcgaagaaccggaaccugcacucccccauguacugcuucaucugcugccucgcccugagcgaccugcucguguccggcagcaacguccuggagaccgccgugauccugcuccuggaggccggcgcgcugguggcccgcgccgccguccuccagcagcuggacaacgugaucgacgugaucacgugcuccagcaugcuguccagccucugcuuccugggggccaucgcggucgaccgguacaucuccaucuucuacgcccugcgcuaccacagcaucgugacccucccccgggcccgccgggccguggccgcgaucugggucgccuccgugguguucagcacccuguucaucgccuacuacgaccacgucgccgugcugcucugccugguggucuucuuccuggccaugcucgugcugauggcggugcuguacguccacaugcucgcccgcgccugccagcacgcccagggcaucgcccggcugcacaagcgccagcggcccgugcaccagggguucggccugaagggggcggucacccucaccauccugcugggcaucuucuuccucugcuggggcccguucuuccugcaccugacgcucaucgugcugugccccgagcacccgaccugcgggugcaucuucaagaacuucaaccuguuccucgcccugaucaucugcaacgccaucaucgacccccugaucuacgccuuccacaaccaggagcugcgccggacccucaaggaggugcugaccugcuccugguga

SEQ ID NO: 1343 - RNA, 954 nt, Artificial Sequence
  AHC09665_variant
auggccgugcagggcagccagcgccggcugcucgggucccugaacagcacccccaccgccaucccccagcugggccucgcggccaaccagacgggggcccgcugccuggaggucuccaucagcgacggccuguuccucucccuggggcuggugagccucguggagaacgcccuggucguggccaccaucgcgaagaaccggaaccugcacucccccauguacugcuucaucugcugccucgcccugagcgaccugcucguguccggcagcaacguccuggagaccgccgugauccugcuccuggaggccggcgcgcugguggcccgcgccgccguccuccagcagcuggacaacgugaucgacaugaucacgugcuccagcaugcuguccagccucugcuuccugggggccaucgcgguggaccgguacaucuccaucuucuacgcccugcgcuaccacagcaucgucacccucccccgggcccgccgggccguggccgcgaucuggguggccuccgucguguucagcacccuguucaucgccuacuacgaccacguggccguccugcucugccuggugguguucuuccuggccaugcucguccugauggcggugcuguacgugcacaugcucgcccgcgccugccagcacgcccagggcaucgcccggcugcacaagcgccagcggcccguccaccagggguucggccugaagggggcggugacccucaccauccugcugggcaucuucuuccucugcuggggcccguucuuccugcaccugacgcucaucguccugugccccgagcacccgaccugcgggugcaucuucaagaacuucaaccuguuccucgcccugaucaucugcaacgccaucaucgacccccugaucuacgccuuccacucccaggagcugcgccggacccucaaggaggugcugaccugcagcugguga

SEQ ID NO: 1344 - RNA, 954 nt, Artificial Sequence
  AHC11324_variant
auggccgugcagggcagccagcgccggcugcucgggucccugaacagcacccccaccgccaucccccagcugggccucgcggccaaccagacgggggcccgcugccuggaggucuccaucagcgacggccuguuccucucccuggggcuggugagccucguggagaacgcccuggucguggccaccaucgcgaagaaccggaaccugcacucccccauguacugcuucaucugcugccucgcccugagcgaccugcucguguccggcagcaacguccuggagaccgccgugauccugcuccuggaggccggcgcgcugguggcccgcgccgccguccuccagcagcuggacaacgugaucgacgugaucacgugcuccagcaugcuguccagccucugcuuccugggggccaucgcggucgaccgguacaucuccaucuucuacgcccugcgcuaccacagcaucgugacccucccccgggcccgccgggccguggccgcgaucugggucgccuccgugguguucagcacccuguucaucgccuacuacgaccacgucgccgugcugcucugccugguggucuucuuccuggccaugcucgugcugauggcggugcuguacguccacaugcucgcccgcgccugccagcacgcccagggcaucgcccggcugcacaagcgccagcggcccgugcaccagggguucggccugaagggggcggucacccucaccauccugcugggcaucuucuuccucugcuggggcccguucuuccugcaccugacgcucaucgugcugugccccgagcacccgaccugcgggugcaucuucaagaacuucaaccuguuccucgcccugaucauccgcaacgccaucaucgacccccugaucuacgccuuccacucccaggagcugcggcgcacccucaaggaggugcugaccugcagcugguga

SEQ ID NO: 1345 - RNA, 954 nt, Artificial Sequence
  AHC09521_variant
auggccgugcagggcagccagcgccggcugcucgggucccugaacagcacccccaccgccaucccccagcugggccucgcggccaaccagacgggggcccgcugccuggaggucuccaucagcgacggccuguuccucucccuggggcuggugagccucguggagaacgcccuggucguggccaccaucgcgaagaaccggaaccugcacucccccauguacugcuucaucugcugccucgcccugagcgaccugcucguguccggcagcaacguccuggagaccgccgugauccugcuccuggaggccggcgcgcugguggcccgcgccgccguccuccagcagcuggacaacgugaucgacgugaucacgugcuccagcaugcuguccagccucugcuuccugggggccaucgcggucgaccgguacaucuccaucuucuacgcccugcgcuaccacagcaucgugacccuccccugggcccggcgcgccguggccgcgaucugggucgccuccgugguguucagcacccuguucaucgccuacuacgaccacgucgccgugcugcucugccugguggucuucuuccuggccaugcucgugcugauggcggugcuguacguccacaugcucgcccgggccugccagcacgcccagggcaucgcccgccugcacaagcggcagcgccccgugcaccagggguucggccugaagggggcggucacccucaccauccugcugggcaucuucuuccucugcuggggcccguucuuccugcaccugacgcucaucgugcugugccccgagcacccgaccugcgggugcaucuucaagaacuucaaccuguuccucgcccugaucaucugcaacgccaucaucgacccccugaucuacgccuuccacucccaggagcugcggcgcacccucaaggaggugcugaccugcagcugguga

SEQ ID NO: 1346 - RNA, 954 nt, Artificial Sequence
  AHC11794_variant
auggccgugcagggcagccagcgccggcugcucgggucccugaacagcacccccaccgccaucccgcagcugggccucgcggccaaccagacgggggcccgcugccuggaggucuccaucagcgacggccuguuccucucccuggggcuggugagccucguggagaacgcccuggucguggccaccaucgcgaagaaccggaaccugcacucccccauguacugcuucaucugcugccucgcccugagcgaccugcucguguccggcagcaacguccuggagaccgccgugauccugcuccuggaggccggcgcgcugguggcccgcgccgccguccuccagcagcuggacaacgugaucgacgugaucacgugcuccagcaugcuguccagccucugcuuccugggggccaucgcggucgaccgguacaucuccaucuucuacgcccugcgcuaccacagcaucgugacccucccccgggcccgccgggccguggccgcgaucugggucgccuccgugguguucagcacccuguucaucgccuacuacgaccacgucgccgugcugcucugccugguggucuucuuccuggccaugcucgugcugauggcggugcuguacguccacaugcucgcccgcgccugccagcacgcccagggcaucgcccggcugcacaagcgccagcggcccgugcaccagggguucggccugaagggggcggucacccucaccauccugcugggcaucuucuuccucugcuggggcccguucuuccugcaccugacgcucaucgugcugugccccgagcaccccgagugcgggugcaucuucaagaacuucaaccuguuccucgcccugaucaucugcaacgccaucaucgacccccugaucuacgccuuccacucccaggagcugcgccggacccucaaggaggugcugaccugcagcugguga

SEQ ID NO: 1347 - RNA, 954 nt, Artificial Sequence
  AHC10874_variant
auggccgugcagggcagccagcgccggcugcucgggucccugaacagcacccccaccgccaucccccagcugggccucgcggccaaccagacgggggcccgcugccuggaggucuccaucagcgacggccuguuccucucccuggggcuggugagccucguggagaacgcccuggucguggccaccaucgcgaagaaccggaaccugcacucccccauguacugcuucaucugcugccucgcccugagcgagcugcucguguccggcagcaacguccuggagaccgccgugauccugcuccuggaggccggcgcgcugguggcccgcgccgccguccuccagcagcuggacaacgugaucgacgugaucacgugcuccagcaugcuguccagccucugcuuccugggggccaucgcggucgaccgguacaucuccaucuucuacgcccugcgcuaccacagcaucgugacccucccccgggcccgccgggccguggccgcgaucugggucgccuccgugguguucagcacccuguucaucgccuacuacgaccacgucgccgugcugcucugccugguggucuucuuccuggccaugcucgugcugauggcggugcuguacguccacaugcucgcccgcgccugccagcacgcccagggcaucgcccggcugcacaagcgccagcggcccgugcaccagggguucggccugaagggggcggucacccucaccauccugcugggcaucuucuuccucugcuggggcccguucuuccugcaccugacgcucaucgugcugugccccgagcacccgaccugcgggugcaucuucaagaacuucaaccuguuccucgcccugaucaucugcaacgccaucaucgacccccugaucuacgccuuccacucccaggagcugcgccggacccucaaggaggugcugaccugcagcugguga

SEQ ID NO: 1348 - RNA, 954 nt, Artificial Sequence
  AHC09597_variant
auggccgugcagggcagccagcgccggcugcucgggucccugaacagcacccccaccgccaucccccagcugggccucgcggccaaccagacgggggcccgcugccuggaggucuccaucagcgacggccuguuccucucccuggggcuggugagccucguggagaacgcccuggucguggccaccaucgcgaagaaccggaaccugcacucccccauguacugcuucaucugcugccucgcccugagcgaccugcucguguccggcagcaacguccuggagaccgccgugauccugcuccuggaggccggcgcgcugguggcccgcgccgccguccuccagcagcuggacaacgugaucgacgugaucacgugcuccagcaugcuguccagccucugcuuccugggggccaucgcggucgaccgguacaucuccaucuucuacgcccugugcuaccacagcaucgugacccucccccgcgcccggcgcgccguggccgcgaucugggucgccuccgugguguucagcacccuguucaucgccuacuacgaccacgucgccgugcugcucugccugguggucuucuuccuggccaugcucgugcugauggcggugcuguacguccacaugcucgcccgggccugccagcacgcccagggcaucgcccgccugcacaagcggcagcgccccgugcaccagggguucggccugaagggggcggucacccucaccauccugcugggcaucuucuuccucugcuggggcccguucuuccugcaccugacgcucaucgugcugugccccgagcacccgaccugcgggugcaucuucaagaacuucaaccuguuccucgcccugaucaucugcaacgccaucaucgacccccugaucuacgccuuccacucccaggagcugcggcgcacccucaaggaggugcugaccugcagcugguga

SEQ ID NO: 1349 - RNA, 1665 nt, Artificial Sequence
  CCDS816.1_variant
augaccgcccccggcgccgcggggcgcugcccgcccaccacguggcugggcagccuccugcugcucgugugccugcuggccucccggagcaucaccgaggaggucuccgaguacugcagccacaugaucggguccggccaccuccagagccugcagcgccugaucgacucccagauggagaccagcugccagaucaccuucgaguucguggaccaggagcagcucaaggaccccgugugcuaccugaagaaggccuuccugcucguccaggacaucauggaggacacgaugcgguuccgcgacaacacccccaacgccaucgccaucgugcagcugcaggagcugucccuccggcugaaguccugcuucaccaaggacuacgaggagcacgacaaggcgugcgugcgcaccuucuacgagacgccgcugcagcuccuggagaaggucaagaacguguucaacgagaccaagaaccugcucgacaaggacuggaacaucuucuccaagaacugcaacaacagcuucgccgagugcuccagccaggacguggucaccaagcccgacugcaacugccuguaccccaaggccauccccuccagcgacccggccuccgugagcccccaccagccccuggcgcccuccauggccccgguggccgggcucaccugggaggacagcgagggcacggagggcagcucccugcugcccggggagcagccccuccacaccgucgaccccggcagcgccaagcagcggccgccccgcuccacgugccagagcuucgagccgcccgagacccccguggugaaggacuccaccaucgggggcagcccccagccccggcccuccgucggggccuucaacccgggcauggaggacauccuggacagcgcgaugggcaccaacugggugcccgaggaggccuccggggaggccagcgagauccccgugccccagggcaccgagcuguccccgagccgccccgggggcggcuccaugcagaccgagcccgcccggccgagcaacuuccucuccgccagcuccccgcugcccgcgagcgccaaggggcagcagcccgccgacgucacgggcaccgcccugccccgcguggggcccgugcggcccaccggccaggacuggaaccacacgccccagaagaccgaccacccguccgcccuccugcgcgacccgcccgagcccgggagcccccggaucagcucccugcgcccccagggccucagcaaccccuccacccugagcgcgcagccccagcugucccggagccacuccagcggcuccguccucccgcugggggagcuggagggccgccggagcacccgcgaccggcgcucccccgccgagcccgagggcgggcccgccagcgagggggccgcccgcccgcucccccgguucaacuccgugccccugaccgacacgggccacgagcgccagagcgagggcuccuucagcccccagcugcaggaguccguguuccaccuccuggucccgagcgugauccugguccuccuggcggucgggggccugcuguucuaccgguggcgccggcgcagccaccaggagccccagcgggccgacagcccccucgagcagccggaggggagcccccugacccaggacgaccgccagguggagcugcccguguga

SEQ ID NO: 1350 - RNA, 1893 nt, Artificial Sequence
  EAW85719_variant
auggcccugcccaccgcccgcccgcuccugggcagcugcgggacccccgcgcugggcucccuccuguuccuccuguucagccuggggugggugcagcccucccggacgcuggccggcgagaccgggcaggaggccgcgccccucgacggcguccuggccaacccgcccaacaucagcucccugagcccccgccagcuccugggcuuccccugcgccgagguguccgggcugagcaccgagcgggugcgcgagcucgccgucgcccuggcccagaagaacgugaagcuguccaccgagcagcuccggugccuggcgcaccgccugagcgagccgcccgaggaccucgacgcccugccccuggaccuccugcuguuccucaaccccgacgccuucuccggcccgcaggccugcacgcgguucuucagccgcaucaccaaggccaacguggaccugcugccccgcggggcgcccgagcggcagcggcuccugcccgccgcccuggccugcuggggcguccgcgggucccuccugagcgaggccgacgugcgggcgcugggcggccucgccugcgaccugccggggcgcuucguggccgaguccgccgagguccugcucccccggcuggugagcugccccggcccccuggaccaggaccagcaggaggccgcgcgcgccgcccuccagggcgggggcccgcccuacgggccgcccuccaccuggagcguguccaccauggacgcccugcggggccugcuccccguccuggggcagcccaucauccgcagcaucccccagggcaucguggccgcguggcggcagcgcagcucccgggaccccagcuggcgccagccggagcgcacgauccugcggccccgcuuccggcgcgagguggagaagaccgccugccccuccgggaagaaggcccgggagaucgacgagagccucaucuucuacaagaagugggagcuggaggccugcgucgacgcggcccugcuggccacccagauggaccgcgugaacgccaucccguucaccuacgagcagcucgacgugcugaagcacaagcuggacgagcucuacccccagggcuaccccgaguccgucauccagcaccugggcuaccuguuccucaagaugagccccgaggacauccggaaguggaacgugacgucccuggagacccugaaggcccuccuggaggugaacaaggggcacgagaugagcccgcaggcgccccgccggccccugccccaggucgccacccucaucgaccgcuucgugaagggccgggggcagcuggacaaggacacccuggacacgcucaccgccuucuacccgggcuaccugugcucccugagccccgaggagcucuccagcgugccgcccuccagcaucugggccguccgcccccaggaccuggacacgugcgacccccggcagcuggacgugcucuaccccaaggcccgccuggcguuccagaacaugaacggguccgaguacuucgucaagauccagagcuuccugggcggcgcccccaccgaggaccucaaggcccugucccagcagaacgugagcauggaccuggccaccuucaugaagcuccggaccgacgccgugcugccgcugaccgucgcggaggugcagaagcuccuggggccccacguggagggccugaaggccgaggagcgccaccggcccguccgcgacuggauccuccggcagcgccaggacgaccuggacacccuggggcucggccugcagggcgggauccccaacggcuaccuggugcucgaccuguccaugcaggaggcccugagcgggacgccgugccuccugggccccgggcccgugcugaccguccucgcccugcugcucgcgagcacccuggccuga

SEQ ID NO: 1351 - RNA, 1515 nt, Artificial Sequence
  CCDS46865.1_variant
auggaggcccugcgcgugcagauguucaugcccugcagcuucgagucccucuaccugagcuccgccgagcacccgggcgcgagcaagccgcccaucuccagcuccagcaugaccucccggauccugcuccgccagcagcugaugcgggagcagaugcaggagcaggagcgccgggagcagcagcagaagcugcaggccgcccaguucaugcagcagcgcguccccgugagccagacccccgccaucaacguguccguccccaccacccuccccagcgccacccaggugcccauggaggugcugaagguccagacccaccuggagaacccgacgaaguaccacauccagcaggcgcagcggcagcaggucaagcaguaccucuccaccacccuggccaacaagcacgccaaccaggugcugagccuccccugccccaaccagcccggggaccacgugaugccgcccgugcccggcuccagcgcccccaacuccccgauggcgaugcugacccugaacagcaacugcgagaaggagggguucuacaaguucgaggagcagaaccgcgccgaguccgagugccccggcaugaacacgcacagccgggccagcugcaugcagauggacgacgugaucgacgacaucaucucccucgagagcuccuacaacgaggagauccuggggcugauggaccccgcccuccagauggccaacacccugcccgucagcggcaaccugaucgaccucuacggcaaccaggggcugccgccgcccggccugaccaucuccaacagcugccccgcgaaccuccccaacaucaagcgcgagcugaccgaguccgaggcccgggcccuggccaaggagcgccagaagaaggacaaccacaaccucaucgagcggcgccggcgcuucaacaucaacgaccggaucaaggagcuggggacgcugauccccaagagcaacgaccccgacaugcgcuggaacaagggcaccauccucaaggccuccguggacuacauccggaagcugcagcgcgagcagcagcgggcgaaggagcuggagaaccgccagaagaagcucgagcacgccaaccgccaccuccugcuccggauccaggagcuggagaugcaggcccgcgcccacgggcugagccucauccccuccaccggccugugcagcccggaccuggugaaccggaucaucaagcaggagcccguccucgagaacugcucccaggaccugcugcagcaccacgccgaccugaccugcacgaccacccuggaccugaccgacggcacgaucaccuucaacaacaaccucgggaccggcaccgaggcgaaccaggccuacagcgugcccacgaagaugggguccaagcuggaggacauccugauggacgacacccugagcccggugggcgucaccgacccccuccuguccagcgugucccccggcgccagcaagaccagcucccgccggagcuccaugagcauggaggagacggagcacacgugcuga

SEQ ID NO: 1352 - RNA, 1260 nt, Artificial Sequence
  CCDS2913.1_variant
augcuggagaugcucgaguacaaccacuaccaggugcagacccaccuggagaaccccaccaaguaccacauccagcaggcccagcgccagcaggucaagcaguaccugagcaccacccucgccaacaagcacgcgaaccaggugcugucccugccgugccccaaccagcccggcgaccacgugaugcccccgguccccgggagcuccgcccccaacagccccauggccaugcucacccugaacuccaacugcgagaaggagggcuucuacaaguucgaggagcagaaccgggccgagagcgagugcccggggaugaacacccacucccgcgccagcugcaugcagauggacgacgugaucgacgacaucaucucccuggagagcuccuacaacgaggagauccucggccugauggaccccgcgcugcagauggccaacacgcuccccgugagcgggaaccugaucgaccuguacggcaaccagggccugcccccgcccgggcucaccaucuccaacagcugccccgccaaccugcccaacaucaagcgggagcucaccgccugcaucuucccgaccgaguccgaggcgcgcgcccuggccaaggagcggcagaagaaggacaaccacaaccugaucgagcgccggcgccgguucaacaucaacgaccgcaucaaggagcucggcacgcugauccccaagagcaacgaccccgacaugcgguggaacaaggggaccauccugaaggccuccgucgacuacauccgcaagcuccagcgggagcagcagcgcgccaaggagcuggagaaccggcagaagaagcuggagcacgcgaaccgccaccuccugcugcggauccaggagcucgagaugcaggcccgcgcccacggccugagccugauccccuccaccgggcucugcagcccggaccuggugaaccggaucaucaagcaggagcccgugcuggagaacugcagccaggaccuccugcagcaccacgccgaccugaccugcacgaccacccucgaccugaccgacggcacgaucaccuucaacaacaaccugggcaccgggaccgaggccaaccaggcguacuccguccccacgaagaugggcagcaagcucgaggacauccugauggacgacacccugucccccgugggggugaccgacccgcuccugagcuccgucagccccggcgccuccaagaccagcucccgccggagcuccaugagcauggaggagacggagcacacgugcuga

SEQ ID NO: 1353 - RNA, 1581 nt, Artificial Sequence
  XM_005264754_variant
augcagagcgaguccggcaucgugcccgacuucgaggucggggaggaguuccacgaggagccgaagaccuacuacgagcucaagagccagccccucaaguccagcuccagcgccgagcaccccggcgccuccaagcccccgaucagcuccagcuccaugaccagccgcauccugcugcggcagcagcucaugcgcgagcagaugcaggagcaggagcggcgcgagcagcagcagaagcugcaggcggcccaguucaugcagcagcgggugcccgugucccagacccccgccaucaacgucagcgugcccaccacccugccguccgccacccaggugcccauggagguccucaaggugcagacgcaccuggagaaccccaccaaguaccacauccagcaggcccagcgccagcaggucaagcaguaccugagcaccacccucgcgaacaagcacgccaaccaggugcugucccugcccugcccgaaccagcccggggaccacgugaugccgcccgugcccggcagcuccgcccccaacagccccauggccaugcucacgcugaacagcaacugcgagaaggagggguucuacaaguucgaggagcagaaccgggcggaguccgagugccccggcaugaacacccacagccgcgccuccugcaugcagauggacgacgucaucgacgacaucaucagccuggaguccagcuacaacgaggagauccucggccugauggacccggcccugcagauggccaacacccuccccguguccgggaaccugaucgaccuguacggcaaccaggggcugcccccgcccggccugaccaucagcaacuccugccccgccaaccugcccaacaucaagcgggagcucacggcgugcaucuuccccaccgagagcgaggcccgcgcccuggccaaggagcggcagaagaaggacaaccacaaccugaucgagcgccggcgccgguucaacaucaacgaccgcaucaaggagcucgggacccugaucccgaaguccaacgaccccgacaugcgguggaacaagggcaccauccugaaggccagcguggacuacauccgcaagcuccagcgggagcagcagcgcgcgaaggagcuggagaaccggcagaagaagcuggagcacgccaaccgccaccuccugcugcgcauccaggagcucgagaugcaggcccgggcccacggccugucccugauccccagcacggggcucugcuccccggaccuggucaaccgcaucaucaagcaggagcccgugcuggagaacugcagccaggaccuccugcagcaccacgccgaccugaccugcaccaccacgcucgaccugaccgacggcaccaucaccuucaacaacaaccuggggacgggcaccgaggcgaaccaggccuacuccgugcccaccaagaugggcagcaagcucgaggacauccugauggacgacacccugucccccgucggggugacggacccgcugcucagcagcgugucccccggcgccagcaagaccuccagccggcgcuccagcauguccauggaggagaccgagcacacgugcuga

SEQ ID NO: 1354 - RNA, 1065 nt, Artificial Sequence
  BAG52140_variant
auggcccccgccgcguggcugcgcagcgccgccgcccgggcccuccugccgcccaugcugcuccugcugcuccagccccccccgcugcuggcgcgcgcccucccccccgacgugcaccaccugcacgccgagcggcgcggcccccagccguggcacgccgcgcugcccuccagccccgcccccgccccggccacccaggaggccccccggcccgcguccagccuccgccccccgcggugcgggguccccgaccccuccgacggccugagcgcccgcaaccggcagaagcgcauccugcgguuccccuggcagcucgugcaggagcaggugcgccagaccauggccgaggcccugaaggucugguccgacgugacgccgcugaccuucaccgaggugcacgaggggcgggccgacaucaugaucgacuucgcgcgcuacuggcacggcgacgaccuccccuucgacgggcccggcggcauccuggcccacgccuucuuccccaagacccaccgggagggggacguccacuucgacuacgacgagacguggaccaucggcgacgaccaggggaccgaccugcuccagguggccgcccacgaguucggccacgugcuggggcugcagcacaccacggcggccaaggcccucaugagcgccuucuacaccuuccgcuacccgcugucccugagccccgacgacugccggggcguccagcaccucuacggccagcccuggcccaccgugaccucccgcacgccggcccuggggccccaggcgggcaucgacaccaacgagaucgccccccuggagccggacgccccccccgacgccugcgaggcgagcuucgacgccguguccaccauccggggggagcucuucuucuucaaggccggcuucgucuggcgccugcggggcgggcagcugcagcccggcuacccggcccucgccagccgccacuggcaggggcugcccucccccguggacgcggccuucgaggacgcccagggccacaucugguucuuccaggggaccacgggcgugagcacccccgccccgggcgucuga

SEQ ID NO: 1355 - RNA, 804 nt, Artificial Sequence
  AAV40839_variant
augcgccugaccgugcucugcgccgucugccugcugcccggcagccucgcccugccgcugccccaggaggccgggggcauguccgagcuccagugggagcaggcgcaggacuaccugaagcgguucuaccuguacgacagcgagaccaagaacgccaacucccucgaggccaagcugaaggagaugcagaaguucuucgggcugcccaucacgggcaugcucaacagccgcgugaucgagaucaugcagaagccccggugcggggugccggacgucgccgaguacucccuguuccccaacagccccaaguggaccuccaagguggugaccuaccgcaucgucagcuacacccgggaccugccccacaucacgguggaccgccucguguccaaggcgcugaacauguggggcaaggagaucccgcugcacuuccggaaggucguguggggcaccgccgacaucaugaucggguucgcccgcggcgcccacggggacagcuaccccuucgacggccccgggaacacccucgcgcacgccuucgcccccggcaccggccucgggggcgacgcccacuucgacgaggacgagcgguggacggacggguccagccugggcaucaacuuccuguacgccgcgacccacgagcugggccacucccuggggaugggccacagcuccgacccgaacgccgugauguaccccaccuacgggaacggcgacccccagaacuucaagcucagccaggacgacaucaaggggauccagaagcuguacggcaagcgcuccaacagccggaagaaguga

SEQ ID NO: 1356 - RNA, 3768 nt, Artificial Sequence
  J05582.1_variant
augacccccggcacccagagcccguucuuccugcuccugcugcucacggugcugaccgucgugaccggguccggccacgccagcuccacccccgggggcgagaaggagacgagcgccacccagcgcuccagcgugcccuccagcaccgagaagaacgcggucuccaugaccagcuccgugcugagcucccacagccccggguccggcagcuccacgacccagggccaggacgugacccucgccccggccaccgagcccgccagcggguccgccgcgacguggggccaggacgucaccagcgugcccgugacccggcccgcccuggggagcaccacgccgcccgcccacgacgucaccuccgcccccgacaacaagcccgcgccgggcagcaccgccccgcccgcccacggggugaccuccgcccccgacacgcgccccgcccccggcagcaccgcgccgcccgcccacggcgugaccuccgcccccgacacccggcccgcccccgggagcacggcgcccccggcccacggcgucaccuccgcccccgacacccgccccgcccccgggagcaccgccccgcccgcccacggcgugacguccgcgcccgacacccggccggcccccggcagcaccgccccgcccgcccacggggugaccuccgcccccgacacgcgccccgcgcccggcagcaccgcgcccccggcccacggggucaccuccgcccccgacacccggcccgcccccggcagcacggccccgcccgcccacggggugaccuccgcccccgacacccgccccgccccgggcagcaccgcgccgcccgcccacggcgugaccuccgcccccgacacgcggcccgcccccgggagcaccgccccgcccgcgcacggcgucaccuccgcccccgacacccgccccgcccccgggagcacggccccgcccgcccacggcgugaccagcgcgcccgacacccggcccgccccgggguccaccgccccgcccgcccacggcgugacgagcgcgcccgacacccgccccgcccccggcuccaccgccccgcccgcccacggggucaccagcgcccccgacacgcggcccgcgcccggcuccaccgcgcccccggcccacggggugaccagcgcccccgacacccgccccgcccccggcuccacggccccgcccgcccacggggugaccagcgcccccgacacccggcccgccccgggcuccaccgccccgcccgcgcacggcgucacgagcgcccccgacacccgccccgcccccggguccaccgcgcccccggcccacggcgugaccagcgcccccgacacgcggcccgcccccggguccaccgccccgcccgcccacggcgucaccagcgcgcccgacacccgccccgccccgggcuccacggccccgcccgcccacggggugaccagcgcccccgacacccggcccgcgcccggcuccaccgccccgcccgcccacggggugacgagcgcccccgacacccgccccgcccccggcagcaccgcgcccccggcccacggggucaccuccgcccccgacacgcggcccgcccccggcagcaccgccccgcccgcgcacggcgugaccuccgcccccgacacccgccccgccccggggagcaccgccccgcccgcgcacggcgugacguccgcccccgacacccgccccgcccccgggagcaccgcgcccccggcccacggcgucaccuccgcccccgacacgcggcccgcccccgggagcaccgccccgcccgcccacggcgugaccuccgcccccgacacccgccccgcgccgggcagcacggccccgcccgcccacggggugaccuccgcccccgacacccggcccgcccccggcagcaccgcgccgcccgcccacggggucacguccgcccccgacacccgccccgcccccggcagcaccgcgcccccggcccacggggugaccuccgcccccgacacgcggcccgccccgggcagcaccgccccgcccgcgcacggcgugaccuccgcccccgacacccgccccgcccccgggagcacggccccgcccgcccacggcgucaccuccgcgcccgacacccggcccgcccccgggagcaccgcgcccccggcccacggcgugacgagcgcccccgacacccgccccgcccccggguccaccgccccgcccgcccacggcgugaccagcgcccccgacacgcggcccgcgccgggcuccaccgccccgcccgcccacggggucaccagcgcccccgacacccgccccgcccccggcuccacggcgccgcccgcccacggggugaccagcgcccccgacacccggcccgcccccggcuccaccgccccgcccgcgcacggcgugacgagcgcccccgacacccgccccgccccgggguccaccgccccgcccgcccacggcgucaccagcgcgcccgacacccggcccgcccccggguccacggccccgcccgcccacggcgugaccagcgcccccgacacccgccccgcgcccggguccaccgcgcccccggcccacggcgugacgagcgcccccgacacccggcccgcccccggcuccaccgccccgcccgcccacggggucaccagcgcccccgacacgcgccccgccccgggcuccaccgcgccgcccgcccacggggugaccagcgcccccgacacccggcccgcccccggcuccacggcgcccccggcccacggggugaccagcgcccccgacacccgccccgcccccggcagcaccgccccgcccgcccacggcgucacguccgcgcccgacaaccggcccgcccuggggagcaccgccccgcccgugcacaacgugaccuccgccagcggcuccgcgagcggguccgccagcacccucguccacaacggcacguccgcccgcgccaccaccacccccgccagcaaguccacgcccuucagcaucccgucccaccacagcgacacccccaccacccuggcgucccacagcacgaagaccgacgccuccagcacccaccacuccagcgugccgccccugaccagcuccaaccacagcacgagcccccagcucuccaccgggguguccuucuucuuccugagcuuccacaucuccaaccugcaguucaacagcucccucgaggaccccagcaccgacuacuaccaggagcugcagcgcgacaucuccgagauguuccugcagaucuacaagcagggcggcuuccucgggcugagcaacaucaaguuccggcccggcuccgucguggugcagcugacccucgccuuccgcgaggggacgaucaacguccacgacguggagacccaguucaaccaguacaagaccgaggccgccagccgguacaaccugaccaucuccgacgugagcgucuccgacgugcccuucccguucagcgcgcaguccggcgccggcgugcccggguggggcaucgcccugcucguccuggugugcgugcuggucgcccucgccaucguguaccugaucgcgcuggccgugugccagugccgccggaagaacuacgggcagcucgacaucuuccccgcccgcgacacguaccaccccaugagcgaguacccgaccuaccacacccacggccgguacgucccgcccagcuccaccgaccgcagccccuacgagaagguguccgccgggaacggcggcagcucccugagcuacaccaaccccgcgguggccgccgccuccgccaaccuguga

SEQ ID NO: 1357 - RNA, 2136 nt, Artificial Sequence
  NM_032853_variant
augauggccgacgccaaguacgugcugugccgcugggagaagcggcucuggcccgcgaagguccuggcccgcaccgccaccagcacgaagaacaagcggcgcaaggaguacuuccuggccgugcagauccucucccuggaggagaagaucaaggucaagagcaccgagguggagauccuggagaagucccagaucgaggccaucgcgagcucccucgccagccagaacgaggugccggccgcgccccuggaggagcuggccuaccggcgcucccuccggguggcccuggacguccugagcgagggcuccaucuggagccaggaguccagcgccgggaccggccgcgccgaccggucccuccgcgggaagcccauggagcacgugagcucccccugcgacagcaacuccagcucccugccgcggggcgacgugcuggggagcagccgcccccaccggcgccggcccugcguccagcagucccucagcuccagcuucacgugcgagaaggaccccgagugcaagguggaccacaagaagggccugcgcaaguccgagaacccgcggggcccccuggugcuccccgccgggggcggggcgcaggacgagagcggcucccgcauccaccacaagaacuggacccuggccagcaagcggggcggcaacuccgcccagaaggccagccugugccucaacggcuccagccuguccgaggacgacaccgagcgcgacauggggagcaagggcggguccugggccgcgcccagccugccguccggcguccgggaggacgaccccugcgccaacgccgagggccacgaccccgggcucccccugggcagccugaccgccccgcccgcccccgagcccuccgcgugcagcgagccgggggagugccccgccaagaagcgcccccgccucgacggcagccagcggcccccggccgugcagcuggagcccauggccgccggggcggcccccucccccggcccgggccccgggccccgcgagagcgugaccccgcgguccacggcccgccuggggcccccgcccagccacgccuccgcggacgccacccggugccuccccugccccgacagccagaagcuggagaaggagugccaguccagcgaggaguccauggggagcaacuccaugcgcagcauccuggaggaggacgaggaggacgaggagccgccccggguccuccuguaccacgagccccgcuccuucgaggugggcaugcugguguggcacaagcacaagaaguaccccuucuggcccgccgucgucaagagcgugcggcagcgcgacaagaaggccuccgugcucuacaucgaggggcacaugaaccccaagaugaagggcuucaccgugagccugaagucccugaagcacuucgacugcaaggagaagcagacccuccugaaccaggcccgggaggacuucaaccaggacaucggcuggugcgugagccugaucacggacuaccgcguccggcucgggugcggcagcuucgcgggguccuuccuggaguacuacgccgccgacaucagcuacccggugcgcaaguccauccagcaggacguccugggcaccaagcucccccagcugagcaaggggucccccgaggagcccguggugggcugcccgcugggccagcggcagcccugccgcaagaugcuccccgaccggagccgcgccgcccgggaccgcgcgaaccagaagcuggucgaguacaucgugaaggccaagggggccgagucccaccuccgcgccauccucaagagccggaagcccucccgcuggcugcagaccuuccugagcuccagccaguacgugaccugcgucgagacguaccuggaggacgagggccagcuggaccugguggugaaguaccugcagggggucuaccaggaggugggcgccaaggugcuccagcggaccaacggcgaccgcauccgguucauccuggacguccugcucccggaggcgaucaucugcgccaucuccgccguggacgagguggacuacaagaccgccgaggagaaguacaucaaggggcccagccuguccuaccgcgagaaggagaucuucgacaaccagcugcucgaggagcggaaccgccggcgccgguga

SEQ ID NO: 1358 - RNA, 438 nt, Artificial Sequence
  AAD44697_variant
augaccgugcacaaccuguaccucuucgaccgcaacggcgucugccugcacuacagcgaguggcaccggaagaagcaggccgggauccccaaggaggaggaguacaagcugauguacggcaugcuguucuccauccgcagcuucguguccaagaugagcccgcucgacaugaaggacggguuccuggccuuccagaccucccgguacaagcuccacuacuacgagacgcccaccggcaucaagguggucaugaacaccgaccugggggugggccccauccgcgacgugcugcaccacaucuacagcgcgcucuacgucgagcugguggugaagaacccccugugcccgcucggccagaccguccaguccgagcuguuccggagccgccuggacuccuacgugcggagccuccccuucuucuccgcccgcgccggguga

SEQ ID NO: 1359 - RNA, 1395 nt, Artificial Sequence
  AAH02712_variant
augcccagcugcuccaccagcaccaugccgggcaugaucugcaagaaccccgaccuggaguucgacucccuccagcccugcuucuaccccgacgaggacgacuucuacuucgggggcccggacagcacgccgcccggggaggacaucuggaagaaguucgagcugcugcccaccccgccccucucccccagccgcggcuucgccgagcacuccagcgagcccccguccugggugaccgagaugcugcuggagaacgagcucugggggagccccgccgaggaggacgcguucggccugggcgggcugggcgggcucacccccaaccccgucauccugcaggacugcaugugguccggcuucagcgcccgcgagaagcuggagcgcgccguguccgagaagcuccagcacgggcggggcccgcccacggccggcagcaccgcccagucccccggggcgggcgccgccagccccgccgggcgcggccacggcggggcggccggcgccgggcgggccggcgccgcgcugccggccgagcuggcccaccccgccgccgagugcguggaccccgcggucguguuccccuucccggugaacaagcgcgagcccgcccccguccccgccgccccggccuccgcgcccgccgccgggcccgccguggccagcggcgcgggcaucgccgccccggccggggcgcccggcguggccccgccccggcccgggggccgccagaccuccgggggcgaccacaaggcccucagcaccagcggcgaggacacgcuguccgacagcgacgacgaggacgacgaggaggaggacgaggaggaggagaucgacgucgugaccguggagaagcggcgcuccagcuccaacaccaaggccgucaccacguucaccaucaccgugcggcccaagaacgccgcgcuggggcccggccgcgcccagagcuccgagcucauccugaagcggugccugcccauccaccagcagcacaacuacgccgcccccagccccuacguggaguccgaggacgccccgccccagaagaagaucaagagcgaggcgagcccccgcccccucaaguccgucaucccgcccaaggccaagucccugagcccccggaacuccgacagcgaggacuccgagcgccggcgcaaccacaacauccuggagcggcagcgccggaacgaccuccgcagcuccuuccugacccugcgcgaccacgugcccgagcucgugaagaacgagaaggccgccaaggucgugauccugaagaaggccacggaguacgugcacagccugcaggcggaggagcaccagcuccugcuggagaaggagaagcuccaggcccggcagcagcagcugcugaagaagaucgagcacgcccggaccugcuga

SEQ ID NO: 1360 - RNA, 3132 nt, Artificial Sequence
  AAC78645_variant
augccccugcucgagggcagcgugggggucgaggaccuggugcugcucgagccgcugguggaggagucccugcucaagaaccugcagcugcgcuacgagaacaaggagaucuacaccuacaucggcaacgucgugaucagcgugaaccccuaccagcagcuccccaucuacgggcccgaguucaucgccaaguaccaggacuacaccuucuacgagcugaagccgcacaucuacgcccuggcgaacgucgccuaccagucccuccgggaccgcgaccgggaccagugcauccugaucacgggcgagagcggguccggcaagaccgaggccagcaagcuggugauguccuacguggccgccgucugcggcaagggggagcaggucaacagcgugaaggagcagcuccugcaguccaaccccgugcuggaggcguucggcaacgccaagaccauccgcaacaacaacagcucccgguucgggaaguacauggacaucgaguucgacuucaagggcagcccccucgggggcgugaucaccaacuaccugcuggagaagucccgccucgugaagcagcugaagggcgagcggaacuuccacaucuucuaccagcugcucgccggggccgacgagcagcugcugaaggcgcucaagcuggagcgcgacacgaccggcuacgccuaccugaaccacgaggucagccggguggacgggauggacgacgccuccagcuuccgcgccgugcaguccgccauggcggucaucggcuucagcgaggaggagauccgccaggugcucgaggugaccuccaugguccugaagcugggcaacgugcucguggccgacgaguuccaggccagcgggauccccgccagcggcauccgggacgggcggggcguccgcgagaucggggagauggugggccugaacuccgaggaggucgagcgggcccugugcagccgcaccauggagacggcgaaggagaagguggugaccgcccucaacgucaugcaggcccaguacgcccgggacgcccuggcgaagaacaucuacucccgccuguucgacuggaucgugaaccggaucaacgagagcaucaaggugggcaucggggagaagaagaaggucaugggcgugcucgacaucuacggguucgagauccuggaggacaacuccuucgagcaguucgugaucaacuacugcaacgagaagcugcagcaggucuucaucgagaugacccucaaggaggagcaggaggaguacaagcgcgagggcaucccguggaccaagguggacuacuucgacaacgggaucaucugcaagcugaucgagcacaaccagcggggcauccuggccaugcucgacgaggagugccugcgccccggcguggucagcgacuccacguuccuggccaagcucaaccagcuguucagcaagcacgggcacuacgaguccaaggugacccagaacgcccagcgccaguacgaccacaccaugggccugagcugcuuccggaucugccacuacgccgggaaggugaccuacaacgucacguccuucaucgacaagaacaacgaccuccucuuccgcgaccugcugcaggcgauguggaaggcccagcacccccuccugcggagccuguuccccgagggcaacccgaagcaggccucccucaagcgcccgcccaccgccggggcgcaguucaagagcuccguggccauccugaugaagaaccuguacagcaagucccccaacuacauccggugcaucaagcccaacgagcaccagcagcgcggccaguucagcuccgaccucguggccacccaggcccgguaccugggccugcucgagaacguccgcgugcggcgcgccggguacgcgcaccggcagggcuacgggcccuuccuggagcgcuaccggcugcucagccgcagcaccuggccccacuggaacggcggcgaccgggaggggguggagaagguccugggcgagcuguccaugagcuccggggagcucgccuucggcaagacgaagaucuucauccgcagccccaagacccuguucuaccuggaggagcagcggcgccuccggcugcagcagcuggccacccucauccagaagaucuaccgcggguggcgcugccggacccacuaccagcugaugcgcaagucccagauccugaucagcuccugguuccggggcaacaugcagaagaagugcuacggcaagaucaaggccagcgugcuccugauccaggccuucgugcgcggguggaaggcgcggaagaacuaccgcaaguacuuccgguccgaggccgcccugacgcucgccgacuucaucuacaagagcaugguccagaaguuccugcugggccucaagaacaaccugccguccaccaacgugcuggacaagaccuggcccgccgcgcccuacaagugccucagcaccgccaaccaggagcugcagcagcuguucuaccaguggaagugcaagcgcuuccgggaccagcucucccccaagcaggucgagauccugcgcgagaagcugugcgccagcgagcuguucaaggggaagaaggccuccuacccgcagagcgugcccauccccuucugcggcgacuacaucgggcugcagggcaaccccaagcugcagaagcucaagggcggggaggagggcccggugcugauggcggaggccgugaagaaggucaaccgggggaacggcaagacguccagccgcauccugcuccugaccaaggggcacgugauccugaccgacaccaagaagucccaggccaagaucgugaucggccucgacaacgucgccggcgugagcgugacgagccugaaggacgggcuguucucccuccaccugagcgagauguccagcgucggcuccaagggggacuuccugcucgugagcgagcacgugaucgagcugcugaccaagauguaccgggccguccucgacgcgacccagcgccagcugaccgugacggugaccgagaaguucuccguccgguucaaggagaacagcguggccgugaaggucgugcagggccccgccgggggcgacaacuccaagcugcgcuacaagaagaagggcagccacugccucgaggugaccguccaguga

SEQ ID NO: 1361 - RNA, 3411 nt, Artificial Sequence
  AAH53558_variant
auggccaagauggaggugaagaccagccugcucgacaacaugaucggcgucggggacauggugcugcuggagccccucaacgaggagaccuucaucaacaaccugaagaagcgcuucgaccacuccgagaucuacacguacaucggcagcguggucaucuccgugaaccccuaccggagccugcccaucuacucccccgagaagguggaggaguaccgcaaccggaacuucuacgagcucagcccccacaucuucgcccuguccgacgaggcguaccgcagccugcgggaccaggacaaggaccagugcauccucaucaccggggaguccggcgccgggaagaccgaggccagcaagcuggucauguccuacguggccgccgugugcggcaagggcgcggaggucaaccaggugaaggagcagcugcuccagagcaacccggugcuggaggccuucgggaacgccaagaccguccgcaacgacaacuccagccgguucggcaaguacauggacaucgaguucgacuucaagggggacccccugggcggggugaucuccaacuaccuccuggagaagucccgcguggucaagcagccccggggcgagcgcaacuuccacguguucuaccagcugcucagcggcgccagcgaggagcugcugaacaagcucaagcuggagcgggacuucucccgcuacaacuaccugagccucgacagcgcgaaggugaacggggucgacgacgccgccaacuuccggacggugcgcaacgccaugcagaucgugggcuucauggaccacgaggccgaguccguccuggcggugguggccgccguccugaagcucgggaacaucgaguucaagcccgagagccgggugaacggccuggacgaguccaagaucaaggacaagaacgagcugaaggagaucugcgagcucaccggcaucgaccagagcguccuggagcgcgccuucuccuuccggaccguggaggccaagcaggagaaggugagcaccacgcugaacgucgcgcaggccuacuacgcccgcgacgcccucgccaagaaccuguacucccggcuguucagcuggcucgugaaccgcaucaacgaguccaucaaggcgcagaccaaggugcggaagaaggucaugggggugcuggacaucuacggcuucgagaucuucgaggacaacagcuucgagcaguucaucaucaacuacugcaacgagaagcugcagcagaucuucaucgagcucacccugaaggaggagcaggaggaguacauccgcgaggacaucgaguggacccacaucgacuacuucaacaacgccaucaucugcgaccugaucgagaacaacacgaacgggauccucgccaugcuggacgaggagugccugcgcccgggcaccgugaccgacgagaccuuccucgagaagcugaaccaggucugcgccacgcaccagcacuucgagucccggaugagcaagugcucccgcuuccugaacgacaccagccucccccacuccugcuuccggauccagcacuacgccgggaaggugcuguaccagguggagggcuucgucgacaagaacaacgaccugcuguaccgcgaccucagccaggcgauguggaaggccucccacgcccugaucaagagccuguuccccgagggcaaccccgccaagaucaaccucaagcggccgcccaccgcggggucccaguucaaggccagcguggccacccugaugaagaaccugcagacgaagaaccccaacuacauccgcugcaucaagcccaacgacaagaaggccgcccacaucuucaacgaggcgcucgugugccaccagauccgguaccugggccugcucgagaacguccgcgugcggcgcgccggguacgccuuccggcaggccuacgagccgugccuggagcgcuacaagaugcugugcaagcagaccuggccccacuggaagggccccgcccggagcgggguggagguccucuucaacgagcuggagauccccguggaggaguacuccuucggccgcagcaagaucuucauccggaacccgcgcacccuguucaagcucgaggaccugcggaagcagcgccuggaggaccucgcgacccugauccagaagaucuaccggggcuggaagugccgcacgcacuuccugcucaugaagaagucccagaucgugaucgccgccugguaccgccgguacgcccagcagaagcgcuaccagcagaccaagagcuccgcccuggucauccagagcuacauccggggguggaaggcgcgcaagauccugcgggagcucaagcaccagaagcgcugcaaggaggccgugaccaccaucgccgccuacuggcacggcacgcaggcgcggcgcgagcugcggcgccugaaggaggaggcccggaacaagcacgccaucgccgugaucugggccuacuggcucggguccaaggcgcgccgggagcugaagcgccugaaggaggaggcccggcgcaagcacgccgucgccgugaucugggccuacuggcucggccugaaggugcggcgcgaguaccggaaguucuuccgcgcgaacgccgggaagaagaucuacgaguucacccugcagcggaucguccagaaguacuuccucgagaugaagaacaagaugcccagccugucccccaucgacaagaacuggcccagccgcccguaccuguuccucgacuccacccacaaggagcugaagcgcaucuuccaccuguggcggugcaagaaguaccgcgaccaguucaccgaccagcagaagcucaucuacgaggagaagcuggaggccagcgagcuguucaaggacaagaaggcccucuaccccuccagcgugggccagcccuuccagggcgccuaccuggagaucaacaagaaccccaaguacaagaagcugaaggacgcgaucgaggagaagaucaucaucgccgagguggucaacaagaucaaccgggccaacgggaaguccacgagccgcaucuuccuccugaccaacaacaaccugcuccuggccgaccagaaguccggccagaucaagagcgaggugccgcugguggacgucaccaaggugagcauguccagccagaacgacggguucuucgcggugcaccucaaggagggcuccgaggccgccagcaagggcgacuuccuguucuccagcgaccaccugaucgagauggccaccaagcucuaccggacgacccugucccagaccaagcagaagcugaacaucgagaucagcgacgaguuccucguccaguuccgccaggacaaggugugcgugaaguucauccaggggaaccagaagaacggcuccgucccgaccugcaagcggaagaacaaccgccugcuggagguggccgugcccuga

SEQ ID NO: 1362 - RNA, 3192 nt, Artificial Sequence
  CCDS42226.1_variant
auggcccuccagguggagcucguccccaccggcgagaucauccgcguggugcacccgcaccggcccugcaagcuggcccuggggagcgacggcguccgcgugaccauggaguccgcgcucacggcccgggaccgcguggggguccaggacuucgugcugcuggagaacuucaccagcgaggccgccuucaucgagaaccuccggcgccgguuccgcgagaaccugaucuacaccuacaucggccccgugcuggucuccgugaaccccuaccgggaccuccagaucuacagccgccagcacauggagcgguaccgcgggguguccuucuacgaggucccgccccaccuguucgccguggcggacaccguguaccgggcccugcgcacggagcggcgcgaccaggccgucaugaucagcggcgaguccggcgccgggaagaccgaggcgaccaagcggcuccugcaguucuacgccgagaccugccccgcccccgagcgcggcggggccgugcgggaccgccugcuccagagcaacccggugcuggaggccuucggcaacgcgaagacgcugcggaacgacaacuccagccgcuucgggaaguacauggacguccaguucgacuucaagggcgcccccgugggcgggcacauccucuccuaccugcuggagaagucccgcgugguccaccagaaccacggcgagcggaacuuccacaucuucuaccagcuccuggagggcggggaggaggagacccugcgccggcucggccuggagcgcaacccccaguccuaccuguaccucgugaaggggcagugcgccaaggugagcuccaucaacgacaagagcgacuggaaggucgugcggaaggcccugaccgucaucgacuucaccgaggacgagguggaggaccugcucuccaucguggccagcguccugcaccugggcaacauccacuucgcggccaacgaggaguccaacgcccaggugacgaccgagaaccagcucaaguaccugacccgccugcucagcguggaggggagcacccugcgggaggcccugacgcaccgcaagaucaucgccaagggcgaggagcuccugagcccccugaaccucgagcaggcggccuacgcccgggacgcccuggccaaggcggucuacagccgcaccuucaccuggcugguggggaagaucaaccggucccucgccagcaaggacguggaguccccgagcuggcgcuccaccacgguccugggccugcucgacaucuacggcuucgagguguuccagcacaacagcuucgagcaguucugcaucaacuacugcaacgagaagcugcagcagcuguucaucgagcugacccucaaguccgagcaggaggaguacgaggccgaggggaucgccugggagcccgugcaguacuucaacaacaagaucaucugcgaccuggucgaggagaaguucaagggcaucaucagcauccuggacgaggagugccuccggcccggggaggcgaccgaccugaccuuccuggagaagcucgaggacacggugaagcaccacccccacuuccugacccacaagcuggccgaccagcgcacccggaagucccucggccgcggggaguuccggcugcugcacuacgccggcgaggugaccuacagcgucacgggcuuccucgacaagaacaacgaccugcuguuccgcaaccucaaggagaccaugugcuccagcaagaacccgaucaugucccagugcuucgaccggagcgagcuguccgacaagaagcgccccgagaccguggccacccaguucaagaugagccugcuccagcugguggagauccugcaguccaaggagcccgccuacguccgcugcaucaagcccaacgacgcgaagcagccggggcgguucgacgaggugcucauccgccaccaggugaaguaccugggccugcucgagaaccugcggguccgccgggccggguucgccuaccgccggaaguacgaggccuuccugcagcgcuacaagagccucugccccgagacguggcccaccugggccggccggccccaggacgggguggcggugcugguccgccaccugggcuacaagccggaggaguacaagaugggccggaccaagaucuucauccgcuuccccaagacccucuucgccacggaggacgcccuggaggugcggcgccagagccuggccaccaagauccaggccgcguggcggggguuccacuggcgccagaaguuccuccgggugaagcgcuccgccaucugcauccagagcugguggcggggcacccuggggcgccggaaggccgccaagcgcaagugggcggcccagaccauccgccggcugauccgcggcuucguccuccggcacgcgccccgcugccccgagaacgccuucuuccuggaccacgugcggaccuccuuccugcucaaccugcgccggcagcugccgcagaacgugcucgacacgagcuggcccacgcccccgcccgcccugcgcgaggccuccgagcugcuccgggagcugugcaucaagaacauggucuggaaguacugccgcagcaucucccccgaguggaagcagcagcugcagcagaaggccguggccagcgagaucuucaagggcaagaaggacaacuacccccaguccgugccgcggcuguucaucagcacccgccuggggaccgacgagaucagcccccggguccugcaggcccucggcuccgagcccauccaguacgccgugcccguggucaaguacgaccgcaagggguacaagccgcggucccgccagcugcugcucacccccaacgcgguggugaucgucgaggacgccaaggugaagcagcggaucgacuacgccaaccugaccggcaucagcguguccagccuguccgacagccucuucguccugcacgugcagcgcgccgacaacaagcagaagggggacgugguccugcagagcgaccacgugaucgagacccucaccaagacggcccuguccgcgaaccgggugaacagcaucaacaucaaccagggcuccaucaccuucgccggcgggcccggccgcgacgggaccaucgacuucacccccggcagcgagcugcucaucacgaaggccaagaacgggcaccuggccgucguggcgccgcgccugaacucccgguga

SEQ ID NO: 1363 - RNA, 3021 nt, Artificial Sequence
  AAI46764_variant
auggccgagcaggagagccuggaguucggcaaggccgacuucgugcucauggacaccgucuccaugcccgaguucauggcgaaccugcgccugcgguucgagaaggggcgcaucuacaccuucaucggcgaggugguggucagcgugaacccguacaagcuccugaacaucuacgggcgggacacgaucgagcaguacaagggccgcgagcuguacgagcggccgccccaccucuucgccaucgccgacgccgccuacaaggcgaugaagcgccgguccaaggacacgugcaucgugaucagcggggaguccggcgccggcaagaccgaggccagcaaguacaucaugcaguacaucgccgcgaucaccaaccccucccagcgcgccgaggucgagcgggugaagaacaugcugcucaagagcaacugcgugcuggaggccuucgggaacgccaagaccaaccgcaacgacaacuccagccgguucggcaaguacauggacaucaacuucgacuucaagggggaccccaucggcgggcacaucaacaacuaccugcuggagaagucccgcgucaucgugcagcagcccggcgagcggagcuuccacuccuucuaccagcuccugcagggcgggagcgagcagaugcugcgcucccuccaccuccagaagucccugagcagcuacaacuacauccacgugggcgcccagcugaaguccagcaucaacgacgcggccgaguuccgggucguggccgacgccaugaaggugaucggguucaagcccgaggagauccagaccgucuacaagauccuggccgcgauccugcaccucggcaaccugaaguucgugguggacggcgacacgccccugaucgagaacgggaaggucgugagcaucaucgccgagcuccuguccaccaagaccgacaugguggagaaggcccugcucuaccgcaccgucgccaccggccgggacaucaucgacaagcagcacaccgagcaggaggccagcuacgggcgcgacgcguucgccaaggccaucuacgagcggcuguucugcuggaucgugacgcgcaucaacgacaucaucgaggugaagaacuacgacaccaccauccacggcaagaacaccgucaucggggugcuggacaucuacggcuucgagaucuucgacaacaacuccuucgagcaguucugcaucaacuacugcaacgagaagcuccagcagcuguucauccagcugguccucaagcaggagcaggaggaguaccagcgggagggcaucccguggaagcacaucgacuacuucaacaaccagaucaucguggaccugguggagcagcagcacaaggggaucaucgccauccuggacgacgccugcaugaacgucggcaaggugacggacgagauguuccucgaggcgcugaacagcaagcuggggaagcacgcccacuucuccagccgcaagcucugcgccuccgacaagauccuggaguucgaccgcgacuuccggauccgccacuacgccggcgacguggucuacagcgugaucggguucaucgacaagaacaaggacacccuguuccaggacuucaagcggcucauguacaacuccagcaaccccgugcugaagaacauguggcccgagggcaagcuguccaucaccgaggucaccaagcgcccccucacggcggccacccuguucaagaacagcaugaucgcccugguggacaaccucgccuccaaggagccguacuacgugcggugcaucaagcccaacgacaagaaguccccgcagaucuucgacgacgagcgcugccggcaccaggucgaguaccugggccugcuggagaacgugcgcgugcggcgcgccggguucgcguuccggcagaccuacgagaaguuccuccaccgcuacaagaugaucagcgaguucaccuggcccaaccacgaccugcccagcgacaaggaggccgucaagaagcugaucgagcggugcggcuuccaggacgacguggccuacgggaagacgaagaucuucauccgcacgccccggacccucuucacccuggaggagcugcgcgcccagaugcucauccggaucgugcuguuccugcagaaggucuggcgcggcacccucgcccggaugcgcuacaagcgcaccaaggcggcccugaccaucauccgguacuaccgccgguacaaggugaaguccuacauccacgagguggcccgccgguuccacggggucaagaccaugcgcgacuacggcaagcacgugaaguggcccagcccgcccaaggugcugcggcgcuucgaggaggcccuccagacgaucuucaaccgguggcgcgccucccagcugaucaagagcauccccgcgagcgaccugccccagguccgggccaagguggccgccguggagaugcucaagggccagcgcgcggaccuggggcugcagcgggccugggagggcaacuaccucgccuccaagcccgacaccccgcagaccagcgggaccuucguccccguggccaacgagcugaagcgcaaggacaaguacaugaacgugcuguucuccugccacguccggaaggugaaccgcuucagcaagguggaggaccgggccaucuucgucacggaccgccaccucuacaagauggaccccaccaagcaguacaaggugaugaagaccaucccccuguacaaccugaccggccucuccgugagcaacggcaaggaccagcuggucguguuccacaccaaggacaacaaggaccugaucgugugccucuucuccaagcagccgacgcacgagagccggaucggggagcuggucggcgugcuggugaaccacuucaaguccgagaagcgccaccuccaggucaacgugaccaaccccgugcagugcagccugcacgggaagaagugcaccgucuccguggagacccggcugaaccagccccagccggacuucacgaagaaccgcagcggcuucauccucuccgugcccgggaacuga

SEQ ID NO: 1364 - RNA, 3327 nt, Artificial Sequence
  CCDS32254.1_variant
augggcagcaaggggguguaccaguaccacuggcagucccacaacgucaagcacagcggcguggacgacauggugcugcucuccaagaucaccgagaacagcaucgucgagaaccugaagaagcgcuacauggacgacuacaucuucaccuacaucggguccgugcugaucagcgugaaccccuucaagcagaugccguacuucggcgagaaggagaucgagauguaccagggggccgcccaguacgagaaccccccccacaucuacgcgcucgccgacaacauguaccggaacaugaucaucgaccgcgagaaccagugcgucaucaucuccggcgagagcggcgccgggaagacgguggccgccaaguacaucauguccuacaucagccggguguccggcgggggcaccaagguccagcacgugaaggacaucauccugcagagcaacccccugcucgaggcguucgggaacgccaagaccgugcgcaacaacaacuccagccgguucggcaaguacuucgagauccaguucuccccgggcggggagcccgacggcgggaagaucagcaacuuccugcuggagaagucccgcgucgugaugcggaaccccggcgagcgcagcuuccacaucuucuaccagcucaucgagggcgccuccgccgagcagaagcacagccuggggaucaccagcauggacuacuacuacuaccugucccucagcggcuccuacaagguggacgacaucgacgaccggcgcgaguuccaggagacgcugcacgcgaugaacgucaucgggaucuucgccgaggagcagacccuggugcuccagaucguggccggcauccugcaccuggggaacaucagcuucaaggaggucggcaacuacgccgccguggaguccgaggaguuccucgcguuccccgccuaccugcugggcaucaaccaggaccggcucaaggagaagcugaccagccgccagauggacuccaagugggggggcaagagcgaguccauccacgugacccugaacgucgagcaggccugcuacacgcgggacgcccucgccaaggcgcugcacgcccgcguguucgacuuccugguggacagcaucaacaaggccauggagaaggaccacgaggaguacaacaucgggguccucgacaucuacggcuucgagaucuuccagaagaacggguucgagcaguucugcaucaacuucgugaacgagaagcugcagcagaucuucaucgagcugacccucaaggccgagcaggaggaguacguccaggagggcauccgguggaccccgaucgaguacuucaacaacaagaucgugugcgaccugaucgagaacaaggugaacccccccggcaucauguccauccuggacgacgucugcgccaccaugcacgcggugggggagggcgccgaccagacgcuccugcagaagcugcagaugcagaucgggagccacgagcacuucaacuccuggaaccagggcuucaucauccaccacuacgccgggaaggugagcuacgacauggacggcuucugcgagcgcaaccgggacguccucuucauggaccugaucgagcugaugcaguccagcgagcuccccuucaucaagucccuguucccggagaaccugcaggccgacaagaagggccgccccaccaccgccgggagcaagaucaagaagcaggcgaacgaccucguguccacccugaugaagugcacgccccacuacauccggugcaucaagcccaacgagaccaagaagccgcgcgacugggaggagagccgggugaagcaccaggucgaguaccugggccucaaggagaacauccgcgugcgccgggccggguacgccuaccgccggaucuuccagaaguuccugcagcgcuacgccauccugaccaaggcgaccuggcccagcuggcagggcgaggagaagcagggcgugcuccaccugcugcaguccgucaacauggacagcgaccaguuccagcuggggcgguccaagguguucaucaaggcccccgagagccucuuccugcuggaggagaugcgcgagcggaaguacgacggcuacgcccgcgugauccagaaguccuggcggaaguucgucgcccgcaagaaguacgugcagaugcgggaggaggccagcgaccuccugcugaacaagaaggagcgccggcgcaacuccaucaaccggaacuucaucggggacuacaucggcauggaggagcaccccgagcuccagcaguucguggggaagcgcgagaagaucgacuucgcggacacggucaccaaguacgaccggcgcuucaagggcgugaagcgggaccugcugcucaccccgaagugccuguaccugaucggccgcgagaaggugaagcaggggcccgacaagggccucgucaaggaggugcugaagcgcaagaucgagaucgagcggauccugagcgugucccucagcaccaugcaggacgacaucuucauccugcacgagcaggaguacgacucccugcucgagagcgucuucaagacggaguuccugucccugcucgccaagcgcuacgaggagaagacccagaagcagcugccccugaaguucagcaacacccucgagcugaagcugaagaaggagaacugggggcccugguccgccggcgggagccggcaggugcaguuccaccagggcuucggcgaccucgccgugcugaagccguccaacaagguccugcaggugagcaucgggcccggccuccccaagaacagccgccccacccggcgcaacacgacccagaacaccggguacuccagcggcacccagaacgccaacuacccggugcgggcggccccccccccgcccggguaccaccagaacggcgucauccgcaaccaguacgugcccuacccccacgccccgggcucccagcggagcaaccagaagucccuguacacgagcauggcccgccccccccugccccggcagcaguccaccagcuccgaccgcgugagccagaccccggagucccucgacuuccugaagguccccgaccagggggccgcgggcgugcggcgccagaccacgagccggccccccccggccgggggccgccccaagccccagcccaagccgaagccccaggugccccagugcaaggcccuguacgccuacgacgcgcaggacaccgacgagcucuccuucaacgccaacgacaucaucgacaucaucaaggaggaccccagcgggugguggaccggccggcugcgcggcaagcaggggcuguucccgaacaacuacgucaccaagaucuga

SEQ ID NO: 1365 - RNA, 3297 nt, Artificial Sequence
  AAH28071_variant
augggcagcaaggagcgcuuccacuggcagucccacaacgugaagcagagcggggucgacgacauggugcugcucccccagaucaccgaggacgccaucgccgcgaaccugcggaagcgcuucauggacgacuacaucuucaccuacaucggcuccgugcugaucagcgucaacccguucaagcagaugcccuacuucacggaccgggagaucgaccucuaccagggggccgcccaguacgagaacccgccccacaucuacgcccugaccgacaacauguaccgcaacaugcugaucgacugcgagaaccagugcgugaucaucuccggcgagagcggggccggcaagaccguggcggccaaguacaucaugggcuacaucuccaaggucagcgggggcggggagaaggugcagcacgugaaggacaucauccuccaguccaacccccugcuggaggccuucggcaacgccaagaccguccggaacaacaacagcucccgcuucgggaaguacuucgagauccaguucagccggggcggcgagcccgacgggggcaagaucuccaacuuccuccuggagaagucccgcguggugaugcagaacgagaacgagcggaacuuccacaucuacuaccagcugcucgagggggcgucccaggagcagcgccagaaccugggccugaugacgcccgacuacuacuacuaccucaaccagagcgacaccuaccaggucgacggcaccgacgaccgguccgacuucggggagacccugagcgccaugcaggucaucggcaucccgcccuccauccagcagcuggugcuccagcuggucgccgggauccugcaccucggcaacaucagcuucugcgaggacgggaacuacgcccgcguggagagcguggaccugcuggccuuccccgcguaccuccugggcaucgacuccggccggcugcaggagaagcucacgagccgcaagauggacucccgguggggcgggcgcagcgaguccaucaacgucacccugaacguggagcaggccgccuacacccgggacgcccuggccaaggggcucuacgcgcgccuguucgacuuccugguggaggccaucaaccgggccaugcagaagccccaggaggaguacagcaucggcgugcucgacaucuacggguucgagaucuuccagaagaacggcuucgagcaguucugcaucaacuucgugaacgagaagcugcagcagaucuucaucgagcugacccucaaggccgagcaggaggaguacgugcaggagggcauccgcuggacgcccauccaguacuucaacaacaaggucgugugcgaccugaucgagaacaagcugagcccgcccgggaucaugagcguccucgacgacgugugcgccaccaugcacgcgaccggcgggggcgccgaccagacccugcugcagaagcuccaggccgccguggggacgcacgagcacuucaacuccuggagcgccggcuucgucauccaccacuacgcgggcaagguguccuacgacgugagcggguucugcgagcggaaccgcgacguccuguucuccgaccugaucgagcucaugcagaccagcgagcaggccuuccugcgcaugcuguuccccgagaagcucgacggcgacaagaaggggcggcccuccaccgccggcagcaagaucaagaagcaggccaacgaccugguggcgacccugaugcgcugcacgccgcacuacauccggugcaucaagcccaacgagaccaagcgcccccgggacugggaggagaaccgcgugaagcaccaggucgaguaccugggccucaaggagaacauccgggugcgccgggccggguucgccuaccgccggcaguucgccaaguuccugcagcgcuacgccauccugacccccgagaccuggccgcgguggcgcggcgacgagcggcagggggugcagcaccuccugcgcgcggucaacauggagcccgaccaguaccagaugggcuccacgaagguguucgugaagaaccccgagagccuguuccuccuggaggagguccgggagcgcaaguucgacggguucgcccggaccauccagaaggccuggcgccgccacguggccgugcggaaguacgaggagaugcgcgaggaggccuccaacauccugcucaacaagaaggagcggcgccggaacagcaucaaccgcaacuucgucggcgacuaccugggccuggaggagcggcccgagcuccgccaguuccuggggaagcgggagcgcguggacuucgcggacagcgugaccaaguacgaccggcgcuucaagccgaucaagcgggaccugauccucacccccaagugcgucuacgugaucggccgcgagaaggugaagaaggggcccgagaagggccaggucugcgaggugcugaagaagaagguggacauccaggcccugcgcggggucucccucagcacgcggcaggacgacuucuucauccugcaggaggacgccgccgacuccuuccuggagagcguguucaagaccgaguucgugucccuccugugcaagcgguucgaggaggccacccgccggccccugccgcucaccuucagcgacacgcugcaguuccgcgucaagaaggagggcuggggcgggggcgggacccgguccgugaccuucagccgcggcuucggggaccuggcggugcucaaggucggcggccgcacccugacgguguccgugggggacggccugcccaagagcuccaagcccacccggaaggggauggccaagggcaagccgcgccggagcucccaggcccccacccgcgccgcgcccgcgcccccgcgggggauggaccgcaacggcgucccgcccagcgcccggggcgggccccucccccuggagaucauguccggcgggggcacccaccgcccgccccggggcccgcccagcaccucccugggggccagccgccggccccgcgcccggccgcccagcgagcacaacacggaguuccucaacgugcccgaccagggcauggccgggaugcagcgcaagcgguccgugggccagcgccccguccccggggugggccggcccaagccccagccccgcacccacggcccccggugccgcgcccuguaccaguacguggggcaggacgucgacgagcugagcuucaacgugaacgaggugaucgagauccucauggaggaccccuccggcugguggaaggggcgccugcacggccaggaggggcuguucccgggcaacuacgucgagaagaucuga

SEQ ID NO: 1366 - RNA, 3057 nt, Artificial Sequence
  CCDS34629.1_variant
auggaggacgaggagggccccgaguacgggaagccggacuucgugcugcucgaccaggucaccauggaggacuucaugcgcaaccugcagcugcgguucgagaagggccgcaucuacaccuacaucggggaggugcucgugagcgucaaccccuaccaggagcugccccuguacggccccgaggccaucgcccgguaccaggggcgcgagcucuacgagcggccgccccaccuguacgcgguggccaacgccgccuacaaggccaugaagcaccgcucccgggacacgugcaucgugaucagcggcgaguccggcgcggggaagaccgaggccagcaagcacaucaugcaguacaucgccgccgucaccaaccccucccagcgcgcggagguggagcgggugaaggacguccugcucaagagcaccugcgugcuggaggccuucggcaacgcccgcacgaaccggaaccacaacuccagccgcuucgggaaguacauggacaucaacuucgacuucaagggcgaccccaucgggggccacauccacuccuaccugcucgagaagagccgggugcugaagcagcacgucggcgagcgcaacuuccacgccuucuaccagcugcuccggggguccgaggacaagcagcugcacgagcugcaccucgagcgcaacccggccguguacaacuucacccaccagggcgcggggcugaacaugaccgugcacagcgcccuggacuccgacgagcagagccaccaggccgucaccgaggccaugcgggugaucggcuucucccccgaggagguggagagcguccaccgcauccucgccgcgauccugcaccugggcaacaucgaguucguggagacggaggaggggggccuccagaaggaggggcuggccguggccgaggaggcccuggucgaccacguggccgagcucaccgcgaccccccgggaccuggugcugcgcucccuccuggcccggaccgucgccagcggcgggcgcgagcugaucgagaagggccacacggccgccgaggcguccuacgcccgcgacgccugcgccaaggcgguguaccagcggcucuucgagugggucgugaaccgcaucaacagcgugauggagccccggggccgcgacccgcggcgcgacgggaaggacaccgucaucggcgugcuggacaucuacggguucgagguguuccccgucaacagcuucgagcaguucugcaucaacuacugcaacgagaagcugcagcagcucuucauccagcugauccugaagcaggagcaggaggaguacgagcgggagggcaucaccuggcaguccguggaguacuucaacaacgccaccaucguggaccucgucgagcgcccccaccgggggauccuggccgugcuggacgaggccugcagcuccgccggcacgaucaccgaccgcaucuuccuccagacccuggacaugcaccaccggcaccaccugcacuacaccagccgccagcucugccccacggacaagaccauggaguucggccgggacuuccgcaucaagcacuacgcgggggacgugaccuacuccgucgagggcuucaucgacaagaaccgggacuuccuguuccaggacuucaagcgccugcucuacaacagcaccgacccgacgcugcgggccauguggcccgacgggcagcaggacaucaccgaggugaccaagcgcccccugaccgccggcacgcuguucaagaacuccaugguggcccucgucgagaaccuggccagcaaggagcccuucuacgugcggugcaucaagccgaacgaggacaagguggcggggaagcuggacgagaaccacugccgccaccaggucgccuaccucggccugcuggagaacgugcgcgugcggcgcgccggcuucgccucccggcagcccuacagccgcuuccuccugcgguacaagaugaccugcgaguacaccuggcccaaccaccugcucggguccgacaaggccgcggucagcgcccugcuggagcagcacggccuccagggggacguggccuucggccacuccaagcuguucauccgcagcccccggacccuggugacgcucgagcagucccgcgcccggcugaucccgaucaucguccugcuccugcagaaggcguggcgcggcacccuggcccgguggcgcugccggcgccuccgggccaucuacaccaucaugcgcugguuccggcgccacaaggugcgggcccaccuggccgagcugcagcgccgguuccaggcggcccgccagcccccccucuacgggcgcgaccugguguggccccugccgcccgccguccuccagcccuuccaggacaccugccacgcccuguucugccgguggcgcgcccggcagcuggugaagaacaucccgcccagcgacaugccccagaucaaggcgaagguggccgccaugggcgcccuccaggggcugcgccaggacuggggcugccggcgcgccugggcgcgggacuaccuguccagcgccacggacaaccccaccgccuccagccucuucgcccagcgccugaagacccugcaggacaaggacggguucggcgcgguccucuucagcucccacgugcggaaggugaaccgcuuccacaagauccggaaccgcgcccugcugcucaccgaccagcaccuguacaagcuggacccggaccggcaguaccgcgucaugcgggccgugccccucgaggccgugaccggccugagcgucacguccgggggcgaccagcugguggugcuccacgcccgcgggcaggacgaccuggucgugugccugcaccggagccgccccccccucgacaaccgggugggcgagcuggucggggugcuggcggcccacugccagggcgagggccgcacccucgaggugcgcgucuccgacugcaucccgcugagccaccggggggugcgccggcugaucuccguggagccccgccccgagcagcccgagccggacuuccggugcgcccgcggcagcuucacccuccuguggcccucccgguga

SEQ ID NO: 1367 - RNA, 3069 nt, Artificial Sequence
  CCDS53826.1_variant
auggagggcgcccugaccgcccgcgacaagguggggguccaggacuucgugcuccuggacgcguacaccagcgaguccgccuucguggacaaccugcggaagcgcuucagcgagaaccucaucuacacguacaucggcacccugcuggucuccgugaaccccuaccaggagcucgggaucuacaccgugagccagauggagcuguaccagggcgucaacuucuucgagcugccgccccacguguacgccaucgccgacaacgccuaccggaugaugugcgcggagcucaacaaccacuucauccugaucuccggggagagcggcgccggcaagaccgaggccuccaagaagauccuggaguacuucgccgugacgugccccaugacccagagccuccagaucgcgcgcgaccggcugcuguucuccaaccccguccucgaggccuucgggaacgcccgcacccugcggaacgacaacagcucccgcuucggcaaguacauggacauccaguucgacuuccaggggaucccggugggcgggcacaucaucagcuaccugaucgagaagucccggguggucuaccagaacgagggcgagcgcaacuuccacaucuucuaccagcuccuggccggcggggaggaggagcggcugagcuaccucggccuggagcgcgacccccagcuguacaaguaccucucccaggggcacugcgccaaggagagcuccaucagcgacaagaacgacuggaagaccguguccaacgcguucagcgugaucgacuucacggaggccgaccuggagaaccuguucggcaucaucgccagcguccuccaccugggcaacaucggguucgaggaggacgaccagggcugcgccaccauccccgacacccacgagaucaaguggaucgccaagcugcucggggugcaccccuccgugcugcuggaggcgcucacccaccggaagaucgaggccaagacggaggaggucaucugcccgcugacccuggagcucagcguguacgcccgcgacgccauggccaaggcgguguacggccggaccuucaccuggcuggucaacaagaucaacuccagccuggugaacaaggacuucacgcgcaagaccgugaucgggcuccuggacaucuacggcuucgaggucuucgacaagaacggcuucgagcaguucugcaucaacuacugcaacgagaagcugcagcagcuccugaucgagcggacccugaaggccgagcaggccgaguacgagauggaggggaucgagugggagcccaucaaguacuucaacaacaagaucaucugcgaccucguggaggagcgccacaagggcaucaucuccauccuggacgaggagugcauccggcccgggcccgccaccgaccugagcuuccucgagaagcuggaggagaaggucggcaagcacgcccacuucgagacgcgcaagcuggcggggccgaagggccggaagcgcaucggcuggauggaguuccgccugcuccacuacgccggggaggugaccuacugcaccaagggcuuccuggagaagaacaacgaccugcucuaccggcaccugaaggaggugcugugcaaguccaagaacaucauccuccgcgagugcuuccugcuggccgagcucgagaaccggcgccggccgcccaccgucgggacgcaguucaagaacagccuguccagccugcucgagacccugaucuccaaggagcccagcuacauccgcugcaucaagcccaacgaccggaaggagcccuccaaguucgacgacuuccugauccgccaccagaucaaguaccucggccugauggagcaccuccgggugcgccgggccggguucgcguaccgccggaaguacgagcacuuccugcagcgcuacaagagccugugccccgacaccuggccccacuggcacggcccgcccgccgagggcguggagcggcugaucaaguacaucggguacaagcccgaggaguacaagcucggcaagaccaagaucuucauccgcuucccccggacgcuguucgccaccgaggacgccuucgaguucuccaagcaccagcuggucgcccgcauccaggcgaccuacaagcggugccucgggcgccgcgaguacgugaagaagcggcaggccgccaucaagcuggaggcccacuggcgcggcgcccuggcgcggaaggccauccagcgccggaagugggccgugcgcaucauccggaaguucaucaagggcuucaucagccgcaacaagccgcucugccccgacaacgaggaguucaucgucuucgugcggaagaacuacauccugaaccugcgcuaccaccuccccaagaccgugcuggacaaguccuggcugcggcccccggggauccucgagaacgccagcgaccugcugcgcaagaugugcguccggaaccucgugcagaaguacugccgcggcaucacggccgagcggaaggcgaugaugcagcagaagguggucaccuccgagaucuuccgcgggcggaaggacggcuacaccgagagccugaaccagcccuucgugaacagccgcaucgacgagggggacaucaaccccaaggugcugcagcucaucucccacgagaagauccaguacggcgucccggugaucaaguacgaccggaagggcuucaaggcccgccagcggcagcugauccugacccagaaggccgccuacguggucgagcucgcgaagaucaagcagaagaucgaguacagcgcccugaaggggguguccacgagcaaccuguccgacggcauccucgugauccacgucagccccgaggacuccaagcagaagggggacgccgugcugcagugcggccacguguucgaggccgucaccaagcuggugaugcucgugaagaaggagaacaucgucaacguggugcaggggagccugcaguucuucaucucccccggcaaggagggcaccaucgucuucgacaccgggcuggaggagcaggucuacaagaacaagaacggccagcucaccguggugagcgugcgccgcaaguccuga

SEQ ID NO: 1368 - RNA, 2379 nt, Artificial Sequence
  BAC84969_variant
augaucaccgugaaccccgacggcaagaucaugguccgccggugccuggugacccuccgcccguuccggcuguucgugcuggggaucggcuucuucacgcucugcuuccugaugaccagccucgggggccaguucuccgcccgccggcugggggacagccccuucaccauccgcaccgaggucaugggcggccccgagucccgcggggugcugcgcaagaugagcgaccugcucgagcugauggugaagcggauggacgcccuggcgcgccucgagaacuccagcgagcugcaccgggccggcggggaccugcacuuccccgccgaccgcaugccgcccggcgccgggcucauggagcggauccaggccaucgcgcagaacgucuccgacaucgccgugaagguggaccagauccugcgccacagccugcuccugcacuccaaggucagcgagggccggcgcgaccagugcgaggcccccuccgaccccaaguucccggacugcagcggcaagguggaguggaugcgggcccgcuggacguccgaccccugcuacgcguucuucgggguggacggcaccgagugcagcuuccugaucuaccucuccgaggucgagugguucugcccgccccugcccuggcggaaccagaccgccgcccagcgcgcccccaagccccugcccaaggugcaggccguguuccggagcaaccucucccaccuccuggaccugauggggagcggcaaggagucccugaucuucaugaagaagcgcaccaagcgccugacggcgcagugggcccucgccgcccagcggcuggcccagaagcugggcgcgacccagcgcgaccagaagcagauccucguccacaucggguuccugaccgaggagagcggcgacguguucagcccgcgggugcugaagggcgggccccucggggagaugguccagugggccgacauccugaccgcccuguacgugcucggccacggccugcgcgugacggucucccugaaggagcuccagagcaaccugggggugccgcccggccggggguccugcccccugaccaugccccuccccuucgaccugaucuacaccgacuaccacggccugcagcagaugaagcgccacauggggcucagcuucaagaaguaccggugccgcauccgggugaucgacaccuucggcacggagcccgccuacaaccacgaggaguacgccacccugcacggcuaccgcaccaacuggggguacuggaaccugaacccgaagcaguucaugaccauguucccccacacgcccgacaacuccuucaugggcuucgucagcgaggagcugaacgagaccgagaagcggcucaucaagggcgggaaggcguccaacauggccguggucuacgggaaggaggccagcaucuggaagcugcagggcaaggagaaguuccugggcauccucaacaaguacauggagauccacgggaccguguacuacgagucccagcggcccccggaggugcccgccuucgucaagaaccacggccugcugccccagccggaguuccagcagcuccugcggaaggccaagcuguucaucggguucggcuuccccuacgagggccccgcgccccucgaggccaucgccaacgggugcaucuuccugcagagccgcuucuccccgccccacagcucccugaaccacgaguucuuccggggcaagcccaccagccgcgagguguucucccagcaccccuacgccgagaacuucaucgggaagccgcacguguggacggucgacuacaacaacagcgaggaguucgaggcggccaucaaggccaucaugcggacccagguggaccccuaccuccccuacgaguacacgugcgagggcaugcuggagcgcauccacgccuacauccagcaccaggacuucugccgggcccccgacccggcgcugcccgaggcccacgcgccccagucccccuucgugcucgccccgaacgccacccaccuggagugggcccgcaacaccagccuggcccccggggccuggccgcccgcccacgcccuccgcgcguggcuggccguccccggccgggccugcaccgacacgugccuggaccacggccucaucugcgagcccuccuucuuccccuuccugaacagccaggacgccuuccugaagcuccaggugcccugcgacagcaccgaguccgagaugaaccaccuguacccggcguucgcccagcccgggcaggagugcuaccugcagaaggagccccuccuguucagcugcgccggcuccaacaccaaguaccgccggcugugcccgugccgcgacuuccggaagggccagguggcccucugccaggggugccuguga

SEQ ID NO: 1369 - RNA, 36 nt, Artificial Sequence
  AF164963.1_variant
augacccagggccagcacuuccugcagaagguguga

SEQ ID NO: 1370 - RNA, 2211 nt, Artificial Sequence
  AAI11702_variant
augaaggagaugagcgccaacaccgugcuggacucccagcgccagcagaagcacuacggcaucaccagccccaucucccucgccagcccgaaggagaucgaccacaucuacacgcagaagcugaucgacgcgaugaagcccuucggggucuucgaggacgaggaggagcugaaccaccggcucguggugcugggcaagcugaacaaccucgucaaggaguggaucuccgacgugagcgaguccaagaaccugccgcccagcguggucgccaccgucgggggcaagaucuucaccuucggguccuaccgccugggcgugcacaccaagggcgccgacaucgacgcccucugcgucgccccgcggcacguggagcgcagcgacuucuuccaguccuucuucgagaagcugaagcaccaggacgggauccggaaccugcgcgcgguggaggacgccuucguccccgugaucaaguucgaguucgacggcaucgagaucgaccucguguucgcccggcuggccauccagacgaucagcgacaaccuggaccuccgcgacgacucccggcugcgcagccuggacauccggugcauccgcucccucaacgggugccgggucaccgacgagauccugcaccuggugcccaacaaggagaccuuccgccucacccugcgggcggugaagcugugggccaagcgccggggcaucuacagcaacaugcucggguuccugggcggcgucuccugggccaugcugguggcccgcacgugccagcucuaccccaacgccgcggccagcacccuggugcacaaguucuuccuggucuucuccaagugggaguggccgaaccccgugcuccugaagcagcccgaggagagcaaccugaaccuccccgugugggacccgcgggucaaccccagcgaccgcuaccaccugaugcccaucaucacccccgccuacccgcagcagaacuccaccuacaacgugagcacguccacccggaccgucaugguggaggaguucaagcaggggcuggccgugaccgacgagauccuccagggcaagagcgacugguccaagcugcuggagccgcccaacuucuuccagaaguaccgccacuacaucguccucacggccagcgcguccaccgaggagaaccaccuggaguggguggggcugguggagagcaagauccgcguccucgugggcaaccuggagcggaacgaguucaucacccuggcccacgugaacccccaguccuuccccggcaacaaggagcaccacaaggacaacaacuacgucagcaugugguuccucgggaucaucuuccgccggguggagaacgccgaguccgugaacaucgaccugaccuacgacauccagagcuucacggacaccgucuaccgccaggccaacaacaucaacaugcugaaggagggcaugaagaucgaggccacccacgugaagaagaagcagcuccaccacuaccugcccgcggagauccugcagaagaagaagaagcagucccugagcgacgugaaccgguccagcgggggccuccaguccaagcgccugagccuggacuccagcugccucgacagcucccgggacaccgacaacgggacgcccuucaacagccccgccuccaagagcgacuccccgagcgucggcgagaccgagcgcaacuccgccgagcccgccgccgugaucguggagaagccccugagcgugcccccggcgcagggccuguccauccccgugaucggggccaagguggacagcaccgucaagaccguguccccgcccacggugugcaccauccccaccgucgugggccggaacgugaucccccgcaucaccacgccccacaaccccgcccaggggcagccccaccucaacggcaugagcaacaucaccaagaccgucacccccaagcggucccacagccccuccaucgacgggacgccgaagcgccugaaggacguggagaaguucauccggcuggagagcaccuucaaggacccccgcaccgccgaggagcggaagcgcaaguccguggacgcgaucggcggcgagagcaugcccauccccaccaucgacaccagccggaagaagcgccucccguccaaggagcugcccgacagcuccagccccguccccgccaacaacauccgggugaucaagaacuccauccgccugacgcucaaccgcuga

SEQ ID NO: 1371 - RNA, 1377 nt, Artificial Sequence
  AAG28389_variant
augagcaccgagggcggguucggcgggaccuccagcuccgacgcccagcagagccugcaguccuucuggccccgcgugauggaggagauccggaaccucacggucaaggacuuccgcgugcaggagcugccgcuggcccggaucaagaagaucaugaagcucgacgaggacgugaagaugaucagcgccgaggcccccguccuguucgccaaggccgcccagaucuucaucaccgagcugacccuccgcgcguggauccacaccgaggacaacaagcggcgcacgcugcagcggaacgacaucgccauggccaucaccaaguucgaccaguucgacuuccugaucgacaucgugccccgcgacgagcucaagcccccgaagcggcaggaggaggugcgccaguccgucacccccgccgagcccgugcaguacuacuucacccuggcgcagcagcccacggccgugcagguccagggccagcagcaggggcagcagaccaccagcuccaccacgaccauccagccgggccagaucaucaucgcccagccccagcagggccagaccacccccgugacgaugcaggucggggagggccagcagguccagaucgugcaggcccagccccaggggcaggcccagcaggcgcagagcggcaccgggcagaccaugcaggucaugcagcagaucaucaccaacacgggcgagauccagcagaucccggugcagcugaacgccggccagcuccaguacauccggcuggcccagcccguguccgggacccagguggugcagggccagauccagacccuggccaccaacgcccagcaggggcagcgcaacgcgagccagggcaagccccggcgcugccucaaggagacgcugcagaucacccagaccgaggugcagcagggccagcagcaguucucccaguucaccgacgggcagcggaacagcgugcagcaggcccgcgucuccgagcugacgggcgaggccgagccccgggaggugaaggccaccgggaacagcaccccgugcaccuccagccuccccacgacccacccgcccucccaccgcgccggcgcgagcugcgugugcugcagccagccccagcaguccagcaccuccccgccgcccagcgacgcccugcagugggucguggucgagguguccgggacccccaaccagcuggagacgcaccgggagcuccacgcgccccugcccggcaugaccagccugagcccccuccaccccucccagcagcuguaccagauccagcaggucaccaugcccgccggccaggaccuggcccagcccauguucauccaguccgccaaccagccgagcgacgggcaggcgccccaggugaccggcgacuga

SEQ ID NO: 1372 - RNA, 2802 nt, Artificial Sequence
  CCDS33423.1_variant
augcgcauggccgccaccgcgugggccggccugcaggggcccccgcuccccacccugugccccgccgugcggacgggccuguacugccgcgaccaggcccacgccgagcggugggcgaugaccagcgagaccuccagcgggucccacugcgcccgcagccggaugcuccgccggcgcgcccaggaggaggacuccaccguccugaucgacgugagcccgcccgaggccgagaagcggggcuccuacgggagcacggcgcacgccuccgagcccggcggccagcaggccgccgccugccgcgcggggagccccgccaagccccggaucgccgacuucgugcuggucugggaggaggaccucaagcuggaccgccagcaggacuccgccgcccgggaccgcaccgacaugcaccggaccuggcgcgagaccuuccuggacaaccuccgggcggccggccugugcguggaccagcaggacgugcaggacgggaacacgaccguccacuacgcccugcucagcgccuccugggccgugcugugcuacuacgcggaggaccugcgccucaagcugccgcugcaggagcuccccaaccaggccagcaacugguccgccggccugcuggccuggcucgggauccccaacgugcugcuggaggucgugcccgacgugccgcccgaguacuacagcugccgguuccgcgucaacaagcucccccgguuccugggcuccgacaaccaggacaccuucuucaccagcacgaagcgccaccagauccuguucgagauccucgccaagacccccuacggccacgagaagaagaaccugcuggggauccaccagcuccuggcggagggcgugcuguccgccgccuucccgcuccacgacgggcccuucaagaccccgcccgagggcccccaggcgccccgccugaaccagcgccaggugcuguuccagcacugggcccgguggggcaaguggaacaaguaccagccccucgaccacguccggcgcuacuucggggagaagguggcccuguacuucgccuggcugggcuucuacaccggguggcuccugcccgccgccguggucggcacgcugguguuccucguggggugcuuccuggucuucagcgacaucccgacccaggagcugugcggcagcaaggacuccuucgagaugugcccccucugccuggacugccccuucuggcugcucagcuccgcgugcgcccuggcccaggccggccggcuguucgaccacgggggcaccguguucuucagccuguucauggcccucugggcggugcugcugcucgaguacuggaagcgcaaguccgccacccuggccuaccggugggacugcagcgacuacgaggacacggaggagcgcccccggccgcaguucgccgccuccgcgcccaugaccgcccccaacccgaucaccggggaggacgagcccuacuuccccgagcgcagccgggcccgccggaugcuggccggcuccgucgugaucgucgugaugguggcggucguggugaugugccucgucagcaucauccuguaccgcgccaucauggccaucguggugucccggagcgggaacacccugcucgccgccugggcgucccgcaucgccagccugacgggcuccgucgugaaccugguguucauccucauccugagcaagaucuacgucucccuggcccacgugcucacccggugggagaugcaccgcacccagaccaaguucgaggacgccuucacgcugaagguguucaucuuccaguucgucaacuucuacagcucccccguguacaucgccuucuucaagggccgguucgugggguacccgggcaacuaccacacccuguucgggguccgcaacgaggagugcgcggccggcgggugccucaucgagcuggcccaggagcugcucgugaucauggugggcaagcaggucaucaacaacaugcaggaggugcugauccccaagcugaagggcugguggcagaaguuccgccuccggagcaagaagcgcaaggccggggccagcgcgggcgccucccaggggcccugggaggacgacuacgagcuggugcccugcgagggccuguucgacgaguaccucgagaugguccugcaguucggcuucgugaccaucuucguggccgccugcccgcuggcgccccucuucgcccugcugaacaacugggucgagauccggcucgacgcccgcaaguucgugugcgaguaccggcgccccguggccgagcgggcccaggacaucgggaucugguuccacauccuggcgggccugacccaccucgccgucaucagcaacgccuuccugcuggccuucuccagcgacuuccucccccgcgccuacuaccgguggacgcgcgcgcacgaccugcggggguuccugaacuucacccucgcccgcgccccguccagcuucgccgccgcgcacaaccggaccugccgcuaccgggccuuccgcgacgacgacggccacuacucccagaccuacuggaaccugcuggccauccggcucgccuucgugaucguguucgagcacgucguguucagcguggggcgccugcuggaccuccugguccccgacauccccgaguccguggagaucaaggugaagcgggaguacuaccuggccaagcaggcgcucgccgagaacgagguccuguucggcacgaacggcaccaaggacgagcagcccgaggggagcgagcuguccagccacuggaccccguucaccgugcccaaggccucccagcuccagcaguga

SEQ ID NO: 1373 - RNA, 885 nt, Artificial Sequence
  AAA36380_variant
auggaggacagcauggacauggacaugagcccccugcggccgcagaacuaccucuucggcugcgagcugaaggccgacaaggacuaccacuucaagguggacaacgacgagaacgagcaccagcugagccuccggaccgucucccugggggccggcgcgaaggacgagcugcacaucguggaggccgaggccaugaacuacgaggggagccccaucaaggugacccucgccacgcugaagauguccguccagcccaccgugagccugggcggguucgagaucaccccgcccgugguccuccgccugaagugcggcuccggccccgugcacaucagcgggcagcaccugguggccgucgaggaggacgcggaguccgaggacgaggaggaggaggacgugaagcuccugagcaucuccggcaagcggagcgcccccgggggcggguccaaggugccccagaagaaggucaagcuggccgccgacgaggacgacgacgacgacgacgaggaggacgacgacgaggacgacgacgacgacgacuucgacgacgaggaggcggaggagaaggccccggugaagaaguccauccgcgacacccccgccaagaacgcccagaaguccaaccagaacggcaaggacagcaagcccuccagcacgccccgguccaagggccaggagagcuucaagaagcaggagaagaccccgaagacccccaaggggcccagcuccguggaggacaucaaggccaagaugcaggcgagcaucgagaagggcgggucccuccccaaggucgaggccaaguucaucaacuacgugaagaacugcuuccgcaugaccgaccaggaggccauccaggaccuguggcaguggcgcaagagccuguga

SEQ ID NO: 1374 - RNA, 3915 nt, Artificial Sequence
  CCDS47686.1_variant
augcagcugaagaucaugcccaagaagaagcgccucagcgccggccgggugccgcugauccuguuccucugccagaugaucuccgcccuggaggucccccuggaccccaagcuccuggaggaccuggugcagcccccgaccaucacccagcagagccccaaggacuacaucaucgacccccgcgagaacaucgugauccagugcgaggcgaaggggaagcccccgcccuccuucagcuggacgcggaacggcacccacuucgacaucgacaaggacccccucgucaccaugaagcccgggaccggcacgcugaucaucaacaucauguccgaggggaaggccgagaccuacgagggcguguaccagugcaccgcccgcaacgagcggggcgccgccgugagcaacaacaucgucgugcgcccgucccggagcccccuguggaccaaggagaagcucgagcccaucacgcugcaguccgggcagagccuggugcuccccugccgcccgcccaucggccugcccccgcccaucaucuucuggauggacaacuccuuccagcggcugccccagagcgagcgcgucucccaggggcucaacggcgaccuguacuucagcaacgugcugcccgaggacacccgggaggacuacaucugcuacgcgcgcuucaaccacacccagaccauccagcagaagcagcccaucuccgugaaggucaucagcguggacgagcucaacgacacgaucgccgccaaccuguccgacaccgaguucuacggggccaagagcucccgggagcgcccgcccaccuuccugacccccgagggcaacgcgagcaacaaggaggagcuccggggcaacgugcugagccuggagugcaucgccgaggggcuccccacgccgaucaucuacugggccaaggaggacggcaugcugcccaagaaccgcaccgucuacaagaacuucgagaagacccugcagaucauccacguguccgaggccgacagcgggaacuaccagugcaucgccaagaacgcgcucggcgccauccaccacaccaucuccgugcgggucaaggccgcccccuacuggaucacggccccgcagaaccuggugcugagccccggcgaggacgggacccucaucugccgcgcgaacggcaaccccaagccccggaucuccuggcugaccaacggggugccgaucgagaucgcccccgacgaccccagccgcaagaucgacggcgacaccaucaucuucuccaacguccaggagcggagcuccgccguguaccagugcaacgccagcaacgaguacggguaccugcucgccaacgcguucgugaacguccuggccgagcccccgcgcauccugacgcccgccaacacccucuaccaggugaucgccaaccgccccgcccugcuggacugcgcguucuucggcagcccccucccgaccaucgagugguucaagggcgccaaggggagcgcccugcacgaggacaucuacguccugcacgagaacggcacccucgagauccccguggcccagaaggacuccacggggaccuacacgugcguggcgcggaacaagcugggcauggccaagaacgagguccaccuggagaucaaggaccccaccuggaucgugaagcagcccgaguacgccgugguccagcgcgggagcaugguguccuucgagugcaaggugaagcacgaccacacccucagccugaccguccuguggcugaaggacaaccgggagcucccguccgacgagcgcuucaccguggacaaggaccaccugguggucgccgacgugagcgacgacgacuccggcaccuacacgugcguggccaacaccacccuggacagcgucagcgcguccgccgugcucagcguggucgcccccacccccacccccgccccgguguacgacgugcccaacccgcccuucgaccuggagcugacggaccagcucgacaaguccguccagcugagcuggacccccggcgacgacaacaacucccccaucaccaaguucaucaucgaguacgaggacgccaugcacaagcccgggcuguggcaccaccagaccgaggugagcggcacgcagaccaccgcgcagcucaagcuguccccguacgugaacuacagcuuccgggucauggccgugaacuccaucgggaagucccugcccuccgaggccagcgagcaguaccucaccaaggccuccgagcccgacaagaaccccacggccguggagggccuggggagcgagccggacaaccuggucaucaccuggaagccccucaacggcuucgaguccaacggccccgggcugcaguacaaggugagcuggcgccagaaggacggcgacgacgaguggaccuccguggucguggcgaacgugagcaaguacaucgucagcgggacccccacguucgugccguaccugaucaaggugcaggcccucaacgacaugggcuucgcccccgagcccgccgucgugaugggccacuccggggaggaccugcccaugguggcgccgggcaacguccgggugaacguggucaacagcacccuggccgaggugcacugggaccccgugccccucaaguccauccgcgggcaccuccagggcuaccggaucuacuacuggaagacccagagcuccagcaagcgcaaccggcgccacaucgagaagaagauccugaccuuccagggguccaagacgcacggcaugcugcccggccuggagccguucagccacuacacccugaacguccggguggugaacgggaagggcgaggggcccgccucccccgaccgcgucuucaacacccccgagggcgugccgagcgcccccuccagccucaagaucgugaaccccacccuggacucccugacgcucgagugggacccgcccagccaccccaacgggauccugaccgaguacacccugaaguaccagcccaucaacuccacccacgagcucggcccccuggucgaccugaagaucccggccaacaagacgcgguggacccucaagaaccugaacuucagcacccgcuacaaguucuacuucuacgcgcagaccuccgccggcagcgggucccagaucacggaggaggccgugaccaccgucgacgaggccggcauccugccgcccgacgugggggccggcaaggugcaggcggucaacccccggaucagcaaccucaccgccgccgccgccgagacguacgcgaacaucagcugggaguacgaggggcccgagcacgugaacuucuacguggaguacggcgucgccggcuccaaggaggaguggcgcaaggagaucgugaacgggagccgguccuucuucggccugaaggggcugaugcccggcaccgccuacaaggugcgcgucggggccgugggcgacagcggcuucguguccagcgaggacgucuucgagaccgggcccgcgauggccucccgccagguggacaucgccacccagggcugguucaucgggcucaugugcgccguggcccugcugauccucauccugcugaucgucugcuucauccggcgcaacaagggcggcaaguacccggugaaggagaaggaggacgcgcacgccgaccccgagauccagcccaugaaggaggacgacgggacguucggcgaguacagcgacgccgaggaccacaagccccucaagaaggggucccggaccccgagcgaccgcaccgugaagaaggaggacuccgacgacagccuggucgacuacggcgagggggugaacggccaguucaacgaggacggcuccuucaucgggcaguacagcggcaagaaggagaaggagcccgccgaggggaacgaguccagcgaggcccccucccccgugaacgcgaugaacagcuucgucuga

SEQ ID NO: 1375 - RNA, 1305 nt, Artificial Sequence
  AAB51320_variant
augagcaucgagaagaucugggcccgcgagauccuggacucccggggcaaccccaccguggaggucgaccucuacaccgccaaggggcuguuccgcgcggccgugccgagcggcgccuccacggggaucuacgaggcccuggagcuccgggacggcgacaagcagcgcuaccuggggaagggcgugcugaaggccgucgaccacaucaacagcaccaucgcgcccgcccucaucuccagcggccuguccgugguggagcaggagaagcuggacaaccucaugcuggagcuggacgggaccgagaacaagagcaaguucggcgccaacgccauccucggggucucccuggcggugugcaaggccggcgccgccgagcgggagcugccccucuaccgccacaucgcccagcuggcggggaacagcgaccugauccuccccgugccggccuucaacgucaucaacggcggcucccacgccgggaacaagcuggccaugcaggaguucaugauccugcccgugggcgccgagagcuuccgggacgcgaugcgccucggggccgagguguaccacacccugaagggcgucaucaaggacaaguacggcaaggacgccacgaacgugggggacgagggcggguucgcccccaacauccuggagaacuccgaggcccucgagcuggugaaggaggcgaucgacaaggccggcuacaccgagaagaucgucaucgggauggacguggccgccagcgaguucuaccgggacggcaaguacgaccuggacuucaagucccccaccgacccgagccgcuacaucaccggcgaccagcucggggcccuguaccaggacuucgugcgggacuaccccgucguguccaucgaggaccccuucgaccaggacgacugggcggccuggagcaaguucacggccaacgugggcauccagaucgucggggacgaccugaccgugaccaaccccaagcgcaucgagcgggccguggaggagaaggcgugcaacugccuccugcugaaggucaaccagaucggcuccgugaccgaggccauccaggccugcaagcucgcccaggagaacggguggggcgucauggugagccaccgcagcggcgagacggaggacaccuucaucgccgaccugguggucgggcugugcaccggccagaucaagaccggggcgccgugccgguccgagcgccucgccaaguacaaccagcugaugcggaucgaggaggagcugggcgacgaggcccgcuucgccgggcacaacuuccggaaccccagcgugcucuga

SEQ ID NO: 1376 - RNA, 1395 nt, Artificial Sequence
  AAH08489_variant
auggagacccugagcuucccccgcuacaacguggccgagaucgucauccacauccggaacaagauccucaccggcgccgacgggaagaaccugacgaagaacgaccuguacccgaaccccaagcccgaggugcuccacaugaucuacaugcgcgcgcugcagaucguguacggcauccggcuggagcacuucuacaugaugcccgucaacuccgaggugauguacccgcaccucauggagggguuccugcccuucagcaaccuggugacccaccucgacuccuuccugcccaucugccgcgucaacgacuucgagaccgccgacauccugugccccaaggccaagcggaccagccgcuuccucuccggcaucaucaacuucauccacuuccgggaggccugccgcgagacguacauggaguuccuguggcaguacaagagcuccgccgacaagaugcagcagcugaacgcggcccaccaggaggcccucaugaagcuggagcggcuggacagcgugccgguggaggagcaggaggaguucaagcagcucuccgacgggauccaggagcugcagcagagccugaaccaggacuuccaccagaagaccaucguccuccaggagggcaacucccagaagaaguccaacaucagcgagaagaccaagcgccugaacgagcugaagcucagcguggugucccugaaggagauccaggagagccugaagaccaagaucgucgacucccccgagaagcucaagaacuacaaggagaagaugaaggacacggugcagaagcugaagaacgcccggcaggagguggucgagaaguacgagaucuacggcgacagcguggacugccugcccuccugccagcucgaggugcagcuguaccagaagaagauccaggaccugagcgacaaccgcgagaagcucgcgagcauccugaaggagucccugaaccucgaggaccagaucgagagcgacgaguccgagcugaagaagcugaagaccgaggagaacagcuucaagcggcucaugaucgucaagaaggagaagcuggccaccgcccaguucaagaucaacaagaagcacgaggacgugaagcaguacaagcgcaccgugaucgaggacugcaacaagguccaggagaagcgcggggccguguacgagcgggugacgaccaucaaccaggagauccagaagaucaagcugggcauccagcagcucaaggacgccgcggagcgggagaagcugaagucccaggagaucuuccugaaccucaagaccgcccuggagaaguaccacgacgggaucgagaaggccgccgaggacagcuacgccaagaucgacgagaagaccgcggagcugaagcgcaagauguucaagauguccacguga

SEQ ID NO: 1377 - RNA, 543 nt, Artificial Sequence
  AAB49693_variant
augcaggccgagggccgcgggaccggcgggagcaccggcgacgccgacgggcccggcggcccggggauccccgacggccccgggggcaacgccgggggccccggcgaggccggggccacgggcgggcggggcccgcgcggcgccggggccgcgcgggccuccggccccgggggcggggcgccccgcggcccccacggcggggccgcgagcggccugaacgggugcugccggugcggcgcccgcgggccggagucccggcuccuggaguucuaccuggccaugcccuucgccacccccauggaggccgagcucgcgcgccggagccuggcccaggacgcgcccccgcugcccgugcccggcguccuccugaaggaguucaccguguccggcaacauccugaccauccgccucacggccgccgaccaccggcagcugcagcugagcaucuccagcugccuccagcagcugucccugcucauguggaucacccagugcuuccugcccguguuccuggcccagccgcccagcgggcagcgccgguga

SEQ ID NO: 1378 - RNA, 1215 nt, Artificial Sequence
  CCDS14134.2_variant
auggccagcccccgccugggcaccuucugcugcccgacccgggacgccgcgacgcagcucgugcuguccuuccagccccgcgccuuccacgcccugugccucgggagcggcgggcugcggcuggcccucggccugcugcagcuccugcccgggcgccggcccgccggcccgggcucccccgcgaccagcccgcccgccuccguccgcauccugcgggccgccgcggccugcgaccuccuggggugccugggcauggugauccgcagcaccguguggcucggguuccccaacuucgucgacuccgugagcgacaugaaccacaccgagaucuggcccgccgccuucugcgugggcuccgccauguggauccagcugcuguacagcgcgugcuucugguggcuguucugcuacgccgucgacgccuaccucgugauccggcgcuccgccgggcugagcacgauccuccuguaccacaucauggccuggggccuggcgacccuccugugcguggagggcgccgccaugcuguacuaccccuccgucagccggugcgagcgcgggcucgaccacgccaucccccacuacgugaccauguaccugccgcugcuccuggugcuggucgccaaccccauccucuuccagaagaccgugacggcgguggccucccugcugaagggccggcaggggaucuacaccgagaacgagcgccggaugggcgccgucaucaagauccgcuucuucaagaucaugcucgugcugaucaucugcuggcugagcaacaucaucaacgagucccuccuguucuaccuggagaugcagaccgacaucaacggcgggagccucaagcccgugcggaccgccgccaagacgaccugguucaucaugggcauccugaaccccgcgcagggguuccugcucucccuggccuucuacggcuggaccgggugcagccugggcuuccagagcccgcgcaaggagauccagugggagucccucaccacgagcgccgccgagggcgcgcaccccagcccccugaugccccacgagaacccggccuccgggaaggucucccaggugggcgggcagaccagcgacgaggcccuguccaugcugagcgagggcuccgacgccagcaccaucgagauccacaccgccuccgagagcugcaacaagaacgagggggaccccgcgcuccccacgcacggcgaccuguga

SEQ ID NO: 1379 - RNA, 3141 nt, Artificial Sequence
  AAH38180_variant
auggccagcuccgugggcaacgucgccgacagcaccgagcccaccaagcgcaugcuguccuuccaggggcucgcggagcuggcccaccgggaguaccaggccggcgacuucgaggccgccgagcgccacugcaugcagcuguggcggcaggagccggacaacacgggggugcuccugcugcucagcuccauccacuuccagugccgccggcuggaccgcagcgcgcacuucuccacccuggccaucaagcagaacccccuccuggccgaggccuacagcaaccugggcaacguguacaaggagcgggggcagcuccaggaggcgaucgagcacuaccgccacgcccugcggcugaagcccgacuucaucgacggcuacaucaaccucgccgccgcccuggucgcggccggcgacauggagggggccgugcaggccuacguguccgcccugcaguacaaccccgaccucuacugcguccgcagcgaccugggcaaccugcucaaggcgcuggggcggcuggaggaggccaaggccugcuaccucaaggccaucgagacccagccgaacuucgccguggcgugguccaaccugggcugcguguucaacgcccagggggagaucuggcuggccauccaccacuucgagaaggccgucacccucgaccccaacuuccuggacgccuacaucaaccugggcaacgugcucaaggaggcgcgcaucuucgaccgggccguggccgccuaccugcgcgcgcugagccucucccccaaccacgccgucgugcacggcaaccuggccugcguguacuacgagcaggggcugaucgaccucgccaucgacacguaccggcgcgccaucgagcugcagccccacuucccggacgcguacugcaaccuggccaacgcccucaaggagaagggcagcgucgccgaggccgaggacugcuacaacaccgcgcugcggcugugccccacccacgccgacucccucaacaaccuggccaacaucaagcgcgagcaggggaacaucgaggaggccgugcggcuguaccgcaaggcccucgagguguuccccgaguucgcggccgcccacagcaaccuggccuccguccugcagcagcagggcaagcuccaggaggcgcugaugcacuacaaggaggccauccggaucagccccaccuucgccgacgccuacuccaacaugggcaacacgcugaaggagaugcaggacgugcagggggcccugcagugcuacacccgcgcgauccagaucaacccggccuucgccgacgcccacagcaaccucgccagcauccacaaggacuccggcaacauccccgaggcgaucgccagcuaccgcaccgcccugaagcugaagcccgacuuccccgacgccuacugcaaccucgcccacugccugcagaucgugugcgacuggaccgacuacgacgagcggaugaagaagcuggucuccaucguggcggaccagcucgagaagaaccgccugccgagcgugcacccccaccacuccaugcuguacccccucagccacggguuccggaaggccaucgccgagcgccacggcaaccugugccuggacaagaucaacguccuccacaagcccccguacgagcaccccaaggaccugaagcuguccgacgggcggcuccgcgugggcuacgucagcuccgacuucggcaaccaccccacgagccaccugaugcaguccauccccgggaugcacaacccggacaaguucgagguguucugcuacgcccugagccccgacgacggcaccaacuuccgggugaaggucauggcggaggccaaccacuucaucgaccucucccagauccccugcaacgggaaggccgccgaccgcauccaccaggacggcauccacauccuggugaacaugaacggguacaccaagggcgcccggaacgagcuguucgcgcuccgccccgccccgauccaggccauguggcugggcuaccccgggaccagcggcgcccuguucauggacuacaucaucacggaccaggagaccucccccgccgagguggcggagcaguacagcgagaagcucgccuacaugccgcacaccuucuucaucggggaccacgccaacauguucccccaccugaagaagaaggccgucaucgacuucaaguccaacggccacaucuacgacaaccggaucgugcugaacgggaucgaccucaaggccuuccuggacagccugcccgacgugaagaucgucaagaugaagugccccgacggcggcgacaacgcggacuccagcaacaccgcccucaacaugccggugauccccaugaacacgaucgccgaggccgugaucgagaugaucaaccgcgggcagauccagaucaccaucaacggcuucagcaucuccaacgggcuggccaccacccagaucaacaacaaggcggccacgggcgaggaggucccccggaccaucaucgugaccacccgcagccaguacggccugcccgaggacgccaucguguacugcaacuucaaccagcucuacaagaucgacccguccacgcugcagaugugggccaacauccugaagcggguccccaacagcgugcucuggcugcugcgcuuccccgcggugggggagcccaacauccagcaguacgcccagaacaugggccucccgcagaaccggaucaucuucucccccgucgcccccaaggaggagcacgugcgccgggggcagcuggccgacgugugccuggacacgccccucugcaacggccacaccaccgggauggacguccugugggccggcaccccgauggugaccaugcccggcgagacccuggcgagccgcguggccgccucccagcugaccugccucgggugccuggagcucaucgccaagaaccgccaggaguacgaggacaucgccgucaagcugggcacggaccuggaguaccucaagaaggugcgggggaagguguggaagcagcgcaucagcagcccccuguucaacaccaagcaguacaccauggagcuggagcggcucuaccugcagaugugggagcacuacgcggccggcaacaagcccgaccacaugaucaagccggucgaggugaccgaguccgccuga

SEQ ID NO: 1380 - RNA, 441 nt, Artificial Sequence
  BAG57972_variant
auggccgccgagacccugcucagcucccugcugggccuccugcugcucgggcugcugcuccccgcgagccugaccggcggggugggcucccugaaccucgaggagcugagcgagaugcgcuacgggaucgagauccugccgcuccccgucaugggcggccagucccagagcuccgacguggugaucgucagcuccaaguacaagcagcgguacgagugccgccugcccgugggggccauccacuuccagcgggagcgcgaggaggagacgcccgccuaccagggcccggggauccccgagcugcucagccccaugcgggacgcccccugccugcugaagaccaaggacugguggaccuacgaguucugcuacggccgccacauccagcaguaccacauggaggacuccgagaucaaggggcuccaggccgcgagcuccuga

SEQ ID NO: 1381 - RNA, 1221 nt, Artificial Sequence
  BAG65333_variant
auggccgccgagacccugcucagcucccugcugggccuccugcugcucgggcugcugcuccccgcgagccugaccggcggggugggcucccugaaccucgaggagcugagcgagaugcgcuacgggaucgagauccugccgcuccccgucaugggcggccagucccagagcuccgacguggugaucgucagcuccaaguacaagcagcgguacgagugccgccugcccgccggggccauccacuuccagcgggagcgcgaggaggagacgcccgccuaccagggcccggggauccccgagcugcucagccccaugcgggacgcccccugccugcugaagaccaaggacugguggaccuacgaguucugcuacggccgccacauccagcaguaccacauggaggacuccgcgagcggggccccgaacgacuuccagaacaacguccaggugaaggugauccggucccccgccgaccucauccgcuucaucgaggagcugaagggcggcaccaagaaggggaagcccaacaucggccaggagcagcccguggacgacgccgcggaggugccgcagcgggagcccgagaaggagcgcggggaccccgagcggcagcgcgagauggaggaggaggaggacgaggacgaggacgaggacgaggacgaggacgagcggcagcugcucggcgaguucgagaaggagcuggagggcauccugcuccccagcgaccgcgaccggcugcgcuccgaggucaaggccgggauggagcgggagcuggagaacaucauccaggagacggagaaggagcucgacccggacggccugaagaaggagagcgagcgcgaccgggccaugcuggcccucaccuccacccugaacaagcugaucaagcgccucgaggagaagcagagccccgagcuggugaagaagcacaagaagaagcgggugguccccaagaagcccccgcccagcccccagcccaccgggaagaucgagaucaagaucgugcgcccgugggccgagggcacggaggagggggcgcgcuggcugaccgacgaggacacccggaaccucaaggagaucuucuucaacauccuggugcccggcgccgaggaggcccagaaggagcgccagcggcagaaggagcuggaguccaacuaccgccgggucuggggcagccccgggggcgaggggaccggcgaccucgacgaguucgacuucuga

SEQ ID NO: 1382 - RNA, 2223 nt, Artificial Sequence
  BAH13933_variant
auggccguggagacccugcucagcucccugcugggccuccugcugcucgggcugcugcuccccgccagccugaccggcggggucggcucccugaaccucgaggagcugagcgagaugcgcuacgggaucgagauccugccgcuccccgugaugggcggccagucccagagcuccgacguggucaucgugagcuccaaguacaagcagcgguacgagugccgccugcccgcgggggccauccacuuccagcgggagcgcgaggaggagacgcccgccuaccagggcccggggauccccgagcugcucagccccaugcgggacgcccccugccugcugaagaccaaggacugguggaccuacgaguucugcuacggccgccacauccagcaguaccacauggaggacuccgagaucaagggggaggugcucuaccugggcuacuaccagagcgccuucgacugggacgacgagaccgcgaaggccuccaagcagcaccggcugaagcgcuaccacagccagacguacggcaacggguccaagugcgaccucaacggccggccgcgcgaggccgagguccgguuccugugcgacgagggggccggcaucagcggcgacuacaucgaccgcguggacgagccccuguccugcagcuacgugcucaccauccggacgccccgccugugcccccacccgcugcuccggcccccgcccuccgcggccccgcaggccauccugugccaccccagccugcagcccgaggaguacauggccuacguccagcgccaggccgacagcaagcaguacggggacaagaucaucgaggagcuccaggaccugggcccccaggugugguccgagaccaagagcgggguggcgccgcagaagauggccggccggacccuguuccaccucuuccgcgagauccacuuccacuucuuccccucccccgaccugaccguccugaccgacugguggggcgggggcgggguggagaaguaccacggccccagcucccucggggaccggggcggggagggcaccccgagcuaccugcugcccuccgugagcccccuccuguccgaccagagccugcccguccucugcacgcugggcgccuccccgaccaaggacgacagcaaggacuccgacuucuggaagaugcugaacgagcccgaggaccaggcccccgggggcgaggaggugccggccgaggagcaggaccccagccccgaggcggccgacuccgccagcggggcccccaacgacuuccagaacaacgugcaggucaaggugauccgcuccccggccgaccucauccgguucaucgaggagcugaagggcgggaccaagaagggcaagcccaacaucggccaggagcagcccguggacgacgcggccgaggucccccagcgcgagccggagaaggagcgcggggaccccgagcggcagcgcgagauggaggaggaggaggacgaggacgaggacgaggacgaggacgaggacgagcggcagcugcugggcgaguucgagaaggagcucgaggggauccugcugcccagcgaccgcgaccggcuccgcuccgaggugaaggccggcauggagcgggagcuggagaacaucauccaggagaccgagaaggagcuggaccccgacggccucaagaaggagagcgagcgcgaccgggccaugcuggcccugacgagcacccucaacaagcugaucaagcgccuggaggagaagcaguccccggagcucgugaagaagcacaagaagaagcgggucgugcccaagaagcccccgcccagcccccagcccaccgaggaggaccccgagcaccgcguccgggugcgcgugaccaagcugcggcucgggggcccgaaccaggaccugacgguccuggagaugaagcgcgagaacccccagcugaagcagaucgaggggcucgugaaggagcugcuggagcgggagggccucaccgcggccgggaagaucgagaucaagaucgugcgccccugggccgagggcaccgaggagggcgcccgguggcugaccgacgaggacacgcgcaaccugaaggagaucuucuucaacauccucguccccggggcggaggaggcccagaaggagcgccagcggcagaaggagcuggaguccaacuaccgccggguguggggcagccccgggggcgaggggaccggcgaccuggacgaguucgacuucuga

SEQ ID NO: 1383 - RNA, 2004 nt, Artificial Sequence
  AAB06495_variant
auggccgccgagacccugcucagcucccugcugggccuccugcugcucgggcugcugcuccccgcgagccugaccggcggggugggcucccugaaccucgaggagcugagcgagaugcgcuacgggaucgagauccugccgcuccccgucaugggcggccagucccagagcuccgacguggugaucgucagcuccaaguacaagcagcgguacgagugccgccugcccgccggggccauccacuuccagcgggagcgcgaggaggagacgcccgccuaccagggcccggggauccccgagcugcucagccccaugcgggacgcccccugccugcugaagaccaaggacugguggaccuacgaguucugcuacggccgccacauccagcaguaccacauggaggacuccgagaucaagggggaggugcucuaccugggcuacuaccagagcgcguucgacugggacgacgagaccgccaaggccuccaagcagcaccggcugaagcgcuaccacagccagacguacggcaacggguccaagugcgaccucaacggccggccgcgcgaggccgaggugcgguuccugugcgacgagggggcgggcaucagcggcgacuacaucgaccgcgucgacgagccccuguccugcagcuacgugcucaccauccggacgccccgccugugcccccacccgcugcuccggcccccgcccuccgccgcgccccaggccauccugugccaccccagccugcagcccgaggaguacauggccuacgugcagcgccaggccgacagcaagcaguacggggacaagaucaucgaggagcuccaggaccugggcccccaggucugguccgagaccaagagcgggguggccccgcagaagauggccggcgccucccccaccaaggacgacagcaaggacuccgacuucuggaagaugcugaacgagcccgaggaccaggcccccgggggcgaggaggugccggcggaggagcaggaccccagccccgaggccgccgacuccgccagcggcgcccccaacgacuuccagaacaacguccaggugaaggugauccgguccccggcggaccucauccgcuucaucgaggagcugaagggcgggaccaagaaggggaagcccaacaucggccaggagcagcccgucgacgacgccgccgaggugccgcagcgggagcccgagaaggagcgcggggaccccgagcggcagcgcgagauggaggaggaggaggacgaggacgaggacgaggacgaggacgaggacgagcgccagcugcucggcgaguucgagaaggagcuggagggcauccugcuccccagcgaccgggaccgccugcgguccgaggugaaggccgggauggagcgcgagcuggagaacaucauccaggagaccgagaaggagcucgacccggacggccugaagaaggagagcgagcgggaccgcgccaugcuggcgcucaccuccacgcugaacaagcugaucaagcggcuggaggagaagcagagccccgagcucgucaagaagcacaagaagaagcgcguggugcccaagaagcccccgcccagcccccagcccaccgaggaggacccggagcaccggguccgcgugcgggugaccaagcugcgccucgggggccccaaccaggaccugaccguccuggagaugaagcgggagaacccccagcugaagcagaucgaggggcucgugaaggagcugcuggagcgcgagggccucacggccgccggcaagaucgagaucaagaucguccggcccugggccgaggggaccgaggagggcgcgcgcuggcugaccgacgaggacacccggaaccugaaggagaucuucuucaacauccucgugccgggggccgaggaggcccagaaggagcgccagcggcagaaggagcuggaguccaacuaccgccgcguguggggcucccccggcggggagggcacgggggaccuggacgaguucgacuucuga

SEQ ID NO: 1384 - RNA, 303 nt, Artificial Sequence
  AAI13433_variant
augcgcgcccugacccuccuggcccugcucgcgcuggccgcccugugcaucgccggccaggccggggcgaagcccagcggcgccgaguccagcaagggggccgccuucguguccaagcaggagggcagcgaggucgugaagcggccgcgccgguaccucuaccaguggcugggggcgcccgugcccuaccccgacccgcuggagccccgccgggaggucugcgagcucaaccccgacugcgacgagcuggccgaccacaucggcuuccaggaggccuaccgccgguucuacggccccguguga

SEQ ID NO: 1385 - RNA, 945 nt, Artificial Sequence
  EAX06008_variant
augcgcaucgccgugaucugcuucugccugcucggcaucacgugcgccauccccgucaagcaggcggacagcggguccagcgaggagaagcagcuguacaacaaguacccggacgccguggccaccuggcugaaccccgaccccucccagaagcagaaccuccuggcgccccagaacgccgugagcuccgaggagaccaacgacuucaagcaggagacccugccgagcaaguccaacgagagccacgaccacauggacgacauggacgacgaggacgacgacgaccacgucgacucccaggacagcaucgacuccaacgacagcgacgacguggacgacaccgacgacucccaccagagcgacgagucccaccacagcgacgaguccgacgagcucgugaccgacuuccccacggaccugcccgccaccgaggucuucacccccguggugccgaccgucgacacguacgacggccgcggggacagcgugguguacggccugcgguccaagagcaagaaguuccggcgccccgacauccaguaccccgacgccaccgacgaggacaucaccagccacauggaguccgaggagcucaacggggccuacaaggccauccccgucgcgcaggaccugaacgccccgagcgacugggacucccggggcaaggacagcuacgagaccucccagcuggacgaccagagcgccgagacgcacucccacaagcagagccgccucuacaagcggaaggccaacgacgaguccaacgagcacagcgacgugaucgacucccaggagcugagcaaggugucccgcgaguuccacagccacgaguuccacucccacgaggacaugcuggucguggaccccaagagcaaggaggaggacaagcaccucaaguuccggaucucccacgagcuggacagcgccuccagcgaggugaacuga

SEQ ID NO: 1386 - RNA, 903 nt, Artificial Sequence
  EAX06009_variant
augcgcaucgccgugaucugcuucugccugcucggcaucacgugcgccauccccgucaagcaggcggacagcggguccagcgaggagaagcagcuguacaacaaguacccggacgccguggccaccuggcugaaccccgaccccucccagaagcagaaccuccuggcgccccagacccugccgagcaaguccaacgagagccacgaccacauggacgacauggacgacgaggacgacgacgaccacguggacucccaggacagcaucgacuccaacgacagcgacgacgucgacgacaccgacgacucccaccagagcgacgagucccaccacagcgacgaguccgacgagcucgugaccgacuuccccaccgaccugcccgccacggagguguucacccccgucgugccgaccguggacaccuacgacggccgcggggacagcgucguguacggccugcgguccaagagcaagaaguuccggcgccccgacauccaguaccccgacgccacggacgaggacaucaccucccacauggagagcgaggagcucaacggggccuacaaggccauccccguggcccaggaccugaacgcgccgagcgacugggacucccggggcaaggacagcuacgagaccucccagcuggacgaccagagcgccgagacccacucccacaagcagagccgccucuacaagcggaaggccaacgacgaguccaacgagcacagcgacgucaucgacucccaggagcugagcaaggugucccgcgaguuccacagccacgaguuccacucccacgaggacaugcugguggucgaccccaagagcaaggaggaggacaagcaccucaaguuccggaucucccacgagcuggacagcgccuccagcgaggugaacuga

SEQ ID NO: 1387 - RNA, 864 nt, Artificial Sequence
  EAX06010_variant
augcgcaucgccgugaucugcuucugccugcucggcaucacgugcgccauccccgucaagcaggcggacagcggguccagcgaggagaagcagaacgccguguccagcgaggagaccaacgacuucaagcaggagacccugccguccaagagcaacgagucccacgaccacauggacgacauggacgacgaggacgacgacgaccacguggacagccaggacuccaucgacagcaacgacuccgacgacgucgacgacaccgacgacagccaccaguccgacgagagccaccacuccgacgagagcgacgagcuggugaccgacuuccccaccgaccuccccgccacggagguguucacccccgucgugccgaccguggacaccuacgacggccgcggggacuccgucguguacggccugcggagcaaguccaagaaguuccggcgccccgacauccaguaccccgacgccacggacgaggacaucaccagccacauggagagcgaggagcugaacggggccuacaaggcgauccccguggcccaggaccucaacgccccguccgacugggacagccggggcaaggacuccuacgagaccagccagcuggacgaccaguccgccgagacccacagccacaagcagucccgccuguacaagcggaaggcgaacgacgagagcaacgagcacuccgacgucaucgacagccaggagcucuccaaggugagccgcgaguuccacucccacgaguuccacagccacgaggacaugcugguggucgaccccaaguccaaggaggaggacaagcaccugaaguuccggaucagccacgagcucgacuccgccagcuccgaggugaacuga

SEQ ID NO: 1388 - RNA, 984 nt, Artificial Sequence
  BAH12087_variant
augggcaucgugccccgcagccuggacaagaaggcccaccggguccaguuccagcucaaccgcaucaaggccaagaucgagcugccgugggggucccugcagcucgacugccugaugaagacccugaaggagcucuacaacaaguaccccgacgcgguggccaccuggcugaaccccgaccccagccagaagcagaaccugcucgccccgcagaacgccguguccagcgaggagacgaacgacuucaagcaggagacccugcccuccaagagcaacgagucccacgaccacauggacgacauggacgacgaggacgacgacgaccacgucgacagccaggacuccaucgacagcaacgacuccgacgacguggacgacaccgacgacagccaccaguccgacgagagccaccacuccgacgagagcgacgagcuggugaccgacuuccccacggaccuccccgccaccgaggucuucaccccgguggugcccaccgucgacacguacgacggccgcggggacuccgugguguacggccugcggagcaaguccaagaaguuccggcgccccgacauccaguaccccgacgcgaccgacgaggacaucaccagccacauggagagcgaggagcugaacggggccuacaaggccaucccggucgcccaggaccucaacgcgcccuccgacugggacagccggggcaaggacuccuacgagaccagccagcuggacgaccaguccgccgagacgcacagccacaagcagucccgccuguacaagcggaaggccaacgacgagagcaacgagcacuccgacgugaucgacagccaggagcucuccaaggugagccgcgaguuccacucccacgaguuccacagccacgaggacaugcuggucguggaccccaaguccaaggaggaggacaagcaccugaaguuccggaucagccacgagcucgacuccgccagcuccgaggugaacuga

SEQ ID NO: 1389 - RNA, 879 nt, Artificial Sequence
  AEA49030_variant
augcgcaucgccgugaucugcuucugccugcucggcaucacgugcgccauccccgucaagcaggcggacagcggguccagcgaggagaagcagcuguacaacaaguacccggacgccguggccaccuggcugaaccccgaccccucccagaagcagaaccuccuggcgccccagaacgccgugagcuccgaggagaccaacgacuucaagcaggagacccugccgagcaaguccaacgagagccacgaccacauggacgacauggacgacgaggacgacgacucccaccagagcgacgagucccaccacagcgacgaguccgacgagcucgucaccgacuuccccaccgaccugcccgccacggagguguucacccccguggucccgaccguggacaccuacgacggccgcggggacagcguggucuacggccugcgguccaagagcaagaaguuccggcgccccgacauccaguaccccgacgccacggacgaggacaucaccucccacauggagagcgaggagcucaacggggccuacaaggccauccccguggcgcaggaccugaacgccccguccgacugggacagccggggcaaggacagcuacgagaccucccagcuggacgaccagagcgccgagacccacucccacaagcagagccgccucuacaagcggaaggccaacgacgaguccaacgagcacagcgacgugaucgacucccaggagcugagcaaggucucccgcgaguuccacagccacgaguuccacucccacgaggacaugcuggugguggaccccaagagcaaggaggaggacaagcaccucaaguuccggaucucccacgagcuggacagcgccuccagcgaggucaacuga

SEQ ID NO: 1390 - RNA, 945 nt, Artificial Sequence; identical to SEQ ID NO: 1385
  AAA86886_variant

SEQ ID NO: 1391 - RNA, 1182 nt, Artificial Sequence
  AAA59988_variant
auggaggagccccagagcgacccguccguggagccgccccugagccaggagaccuucuccgaccucuggaagcugcugcccgagaacaacguccucagcccccugcccucccaggccauggacgaccugaugcucagccccgacgacaucgagcagugguucaccgaggaccccggcccggacgaggcgccccgcaugcccgaggccgcgcccccgguggcccccgcccccgccgcccccacgccggccgcccccgcccccgcgcccuccuggccgcugagcuccagcgugcccucccagaagaccuaccaggggagcuacggcuuccggcugggguuccuccacuccggcaccgccaagagcgugaccugcacguacucccccgcccugaacaagauguucugccagcuggccaagaccugccccguccagcucuggguggacagcaccccgccgcccgggacccgcguccgggccauggcgaucuacaagcagucccagcacaugacggagguggugcgccggugcccccaccacgagcgcugcagcgacuccgacggccuggccccgccccagcaccugauccgggucgagggcaaccuccgcguggaguaccuggacgaccggaacaccuuccgccacagcguggucgugcccuacgagccgcccgagguggggagcgacugcaccaccauccacuacaacuacaugugcaacuccagcugcaugggcgggaugaaccggcgccccauccugacgaucaucacccucgaggacuccagcggcaaccugcuggggcggaacuccuucgagguccgcgugugcgccugccccggccgggaccgccggaccgaggaggagaaccuccgcaagaagggcgagccccaccacgagcugccgcccgggagcaccaagcgggcccugcccaacaacacguccagcagcccccagcccaagaagaagccccucgacggcgaguacuucacccugcagauccgcgggcgggagcgcuucgagauguuccgcgagcugaacgaggcccucgagcugaaggacgcgcaggccggcaaggagcccggcgggucccgggcccacuccagccaccugaaguccaagaagggccagagcaccucccgccacaagaagcucauguucaagaccgaggggccggacagcgacuga

SEQ ID NO: 1392 - RNA, 309 nt, Artificial Sequence
  AAF88037_variant
augagcgcccgcgugcggucccgcagccggggccgcggggacggccaggaggcccccgacgucguggcguucguggcccccggggagucccagcaggaggagccgcccaccgacaaccaggacaucgagcccggccaggagcgggaggggaccccgcccaucgaggagcgcaaggucgagggcgacugccaggagauggaccuggagaagacgcggagcgagcgcggcgacggguccgacgugaaggagaagaccccgcccaaccccaagcacgccaagaccaaggaggccggcgacgggcagcccuga

SEQ ID NO: 1393 - RNA, 1209 nt, Artificial Sequence
  AAA60003_variant
augcagaugagccccgcccugaccugccucgugcuggggcuggcccucgucuucggggagggcuccgcggugcaccacccgcccagcuacguggcccaccuggccuccgacuucgggguccgcguguuccagcaggucgcccaggccagcaaggaccggaacgugguguucucccccuacggcguggcgagcguccuggccaugcuccagcugaccaccgggggcgagacgcagcagcagauccaggccgccaugggcuucaagaucgacgacaaggggauggcgcccgcccugcgccaccucuacaaggagcugaugggcccguggaacaaggacgagaucuccaccaccgacgccaucuucgugcagcgggaccugaagcucgugcagggguucaugccccacuucuuccgccuguuccggagcacggucaagcaggucgacuucuccgagguggagcgcgcccgguucaucaucaacgacugggugaagacccacaccaagggcaugaucagcaaccugcucgggaagggcgccguggaccagcugacccgccuggugcucgucaacgcgcuguacuucaacggccaguggaagacgcccuuccccgacuccagcacccaccggcgccuguuccacaaguccgacgggagcaccguguccgugccgaugauggcccagaccaacaaguucaacuacacggaguucaccacccccgacggccacuacuacgacauccucgagcugcccuaccacggggacacccugagcauguucaucgccgcccccuacgagaaggaggucccgcucuccgcccugacgaacauccugagcgcgcagcucaucucccacuggaagggcaacaugacccggcugccccgccugcucgugcugcccaaguucagccuggagaccgagguggaccuccggaagccccuggagaaccugggcaugaccgacauguuccgccaguuccaggccgacuucacgagccucuccgaccaggagccgcugcacgucgcccaggcccugcagaaggugaagaucgaggucaacgagagcgggaccguggccuccagcuccaccgcggugaucgucagcgcccggauggcccccgaggagaucaucauggaccgccccuuccucuucguggugcggcacaaccccaccggcacgguccuguucaugggccaggugauggagccguga

SEQ ID NO: 1394 - RNA, 1248 nt, Artificial Sequence
  AAA36797_variant
auggaggaccugugcguggccaacacccucuucgcccugaaccuguucaagcaccucgcgaaggccagccccacccagaaccuguuccuguccccguggagcaucuccagcacgauggccauggucuacaugggcucccgcgggagcaccgaggaccagauggccaaggugcuccaguucaacgaggugggcgccaacgcggucacccccaugacccccgagaacuucacguccugcggguucaugcagcagauccagaagggcagcuaccccgacgccauccugcaggcccaggccgcggacaagauccacuccagcuuccggucccugagcuccgccaucaacgccagcaccgggaacuaccuccuggaguccgugaacaagcuguucggcgagaaguccgccagcuuccgcgaggaguacauccggcucugccagaaguacuacagcuccgagccgcaggccguggacuuccuggagugcgcggaggaggcccgcaagaagaucaacagcugggucaagacccagaccaagggcaagauccccaaccugcuccccgaggggagcguggacggcgacacgcggauggugcuggucaacgccguguacuucaaggggaaguggaagacccccuucgagaagaagcugaacggccucuacccguuccgcgugaacuccgcccagcggacccccguccagaugauguaccugcgcgagaagcugaacaucggguacaucgaggaccucaaggcccagauccuggagcugcccuacgcgggcgacgugagcauguuccuccugcugcccgacgagaucgccgacguguccaccggccucgagcugcuggagagcgagaucacguacgacaagcucaacaaguggaccuccaaggacaagauggccgaggacgaggucgagguguacaucccgcaguucaagcuggaggagcacuacgagcugcggagcauccuccgcuccauggggauggaggacgccuucaacaagggccgggccaacuucagcgggauguccgagcgcaacgaccuguuccugagcgagguguuccaccaggcgauggucgacgugaacgaggagggcaccgaggccgccgccggcaccgggggcgugaugacggggcggaccggccacgggggcccccaguucgucgccgaccaccccuuccucuuccugaucaugcacaagaucaccaacugcauccuguucuucggccgcuucuccagccccuga

SEQ ID NO: 1395 - RNA, 528 nt, Artificial Sequence
  AAA60020_variant
augcugcccccgauggcccuccccagcguguccuggaugcugcugagcugccucaugcugcugucccagguccagggcgaggagccccagcgcgagcuccccagcgcccggauccgcugcccgaagggguccaaggcguacggcagccacugcuacgcccuguuccugucccccaagagcuggaccgacgccgaccucgccugccagaagcggcccuccgggaaccuggugagcgugcuguccggcgccgaggggagcuucgucuccagccucgugaaguccaucggcaacagcuacuccuacguguggaucggccugcacgaccccacccaggggacggagccgaacggcgaggggugggaguggagcuccagcgacgucaugaacuacuucgcgugggagcgcaaccccagcaccaucuccagccccggccacugcgccucccugagccgguccaccgccuuccuccgcuggaaggacuacaacugcaacgugcggcugcccuacgugugcaaguucaccgacuga

SEQ ID NO: 1396 - RNA, 528 nt, Artificial Sequence; identical to SEQ ID NO: 1395
  AAT11159_variant

SEQ ID NO: 1397 - RNA, 381 nt, Artificial Sequence
  AAH39863_variant
auggacaagagccugcuccuggagcugcccauccuccugugcugcuuccgcgcccuguccggcagccucuccaugcggaacgacgccgugaacgagaucgucgcggugaagaacaacuucccggugaucgagaucguccagugccgcaugugccaccuccaguuccccggggagaagugcagccggggccgcgggaucugcaccgccaccacggaggaggccugcauggugggccggauguucaagcgcgacgggaaccccuggcugaccuucaugggcugccugaagaacugcgccgacgugaagggcauccggugguccgucuaccuggugaacuuccgcugcugccggagccacgaccugugcaacgaggaccucuga

SEQ ID NO: 1398 - RNA, 1440 nt, Artificial Sequence
  CCDS42826.1_variant
augaccacccuggccggcgccgugccccgcaugaugcggccggggcccggccagaacuacccccgcagcggguucccccucgaggucuccacgccgcugggccaggggcgggugaaccagcugggcggcguguucaucaacgggcgcccccuccccaaccacauccggcacaagaucgucgagauggcgcaccacggcauccgccccugcgugaucagccggcagcugcgcgugucccacgggugcgucagcaagauccugugccgguaccaggagaccggcuccauccgcccgggggccaucggcggcagcaagcccaagcaggucaccacccccgacguggagaagaagaucgaggaguacaagcgggagaaccccgggauguucuccugggagauccgcgacaagcuccugaaggacgccgugugcgaccggaacacggugccgagcguguccagcaucucccgcauccugcggagcaaguucggcaagggggaggaggaggaggccgaccucgagcgcaaggaggccgaggaguccgagaagaaggcgaagcacagcaucgacggcauccuguccgagcgggccagcgcgccccaguccgacgagggcagcgacaucgacuccgagcccgaccugccccucaagcgcaagcagcggcgcagccggaccaccuucaccgccgagcagcuggaggagcuggagcgcgccuucgagcgcacgcacuacccggacaucuacacccgggaggagcucgcccagcgcgccaagcugaccgaggcccggguccaggugugguucagcaaccgccgggcccgcuggcggaagcaggcgggggccaaccagcugauggccuucaaccaccucauccccggcggguucccgcccaccgccaugcccacgcugcccaccuaccagcuguccgagaccagcuaccagcccaccuccaucccccaggccgugagcgacccguccagcacgguccaccgcccccagccccugcccccguccaccgugcaccagagcaccauccccuccaaccccgacagcuccagcgcguacugccucccguccacccggcacggcuucagcuccuacacggacagcuucgugccgcccuccgggcccagcaaccccaugaaccccaccaucggcaacggccuguccccgcaggucauggggcuccugaccaaccacggcggggugccccaccagccccagaccgacuacgcccugagcccccucacgggcgggcuggagcccaccaccaccgugagcgccuccugcagccagcgccuggaccacaugaagucccucgacagccugcccacgucccagagcuacugcccgcccaccuacuccaccaccggcuacagcauggaccccgucacgggcuaccaguacgggcaguacggccaguccaagcccuggaccuucuga

SEQ ID NO: 1399 - RNA, 1176 nt, Artificial Sequence
  AAA58397_variant
auggaccuggagaagaacuaccccacgccccgcaccagccggaccggccacgggggcgugaaccagcucgggggcgucuucgugaacgggcgcccccugcccgacgugguccggcagcgcaucguggagcuggcccaccagggcgugcggcccugcgacaucucccgccagcuccgggucagccacggcugcguguccaagauccuggggcgcuacuacgagaccggcagcaucaagccgggggugaucggcggguccaagcccaaggucgccacccccaaggugguggagaagaucgcggaguacaagcggcagaaccccaccauguucgccugggagauccgcgaccggcugcucgccgagcgcgucugcgacaacgacacggugccgagcguguccagcaucaaccggaucauccgcaccaagguccagcagccgcccaaccagcccgugcccgccuccagccacuccaucgugagcaccggcuccgucacccaggugagcuccgugagcacggacuccgccggcagcuccuacagcaucagcgggauccugggcaucaccucccccagcgcggacaccaacaagcggaagcgcgacgaggggauccaggagucccccguccccaacggccacagccugccgggccgggacuuccuccgcaagcagaugcgcggggaccuguucacccagcagcagcuggaggugcucgaccggguguucgagcggcagcacuacuccgacaucuucacgaccaccgagcccaucaagcccgagcagaccacggaguacagcgccauggccucccuggccggcgggcuggacgacaugaaggcgaaccucgccagccccaccccggccgacaucggcuccagcguccccgggccccaguccuaccccaucgugaccggccgcgaccuggccagcaccacgcugccgggcuacccgccccacgucccgcccgccgggcagggcuccuacagcgcgcccacccucaccgggauggugcccggcuccgaguucagcgggucccccuacagccacccccaguacuccagcuacaacgacagcuggcgcuuccccaaccccggccugcugggcuccccguacuacuacagcgccgccgcccgcggggccgcgccgcccgccgccgccaccgccuacgaccggcacuga

SEQ ID NO: 1400 - RNA, 873 nt, Artificial Sequence
  AAF25807_variant
augcgcaucuucgccguguucaucuucaugaccuacuggcaccuccucaacgccuucaccgucacggugcccaaggaccuguacguggucgaguacggcagcaacaugaccaucgagugcaaguucccgguggagaagcagcuggaccucgcggcccugaucguguacugggagauggaggacaagaacaucauccaguucguccacggggaggaggaccugaaggugcagcacuccagcuaccggcagcgcgcccggcuccugaaggaccagcugucccucggcaacgccgcccugcagaucaccgacgugaagcugcaggacgcgggggucuaccgcugcaugaucagcuacggcggggccgacuacaagcggaucaccgugaaggugaacgcccccuacaacaagaucaaccagcgcauccucgucguggaccccgugacguccgagcacgagcugaccugccaggccgagggcuaccccaaggcggaggucaucuggaccagcuccgaccaccaggugcugagcggcaagaccacgaccaccaacuccaagcgggaggagaagcuguucaacgugaccagcacgcugcgcaucaacaccaccaccaacgagaucuucuacugcacguuccggcgccuggacccggaggagaaccacaccgccgagcucgucauccccgagcugccccuggcccacccgcccaacgagcggacccaccucgugauccugggggccauccugcucugccugggcguggcccugaccuucaucuuccgccuccggaaggggcgcaugauggacgucaagaagugcggcauccaggacacgaacuccaagaagcagagcgacacccaccuggaggagaccuga

SEQ ID NO: 1401 - RNA, 867 nt, Artificial Sequence
  AAH74740_variant
augcagaucccccaggccccguggcccguggucugggccgugcugcagcucggcuggcgccccgggugguuccuggacagccccgaccggccguggaacccgcccaccuucucccccgcgcugcucguggucaccgagggcgacaacgccacguucacgugcagcuucuccaacaccagcgaguccuucgugcugaacugguaccgcaugagccccuccaaccagaccgacaagcuggccgccuuccccgaggaccggagccagcccgggcaggacugccgcuuccgggugacccagcuccccaacggccgcgacuuccacauguccgucgugcgggcccgccggaacgacagcgggaccuaccugugcggcgcgaucucccuggccccgaaggcccagaucaaggagagccuccgcgccgagcugcgggugaccgagcgccgggcggagguccccaccgcccaccccucccccagcccgcgccccgccggccaguuccagacgcugguggugggggucgugggcgggcuccugggcucccuggugcuccuggucugggugcuggccgugaucugcagccgggccgcgcgcgggaccaucggcgcccggcgcaccggccagccccucaaggaggaccccuccgccgucccgguguucagcguggacuacggggagcuggacuuccaguggcgggagaagacccccgagccgcccguccccugcgugcccgagcagacggaguacgccaccaucguguuccccuccggcauggggaccagcagccccgcccgccggggcuccgcggacggcccgcgcagcgcccagccccugcgccccgaggacgggcacugcuccuggccgcucuga

SEQ ID NO: 1402 - RNA, 1008 nt, Artificial Sequence
  AAC95296_variant
augggcagcgccucccccgggcugagcuccgugagcccgucccaccuccugcugccgcccgacaccgucagccgcaccggccucgagaaggccgcggccggggccgugggccuggagcggcgcgacuggucccccagcccgcccgccacgcccgagcaggggcuguccgccuucuaccucagcuacuucgacaugcuguaccccgaggacuccagcugggcggccaaggcccccggcgccuccagccgggaggagccgcccgaggagcccgagcagugccccgugaucgacucccaggcgcccgccggcagccuggaccucguccccgggggccugacccuggaggagcacucccucgagcagguccagagcaugguggugggggaggugcugaaggacaucgagaccgccugcaagcugcucaacaucaccgccgaccccauggacugguccccgagcaacgugcagaaguggcugcuguggacggagcaccaguaccgccucccgcccaugggcaaggccuuccaggagcuggcggggaaggagcugugcgccaugagcgaggagcaguuccggcagcgcagcccccucggcggcgacguccugcacgcccaccuggacaucuggaaguccgccgccuggaugaaggagcggaccucccccggggcgauccacuacugcgccagcaccuccgaggagagcuggaccgacuccgagguggacagcuccugcagcggccagcccauccaccucuggcaguuccugaaggagcugcuccugaagccccacuccuacgggcgcuucauccgguggcugaacaaggagaagggcaucuucaagaucgaggacagcgcccagguggcccgccucuggggcauccggaagaaccgccccgccaugaacuacgacaagcugucccggagcauccgccaguacuacaagaaggggaucauccggaagccggacaucucccagcgccuggucuaccaguucgugcaccccaucuga

SEQ ID NO: 1403 - RNA, 2217 nt, Artificial Sequence
  AAA36429_variant
augcagccccgcugggcccagggcgccaccauguggcugggggugcuccugacccugcuccugugcagcucccuggagggccaggagaacagcuucacgaucaacuccgucgacaugaagucccucccggacuggaccgugcagaacgggaagaaccugacccugcagugcuucgcggacgugagcaccacgagccacgucaagccccagcaccagaugcuguucuacaaggacgacguccucuucuacaacaucuccagcaugaaguccaccgagagcuacuucauccccgaggugcggaucuacgacuccggcaccuacaagugcaccgugaucgugaacaacaaggagaagacgaccgccgaguaccagcugcucguggaggggguccccagcccgcgcgugacccuggacaagaaggaggccauccagggcggcaucgugcgggucaacugcuccgugcccgaggagaaggcccccauccacuucaccaucgagaagcuggagcucaacgagaagauggugaagcugaagcgcgagaagaacagccgggaccagaacuucgucauccuggaguuccccguggaggagcaggaccgcgugcucuccuuccggugccaggcccgcaucaucagcgggauccacaugcagacguccgagagcaccaaguccgagcuggucaccgugaccgagagcuucagcacgccgaaguuccacaucucccccaccggcaugaucauggagggggcgcagcugcacaucaagugcaccauccaggugacccaccucgcccaggaguuccccgagaucaucauccagaaggacaaggccaucgucgcccacaaccggcacggcaacaaggcgguguacagcgugauggccauggucgagcacuccgggaacuacacgugcaagguggagagcucccgcaucagcaaggucuccagcaucguggugaacaucaccgagcuguucuccaagcccgagcuggagagcuccuucacccaccucgaccagggcgagcggcugaaccugagcugcuccaucccgggcgccccgcccgccaacuucaccauccagaaggaggacacgaucgucagccagacccaggacuucaccaagaucgccuccaagagcgacuccgggaccuacaucugcacggcgggcaucgacaagguggugaagaaguccaacaccguccagaucguggugugcgagaugcucagccagccccgcaucagcuacgacgcccaguucgaggucaucaaggggcagaccaucgaggugcggugcgagagcaucuccggcacccugcccaucagcuaccagcugcucaagacguccaaggugcuggagaacagcaccaagaacuccaacgaccccgccgucuucaaggacaaccccaccgaggacguggaguaccagugcguggccgacaacugccacagccacgccaagaugcuguccgagguccuccgcgugaaggugaucgcgcccgucgacgaggugcagaucagcauccuguccagcaagguggucgaguccggcgaggacaucgugcugcagugcgccgugaacgaggggagcggcccgaucaccuacaaguucuaccgggagaaggaggggaagcccuucuaccagaugacguccaacgccacccaggccuucuggaccaagcagaaggccagcaaggagcaggagggcgaguacuacugcaccgcguucaaccgcgccaaccacgccuccagcgucccccgguccaagauccucaccgugcgcgugauccuggcccccuggaagaaggggcugaucgccgucgugaucaucggcgugaucaucgcgcuccugaucaucgccgccaagugcuacuuccugcggaaggccaaggcgaagcagaugccggucgagaugagccgccccgccgugccccuccugaacagcaacaacgagaagauguccgaccccaacauggaggccaacagccacuacggccacaacgacgacgugcggaaccacgccaugaagccgaucaacgacaacaaggagccccugaacuccgacguccaguacacggagguccaggugagcuccgccgagagccacaaggaccucgggaagaaggacaccgagaccguguacuccgaggugcgcaaggcggugcccgacgccgucgagagccgcuacucccggaccgagggcagccuggacgggacguga

SEQ ID NO: 1404 - RNA, 2736 nt, Artificial Sequence
  AAG23134_variant
auggcccagcuguuccucccccugcuggccgcgcucgugcuggcccaggccccggccgcccuggcggacguccucgagggcgacagcuccgaggaccgcgccuuccgggugcgcaucgccggggacgcgccccugcagggcgugcucgggggcgcccugaccauccccugccacguccacuaccugcggcccccgcccagccgccgggccgugcuggggagcccccgcgugaaguggaccuuccucucccggggccgcgaggccgagguccugguggcccggggcgugcgcgucaaggugaacgaggccuaccgguuccgcguggcgcugcccgccuacccggccucccucacggacgucagccuggcccuguccgagcuccggcccaacgacagcgggaucuaccgcugcgaggugcagcacggcaucgacgacuccagcgacgccguggaggucaaggugaaggggguggucuuccuguaccgggagggcuccgcgcgcuacgccuucagcuucuccggggcccaggaggccugcgcccggaucggcgcgcacaucgccacccccgagcagcuguacgccgccuaccucggcggguacgagcagugcgacgccggcuggcugagcgaccagaccgugcgcuaccccauccagaccccgcgggaggcgugcuacggggacauggacggcuuccccggcgugcgcaacuacggggucguggaccccgacgaccuguacgacguguacugcuacgccgaggaccucaacggcgagcuguuccugggggacccgcccgagaagcucacgcuggaggaggcccgggccuacugccaggagcgcggcgcggagaucgccaccaccgggcagcuguacgccgccugggacggcggccucgaccacugcucccccggguggcuggccgacggcagcguccgcuaccccaucgugacccccucccagcggugcgggggcgggcugccgggcgucaagacccucuuccuguuccccaaccagaccggcuuccccaacaagcacagccgcuucaacguguacugcuuccgggacuccgcgcagcccagcgccaucccggaggccagcaaccccgccuccaaccccgccagcgacgggcuggaggcgaucgugaccgucaccgagacgcucgaggagcugcagcugccccaggaggccaccgaguccgagagccgcggcgccaucuacuccaucccgaucauggaggacgggggcgggggcagcuccacccccgaggaccccgccgaggccccgcggacccuccuggaguucgagacgcagagcauggugccgcccaccggcuucuccgaggaggaggggaaggcgcuggaggaggaggagaaguacgaggacgaggaggagaaggaggaggaggaggaggaggaggagguggaggacgaggcccucugggccuggcccagcgagcuguccagccccggccccgaggccucccugcccaccgagcccgcggcccaggaggagagccucucccaggccccggcccgcgccguccugcagcccggggcgagcccccugcccgacggcgaguccgaggccagccggccgccccgcgugcacggcccgcccaccgagacgcuccccacgccccgggagcgcaaccuggccucccccagccccagcacccugguggaggcccgggaggucggggaggccaccggcgggccggagcuguccggcgugccccgcggggagagcgaggagacgggcuccagcgagggcgcgcccucccuccugcccgccacccgggccccggaggggacccgcgagcuggaggcccccagcgaggacaacuccggccggaccgcccccgcggggacgagcgugcaggcccagccgguccuccccaccgacuccgccagccgcggcgggguggccgugguccccgcguccggcgacugcgugcccagcccgugccacaacggcgggaccugccuggaggaggaggagggcgugcggugccugugccuccccggguacggcggggaccugugcgacgucggccugcgcuucugcaaccccggcugggacgccuuccagggggccugcuacaagcacuucuccacccggcgcagcugggaggaggccgagacgcagugccgcauguacggcgcccaccucgcguccaucagcacccccgaggagcaggacuucaucaacaaccgguaccgcgaguaccaguggaucgggcugaacgaccggaccaucgagggcgacuuccugugguccgacggggugccgcuccuguacgagaacuggaaccccggccagcccgacagcuacuuccugagcggcgagaacugcguggucaugguguggcacgaccaggggcagugguccgacgugcccugcaacuaccaccucagcuacacgugcaagaugggccuggucuccugcgggccgccgcccgagcugccccucgcccagguguucggccgcccccggcugcgcuacgagguggacaccguccugcgguaccgcugccgggagggccucgcccagcgcaaccugccccugauccggugccaggagaacgggcgcugggaggcgccccagaucagcugcgugccccggcgcccggcccgggcccuccaccccgaggaggaccccgagggccgccaggggcggcugcugggccgcuggaaggcccuccugaucccgcccuccagccccaugcccgggcccuga

SEQ ID NO: 1405 - RNA, 3321 nt, Artificial Sequence
  AAA60049_variant
augcgccugcccggcgccaugccggcccucgcgcugaagggggagcugcuccugcugagccuccugcugcuccuggagccccagaucucccagggccugguggucaccccgcccgggcccgagcucgugcugaacgugagcuccaccuucguccugacgugcagcggcuccgcccccguggugugggagcggaugagccaggagccgccccaggagauggccaaggcccaggacgggaccuucuccagcguccucacccugaccaaccugacgggccucgacaccggcgaguacuucugcacccacaacgacucccgcgggcuggagaccgacgagcggaagcgccuguacaucuucgugcccgaccccacggugggcuuccuccccaacgacgccgaggagcuguucaucuuccugaccgagaucaccgagaucaccauccccugccgggucacggacccgcagcucguggugacccugcacgagaagaagggggacgucgcgcugcccgugcccuacgaccaccagcgcggcuucagcgggaucuucgaggaccgguccuacaucugcaagaccaccaucggcgaccgcgagguggacagcgacgccuacuacgucuaccggcuccagguguccagcaucaacguguccgucaacgccgugcagacggugguccgccagggcgagaacaucacccugaugugcaucgugaucgggaacgagguggucaacuucgaguggaccuacccccggaaggagagcggccgccugguggagccggucaccgacuuccuccuggacaugcccuaccacauccgguccauccugcacauccccagcgccgagcucgaggacuccgggacguacacgugcaacgugaccgagagcgugaacgaccaccaggacgagaaggcgaucaacaucaccgucguggagagcggcuacgugcgccugcugggcgaggucgggacccuccaguucgccgagcugcaccggucccgcacccuccaggugguguucgaggccuacccgccgcccaccguccugugguucaaggacaaccggacccugggcgacagcuccgccggggagaucgcccugagcacgcgcaacguguccgagacccgguacgugagcgagcucacccugguccgcgugaagguggcggaggccggccacuacaccaugcgggccuuccacgaggacgccgagguccagcuguccuuccagcuccagaucaacgugcccgugcgcguccuggagcugagcgagucccaccccgacagcggggagcagacggugcgcugccggggccgcggcaugccccagcccaacaucaucugguccgccugccgggaccucaagcgcugcccccgggagcugcccccgacccugcuggggaacagcuccgaggaggagagccagcucgagaccaacgugaccuacugggaggaggagcaggaguucgaggucguguccacgcugcgccugcagcacguggaccggccccucagcguccgcugcacccugcggaacgcggugggccaggacacccaggaggugaucgucgugccccacucccugccguucaagguggucgugaucagcgccauccucgcccuggugguccugaccaucaucucccucaucauccugaucaugcuguggcagaagaagccccgcuacgagauccgguggaaggugaucgagagcgugagcuccgacgggcacgaguacaucuacgucgaccccaugcagcuccccuacgacagcaccugggagcugccgcgcgaccagcuggugcucggccggacgcugggguccggcgccuucggccagguggucgaggccaccgcgcacgggcugagccacucccaggccaccaugaagguggccgugaagaugcucaagagcaccgcccgcuccagcgagaagcaggcccugauguccgagcugaagaucaugagccaccucggcccccaccugaacgucgugaaccugcucggggcgugcacgaagggcgggcccaucuacaucaucaccgaguacugccgguacggcgaccugguggacuaccugcaccgcaacaagcacaccuuccuccagcaccacuccgacaagcggcggcccccgagcgccgagcuguacuccaacgcccugcccgucggccucccccugcccagccacgugucccugaccggggagagcgacggcggguacauggacauguccaaggacgagagcguggacuacgucccgaugcucgacaugaagggcgacgugaaguacgccgacaucgagagcuccaacuacauggcgcccuacgacaacuacgugcccagcgcccccgagcgcacgugccgcgccacccugaucaacgaguccccgguccugagcuacauggaccucgugggcuucuccuaccaggucgccaacgggauggaguuccuggccagcaagaacugcgugcaccgcgaccuggcggcccggaacgugcucaucugcgagggcaagcuggucaagaucugcgacuucgggcuggcccgcgacaucaugcgggacuccaacuacaucagcaagggcuccaccuuccucccccugaaguggauggcccccgagagcaucuucaacucccuguacaccacgcucagcgacgugugguccuucgggauccugcugugggagaucuucacccucggcggcacccccuacccggagcugcccaugaacgagcaguucuacaacgccaucaagcgcggguaccggauggcgcagcccgcccacgccagcgacgagaucuacgagaucaugcagaagugcugggaggagaaguucgagauccggcccccguucucccagcuggugcuccugcuggagcgccuccugggcgagggguacaagaagaaguaccagcaggucgacgaggaguuccugcgcagcgaccaccccgccauccuccggucccaggcccgccugcccggcuuccacgggcugcggagcccgcucgacaccuccagcgugcuguacacggcggugcagcccaacgagggcgacaacgacuacaucaucccccugcccgacccgaagcccgaggucgccgacgagggcccccucgaggggagccccucccuggccagcuccacccugaacgaggugaacaccagcuccaccaucagcugcgacuccccgcucgagccccaggacgagcccgagcccgagccgcagcuggagcuccagguggagcccgagcccgagcuggagcagcugcccgacagcggcugcccggcgccccgcgccgaggccgaggacuccuuccuguga

SEQ ID NO: 1406 - RNA, 942 nt, Artificial Sequence
  EAX03935_variant
augcugcucagcaagaucaacucccuggcccaccuccgcgccgcgcccugcaacgaccugcacgccaccaagcuggccccgggcaaggagaaggagccccuggagagccaguaccagguggggccccuccugggcuccgggggcuucgggagcgucuacuccggcauccgggugagcgacaaccugcccguggccaucaagcacgucgagaaggaccgcaucuccgacuggggcgagcucccgaacgggacccgggugcccauggaggugguccugcugaagaaggugagcuccggcuucagcggggugauccgccuccuggacugguucgagcggcccgacuccuucguccugauccucgagcgccccgagccggugcaggaccuguucgacuucaucacggagcggggcgcccugcaggaggagcucgcgcgcagcuucuucuggcagguccuggaggccgugcggcacugccacaacugcggggugcugcaccgcgacaucaaggacgagaacauccucaucgaccugaaccggggcgagcugaagcucaucgacuucggcuccggggcccugcugaaggacaccguguacaccgacuucgacggcacccgcgucuacagcccgcccgaguggauccgguaccaccgcuaccacgggcgguccgccgcgguguggagccucggcauccugcuguacgacauggugugcggcgacauccccuucgagcacgacgaggagaucauccgcgggcaggucuucuuccggcagcgcguguccagcgagugccagcaccucauccgguggugccuggcccugcgccccuccgaccggcccacguucgaggagauccagaaccaccccuggaugcaggacgugcuccugccccaggagaccgccgagauccaccuccacagccugagcccgggccccuccaaguga

SEQ ID NO: 1407 - RNA, 303 nt, Artificial Sequence
  AAB81333_variant
auggccgacgaggagaagcugcccccgggcugggagaagcgcaugagccggcccuccgggcgcggcuacuacuucaaccacaucaccaaccccagccagugggagcggcccuccgggaacagcuccagcggcgggaagaucuggcagggcgagccggcccgcgugcggcgcucccaccuccuggucaagcccgugaaggcggcccuggaccucgccgccggcaaccaccccgaccagggcggcgggcccggggccgaccagcggcugcacccggaggaccaggggcgccgggagggccuguga

SEQ ID NO: 1408 - RNA, 492 nt, Artificial Sequence
  AAC50492_variant
auggccgacgaggagaagcugcccccgggcugggagaagcgcaugagccgguccagcgggcgcguguacuacuucaaccacaucaccaacgccucccagugggagcggcccagcggcaacuccagcuccgggggcaagaacgggcagggcgagcccgcgcgcguccggugcagccaccuccuggugaagcacucccagagccgccggcccuccagcuggcgccaggagaagaucacccggacgaaggaggaggcccuggagcucaucaacggcuacauccagaagaucaaguccggggaggaggacuucgagagccuggccucccaguucagcgacugcuccagcgccaaggcccgcggcgaccugggggcguucucccggggccagaugcagaagccguucgaggacgccagcuucgcccuccgcaccggggagaugagcggccccguguucaccgacuccggcauccacaucauccugcggaccgaguga

SEQ ID NO: 1409 - RNA, 138 nt, Artificial Sequence
  AAH31971_variant
augcagaagcccuucgaggacgccagcuucgcccugcgcaccggcgagauguccgggccgguguucaccgacagcggcauccacaucauccuccggacggagugcuggcgccagacccgggggcccaacugcuucuga

SEQ ID NO: 1410 - RNA, 639 nt, Artificial Sequence
  AAG22596_variant
augaagguguucaaguucaucggccugaugauccuccugaccagcgccuucuccgccgggagcggccagucccccaugaccguccugugcagcaucgacugguucauggugacggugcacccguucaugcucaacaacgacgucugcgugcacuuccacgagcugcaccuggggcucggcugcccgcccaaccacgugcagccccacgcguaccaguucaccuaccgcgucaccgagugcgggauccgggccaaggccgugucccaggacauggugaucuacagcaccgagauccacuacuccagcaagggcacgcccuccaaguucgucauccccgugagcugcgccgcgccccagaagucccccuggcugaccaagccgugcagcaugcgcguggccuccaagagccgggccaccgcccagaaggacgagaagugcuacgaggucuucucccugagccaguccagccagcgccccaacugcgacugcccgcccugcguguucuccgaggaggagcacacccaggugcccugccaccaggccggcgcgcaggaggcccagccccuccagcccagccacuuccuggacaucagcgaggacuggucccugcacacggacgacaugaucgggagcauguga

SEQ ID NO: 1411 - RNA, 1986 nt, Artificial Sequence
  AAB00386_variant
auggaccuggugcucaagcgcugccugcugcaccucgccgugaucggcgcccugcuggcggugggggccaccaaggugccccggaaccaggacuggcucggcgucagccgccagcugcggaccaaggccuggaaccgccagcuguacccggaguggacggaggcccagcggcucgacugcuggcgcgggggccaggugucccugaaggugagcaacgacgggcccacccugaucggcgccaacgcguccuucagcaucgcccucaacuuccccggcucccagaagguccugcccgacggccaggugaucugggugaacaacaccaucaucaacgggagccaggucuggggcgggcagccgguguacccccaggagaccgacgacgccugcaucuuccccgacgggggccccugcccguccggcagcuggucccagaagcggagcuucguguacgucuggaagacgugggggcaguacuggcagguccugggcgggcccguguccggccucagcaucggcaccgggcgcgccaugcugggcacccacaccauggaggugacgguguaccaccggcgcgggucccggagcuacgugccccuggcgcacuccagcuccgccuucaccaucaccgaccagguccccuucagcguguccgugagccagcuccgcgcccuggacggcgggaacaagcacuuccugcggaaccagccgcucaccuucgcccugcagcugcacgaccccagcggcuaccucgccgaggcggaccuguccuacacgugggacuucggcgacagcuccgggacccugaucagccgcgcccucgucgugacccacaccuaccuggagcccggccccgugacggcccaggucgugcugcaggccgccaucccgcucaccuccugcgggagcucccccguccccggcaccaccgacgggcaccggcccacggcggaggccccgaacaccaccgccggccaggugcccaccacggagguggucggcaccacccccgggcaggcccccaccgccgagccgagcggcacgaccuccguccaggugcccaccaccgaggugaucagcacggcgcccgugcagaugcccaccgccgaguccaccgggaugaccccggagaaggugcccgucagcgaggugaugggcacgacccuggccgagauguccacccccgaggccaccgggaugaccccggccgaggugagcaucgucgugcuguccggcacgaccgcggcccaggugaccaccacggagugggucgagaccaccgcccgcgagcuccccauccccgagcccgagggcccggacgccagcuccaucaugagcaccgaguccaucacggggagccugggcccccugcucgacgggaccgcgacccugcggcuggugaagcgccaggugccccucgacugcguccuguaccgguacggcagcuucuccgugacccuggacaucgugcagggcaucgagagcgccgagauccuccaggccguccccuccggggagggcgacgccuucgagcugacggugagcugccagggcgggcugccgaaggaggccugcauggagaucuccagccccgggugccagccgcccgcgcagcgccucugccagcccgugcugcccucccccgccugccagcugguccuccaccagauccugaagggcggcagcgggaccuacugccugaacgugucccuggccgacaccaacagccucgccguggucuccacccagcugaucaugcccggccaggaggccgggcugggccaggugccgcucaucguggggauccugcugguccucauggcgguggugcuggccagccugaucuaccggcgccgccucaugaagcaggacuucuccgucccccagcugccccacagcuccagccacuggcugcggcucccccgcaucuucugcuccugcccgaucggcgagaacagcccccugcugagcggccagcaggucuga

SEQ ID NO: 1412 - RNA, 2649 nt, Artificial Sequence
  CCDS10255.1_variant
auggagcccgccccggcccgcagcccccggccccagcaggaccccgcgcgcccgcaggagcccaccaugcccccgcccgagacccccuccgagggccggcagcccagccccuccccgagccccaccgagcgcgcccccgccuccgaggaggaguuccaguuccugcggugccagcagugccaggccgaggccaagugccccaagcuccugccgugccugcacacccucugcagcgggugccuggaggcguccggcaugcagugccccaucugccaggcccccuggccccugggggccgacaccccggcccucgacaacguguucuucgagagccugcagcgccggcuguccgucuaccgccagaucguggacgcgcaggccgugugcacccggugcaaggagagcgccgacuucuggugcuucgagugcgagcagcuccugugcgccaagugcuucgaggcccaccagugguuccugaagcacgaggcgcgcccccucgccgagcugcggaaccaguccguccgcgaguuccuggacggcacgcggaagaccaacaacaucuucugcagcaaccccaaccaccgcacccccacccucacguccaucuacugccgggggugcagcaagccgcugugcugcuccugcgcccugcucgacagcucccacagcgagcugaagugcgacaucuccgccgagauccagcagcgccaggaggagcuggacgccaugacccaggcgcuccaggagcaggacagcgccuucggcgccgugcacgcccagaugcacgccgcggugggccagcuggggcgggcccgcgccgagaccgaggagcugauccgggagcgcguccgccaggugguggcccacguccgggcccaggagcgcgagcuccuggaggcgguggacgcccgguaccagcgcgacuacgaggagauggccagccggcugggccgccucgacgccgugcugcagcggauccgcaccggguccgcgcugguccagcggaugaagugcuacgccagcgaccaggaggugcucgacaugcacggcuuccugcgccaggcccugugccggcuccgccaggaggagccccagucccugcaggccgccgugcggacggacggguucgacgaguucaagguccgccugcaggaccucagcuccugcaucacccagggcaaggacgcggccgugagcaagaaggccucccccgaggccgccagcacgccccgggacccgaucgacguggaccugcccgaggaggcggagcgcgucaaggcccaggugcaggcccugggccucgccgaggcccagcccauggcggugguccaguccgugccgggggcccaccccgugcccgucuacgccuucagcaucaagggccccuccuacggggaggacgugagcaacaccaccaccgcccagaagcggaagugcucccagacccagugcccgcgcaaggucaucaagauggagagcgaggagggcaaggaggcgcggcuggcccgcuccagccccgagcagccccggcccuccaccagcaaggccguguccccgccccaccuggacggcccgcccagcccccgcagccccgugaucggguccgaggucuuccuccccaacagcaaccacguggccuccggcgccggggaggcggaggagcgcguggucgugaucagcuccagcgaggacuccgacgccgagaacagcuccagccgggagcuggacgacuccagcuccgagagcuccgaccugcagcucgagggccccagcacgcugcgcgugcuggacgagaaccucgccgacccgcaggccgaggaccggccccuggucuucuucgaccugaagaucgacaacgagacccagaagaucucccagcuggccgcggugaaccgcgagagcaaguuccggguggucauccagcccgaggccuucuucagcaucuacuccaaggccgugagccucgagguggggcugcagcacuuccuguccuuccucagcuccaugcgccggcccauccuggccugcuacaagcuguggggcccgggccuccccaacuucuuccgcgcccuggaggacaucaaccggcugugggaguuccaggaggcgaucagcggguuccucgccgcccugccccugauccgcgagcggguccccggcgccuccagcuucaagcucaagaaccuggcgcagaccuaccuggcccgcaacauguccgagcggagcgccauggccgccgugcucgcgaugcgcgaccugugccggcugcucgagguguccccggggccccagcuggcccagcacgucuaccccuucagcucccugcagugcuucgccagccuccagccgcuggugcaggccgccgugcugccccgcgcggaggcccggcuccuggcccugcacaacgucuccuucauggagcuccugagcgcccaccgccgggaccgccagggcgggcugaagaaguacucccgguaccucagccugcagaccacgacccugccgcccgcccagcccgcguucaaccuccaggcccugggcaccuacuucgagggccugcucgaggggcccgcccuggcccgcgccgagggcguguccacgccccuggcggggcgcggccucgccgagcgggccagccagcagagcuga

SEQ ID NO: 1413 - RNA, 3228 nt, Artificial Sequence
  CCDS46409.1_variant
augguggucgagguggacagcaugcccgccgccuccagcgugaagaagcccuucggccugcgcuccaagauggggaaguggugcugccggugcuuccccugcugccgcgagagcggcaaguccaacgucgggaccagcggcgaccacgacgacuccgcgaugaagacccuccggagcaagauggggaaguggugccgccacugcuuccccugcugccggggcuccggcaagagcaacgugggggccuccggcgaccacgacgacagcgccaugaagacgcugcgcaacaagauggggaaguggugcugccacugcuuccccugcugccggggcuccagcaaguccaaggugggggccuggggcgacuacgacgacagcgccuucauggagccgcgcuaccacguccggggcgaggaccuggacaagcuccaccgcgcggccuggugggggaaggugccccggaaggaccugaucgugaugcugcgcgacaccgacgucaacaagcaggacaagcagaagcggaccgcccuccaccuggccuccgcgaacggcaacagcgagguggugaagcugcuccuggaccgccggugccagcugaacguccucgacaacaagaagcgcaccgcccugaucaaggccgugcagugccaggaggacgagugcgcccugaugcuccuggagcacgggacggaccccaacauccccgacgaguacggcaacaccacccugcacuacgccaucuacaacgaggacaagcucauggcgaaggcccugcugcucuacggcgccgacaucgaguccaagaacaagcacgggcugaccccgcugcuccugggcgugcacgagcagaagcagcaggucgugaaguuccugaucaagaagaaggccaaccucaacgcccuggaccgguacgggcgcacggcgcugauccucgccgugugcugcggcagcgccagcaucgucucccugcugcucgagcagaacaucgacgugagcucccaggaccugagcgggcagaccgcccgggaguacgccguguccagccaccaccacgucaucugccagcugcucuccgacuacaaggagaagcagaugcugaagaucagcuccgagaacagcaaccccgagcaggaccugaagcucaccuccgaggaggagagccagcgcuucaagggcuccgagaacagccagcccgagaagaugucccaggagcccgagaucaacaaggacggcgaccgggagguggaggaggagaugaagaagcacgagagcaacaacguggggcugcuggagaaccucaccaacggcgucacggcggggaacggcgacaacgggcugaucccgcagcgcaagucccgcacccccgagaaccagcaguuccccgacaacgagagcgaggaguaccaccggaucugcgagcugcucuccgacuacaaggagaagcagaugcccaaguacagcagcgagaacuccaacccggagcaggaccugaagcugaccagcgaggaggagucccagcgccucaagggcagcgagaacggccagcccgagaagcggucccaggagcccgagaucaacaaggacggggaccgcgagcuggagaacuucauggccaucgaggagaugaagaagcaccggagcacccacgugggcuuccccgagaaccugacgaacggggccaccgccggcaacggggacgacggccugaucccgccccgcaagucccggacccccgagagccagcaguuccccgacaccgagaacgaggaguaccacuccgacgagcagaacgacacgcagaagcaguucugcgaggagcagaacaccggcauccuccacgacgagauccugauccacgaggagaagcagaucgaggucguggagaagaugaacagcgagcugucccucagcugcaagaaggagaaggacauccugcacgagaacuccacccugcgcgaggagaucgccaugcuccggcuggagcuggacaccaugaagcaccagagccagcuccgcgagaagaaguaccuggaggacaucgaguccgugaagaagcggaacgacaaccugcucaaggcgcugcagcugaacgagcucacgauggacgacgacaccgccguccuggugaucgacaacgggagcggcaugugcaaggccggguucgccggcgacgacgcgccgcgcgccguguuccccuccaucgucggccggccccgccagcaggggaugaugggcgggaugcaccagaaggagagcuacgugggcaaggaggcccagagcaagcgggggauccugacccucaaguaccccauggagcacggcaucaucaccaacugggacgacauggagaagaucuggcaccacacguucuacaacgagcugcgcguggccccggaggagcaccccguccugcucaccgaggccacccugaaccccaaggcgaaccgggagaagaugacccagaucauguucgagacguucaacaccccggccauguacguggccauccaggccgugcugucccucuacaccagcggccgcaccacggggaucgucauggacuccggcgacggggugacccacaccgugcccaucuacgagggcaacgcccugccccacgcgacccugcggcucgaccuggccgggcgcgagcugcccgacuaccucaugaagauccugaccgagcacggcuaccgcuucacgaccauggccgagcgggagaucguccgcgacaucaaggagaagcugugcuacguggcccucgacuucgagcaggagauggccaccguggcgagcuccagcucccuggagaaguccuacgagcugccggacggccaggucaucaccaucgggaacgagcgguuccgcugccccgaggcccucuuccagcccugcuuccugggcauggagagcugcgggauccacgagacgaccuucaacagcaucaugaaguccgacguggacauccggaaggaccuguacaccaacaccgugcucagcggcgggacgaccauguaccccggcauggcccaccgcaugcagaaggagaucgccgcgcuggccccguccaugaugaagauccggaucaucgccccgcccaagcgcaaguacagcgucugggugggcggguccauccuggccagccucuccaccuuccagcagauguggaucagcaagcaggaguacgacgaguccggccccagcaucgugcaccggaagugccuguga

SEQ ID NO: 1414 - RNA, 1755 nt, Artificial Sequence
  CCDS13562.1_variant
augguggccgaggucugcagcaugcccaccgccuccaccgugaagaagccguucgaccugcgcagcaagaugggcaaguggugccaccaccgguuccccugcugccgcggguccggcaagagcaacauggggacguccggcgaccacgacgacagcuucaugaagaugcuccgguccaagauggggaagugcugccgccacugcuuccccugcugccggggcagcggcaccuccaacguggggaccagcggcgaccacgagaacuccuucaugaagaugcugcgcagcaagauggggaaguggugcugccacugcuuccccugcugccggggcuccggcaagagcaacgucggggcguggggcgacuacgaccacuccgccuucauggagccgcgcuaccacauccggcgcgaggaccuggacaagcuccaccgggccgccuggugggggaaggugccccgcaaggaccugaucgugaugcugcgggacaccgacaugaacaagcgcgacaaggagaagcggacggcccuccaccuggcgagcgccaacggcaacuccgaggucgugcagcugcuccuggaccgccggugccagcugaacgugcucgacaacaagaagcgcaccgcccugaucaaggccauccagugccaggaggacgagugcguccugaugcuccuggagcacggggcggaccggaacauccccgacgaguacggcaacaccgcccugcacuacgccaucuacaacgaggacaagcucauggccaaggcccugcugcucuacggcgcggacaucgagagcaagaacaagugcgggcugacgccccugcuccugggcgugcacgagcagaagcagcaggucgugaaguuccugaucaagaagaaggccaaccucaacgugcuggaccgcuacgggcggaccgcccugauccucgccgugugcugcggcuccgccagcaucgucaaccugcugcucgagcagaacguggacgugagcucccaggaccugagcgggcagaccgcgcgcgaguacgccgucuccagccaccaccacgugaucugcgagcugcucuccgacuacaaggagaagcagaugcugaagaucagcuccgagaacagcaacccggagcaggaccugaagcucaccuccgaggaggagagccagcgccugaagguguccgagaacagccagcccgagaagaugucccaggagcccgagaucaacaaggacugcgaccgggaggucgaggaggagaucaagaagcacggcagcaaccccgugggccugccggagaaccucaccaacggggccuccgccggcaacggggacgacggccugaucccccagcgccggagccgcaagcccgagaaccagcaguuccccgacacggagaacgaggaguaccacuccgacgagcagaacgacacccggaagcagcugagcgaggagcagaacaccgggaucucccaggacgagauccucaccaacaagcagaagcagaucgagguggccgagcagaagaugaacagcgagcugagccugucccacaagaaggaggaggaccuccugcgcgagaacagcguccugcaggaggagaucgcgaugcugcggcucgagcuggacgagacgaagcaccagaaccagcugcgcgagaacaagauccucgaggagaucgaguccgugaaggagaagaccgacaagcugcugcgggccaugcagcucaacgaggaggcccugaccaagaccaacaucuga

SEQ ID NO: 1415 - RNA, 1530 nt, Artificial Sequence
  EAW59519_variant
auggagcgccggcgccuguggggcagcauccagucccgguacaucagcauguccguguggaccagcccccgccggcucgucgagcuggccgggcagucccugcucaaggacgaggcccuggcgaucgccgcccuggagcuccugccgcgcgagcuguucccgccccucuucauggccgccuucgacggccggcacagccagacccugaaggcgauggugcaggccuggcccuucacgugccugccccucggggugcugaugaagggccagcaccuccaccuggagaccuucaaggccguccuggacgggcuggacgugcuccuggcccaggaggugcgcccccggcgcuggaagcugcagguccucgaccugcggaagaacucccaccaggacuucuggaccguguggagcggcaaccgcgcgucccuguacagcuuccccgagcccgaggccgcccagccgaugaccaagaagcggaagguggacggccucuccacggaggccgagcagcccuucauccccgucgaggugcugguggaccuguuccucaaggagggggccugcgacgagcuguucagcuaccugaucgagaaggucaagcgcaagaagaacgugcuccggcugugcugcaagaagcugaagaucuucgcgaugcccaugcaggacaucaagaugauccucaagauggugcagcuggacuccaucgaggaccuggaggugaccugcaccuggaagcucccgacccuggccaaguucagccccuaccugggccagaugaucaaccuccgccggcugcugcucucccacauccacgccagcuccuacaucagccccgagaaggaggagcaguacaucgcccaguucacgucccaguuccugagccugcagugccuccaggcccuguacgucgacagccuguucuuccuccgcgggcggcuggaccagcugcugcgccacgugaugaacccccucgagacccuguccaucaccaacugccggcugagcgagggcgacgucaugcaccucucccagagcccguccgugagccagcuguccgugcugagccucuccggggucaugcugaccgacgugagccccgagccccugcaggcgcuccuggagcgcgccuccgccacgcugcaggaccucguguucgacgagugcggcaucaccgacgaccagcugcuggcccuccugcccagccugucccacugcagccagcucaccacccuguccuucuacggcaacagcaucuccaucagcgcccugcagucccuccugcagcaccugaucgggcucagcaaccugacgcacguccuguacccggugccccucgagagcuacgaggacauccacggcacccugcaccuggagcgccucgcguaccugcacgcccggcugcgcgagcuccugugcgagcuggggcggcccuccauggucuggcucagcgccaaccccugcccgcacugcggcgaccgcaccuucuacgaccccgagcccauccugugccccugcuucaugccgaacuga

SEQ ID NO: 1416 - RNA, 1530 nt, Artificial Sequence; identical to SEQ ID NO: 1415
  AAC51160_variant

SEQ ID NO: 1417 - RNA, 645 nt, Artificial Sequence
  CCDS8069.1_variant
augggccuggccggggugugcgcccuccgccggagcgcgggcuacauccuggucgggggcgccgggggccaguccgccgccgccgcggcccgccgguacagcgagggcgagugggccuccgggggcgugcgcagcuucucccgggccgcggccgccauggcccccaucaaggugggggacgccaucccggcggucgagguguucgagggcgagcccgggaacaaggugaaccuggccgagcuguucaagggcaagaagggcguccuguucggggugcccggcgccuucacccccgggugcagcaagacccaccucccgggcuucguggagcaggccgaggcccucaaggcgaagggcguccaggugguggccugccuguccgucaacgacgccuucgugacgggggaguggggccgcgcccacaaggccgaggggaaggugcggcugcucgcggaccccaccggcgccuucgggaaggagaccgaccugcugcucgacgacagccuggucuccaucuucggcaaccgccggcugaagcgcuucagcaugguggugcaggacggcaucgucaaggcccucaacguggagcccgacgggaccggccugacgugcucccuggcccccaacaucaucagccagcucuga

SEQ ID NO: 1418 - RNA, 309 nt, Artificial Sequence
  AAA63250_variant
auggugcgcuaccggguccgcagccuguccgagcggagccacgagguguaccgccagcagcuccacggccaggagcaggggcaccacggccaggaggagcaggggcugucccccgagcacguggaggucuacgagcggacccacggccagagccacuaccgccggcgccacugcucccggcgccggcugcaccgcauccaccggcgccagcaccggagcugccgccggcgcaagcggcgcuccugccggcaccgccgccggcaccgccgggggugccgcacccggaagcgcacgugccggcgccacuga

SEQ ID NO: 1419 - RNA, 1662 nt, Artificial Sequence
  AAH50416_variant
auggugcagcgccugugggucagccggcuccugcgccaccggaaggcccagcugcuccuggugaaccugcucaccuucggccuggaggugugccuggccgcggggaucaccuacgugcccccgcuccugcuggaggugggcguggaggagaaguucaugacgaugguccucgggaucggccccgugcuggggcuggugugcgucccccuccugggcuccgccagcgaccacuggcgcggccgguacgggcgccggcgccccuucaucugggcccugucccucggcauccugcugagccucuuccugaucccgcgggccggguggcuggccggccuccugugccccgacccccgcccccuggagcucgcgcugcugauccucggggugggccugcuggacuucugcggccaggugugcuucaccccgcucgaggcccugcuguccgaccucuuccgggaccccgaccacugccgccaggccuacagcgucuacgccuucaugaucucccucgggggcugccugggguaccugcugcccgcgaucgacugggacaccagcgcccuggcccccuaccucggcacccaggaggagugccuguucggccugcucacgcugaucuuccugaccugcguggccgccacccuccugguggcggaggaggccgcccuggggcccaccgagcccgccgagggccuguccgcccccagccucagcccccacugcugcccgugccgggcgcgccuggccuuccggaaccugggggcccuccugccccgccugcaccagcucugcugccggaugccccgcacgcugcggcgccuguucgucgccgagcucugcuccuggauggcccugaugaccuucacccuguucuacaccgacuucgugggcgaggggcucuaccagggcgugccccgggcggagccgggcacggaggcccgccgccacuacgacgaggggguccggaugggcucccuggggcuguuccuccagugcgccaucagccugguguucucccuggugauggaccgccucguccagcgguucggcacccgcgccguguaccuggccagcguggcggccuuccccgucgccgccggggcgaccugccugucccacagcguggccgucgugaccgccuccgccgcccucacgggcuucaccuucagcgcgcugcagauccugcccuacacccucgccagccuguaccaccgggagaagcaggucuuccugcccaaguaccgcggcgacaccgggggcgccuccagcgaggacucccucaugacgagcuuccugccggggcccaagcccggcgcccccuucccgaacgggcacgucggcgccggcggguccggccugcucccgccgccgcccgcgcugugcggggccagcgccugcgacguguccgugcgggucguggugggcgagcccaccgaggcccgcgucgugcccggccgggggaucugccuggaccucgccauccuggacagcgcguuccugcucucccagguggcccccagccuguucaugggcuccaucguccagcugagccaguccgugaccgccuacauggugagcgccgcggggcucggccuggucgccaucuacuucgccacccaggugguguucgacaaguccgaccuggccaaguacagcgccuga

SEQ ID NO: 1420 - RNA, 648 nt, Artificial Sequence
  CBI83574_variant
auggccagccugcagaugcgcggcaaccccgggucccacuucugcggcgggacccucauccacccgagcuucgugcugaccgccgcgcacugccugcgggacaucccccagcgccucgucaacguggugcugggcgcccacaacguccggacgcaggagcccacccagcagcacuucuccguggcccagguguuccugaacaacuacgacgccgagaacaagcucaacgacauccugcugauccagcucagcucccccgccaaccugagcgcguccgucgccaccgugcagcugccgcagcaggaccagcccgugccccacgggacccagugccucgccaugggcuggggccgcgucggggcccacgacccgcccgcccaggugcugcaggagcugaacgugacggucgugaccuucuucugccggccccacaacaucugcaccuucgugccccgccggaaggcgggcaucugcuucggggacagcggcgggccccucaucugcgacggcaucauccagggcaucgacuccuucgucaucugggggugcgccacccgccuguucccggacuucuucacgcggguggcccuguacguggacuggauccgcagcacccuccggcgcgucgaggccaagggccggcccuga

SEQ ID NO: 1421 - RNA, 771 nt, Artificial Sequence
  AAH96183_variant
auggcccaccggcccccgagccccgcccuggcguccgugcuccuggcccugcuccugagcggcgccgcccgcgccgcggagaucgucgggggccacgaggcccagccccacucccgccccuacauggccagccugcagaugcgggggaacccgggcucccacuucugcgggggcacccucauccaccccagcuucgugcugaccgccgcgcacugccugcgcgacaucccccagcggcucgugaacgucgugcugggcgcccacaacgugcgcacgcaggagcccacccagcagcacuucuccgucgcccagguguuccugaacaacuacgacgccgagaacaagcucaacgacgugcugcugauccagcucagcuccccggccaaccugagcgcguccgucgccaccgugcagcugccccagcaggaccagcccgugccccacgggacccagugccucgccaugggcugggggcgggucggcgcccacgacccgcccgcccaggugcugcaggagcugaacgugacggucgugaccuucuucugccgcccccacaacaucugcaccuucgugccccggcgcaaggcggggaucugcuucggcgacagcggcgggccgcucaucugcgacggcaucauccaggggaucgacuccuucgucaucuggggcugcgccacccggcuguuccccgacuucuucacgcgcguggcccuguacguggacuggauccggagcacccuccgccgggucgaggccaagggccgccccuga

SEQ ID NO: 1422 - RNA, 2760 nt, Artificial Sequence
  CCDS45721.1_variant
auguggcuggccgccgcggcccccagccucgcccgccggcugcuguuccucggcccgcccccgccgccccugcugcuccugguguucucccgcagcucccggcgccggcugcacagccucgggcuggccgccaugcccgagaagcgccccuucgagcggcugcccgcggacgucucccccaucaacuacagccucugccugaagcccgaccugcucgacuucaccuucgagggcaagcuggaggccgccgcccaggugcgccaggcgaccaaccagaucgugaugaacugcgccgacaucgacaucaucacggccuccuacgcccccgagggggacgaggagauccacgccaccggcuucaacuaccagaacgaggacgagaaggucacccugagcuuccccuccacccuccagacggggaccggcacccugaagaucgacuucgugggcgagcugaacgacaagaugaagggguucuaccggagcaaguacaccacgccguccggcgaggugcgcuacgcggccgucacccaguucgaggccaccgacgcccggcgcgccuuccccugcugggacgagcccgcgaucaaggccaccuucgacaucagccucguggugcccaaggaccgggucgcccuguccaacaugaacgugaucgaccgcaagccguaccccgacgacgagaaccugguggaggucaaguucgcccggacgcccgugaugagcaccuaccucguggccuucgucgugggggaguacgacuucguggagacccgcuccaaggacggcgucugcgugcggguguacacccccgucgggaaggcggagcagggcaaguucgcccuggagguggccgccaagacgcugccguucuacaaggacuacuucaacgugcccuacccccuccccaagaucgaccugaucgccaucgcggacuucgccgccggcgccauggagaacugggggcuggucaccuaccgcgagaccgcgcuccugaucgacccgaagaacagcugcuccagcucccggcaguggguggcccuggucgugggccacgagcucgcccaccagugguucgggaaccuggugaccauggagugguggacgcaccuguggcucaacgagggcuucgccagcuggaucgaguaccugugcgucgaccacugcuuccccgaguacgacaucuggacccaguucgugagcgccgacuacacccgcgcgcaggagcuggacgcccucgacaacucccaccccaucgaggugagcgucggccaccccuccgagguggacgagaucuucgacgccaucagcuacuccaagggggccagcgugauccggaugcugcacgacuacaucggcgacaaggacuucaagaaggggaugaacauguaccugaccaaguuccagcagaagaacgccgcgacggaggaccucugggagucccuggagaacgccagcggcaagccgaucgccgccgucaugaacaccuggaccaagcagaugggguucccccugaucuacguggaggccgagcaggucgaggacgaccgccuccugcgccugucccagaagaaguucugcgcgggcggcagcuacgugggggaggacugcccccaguggauggugccgaucaccaucuccacgagcgaggaccccaaccaggccaagcucaagauccugauggacaagcccgagaugaacgugguccugaagaacgugaagcccgaccagugggugaagcugaaccucggcaccgucggguucuaccggacccaguacuccagcgccaugcuggagucccugcucccgggcauccgcgaccugagccugccgcccguggaccggcucgggcugcagaacgaccuguucucccucgcccgcgcgggcaucaucagcaccguggagguccugaaggugauggaggccuucgugaacgagcccaacuacacggucugguccgaccugagcugcaaccucggcauccugagcacccugcucucccacaccgacuucuacgaggagauccaggaguucgugaaggacguguucagccccaucggggagcggcugggcugggaccccaagcccggggagggccaccuggacgcccuccugcgcgggcugguccucggcaagcugggcaaggccgggcacaaggccacccuggaggaggcgcggcgccgguucaaggaccacguggagggcaagcagauccucuccgccgaccugcgcagccccguguaccugacgguccucaagcacggggacggcaccacccuggacaucaugcugaagcuccacaagcaggccgacaugcaggaggagaagaaccggaucgagcgcgugcugggcgccacccugcucccggaccugauccagaaggugcugaccuucgcccucuccgaggagguccggccccaggacacggugagcgugaucgggggcgucgccgggggcuccaagcacgggcgcaaggcggccuggaaguucaucaaggacaacugggaggagcuguacaaccgguaccagggcggcuuccugaucagccgccucaucaagcuguccguggagggguucgccguggacaagauggccggcgaggucaaggcguucuucgagagccaccccgcccccuccgccgagcggaccauccagcagugcugcgagaacauccugcucaacgccgcguggcugaagcgcgacgccgagagcauccaccaguaccugcuccagcggaaggccuccccgcccaccguguga

SEQ ID NO: 1423 - RNA, 660 nt, Artificial Sequence
  AAH65513_variant
augcugcgcgccggcgcccccaccggggaccucccgcgggcgggcgaggugcacaccgggacgaccaucauggccgucgaguucgacggcgggguggugaugggcagcgacucccgcgucagcgccggcgaggccguggugaaccgggucuucgacaagcugagcccccugcacgagcgcaucuacugcgcccucuccggguccgcggccgacgcccaggccguggcggacauggccgccuaccagcuggagcugcacggcaucgagcucgaggagccgccccuggugcuggccgccgcgaacgucgugcggaacaucagcuacaaguaccgcgaggaccucuccgcccaccugaugguggccgggugggaccagcgggagggcgggcaggucuacggcacccugggcgggaugcucacccgccagcccuucgccaucggcgggagcggcuccacguucaucuacggcuacguggacgccgcguacaagcccgggaugagccccgaggagugccggcgcuucaccaccgacgccaucgcccuggccaugucccgggacggcagcuccgggggcgugaucuaccuggucaccaucacggccgcggggguggaccaccgcgugauccucggcaacgagcugcccaaguucuacgacgaguga

SEQ ID NO: 1424 - RNA, 345 nt, Artificial Sequence
  EAW82312_variant
auggccggccuggcccuccagcccgggaccgcgcugcugugcuacagcugcaaggcccagguguccaacgaggacugccuccaggucgagaacugcacccagcugggcgagcagugcuggaccgcccgcauccgggccguggggcugcucaccgugaucagcaagggcugcucccugaacugcgucgacgacagccaggacuacuacguggggaagaagaacaucacgugcugcgacaccgaccugugcaacgccuccggcgcgcacgcccuccagccggccgccgcgauccuggcccugcuccccgcccugggccugcuccugugggggcccggccagcuguga

SEQ ID NO: 1425 - RNA, 372 nt, Artificial Sequence
  AAC39607_variant
augaaggccgugcugcucgcccugcugauggcgggccucgcccugcagcccgggaccgcccugcucugcuacagcugcaaggcccaggucuccaacgaggacugccuccagguggagaacugcacccagcugggcgagcagugcuggaccgcccgcauccgggcgguggggcugcugaccgucaucagcaagggcugcucccugaacugcguggacgacagccaggacuacuacguggggaagaagaacaucacgugcugcgacaccgaccucugcaacgccuccggcgcccacgcccugcagccggcggccgccauccuggcccuccugcccgcccugggccuccugcugugggggcccggccagcucuga

SEQ ID NO: 1426 - RNA, 963 nt, Artificial Sequence
  AAG40776_variant
augagcuccugcaacuucacccacgccaccuucgugcugaucggcauccccgggcucgagaaggcccacuucugggucggcuucccgcugcugagcauguacgugguggcgauguucgggaacugcaucgucguguucaucgugcgcacggagcggucccuccacgcccccauguaccuguuccugugcaugcucgccgccaucgaccuggcccugagcaccuccaccaugcccaagauccucgcgcuguucugguucgacagccgcgagaucuccuucgaggccugccugacccagauguucuucauccacgcccucagcgccaucgaguccacgauccugcuggcgauggccuucgaccgguacgucgccaucugccacccccuccgccacgccgccgugcugaacaacaccgugaccgcgcagaucggcaucgucgccguggugcgggggagccuguucuucuucccgcucccccugcugaucaagcgccucgccuucugccacuccaacguccugagccacuccuacugcgugcaccaggacgugaugaagcuggccuacgccgacacccuccccaacgucguguacggccugacggcgauccugcucgugaugggcgucgacgugauguucaucagccuguccuacuuccugaucauccggaccgugcuccagcugcccagcaaguccgagcgcgccaaggccuucgggaccugcgucagccacaucggcguggugcuggccuucuacgucccgcucaucgggcuguccgugguccaccgguucggcaacagccugcaccccaucgugcgcguggucaugggggacaucuaccuccugcugccgcccgugaucaaccccaucaucuacggcgccaagaccaagcagauccggacgcgcgugcucgcgauguucaagaucagcugcgacaaggaccugcaggccgucggcgggaaguga

SEQ ID NO: 1427 - RNA, 2253 nt, Artificial Sequence
  AAA60209_variant
auguggaaccugcuccacgagaccgacagcgccguggccaccgcgcgccggccccgcuggcugugcgccggggcccugguccucgccgggggcuucuuccugcugggguuccucuucggcugguucaucaaguccagcaacgaggccacgaacaucaccccgaagcacaacaugaaggcguuccuggacgagcugaaggccgagaacaucaagaaguuccucuacaacuucacccagaucccccaccuggccgggaccgagcagaacuuccagcuggccaagcagauccagucccaguggaaggaguucggccucgacagcguggagcuggcgcacuacgacgugcugcucuccuaccccaacaagacgcaccccaacuacaucagcaucaucaacgaggacggcaacgagaucuucaacaccucccuguucgagccgcccccgcccggguacgagaacgucagcgacaucgugccgcccuucuccgccuucagcccccagggcaugcccgagggggaccugguguacgucaacuacgcccggaccgaggacuucuucaagcucgagcgcgacaugaagaucaacugcuccggcaagaucgugaucgcccgguacgggaagguguuccgcggcaacaaggucaagaacgcccagcuggcgggcgccaagggggugauccuguacagcgaccccgccgacuacuucgcccccggcgugaaguccuaccccgacggguggaaccuccccggcggcgggguccagcggggcaacauccugaaccugaacggggccggcgacccgcucacccccggguaccccgcgaacgaguacgccuaccgccggggcaucgccgaggccgugggccugcccagcaucccggugcaccccaucggguacuacgacgcccagaagcugcucgagaagaugggcggguccgcgccgcccgacagcuccuggcgcggcagccugaagguccccuacaacguggggcccggcuucacgggcaacuucuccacccagaaggugaagaugcacauccacagcaccaacgaggucacccggaucuacaacgugaucgggacgcugcgcggcgccguggagcccgaccgguacgucauccucgggggccaccgcgacagcuggguguucgggggcaucgacccccaguccggcgccgccgugguccacgagaucgugcggagcuucgggacccugaagaaggagggcuggcgcccgcggcgcaccauccuguucgccuccugggacgcggaggaguucgggcuccugggcagcaccgagugggccgaggagaacucccggcugcuccaggagcgcggcgucgccuacaucaacgccgacagcuccaucgaggggaacuacacgcugcggguggacugcacgccccugauguacagccucgugcacaaccugaccaaggagcugaagucccccgacgagggcuucgagggcaagagccucuacgaguccuggaccaagaaguccccgagccccgaguucagcgggaugccccgcaucuccaagcuggggagcggcaacgacuucgaggucuucuuccagcgccugggcaucgcguccgggcgggcccgcuacaccaagaacugggagaccaacaaguucagcggcuacccccucuaccacuccguguacgagaccuacgagcugguggagaaguucuacgacccgauguucaaguaccaccugaccgucgcccaggugcgcgggggcaugguguucgagcucgccaacagcaucguccugcccuucgacugccgggacuacgccguggugcugcggaaguacgcggacaagaucuacagcaucuccaugaagcacccccaggagaugaagacguacagcgucuccuucgacagccuguucuccgccgugaagaacuucaccgagaucgccagcaaguucuccgagcgccuccaggacuucgacaagagcaaccccaucgugcugcggaugaugaacgaccagcugauguuccucgagcgcgccuucaucgacccgcuggggcugcccgaccggcccuucuaccgccacgucaucuacgcccccuccagccacaacaaguacgcgggcgaguccuucccgggcaucuacgacgcccucuucgacaucgagagcaagguggaccccuccaaggccuggggcgaggugaagcggcagaucuacgucgccgccuucaccgugcaggcggccgccgagacccugagcgagguggccuga

SEQ ID NO: 1428 - RNA, 3921 nt, Artificial Sequence
  CCDS1397.2_variant
augaccauguaccuguggcucaagcugcuggccuucggcuucgccuuccucgacaccgagguguucgucacggggcagagccccaccccgucccccaccggccugaccacggcgaagaugcccagcgugccccuguccagcgacccgcuccccacccacaccaccgccuucucccccgccagcacguucgagcgcgagaacgacuucuccgagaccaccaccagccugucccccgacaacacgagcacccagguguccccggacagccuggacaacgccuccgccuucaacaccaccggggucagcuccgugcagacgccccaccuccccacccacgcggacagccagacccccuccgccggcaccgacacgcagaccuucagcggguccgccgccaacgcgaagcugaacccgacccccggcagcaacgccaucagcgacgugcccggcgagcgguccaccgccagcacguuccccaccgacccggucagcccccugaccaccacgcucucccuggcccaccacuccagcgccgcgcugcccgcccgcaccuccaacaccaccaucacggccaacaccagcgacgccuaccucaacgccuccgagaccaccacgcugagccccuccgggagcgcggugaucuccaccaccaccaucgccaccacgccgagcaagcccacgugcgacgagaaguacgccaacaucaccguggacuaccuguacaacaaggagaccaagcuguucaccgccaagcugaacgucaacgagaacguggagugcggcaacaacacgugcaccaacaacgaggugcacaaccugaccgagugcaagaacgccuccgucagcaucucccacaacagcugcaccgcgcccgacaagacccucauccuggacgugcccccggggguggagaaguuccagcugcacgacugcacccaggucgagaaggccgacaccacgaucugccucaaguggaagaacaucgagaccuucacgugcgacacccagaacaucaccuaccgguuccagugcggcaacaugaucuucgacaacaaggagaucaagcuggagaaccuggagcccgagcacgaguacaagugcgacuccgagauccucuacaacaaccacaaguucaccaacgccagcaagaucaucaagaccgacuucgggagccccggcgagccccagaucaucuucugccgcuccgaggccgcccaccagggcgugaucaccuggaacccgccccagcggagcuuccacaacuucacgcugugcuacaucaaggagaccgagaaggacugccugaaccucgacaagaaccugaucaaguacgaccugcagaaccucaagcccuacaccaaguacgugcugucccugcacgcguacaucaucgccaagguccagcgcaacgggagcgccgccaugugccacuucaccacgaaguccgcgccgcccagccagguguggaacaugaccguguccaugaccagcgacaacuccaugcacgucaagugccggccgccccgcgaccggaacggcccccacgagcgcuaccaccucgagguggaggccgggaacacccuggugcggaacgagagccacaagaacugcgacuuccgcgucaaggaccugcaguacuccacggacuacaccuucaaggccuacuuccacaacggcgacuaccccggcgagcccuucauccuccaccacagcaccuccuacaacagcaaggcccugaucgccuuccuggcguuccucaucaucgugaccuccaucgcccugcuggucgugcucuacaagaucuacgaccugcacaagaagcggagcugcaaccuggacgagcagcaggagcucguggagcgcgacgacgagaagcagcugaugaacgucgagcccauccacgccgacauccugcuggagacguacaagcggaagaucgccgacgaggggcgccucuuccuggccgaguuccaguccaucccgcggguguucagcaaguuccccaucaaggaggcgcgcaagcccuucaaccagaacaagaaccgguacguggacauccugcccuacgacuacaaccgcgucgagcucagcgagaucaacggcgacgccggguccaacuacaucaacgccagcuacaucgacggcuucaaggagccgcggaaguacaucgccgcccaggggccccgcgacgagaccguggacgacuucuggcgcaugaucugggagcagaaggcgaccgugaucgucauggugacccggugcgaggagggcaaccgcaacaagugcgccgaguacuggcccuccauggaggagggcacgcgggccuucggggacguggucgugaagaucaaccagcacaagcgcugccccgacuacaucauccagaagcugaacaucgugaacaagaaggagaaggccaccggccgggaggucacccacauccaguucaccagcuggccggaccacggggugcccgaggacccccaccuccuccugaagcugcgccggcgcgugaacgcguucuccaacuucuucagcggccccaucgucgugcacugcuccgccggggugggccggaccggcacguacaucgggaucgacgccaugcucgagggccuggaggccgagaacaaggucgacguguacggguacguggucaagcugcgccggcagcgcugccucaugguccagguggaggcccaguacauccugauccaccaggcgcugguggaguacaaccaguucggcgagaccgaggugaaccucagcgagcugcacccguaccugcacaacaugaagaagcgggacccgcccuccgagcccagcccccucgaggccgaguuccagcgccugcccuccuaccggagcuggcgcacccagcacaucgggaaccaggaggagaacaaguccaagaaccggaacagcaacgugauccccuacgacuacaaccgcgucccgcugaagcacgagcucgagauguccaaggagagcgagcacgacuccgacgagagcuccgacgacgacagcgacagcgaggagcccuccaaguacaucaacgccagcuucaucauguccuacuggaagcccgaggugaugaucgccgcccagggcccccugaaggagaccaucggcgacuucuggcagaugaucuuccagcggaaggugaaggucaucgugaugcugacggagcucaagcacggggaccaggagaucugcgcgcaguacuggggcgaggggaagcagaccuacggcgacaucgagguggaccugaaggacaccgacaagagcuccaccuacacgcugcgcgucuucgagcuccgccacagcaagcggaaggacucccgcaccguguaccaguaccaguacaccaacuggagcguggagcagcugccggccgagcccaaggagcugaucuccaugauccaggucgugaagcagaagcucccccagaagaacagcuccgagggcaacaagcaccacaagagcacgccccugcugauccacugccgggacgggucccagcagaccggcaucuucugcgcccuccugaaccugcucgagagcgccgagaccgaggagguggucgacaucuuccagguggugaaggcccugcgcaaggcgcggccggggauggucuccaccuucgagcaguaccaguuccuguacgacgugaucgccagcaccuaccccgcccagaacggccaggugaagaagaacaaccaccaggaggacaagaucgaguucgacaacgaggucgacaaggugaagcaggacgccaacugcgugaacccccucggggcgcccgagaagcugccggaggccaaggagcaggccgagggcuccgagcccacgagcggcaccgaggggcccgagcacuccgucaacggccccgccagcccggcccugaaccaggggagcuga

SEQ ID NO: 1429 - RNA, 624 nt, Artificial Sequence
  AAH02977_variant
auggccaagaccuacgacuaccuguucaagcuccugcugaucggcgacagcggggugggcaagaccugcguccucuuccgcuucuccgaggacgccuucaacagcacguucaucuccaccaucgggaucgacuucaagauccggaccaucgagcuggacggcaagcgcaucaagcugcagaucugggacaccgcggggcaggagcgguuccgcacgaucaccaccgccuacuaccggggcgccaugggcaucaugcucguguacgacaucaccaacgagaaguccuucgacaacauccgcaacuggauccggaacaucgaggagcacgccagcgccgacguggagaagaugauccuggggaacaagugcgacgucaacgacaagcgccaggugagcaaggagcggggcgagaagcuggcgcucgacuacgggaucaaguucauggagacguccgccaaggccaacaucaacguggagaacgccuucuucacccuggcgcgcgacaucaaggccaagauggacaagaagcuggagggcaacagcccccagggguccaaccagggcgucaagaucaccccggaccagcagaagcggagcuccuucuuccgcugcgugcuccuguga

SEQ ID NO: 1430 - RNA, 1260 nt, Artificial Sequence
  BAA81688_variant
augaagaacuacaaggccaucggcaagaucggggagggcaccuucagcgaggugaugaagaugcagucccugcgcgacgggaacuacuacgccugcaagcagaugaagcagcgguucgagagcaucgagcaggucaacaaccuccgcgagauccaggcccugcggcgccugaacccccacccgaacauccucaugcugcacgaggugguguucgaccggaaguccggcagccuggcccucaucugcgagcugauggacaugaacaucuacgagcugauccgcgggcggcgcuacccccucuccgagaagaagaucaugcacuacauguaccagcugugcaagagccuggaccacauccaccggaacggcaucuuccaccgcgacgucaagcccgagaacauccucaucaagcaggacgugcugaagcugggcgacuucggguccugccggagcguguacuccaagcagcccuacaccgaguacaucagcacgcgcugguaccgggccccggagugccuccugaccgacggcuucuacaccuacaagauggaccugugguccgccgggugcgucuucuacgagaucgccagccuccagccccuguuccccggcgugaacgagcuggaccagaucuccaagauccacgacgugaucgggacccccgcgcagaagauccucacgaaguucaagcagagccgcgccaugaacuucgacuucccguucaagaagggcuccggcaucccccugcugaccaccaaccucagcccccagugccugucccugcuccacgccauggucgccuacgaccccgacgagcggaucgcggcccaccaggcccugcagcacccguacuuccaggagcagcgcaagaccgagaagcgggcccuggggagccaccgcaaggccggcuuccccgagcaccccguggcgcccgagccgcucuccaacagcugccagaucagcaaggaggggcggaagcagaagcagucccugaagcaggaggaggaccgccccaagcggcgcggccccgccuacgugauggagcugcccaagcucaagcugagcggcgucgugcgccuguccagcuacuccagcccgacgcuccaguccgugcuggggagcggcaccaacgggcggguccccgugcugcgcccccucaagugcauccccgccuccaagaagaccgacccgcagaaggaccugaagcccgcgccccagcagugccggcugcccaccaucgugcgcaagggcgggcgguga

SEQ ID NO: 1431 - RNA, 1389 nt, Artificial Sequence
  AAH08727_variant
auggccagcaacuccagcuccugccccacccccggcgggggccaccugaacggguaccccgugccgcccuacgccuucuucuucccgcccaugcucggcgggcugagcccgcccggcgcgcugaccacgcuccagcaccagcugcccgucuccggcuacagcacccccucccccgccaccaucgagacccagagcuccagcuccgaggagaucgugcccagcccgcccuccccgccgccccugccccgcaucuacaagcccugcuucgugugccaggacaagagcuccggguaccacuacggcgucagcgccugcgaggggugcaagggcuucuuccggcgcuccauccagaagaacaugguguacacgugccaccgggacaagaacugcaucaucaacaaggugacccgcaaccggugccaguacugccgccuccagaagugcuucgaggucgggaugagcaaggaguccgugcggaacgaccgcaacaagaagaagaaggaggugcccaagcccgagugcagcgagagcuacacccugacccccgaggucggcgagcugaucgagaaggugcggaaggcccaccaggagacguuccccgcccucugccagcugggcaaguacaccaccaacaacuccagcgagcagcgcgugucccuggacaucgaccucugggacaaguucagcgagcuguccaccaagugcaucaucaagacggucgaguucgcgaagcagcugcccggguucaccacccucaccaucgccgaccagaucacgcugcugaaggccgccugccucgacauccugauccugcggaucugcacccgcuacacccccgagcaggacaccaugacguucagcgacggccucacccugaaccggacccagaugcacaacgcgggguucggcccccugaccgaccucguguucgccuucgccaaccagcugcugccccucgagauggacgacgccgagacgggccugcuguccgccaucugccucaucugcggggaccgccaggaccuggagcagcccgaccggguggacaugcugcaggagccgcuccuggaggcgcugaaggucuacgugcgcaagcggcgccccagccggccccacauguucccgaagaugcucaugaagaucaccgaccugcgcuccaucagcgccaagggcgccgagcgggugaucacccugaagauggagauccccggguccaugccgccccucauccaggagaugcuggagaacagcgagggccuggacacccucuccgggcagcccggcggcgggggccgcgacgggggcgggcuggccccgccgcccggcagcugcucccccagccugucccccagcuccaaccgcagcagccccgccacgcacucccccuga

SEQ ID NO: 1432 - RNA, 570 nt, Artificial Sequence
  AAB02605_variant
augaccgaguacaagcugguggucgugggcgccgggggcgugggcaagagcgcccucaccauccagcugauccagaaccacuucgucgacgaguacgaccccacgaucgaggacuccuaccgcaagcaggucgugaucgacggggagaccugccugcucgacauccuggacaccgcggggcaggaggaguacagcgccaugcgggaccaguacaugcgcaccggcgagggcuuccugugcguguucgccaucaacaacacgaaguccuucgaggacauccaccaguaccgggagcagaucaagcgcgugaaggacagcgacgacgugccgaugguccucguggggaacaagugcgaccuggccgcccggaccguggagucccgccaggcgcaggaccuggcccggagcuacggcauccccuacaucgagaccuccgccaagacccgccagggggucgaggacgccuucuacacgcucgugcgggagauccgccagcacaagcugcggaagcugaacccgcccgacgagagcggccccgggugcauguccugcaagugcgugcucagcuga

SEQ ID NO: 1433 - RNA, 570 nt, Artificial Sequence
  AAB59445_variant
augaccgaguacaagcugguggucgugggcgccgggggcgugggcaagagcgcccucaccauccagcugauccagaaccacuucgucgacgaguacgaccccacgaucgaggacuccuaccgcaagcaggucgugaucgacggggagaccugccugcucgacauccuggacaccgcggggcaggaggaguacagcgccaugcgggaccaguacaugcgcaccggcgagggcuuccugugcguguucgccaucaacaacacgaaguccuucgaggacauccaccacuaccgggagcagaucaagcgcgugaaggacagcgaggacgugccgaugguccucguggggaacaagugcgaccugcccucccggaccguggacaccaagcaggcccaggaccuggcccgcagcuacggcauccccuucaucgagaccuccgcgaagacgcggcagcgcgucgaggacgccuucuacacccucgugcgggagauccgccaguaccggcugaagaagaucagcaaggaggagaagacccccgggugcgugaagaucaagaagugcaucaucauguga

SEQ ID NO: 1434 - RNA, 570 nt, Artificial Sequence
  AAA60255_variant
augaccgaguacaagcugguggucgugggcgccgggggcgugggcaagagcgcccucaccauccagcugauccagaaccacuucgucgacgaguacgaccccacgaucgaggacuccuaccgcaagcaggucgugaucgacggggagaccugccugcucgacauccuggacaccgcggggcaggaggaguacagcgccaugcgggaccaguacaugcgcaccggcgagggcuuccugugcguguucgccaucaacaacuccaagagcuucgccgacaucaaccucuaccgggagcagaucaagcgcgugaaggacuccgacgacgugccgaugguccugguggggaacaagugcgaccugcccacgcggaccguggacaccaagcaggcccacgagcucgccaagagcuacggcauccccuucaucgagaccuccgcgaagacgcgccagggggucgaggacgccuucuacacccuggugcgggagauccgccaguaccggaugaagaagcugaacagcuccgacgacggcacccaggggugcaugggccuccccugcguggucauguga

SEQ ID NO: 1435 - RNA, 546 nt, Artificial Sequence
  AAB84001_variant
augugcaagggccuggccgcccucccccacagcugccuggagcgcgcgaaggagaucaagaucaagcuggggauccuccugcagaagccggacuccgugggcgaccuggucauccccuacaacgagaagcccgagaagcccgccaagacccagaagaccagccucgacgaggcccugcaguggcgggacucccuggacaagcuccugcagaacaacuacgggcuggccagcuucaaguccuuccucaagagcgaguucuccgaggagaaccuggaguucuggaucgccugcgaggacuacaagaagaucaagagcccggcgaagauggccgagaaggccaagcagaucuacgaggaguucauccagacggaggcccccaaggaggugaacaucgaccacuucaccaaggacaucaccaugaagaaccugguggagcccucccucagcuccuucgacauggcgcagaagcgcauccacgcccugauggagaaggacagccugccccgguucguccgcuccgaguucuaccaggagcucaucaaguga

SEQ ID NO: 1436 - RNA, 2175 nt, Artificial Sequence
  CCDS4362.1_variant
augagcuuccccaaggccccgcugaagcgcuucaacgaccccuccggcugcgcccccagccccggggcguacgacgugaagacccucgagguccugaagggcccgguguccuuccagaagucccagcgguucaagcagcagaaggagagcaagcagaaccugaacguggacaaggacaccacgcuccccgccagcgcccgcaaggucaaguccagcgaguccaaggagagccagaagaacgacaaggaccugaagauccuggagaaggagauccgggugcuccugcaggagcgcggggcccaggaccggcgcauccaggaccuggagaccgagcucgagaagauggaggcccggcugaacgcggcccugcgcgagaagaccucccucagcgccaacaacgccacccuggagaagcagcugaucgagcucacgcggaccaacgagcugcugaaguccaaguucagcgagaacggcaaccagaagaaccuccgcauccugucccuggagcucaugaagcugcggaacaagcgcgagaccaagaugcgggggaugauggcgaagcaggagggcauggagaugaagcuccaggugacccagcgcagccuggaggagucccagggcaagaucgcccagcuggaggggaagcuggucagcaucgagaaggagaagaucgacgagaaguccgagacggagaagcuccuggaguacaucgaggagaucagcugcgccagcgaccagguggagaaguacaagcuggacaucgcccagcucgaggagaaccugaaggagaagaacgacgagauccugucccucaagcagagccuggaggagaacaucgugauccuguccaagcaggucgaggaccucaacgugaagugccagcugcuggagaaggagaaggaggaccacgugaaccggaaccgcgagcacaacgagaaccucaacgccgagaugcagaaccugaagcagaaguucauccuggagcagcaggagcgggagaagcuccagcagaaggagcugcagaucgacagccugcuccagcaggagaaggagcuguccagcucccugcaccagaagcucugcagcuuccaggaggagauggucaaggagaagaaccuguucgaggaggagcugaagcagacccuggacgagcucgacaagcugcagcagaaggaggagcaggcggagcgccuggugaagcagcucgaggaggaggccaagucccgggccgaggagcugaagcugcucgaggagaagcugaagggcaaggaggccgagcuggagaaguccagcgccgcgcacacccaggccacccuccugcugcaggagaaguacgacagcauggugcagucccucgaggacgucacggcccaguucgagagcuacaaggcccugaccgccuccgagaucgaggaccugaagcucgagaacagcucccugcaggagaaggcggccaaggccgggaagaacgccgaggacgugcagcaccagauccuggccaccgagagcuccaaccaggaguacgugcgcaugcuccuggaccugcagaccaagagcgcgcucaaggagacggagaucaaggagaucaccgucagcuuccugcagaagaucaccgaccugcagaaccagcucaagcagcaggaggaggacuuccggaagcagcuggaggacgaggagggccgcaaggccgagaaggagaacaccacggccgagcugaccgaggagaucaacaaguggcgccuccuguacgaggagcuguacaacaagaccaagcccuuccagcuccagcuggacgccuucgagguggagaagcaggcgcugcucaacgagcacggggccgcccaggagcagcugaacaagauccgggacuccuacgccaagcugcucggccaccagaaccugaagcagaagaucaagcacguggucaagcugaaggacgagaacagccagcucaaguccgaggugagcaagcugcgcugccagcuggccaagaagaagcaguccgagaccaagcuccaggaggagcugaacaaggugcugggcaucaagcacuucgaccccagcaaggcguuccaccacgaguccaaggagaacuucgcccucaagacgccgcugaaggaggggaacaccaacugcuaccgggcccccauggagugccaggagagcuggaaguga

SEQ ID NO: 1437 - RNA, 582 nt, Artificial Sequence
  AAC33179_variant
auggccgccauccgcaagaagcuggugaucgucggcgacggggcgugcggcaagaccugccuccugaucguguucagcaaggaccaguuccccgagguguacgucccgaccguguucgagaacuacaucgccgacaucgagguggacgggaagcaggucgagcuggcccucugggacacggccggccaggaggacuacgaccggcugcgcccccuguccuaccccgacaccgacgugauccucaugugcuucagcaucgacucccccgacagccuggagaacaucccggagaaguggacccccgaggugaagcacuucugccccaacguccccaucauccugguggggaacaagaaggaccuccggcaggacgagcacacccgccgggagcuggccaagaugaagcaggagccggugcgcuccgaggagggccgggacauggcgaaccgcaucagcgccuucggcuaccuggagugcuccgccaagacgaaggaggggguccgggagguguucgagauggccacccgcgcgggccuccaggugcggaagaacaagcgccggcgcgggugccccauccuguga

SEQ ID NO: 1438 - RNA, 888 nt, Artificial Sequence
  AAA36161_variant
augagcggcgcccuggacgugcuccagaugaaggaggaggacguccugaaguuccuggccgcggggacccaccucggcgggaccaaccuggacuuccagauggagcaguacaucuacaagcgcaaguccgacggcaucuacaucaucaaccugaagcggacgugggagaagcuccugcuggccgcccgcgccaucguggccaucgagaaccccgcggacgugagcgucaucuccagccggaacaccgggcagcgcgccgugcucaaguucgccgccgcgaccggcgccaccccgaucgccggccgguucacgcccgggaccuucaccaaccagauccaggccgccuuccgcgagccccggcugcugguggucaccgacccccgcgcggaccaccagccgcucacggaggccuccuacgugaaccugcccaccaucgcccugugcaacaccgacagcccccuccgguacguggacaucgccauccccugcaacaacaagggcgcccacuccgucgggcugaugugguggaugcuggcgcgcgaggugcuccggaugcgcggcaccaucagccgggagcacccgugggaggugaugcccgaccuguacuucuaccgcgaccccgaggagaucgagaaggaggagcaggccgccgccgagaaggccgucacgaaggaggaguuccagggggaguggaccgcgcccgccccggaguucaccgccacccagcccgagguggccgacugguccgagggcgugcagguccccagcgugcccauccagcaguucccgacggaggacugguccgcccagcccgcgaccgaggacuggagcgccgcccccaccgcccaggcgaccgagugggugggcgccacgaccgacugguccuga

SEQ ID NO: 1439 - RNA, 2601 nt, Artificial Sequence
  AAH14614_variant
augaacggcgagcagcagcuggacgccgacgccgggagcggcauggaggagguggagcucuccugggaggacuaccuggaggagaccgggagcaccgcgguccccuacggcuccuucaagcacguggacacgcgccugcagaacggguucgccccgggcaugaagcucgagguggccguccggaccgaccccgagaccuacuggguggccaccgugaucacgaccugcgagcagcugcugcuccugcgcuacgacggcuacggggaggaccggcgcgccgacuucuggugcgacauccggaaggcggaccuguaccccaucggcuggugcgagcagaacaagaagacccucgaggcccccgaggggauccgcgacaaggucagcgacugggacgaguuccugcggcagacccugaucggcgccugcuccccgcccgugccccuccuggaggggcugcgcaacggccggaacccccucgaccugaucgccccgggcagccgccuggagugccaggcguuccaggacucccucagcacguggaucgugaccgucguggagaacaucgggggccggcugaagcugcgcuacgaggggcucgaguccagcgacaacuacgagcacuggcuguacuaccuggaccccuuccuccaccacgugggcugggccgcccagcagggcuacgagcugcagccgcccuccgccauccggcaccugaagaacgaggccgaguggcaggagauccucgcgaaggucaaggaggaggaggaggagccccugcccagcuaccuguucaaggacaagcaggucaucgggauccacaccuucuccgugaacaugaagcucgaggccguggaccccuggagccccuucggcaucuccccggccaccguggugaaggucuucgacgagaaguacuuccugguggagauggacgaccugcgccccgagaaccacgcccggcgcagcuucgugugccacgccgacucccccgggaucuuccccguccaguggagccucaagaacggccugcacaucuccccgccgcccggguaccccagccaggacuucgacugggcggacuaccugaagcagugcggcgccgaggccgcgccccagcggugcuucccgccccucaucagcgagcacgaguucaaggagaacaugaagcuggaggccgugaaccccauccugcccgaggaggugugcgucgccacgaucaccgccgugcgcggcuccuaccucuggcugcagcuggaggggagcaagaagcccauccccgagugcaucgucuccguggagagcauggacaucuucccgcucggcuggugcgagaccaacgggcacccccuguccacgccccggcgcgcccggguguacaagcagcgcaagaucgccgucgugcagcccgagaagcaggucccgagcucccgcaccgugcacgagggccugcggaaccaggagcucaacagcaccgaguccgugaugaucaacgggaaguacugcugccccaagaucuacuucaaccaccgcugcuucagcggccccuaccugaacaagggccggaucgccgagcugccccagugcguggggccgggcaacugcguccucgugcugcgcgaggugcugacccugcucaucaacgcggccuacaagcccucccggguccugcgcgagcugcagcucgacaaggacagcguguggcacgggugcggcgaggugcugaaggccaaguacaaggggaaguccuaccgggccaccgucgagaucgugaagacggcggaccgcgugaccgaguucugccggcagaccugcaucaagcuggagugcugccccaaccucuucggcccccgcaugguccuggacaagugcagcgagaacugcuccgugcugaccaagacgaaguacacccacuacuacggcaagaagaagaacaagcggaucgggcgcccgcccggcgggcacagcaaccucgccugcgcccugaagaaggccuccaagcggcgcaagcggcgcaagaacguguucguccacaagaagaagcggagcuccgccagcguggacaacacccccgcgggcagcccccagggcuccgggggcgaggacgaggacgacccggacgagggggacgacgacagccuguccgagggcagcaccuccgagcagcaggacgagcuccaggaggagagcgagauguccgagaagaaguccugcagcagcucccccacgcagagcgagaucuccaccagccugccgcccgaccgccagcggcgcaagcgcgagcugcggaccuucuccuucagcgacgacgagaacaagccgcccucccccaaggagauccgcaucgagguggccgagcggcuccaccuggacagcaacccccugaaguggagcgucgccgacguggugcgcuucauccgguccaccgacugcgcgccccucgcccgcaucuuccuggaccaggagaucgacgggcaggcccugcuccugcugacgcuccccaccguccaggagugcauggaccugaagcugggccccgccaucaagcucugccaccacaucgagcggaucaaguucgccuucuacgagcaguucgccaacuga

SEQ ID NO: 1440 - RNA, 1431 nt, Artificial Sequence
  CCDS4550.1_variant
augagcggcuccagcgcccgcuccagccaccugucccagcccguggucaagagcgugcucguguaccggaacggggacccguucuacgccggccgccgggucgugauccacgagaagaagguguccagcuucgaggucuuccugaaggaggugaccgggggcgugcaggcgcccuucggggccguccgcaacaucuacacgccccggacgggccaccgcauccggaagcuggaccagauccaguccggcgggaacuacguggccggcgggcaggaggccuucaagaagcucaacuaccuggacaucggcgagaucaagaagcgccccauggagguggucaacaccgaggugaagccggugauccacagccggaucaacgucuccgcccgcuuccggaagccccugcaggagcccugcaccaucuuccucaucgcgaacggggaccugaucaaccccgccagccgccugcucaucccgcggaagacccugaaccagugggaccacgugcugcagauggugacggagaagaucacccuccgcuccggcgccguccaccggcuguacacccuggagggcaagcucguggagagcggggccgagcuggagaacggccaguucuacguggcggucgggcgcgacaaguucaagaagcugcccuacuccgagcuccuguucgacaagagcaccaugcggcgccccuucggccagaaggccuccagccugcccccgaucgugggcucccgcaagagcaaggggagcggcaacgaccggcacuccaagagcacggugggguccagcgacaacuccagcccccagccccucaagcggaagggcaagaaggaggacgucaacuccgagaagcugaccaagcugaagcagaacgugaagcucaagaacagccaggagaccauccccaacuccgacgaggggaucuucaaggccggcgccgagcgcagcgagacccgcggcgccgcggagguccaggaggacgaggacacccagguggaggugccggucgaccagcggcccgccgagaucguggacgaggaggaggacggggagaaggccaacaaggacgccgagcagaaggaggacuucuccggcaugaacggggaccuggaggaggagggcgggcgcgaggccaccgacgcgcccgagcaggucgaggagauccuggaccacagcgagcagcaggcccggcccgcccgcgugaacggcggcaccgacgaggagaacggggaggagcuccagcaggucaacaacgagcugcagcuggugcucgacaaggagcggaagucccagggcgccgggagcggccaggacgaggccgacguggacccgcagcgcccgccccggcccgaggugaagaucaccucccccgaggagaacgagaacaaccagcagaacaaggacuacgcggccguggccuga

SEQ ID NO: 1441 - RNA, 1362 nt, Artificial Sequence
  BAA07903_variant
augcgcauccccguggacgccagcaccucccggcgcuucaccccgcccagcacggcccugucccccggcaagaugagcgaggcgcucccccugggggccccggacgccggcgccgcccuggcggggaagcuccgguccggcgaccgcagcauggucgaggugcuggccgaccaccccggggagcuggugcggaccgacucccccaacuuccucugcagcguccugcccacccacuggcgcugcaacaagacccugccgaucgccuucaaggugguggcccucggcgacguccccgacggcacgcuggugaccgugauggcggggaacgacgagaacuacuccgccgagcugcggaacgccaccgccgccaugaagaaccaggucgcgcgcuucaacgaccuccgguucgugggccgcagcgggcggggcaaguccuucacccugacgaucaccguguucaccaacccgccccaggucgccaccuaccaccgcgccaucaagaucacgguggacgggccccgggagccccgccggcaccgccagaagcuggacgaccagaccaagcccggcagccucuccuucagcgagcggcuguccgagcuggagcagcuccgccggaccgccaugcgcgugagcccccaccacccggcccccacccccaacccccgggcgucccugaaccacagcacggccuucaacccgcagccccagucccagaugcaggacacccgccagauccagcccagcccgcccuggagcuacgaccaguccuaccaguaccugggcagcaucgccucccccagcguccaccccgccacccccaucuccccggggcgcgccagcggcaugaccacgcucuccgcggagcugagcucccggcugagcaccgcccccgaccucaccgccuucuccgacccccgccaguucccggcccugcccagcaucuccgacccccggaugcacuaccccggggccuucaccuacagcccgacgcccgugaccuccggcaucggcaucgggaugagcgcgaugggcuccgccacccgcuaccacaccuaccugcccccgcccuaccccgggagcucccaggcccagggcgggcccuuccaggccagcagccccuccuaccaccucuacuacggcgcgagcgccggcuccuaccaguucagcauggucgggggcgagcgguccccgccccgcauccugccgcccugcacgaacgccagcaccggguccgcccugcucaaccccagccugcccaaccaguccgacgugguggaggccgagggcagccacuccaacagccccaccaacauggcgcccuccgcccggcuggaggaggccguguggcgcccguacuga

SEQ ID NO: 1442 - RNA, 1080 nt, Artificial Sequence
  ACI46041_variant
augccccuggagcucgagcugugccccggccgcugggucgggggccagcaccccugcuucaucaucgccgagaucgggcagaaccaccagggcgaccuggacguggccaagcggaugauccgcauggcgaaggagugcggggccgacugcgccaaguuccagaaguccgagcucgaguucaaguucaaccggaaggcccuggagcgccccuacaccagcaagcacagcuggggcaagaccuacggcgagcacaagcggcaccuggaguucucccacgaccaguaccgcgagcuccagcgguacgccgaggagguggggaucuucuucacggcgagcggcauggacgagauggccguggaguuccugcacgagcugaacguccccuucuucaaggugggguccggcgacaccaacaacuucccguaccucgagaagaccgccaagaaggggcgccccauggugaucagcuccggcaugcagagcauggacaccaugaagcaggucuaccagaucgugaagccccugaaccccaacuucugcuuccugcagugcacguccgccuacccgcuccagcccgaggacgugaaccugcgggucaucagcgaguaccagaagcuguuccccgacauccccaucggcuacuccgggcacgagaccggcaucgcgaucagcguggccgccguggcccucggggccaagguccuggagcgccacaucacccuggacaagaccuggaagggcuccgaccacagcgcgucccucgagccgggcgagcuggccgagcuggugcggagcgugcgccucgucgagcgggcccuggggucccccacgaagcagcugcuccccugcgagauggccugcaacgagaagcugggcaagagcgugguggccaaggucaagauccccgaggggaccauccugaccauggacaugcucaccgugaaggugggcgagccgaaggcguacccgcccgaggacaucuucaaccuggucgggaagaaggugcuggugacggucgaggaggacgacaccaucauggaggagcucguggacaaccacggcaagaagaucaaguccuga

SEQ ID NO: 1443 - RNA, 2715 nt, Artificial Sequence
  CCDS14652.1_variant
augcaggccagcccccugcagaccucccagcccaccccgcccgaggagcugcacgccgcggccuacguguucaccaacgacggccagcagaugcgcagcgacgaggucaaccugguggccaccgggcaccaguccaagaagaagcacagccggaaguccaagcgccacagcuccagcaagcggcgcaaguccaugagcuccuggcuggacaagcaggaggacgccgccgugacccacagcaucugcgaggagcggaucaacaacggccagcccgucgcggacaacgugcucuccaccgccccgcccuggcccgacgccacgaucgcccacaacauccgcgaggagcggauggagaacgggcagagccgcaccgacaaggugcuguccaccgcgcccccgcagcugguccacauggccgccgccggcauccccagcauguccacccgggaccuccacagcacggugacccacaacauccgcgaggagcggauggagaacgggcagccccagcccgacaacgugcuguccaccggcccgaccggccugaucaacauggccgcgacgcccauccccgccaugagcgcccgcgaccucuacgccaccgucacccacaacgugugcgagcagaagauggagaacgugcagcccgccccggacaacguccugcugacccuccggccccgccggaucaacaugacggacaccgggaucagccccauguccacccgcgaccccuacgcgaccaucacguacaacgugccggaggagaagauggagaagggccagccccagcccgacaacauccugagcaccgccuccaccgggcugaucaacguggccggcgccgggacccccgccaucagcacgaacggccucuacuccaccgucccgcacaacgugugcgaggagaagauggagaacgaccagccccagcccaacaacgugcugagcaccguccagcccgugaucaucuaccugaccgcgacgggcauccccgggaugaacacccgggaccaguacgccaccaucacccacaacgugugcgaggagcgcgucgugaacaaccagccccuccccuccaacgcccugagcacggugcugccgggccucgccuaccuggccaccgcggacaugcccgccauguccacccgggaccagcacgccaccaucauccacaaccugcgcgaggagaagaaggacaacagccagcccacgcccgacaacguccucuccgccgugaccccggagcugaucaaccuggcgggggccggcaucccgcccaugagcacccgggaccaguacgccaccgucaaccaccacgugcacgaggcccgcauggagaacggccagcgcaagcaggacaacgugcucuccaacguccugagcgggcugaucaacauggccggcgcguccauccccgccaugagcucccgggaccucuacgccaccaucacgcacagcgugcgcgaggagaagauggaguccgggaagccccagaccgacaaggugaucagcaacgacgcgccccagcugggccacauggccgccgggggcauccccagcauguccaccaaggaccuguacgccaccgucacgcagaacgugcacgaggagcggauggagaacaaccagccccagccgagcuacgaccucuccaccgugcugcccggccugaccuaccucaccgucgccgggauccccgccaugagcacgcgcgaccaguacgccaccgugacccacaacgugcacgaggagaagaucaagaacggccaggcggccuccgacaacgucuucagcaccgugcccccggccuucaucaacauggccgcgacggggguguccagcauguccacccgggaccaguacgccgccgucacccacaacauccgcgaggagaagaucaacaacagccagcccgcccccggcaacauccuguccaccgcgccgcccuggcugcggcacauggccgccgccgggaucagcuccacgaucacccgcgaccucuacgugaccgccacccacagcgugcacgaggagaagaugacgaacggccagcaggcccccgacaacucccugagcaccgucccgcccggcugcaucaaccuguccggggcgggcaucagcugccggagcacccgcgaccucuacgccaccgugauccacgacauccaggaggaggagauggagaacgaccagacgccgcccgacggguuccuguccaacagcgacucccccgagcugaucaacaugaccggccacugcaugccgcccaacgcccucgacagcuucucccacgacuucaccagccuguccaaggacgagcugcucuacaagcccgacagcaacgaguucgccguggggaccaagaacuacuccgucagcgccggcgacccgcccgugacggugaugucccuggucgagaccgugcccaacacgccccagaucagccccgcgauggccaagaagaucaacgacgacaucaaguaccagcugaugaaggaggugcggcgcuucggccagaacuacgagcggaucuucauccugcucgaggagguccagggguccaugaaggugaagcgccaguucguggaguucaccaucaaggaggccgcccgguucaagaaggucgugcugauccagcagcuggagaaggcgcucaaggagaucgacagccacugccaccuccgcaaggugaagcacaugcggaagcgcuga

SEQ ID NO: 1444 - RNA, 2403 nt, Artificial Sequence
  AAH01058_variant
augggcagcuccaagaagcaccgcggggagaaggaggccgccggcaccaccgcggccgccgggacgggcggggccaccgagcagcccccgcggcaccgcgagcacaagaagcacaagcaccggagcggcggcuccgggggcagcgggggcgagcgccggaagcgcucccgggagcgcgggggcgagcggggcagcgggcgccggggcgccgaggcggaggcccgcuccagcacccacgggcgggagcgcucccaggccgagcccagcgagcggcgcgugaagcgggagaagcgcgacgacggcuacgaggccgcggccuccagcaagaccuccagcggcgacgccuccagccuguccaucgaggagacgaacaagcuccgggccaagcuggggcugaagccccucgaggucaacgccaucaagaaggaggcgggcaccaaggaggagcccgugaccgccgacgugaucaacccgauggcccugcgccagcgggaggagcugcgcgagaagcucgccgccgcgaaggagaagcgccugcugaaccagaagcucgggaagaucaagacccugggcgaggacgaccccuggcuggacgacacggccgccuggaucgagcggagccgccagcuccagaaggagaaggaccuggccgagaagcgggccaagcugcucgaggagauggaccaggaguucggggucuccacccugguggaggaggaguucggccagcgccggcaggaccuguacagcgcgcgcgaccuccagggccugaccguggagcacgccaucgacagcuuccgggagggggagaccaugauccugacgcucaaggacaagggcguccugcaggaggaggaggacgugcuggugaacgucaaccucguggacaaggagcgcgccgagaagaacguggagcugcggaagaagaagcccgacuaccugcccuacgccgaggacgaguccgucgacgaccucgcccagcagaagccgcgcagcauccuguccaaguacgacgaggagcuggagggggagcggccccacagcuuccgccucgagcagggcgggaccgcggacggccugcgggagcgcgagcuggaggagauccgggccaagcuccgccugcaggcccagucccugagcaccgugggcccccggcucgccuccgaguaccugacccccgaggagauggugacguucaagaagaccaagcgccgggucaagaagauccgcaagaaggagaaggagguggugguccgcgcggacgaccugcucccgcugggggaccagacccaggacggcgacuucgggagccggcugcgcggccgggggcgccggcgcguguccgagguggaggaggagaaggagcccgucccccagccccucccgagcgacgacacccggguggagaacauggacaucuccgacgaggaggagggcggcgccccgccgcccgggagcccccaggugcuggaggaggacgaggccgagcuggagcuccagaagcagcuggagaagggccgccggcugcgccagcuccagcagcugcagcagcugcgggacuccggggagaaggucguggagaucgucaagaagcuggagagccgccagcggggcugggaggaggacgaggaccccgagcgcaagggcgccaucguguucaacgccacguccgaguucugccggacccucggggagauccccaccuacggccuggcggggaaccgcgaggagcaggaggagcugauggacuucgagcgggacgaggagcgcagcgccaacggcggguccgagagcgacggcgaggagaacaucggcugguccaccgugaaccucgacgaggagaagcagcagcaggacuucagcgccagcuccacgaccauccuggacgaggagcccaucgucaaccgggggcuggccgccgcgcuccugcugugccagaacaagggccuccuggagaccaccgugcagaagguggcccgcgucaaggcccccaacaagagccugcccuccgccguguacugcaucgaggacaagauggccaucgacgacaaguacagccggcgcgaggaguaccgcggguucacgcaggacuucaaggagaaggacggcuacaagcccgacgugaagaucgaguacgucgacgagaccgggcggaagcucacccccaaggaggcguuccgccagcugucccaccgguuccacggcaagggcagcgggaagaugaagaccgagcgccggaugaagaagcuggacgaggaggcccuccugaagaagauguccagcuccgacacgccgcugggcaccguggcccuccugcaggagaagcagaaggcccagaagacccccuacaucgugcugagcggguccggcaagagcaugaacgcgaacaccaucacgaaguga

SEQ ID NO: 1445 - RNA, 2877 nt, Artificial Sequence
  AAF00087_variant
augcgcacccacacccggggcgcccccagcguguucuucaucuaccugcucugcuucgucuccgccuacaucacggacgagaacccggaggugaugauccccuucaccaacgcgaacuacgacagccaccccaugcuguacuucucccgcgccgagguggccgagcugcagcuccgggccgccagcucccacgagcacaucgcggcccgccugaccgaggccguccacaccaugcugagcagcccccucgaguaccugccgcccugggaccccaaggacuacuccgcccgguggaacgagaucuucgggaacaaccugggcgcgcucgccauguucugcgugcuguaccccgagaacaucgaggcccgcgacauggccaaggacuacauggagcggauggccgcgcagccguccuggcuggugaaggacgcccccugggacgaggucccccucgcccacagccuggugggguucgccacggccuacgacuuccuguacaacuaccucuccaagacccagcaggagaaguuccuggaggugaucgcgaacgccagcggcuacauguacgagaccuccuaccgccggggguggggcuuccaguaccugcacaaccaccagcccaccaacugcauggcccuccugacgggcagccugguccucaugaaccagggguaccugcaggaggccuaccuguggaccaagcagguccucaccaucauggagaagucccuggugcugcuccgcgaggugaccgacggcagccuguacgaggggguggccuacggcuccuacacgacccggagccuguuccaguacauguuccucgugcagcgccacuucaacaucaaccacuucgggcacccguggcugaagcagcacuucgcguucauguaccggaccauccugcccggcuuccagcgcaccgucgccaucgccgacuccaacuacaacugguucuacggccccgagagccagcucguguuccuggacaaguucgugaugcggaacgggagcggcaacuggcuggccgaccagauccgccggaaccgcgucguggaggggcccggcacgccguccaagggccagcgguggugcacccuccacaccgaguuccugugguacgacgggagccugaaguccgugcccccgcccgacuucggcacccccacgcuccacuacuucgaggacuggggcgucgugaccuacgggagcgcccugcccgcggagaucaaccgcuccuuccugagcuucaaguccgggaagcucggcggccgggccaucuacgacaucgugcaccgcaacaaguacaaggacuggaucaagggguggcgcaacuucaacgccggccacgagcaccccgaccagaacagcuucaccuucgcccccaacggggucccguucaucaccgaggcgcuguacggccccaaguacacguucuucaacaacgugcugauguucucccccgccgucagcaaguccugcuucagccccugggugggccaggugaccgaggacugcuccagcaagugguccaaguacaagcacgaccucgccgccagcugccaggggcgggucguggccgcggaggagaagaacggcguggucuucauccgcggggagggcgugggggccuacaacccgcagcugaaccugaagaacgugcagcggaaccucauccugcugcacccccagcugcuccugcuggucgaccagauccaccucggcgaggagagcccccuggagaccgccgccuccuucuuccacaacguggacgugccguucgaggagaccgucguggacggggugcacggcgccuucauccgccagcgggacggccuguacaagauguacuggauggacgacacgggguacuccgagaaggcgaccuucgccagcgucaccuacccccgcggcuaccccuacaacgggaccaacuacgugaacgugacgaugcaccuccggagccccaucacccgcgccgccuaccuguucaucggcccguccaucgacguccagagcuucaccgugcacggcgacucccagcagcuggacguguucaucgccaccagcaagcacgcguacgccacguaccucuggaccggggaggccaccggccaguccgccuucgcgcaggucaucgccgaccggcacaagauccuguucgaccgcaacagcgccaucaaguccagcaucgugcccgaggugaaggacuacgccgccaucgucgagcagaaccugcagcacuucaagcccguguuccagcuccuggagaagcagauccugucccgggugcgcaacaccgcgagcuuccggaagaccgccgagcgccuccugcgguucuccgacaagcgccagacggaggaggccaucgaccggaucuucgccaucagccagcagcagcagcagcaguccaagagcaagaagaaccgccgggccgggaagcgcuacaaguucgucgacgcggugcccgacaucuucgcccagaucgaggugaacgagaagaagauccgccagaaggcccagauccuggcccagaaggagcucccgaucgacgaggacgaggagaugaaggaccugcuggacuucgccgacgucaccuacgagaagcacaagaacggcgggcucaucaagggccgguucggccaggcgcgcauggugaccaccacgcacucccgggcccccagccuguccgccagcuacacccgccuguuccucauccugaacaucgccaucuucuucgugaugcuggcgaugcagcucaccuacuuccagcgggcccagagccugcacgggcagcgcugccuguacgccguccuccugaucgacuccugcauccugcucuggcuguacagcuccugcagccagucccagugcuga

SEQ ID NO: 1446 - RNA, 2892 nt, Artificial Sequence
  AAH93784_variant
auggccaccgccgcggagaccagcgccuccgagcccgaggccgagagcaaggccggcccgaaggccgacggggaggaggacgaggugaaggcggcccgcacgcggcgcaagguccugucccgggccguggccgcggccaccuacaagaccaugggccccgccugggaccagcaggaggagggggugagcgaguccgacggcgacgaguacgccauggccagcuccgcggagagcucccccggggaguacgagugggaguacgacgaggaggaggagaagaaccagcucgagaucgagcgccuggaggagcagcugagcaucaacgucuacgacuacaacugccacguggaccucauccggcugcugcgccucgagggcgagcugaccaaggugcggauggcccgccagaagauguccgagaucuucccccugacggaggagcucuggcuggaguggcugcacgacgagaucagcauggcccaggacggccucgaccgggagcacgucuacgaccuguucgagaaggccgugaaggacuacaucugcccgaacaucuggcuggaguacgggcaguacuccgugggcgggaucggccagaagggcgggcucgagaagguccgcagcguguucgagcgggcccuguccagcgugggccugcacaugaccaaggggcucgcgcugugggaggccuaccgcgaguucgaguccgccaucgucgaggccgcccggcuggagaaggugcacagccucuuccgccggcagcuggcgaucccccuguacgacauggaggccaccuucgccgaguacgaggagugguccgaggaccccauccccgagagcgugauccagaacuacaacaaggcccuccagcagcuggagaaguacaagccguacgaggaggcccugcuccaggcggaggcgccccgccuggccgaguaccaggccuacaucgacuucgagaugaagaucggcgaccccgcccggauccagcugaucuucgagcgcgcccucgucgagaacugccuggugcccgaccuguggauccgguacagccaguaccucgaccgccagcugaaggugaaggaccugguccucuccgugcacaaccgggccauccgcaacugcccguggaccguggcccuguggagccgcuaccugcucgccauggagcggcacggggucgaccaccaggugaucuccgugacguucgagaaggcgcugaacgccggcuucauccaggccaccgacuacgucgagaucuggcaggccuaccuggacuaccuccgccggcgcguggacuucaagcaggacagcuccaaggagcuggaggagcugcgggccgcguucacccgcgcccucgaguaccugaagcaggaggucgaggagcgguucaacgagagcggcgaccccuccugcgugaucaugcagaacugggcccgcaucgaggcccggcugugcaacaacaugcagaaggcccgcgagcucugggacagcaucaugacccgggggaacgcgaaguacgccaacauguggcuggaguacuacaaccuggagcgcgcccacggcgacacgcagcacugccggaaggcccugcaccgcgcggugcagugcaccuccgacuaccccgagcacgucugcgaggugcuccugaccauggagcggaccgaggggagccuggaggacugggacaucgccgugcagaagacggagacccgccucgcccgggucaacgagcagcgcaugaaggccgccgagaaggaggcggcccuggugcagcaggaggaggagaaggccgagcagcggaagcgcgcccgcgccgagaagaaggcgcugaagaagaagaagaagauccggggccccgagaagcgcggggccgacgaggacgacgagaaggaguggggcgacgacgaggaggagcagccguccaagcggcgccggguggagaacagcauccccgccgccggcgagacccagaacgucgagguggccgcggggcccgccggcaagugcgccgccguggacgucgagcccccguccaagcagaaggagaaggcggccagccucaagcgcgacaugcccaaggugcugcacgacuccagcaaggacuccaucaccguguucgucagcaaccugcccuacuccaugcaggagcccgacacgaagcuccggccgcuguucgaggccugcggggagguggugcagauccgccccaucuucagcaaccggggcgacuuccgcggguacugcuacgucgaguucaaggaggagaaguccgcccugcaggcccucgagauggaccgcaagagcguggagggccggcccauguucgugagccccugcgucgacaaguccaagaacccggacuucaagguguuccgguacagcaccucccuggagaagcacaagcuguucaucagcggccuccccuucuccugcaccaaggaggagcuggaggagaucugcaaggcgcacgggaccgugaaggaccugcgccucgucacgaaccgggccggcaagcccaaggggcuggccuacguggaguacgagaacgagagccaggccucccaggccgugaugaagauggacggcaugaccaucaaggagaacaucaucaaggucgcgaucagcaacccgccccagcgcaaggugcccgagaagcccgagacccggaaggcccccgggggcccgaugcugcucccccagaccuacggcgcccgcgggaagggccggacgcagcugucccugcucccccgcgcccugcagcggccgagcgccgcggcgccccaggccgagaacgggcccgccgccgcccccgccguggccgccccggcggccaccgaggcccccaagauguccaacgccgacuucgccaagcuguuccuccgcaaguga

SEQ ID NO: 1447 - RNA, 2283 nt, Artificial Sequence
  AAC51668_variant
augaagaccugggugaagaucgucuucggcguggccaccagcgccgugcuggcgcuccuggucaugugcaucgugcugcgccccucccgggugcacaacagcgaggagaacacgaugcgcgcccucacccugaaggacauccugaacgggaccuucuccuacaagaccuucuucccgaacuggaucagcggccaggaguaccuccaccaguccgccgacaacaacaucguccuguacaacaucgagacggggcagagcuacaccauccuguccaaccggaccaugaaguccgugaacgccagcaacuacggccucagccccgaccgccaguucguguaccuggaguccgacuacagcaagcuguggcgguacuccuacaccgccacguacuacaucuacgaccucagcaacggggaguucguccgcggcaacgagcugccccggcccauccaguaccugugcugguccccggugggcagcaagcucgcguacguguaccagaacaacaucuaccugaagcagcgccccggggacccgcccuuccagaucaccuucaacggccgggagaacaagaucuucaacgggauccccgacugggucuacgaggaggagaugcuggccaccaaguacgcccucugguggucccccaacggcaaguuccuggccuacgcggaguucaacgacaccgacauccccgugaucgccuacagcuacuacggggacgagcaguacccccgcacgaucaacaucccguaccccaaggccggcgccaagaaccccgugguccggaucuucaucaucgacaccaccuaccccgccuacgugggcccgcaggaggugcccguccccgcgaugaucgccuccagcgacuacuacuucagcuggcugaccugggugacggacgagcgcgugugccuccaguggcugaagcggguccagaacguguccgugcugagcaucugcgacuuccgcgaggacuggcagaccugggacugccccaagacccaggagcacaucgaggagucccggaccgggugggccggcggguucuucgucagcacgccgguguucuccuacgacgccaucagcuacuacaagaucuucuccgacaaggacggcuacaagcacauccacuacaucaaggacaccgucgagaacgccauccagaucaccagcggcaagugggaggcgaucaacaucuuccgcgugacccaggacucccucuucuacagcuccaacgaguucgaggaguaccccgggcggcgcaacaucuaccggaucagcaucggcuccuacccgcccagcaagaagugcgugacgugccaccuccgcaaggagcggugccaguacuacaccgccuccuucagcgacuacgccaaguacuacgcccuggucugcuacgggcccggcauccccaucuccacccugcacgacgggcgcaccgaccaggagaucaagauccuggaggagaacaaggagcuggagaacgcccucaagaacauccagcugcccaaggaggagaucaagaagcuggagguggacgagaucacgcucugguacaagaugauccugcccccgcaguucgaccgcagcaagaaguacccccugcucauccagguguacggcggccccugcucccagagcguccggagcguguucgcggugaacuggaucuccuaccuggccagcaaggaggggauggucaucgcccugguggacggccgcgggaccgccuuccagggcgacaagcuccuguacgccguguaccggaagcugggggucuacgagguggaggaccagaucaccgcggugcgcaaguucaucgagaugggcuucaucgacgagaagcggaucgccaucuggggcugguccuacgggggcuacgucagcucccucgcccuggccagcgggaccggccuguucaagugcgggaucgcgguggccccgguguccagcugggaguacuacgccuccgucuacacggagcgcuucaugggccuccccaccaaggacgacaaccuggagcacuacaagaacagcaccgugauggcccgggccgaguacuuccgcaacguggacuaccugcucauccacggcaccgcggacgacaacguccacuuccagaacuccgcccagaucgccaaggcccuggugaacgcccagguggacuuccaggcgaugugguacagcgaccagaaccacgggcuguccggccugagcacgaaccaccucuacacccacaugacccacuuccugaagcagugcuucucccugagcgacuga

SEQ ID NO: 1448 - RNA, 1128 nt, Artificial Sequence
  CCDS32839.1_variant
auggacgcccugcagcucgccaacagcgcguucgccguggaccuguucaagcagcugugcgagaaggagccccucggcaacguccuguucuccccgaucugccugagcaccucccucagccuggcccaggugggggccaagggcgacaccgccaacgagaucggccaggugcugcacuucgagaacgucaaggacgugcccuucggguuccagacggugaccuccgacgucaacaagcucagcuccuucuacagccugaagcugaucaagcgccucuacguggacaagucccugaaccugagcaccgaguucaucuccagcaccaagcggcccuacgcgaaggagcucgagacgguggacuucaaggacaagcuggaggagaccaaggggcagaucaacaacuccaucaaggaccugaccgacggccacuucgagaacauccucgccgacaacagcgucaacgaccagaccaagauccugguggugaacgccgccuacuucgucggcaaguggaugaagaaguucuccgagagcgagacgaaggagugccccuuccgcgugaacaagaccgacaccaagccggugcagaugaugaacauggaggcgaccuucugcauggggaacaucgacuccaucaacugcaagaucaucgagcugcccuuccagaacaagcaccucagcauguucauccugcugcccaaggacgucgaggacgaguccacgggccucgagaagaucgagaagcagcugaacagcgagagccugucccaguggaccaaccccagcaccauggccaacgccaaggugaagcucuccaucccgaaguucaagguggagaagaugaucgaccccaaggccugccuggagaaccuggggcucaagcacaucuucagcgaggacaccuccgacuucagcggcauguccgagacgaagggggucgcccugagcaacgugauccacaaggugugccuggagaucaccgaggacggcggcgacuccaucgagguccccggggcgcggauccuccagcacaaggacgagcugaacgccgaccaccccuucaucuacaucauccgccacaacaagacccggaacaucaucuucuucggcaaguucugcagcccguga

SEQ ID NO: 1449 - RNA, 1002 nt, Artificial Sequence
  AAH06564_variant
auggccugcagccggcccccgucccagugcgagcccaccagccugccgcccggcccgcccgccgggcgccgccaccucccccugucccggcgccggcgcgagaugagcuccaacaaggagcagcggagcgcgguguucgucauccuguucgcccucaucaccauccugauccuguacuccagcaacuccgccaacgagguguuccacuacggcagccuccgcgggcggucccgccggcccgugaaccugaagaaguggagcaucacggacggcuacguccccauccuggggaacaagacccuccccucccgcugccaccagugcgugaucgugagcuccagcucccaccuccugggcaccaagcugggccccgagaucgagcgggccgagugcaccauccgcaugaacgacgcccccacgaccggguacagcgcggacgucggcaacaagaccaccuaccgggugguggcccacuccagcgucuuccgcgugcugcggcgcccgcaggaguucgugaaccggacgcccgagaccgucuucaucuucugggggccgcccagcaagaugcagaagccccagggcucccuggugcgcgugauccagcgggccgggcucgucuuccccaacauggaggccuacgcggugagccccggccgcaugcgccaguucgacgaccuguuccggggcgagaccgggaaggaccgcgagaagucccacagcuggcuguccaccggcugguucacgauggugaucgccgucgagcucugcgaccacgugcacguguacgggauggugcccccgaacuacugcagccagcggccccgccugcagcggaugcccuaccacuacuacgagcccaagggcccggacgagugcgucaccuacauccagaacgagcacucccgcaagggcaaccaccaccgguucaucaccgagaagcgcguguucagcuccugggcccagcuguacgggaucaccuucagccaccccuccuggacguga

SEQ ID NO: 1450 - RNA, 1071 nt, Artificial Sequence
  AAC37586_variant
augagccccugcggccgcgcccggcgccagaccucccgcggggccauggcggugcuggccuggaaguucccgcggacccggcuccccaugggcgccagcgcccugugcgucguggugcugugcuggcucuacaucuuccccgucuaccgccugcccaacgagaaggagaucgugcagggggugcugcagcagggcacggccuggcggcgcaaccagaccgcggcccgggccuuccgcaagcagauggaggacugcugcgacccggcccaccucuucgcgaugaccaagaugaacucccccaugggcaagagcaugugguacgacggggaguuccuguacuccuucaccaucgacaacagcacguacucccuguucccccaggccacccccuuccagcucccgcugaagaagugcgccgucgugggcaacgggggcauccugaagaaguccgggugcggccggcagaucgacgaggccaacuucgugaugcgcugcaaccucccgccccugagcagcgaguacaccaaggacgucggguccaagagccagcuggugaccgccaaccccuccaucauccggcagcgcuuccagaaccuccuguggagccggaagacguucguggacaacaugaagaucuacaaccacuccuacaucuacaugcccgcguucagcaugaagaccggcaccgagcccucccugcgcgucuacuacacccucagcgacgugggcgccaaccagacggugcuguucgccaaccccaacuuccugcgguccaucgggaaguucuggaagucccgcggcauccacgccaagcggcucagcaccgggcuguuccuggucagcgccgcgcucggccugugcgaggagguggccaucuacggcuucuggcccuucagcgugaacaugcacgagcagccgaucucccaccacuacuacgacaacguccugcccuucagcggguuccacgccaugcccgaggaguuccuccagcugugguaccugcacaagaucggcgcccuccgcaugcagcuggaccccugcgaggacaccucccugcagccgaccagcuga

SEQ ID NO: 1451 - RNA, 1257 nt, Artificial Sequence
  BAG50894_variant
augcgcaccaaggccgccggcugcgcggagcggcgcccccugcagccgcggaccgaggccgccgccgcccccgcggggcgcgccaugcccagcgaguacacguacgugaagcuccgguccgacugcagccgccccucccugcagugguacacccgggcccagagcaagaugcgccggccgucccugcuccugaaggacauccugaagugcacccuccuggucuucggcguguggauccuguacauccucaagcugaacuacaccacggaggagugcgacaugaagaagaugcacuacguggaccccgaccacgucaagcgcgcccagaaguacgcgcagcagguccugcagaaggagugccggcccaaguucgccaagaccagcauggcccuccuguucgagcaccgcuacuccguggaccugcuccccuucgugcagaaggccccgaaggacagcgaggccgaguccaaguacgacccgcccuucggguuccggaaguucagcuccaaggugcagacccugcuggagcuccugcccgagcacgaccugcccgagcaccucaaggcgaagaccugccgccggugcguggucaucggcagcgggggcauccugcacggccuggagcucgggcacacgcugaaccaguucgacguggugauccgccugaacuccgcccccgucgagggcuacagcgagcacguggggaacaagaccaccauccggaugaccuaccccgagggcgcgccccucuccgaccuggaguacuacagcaacgaccuguucguggccguccucuucaaguccguggacuucaacuggcugcaggccauggugaagaaggagacgcugccguucuggguccgccucuucuucuggaagcaggucgccgagaagaucccccugcagcccaagcacuuccggauccugaaccccgugaucaucaaggagaccgccuucgacauccuccaguacagcgagccgcagucccgcuucugggggcgggacaagaacgugcccaccaucggcgugaucgccgugguccuggccacccaccugugcgacgaggugagccucgccggcuucggguacgaccugaaccagccccgcacgccccugcacuacuucgacagccagugcauggcggccaugaacuuccagaccaugcacaacgucaccaccgagacgaaguuccuccugaagcuggugaaggagggcguggucaaggaccucuccgggggcaucgaccgcgaguucuga

SEQ ID NO: 1452 - RNA, 1059 nt, Artificial Sequence
  EAW56837_variant
auggacuuccugcgcaaccucuucagccagacccugagccugggcagccagaaggagcggcuccuggacgagcugacccucgaggggguggcccgcuacaugcaguccgagcggugccgccgggucaucugccuggugggcgccgggaucagcacguccgcgggcauccccgacuuccgcagccccuccaccgggcuguacgacaaccucgagaaguaccaccuccccuaccccgaggccaucuucgagaucagcuacuucaagaagcaccccgagccguucuucgcccuggccaaggagcuguaccccggccaguucaagcccaccaucugccacuacuucaugcggcugcugaaggacaagggccuccugcugcgcugcuacacccagaacaucgacacgcucgagcggaucgccgggcuggagcaggaggaccugguggaggcgcacggcaccuucuacaccucccacugcgucagcgccuccugccgccacgaguacccccucagcuggaugaaggagaagaucuucuccgaggugaccccgaagugcgaggacugccagagccuggugaagcccgacaucgucuucuucggggagucccugcccgcccgguucuucagcugcaugcaguccgacuuccucaagguggaccugcugcucgugaugggcacgagccugcagguccagcccuucgccucccugaucagcaaggcgccgcucagcacgccccgccugcugaucaacaaggagaaggccgggcaguccgaccccuuccucggcaugaucaugggccucgggggcgggauggacuucgacagcaagaaggccuaccgggacguggccuggcugggcgagugcgaccagggcugccuggcccuggcggagcugcucggguggaagaaggagcuggaggaccuggugcgccgggagcacgccuccaucgacgcccagagcggcgccgggguccccaacccguccaccagcgccucccccaagaaguccccgccgcccgcgaaggacgaggcccgcaccaccgagcgggagaagccccaguga

SEQ ID NO: 1453 - RNA, 1170 nt, Artificial Sequence
  AAD40850_variant
auggccgagcccgaccccagccacccccuggagacccaggccggcaaggugcaggaggcgcaggacagcgacagcgacuccgagggcggggccgccgggggcgaggccgacauggacuuccuccgcaaccuguucagccagacccugucccucgggagccagaaggagcggcugcuggacgagcucacgcuggagggcgucgcccgcuacaugcaguccgagcggugccgccgggugaucugccuggugggcgcggggaucagcaccuccgccggcauccccgacuuccgcagccccuccaccgggcucuacgacaaccuggagaaguaccaccucccguaccccgaggccaucuucgagaucagcuacuucaagaagcaccccgagcccuucuucgcccuggcgaaggagcuguacccgggccaguucaagcccaccaucugccacuacuucaugcggcugcucaaggacaaggggcugcugcuccgcugcuacacgcagaacaucgacacccuggagcggaucgccggccuggagcaggaggaccucgucgaggcccacggcaccuucuacaccucccacugcgugagcgccuccugccgccacgaguacccccugagcuggaugaaggagaagaucuucuccgaggugacgcccaagugcgaggacugccagagccuggucaagccggacaucguguucuucggggagucccuccccgcccgguucuucagcugcaugcagagcgacuuccugaagguggaccugcuccuggucaugggcaccucccuccaggugcagcccuucgcgagccugaucuccaaggcgccccugagcaccccgcgccugcucaucaacaaggagaaggccgggcaguccgaccccuuccugggcaugaucaugggccucgggggcgggauggacuucgacagcaagaaggccuaccgggacguggccuggcugggcgagugcgaccaggggugccuggcccuggccgagcuccugggcuggaagaaggagcuggaggaccucguccgccgggagcacgccuccaucgacgcccagagcggcgccggggugcccaaccccuccaccagcgcguccccgaagaaguccccgccgcccgccaaggacgaggcccgcacgaccgagcgggagaagccccaguga

SEQ ID NO: 1454 - RNA, 1401 nt, Artificial Sequence
  AAH02824_variant
auggccgaggagcaggaccugagcgagguggagcucucccccgucggcagcgaggagccgcgcugccugucccccgggagcgcccccucccugggccccgacgggggcgggggcggcagcgggcuccgggcguccccgggccccggggagcugggcaaggugaagaaggagcagcaggacggggaggccgacgacgacaaguuccccgugugcauccgcgaggccgucagccaggugcuguccggcuacgacuggacccucgugcccaugccgguccgggugaacggcgccagcaaguccaagccccacgugaagcgccccaugaacgccuucauggucugggcgcaggccgcccggcgcaagcuggccgaccaguacccccaccuccacaacgcggagcucagcaagacccuggggaagcuguggcggcuccugaacgaguccgacaagcgcccguucaucgaggaggccgagcggcugcgcaugcagcacaagaaggaccaccccgacuacaaguaccagccccggcgccggaagaacggcaaggccgcccagggggaggccgagugccccggcggcgaggcggagcagggcgggacggccgccauccaggcccacuacaagagcgcccaccucgaccaccgccacccgggggagggcucccccaugagcgacgggaaccccgagcaccccuccggccagagccacggcccgcccaccccgcccaccacccccaagacggagcugcaguccgggaaggcggaccccaagcgggacggccgcagcaugggggagggcgggaagccccacaucgacuucggcaacguggacaucggcgagaucagccacgaggugauguccaacauggagaccuucgacgucgccgagcuggaccaguaccugcccccgaacgggcaccccggccacgugagcuccuacagcgccgccggguacggccugggguccgcccuggcgguggccagcggccacuccgccuggaucagcaagcccccgggcgucgcccuccccaccguguccccgcccgggguggacgccaaggcgcaggucaagaccgagacggccggcccccaggggccgccccacuacaccgaccagcccagcaccucccagaucgccuacaccagccugucccugccccacuacggcagcgccuuccccuccaucagccggccccaguucgacuacuccgaccaccagcccagcggcccguacuacgggcacuccggccaggcgagcgggcucuacagcgccuucuccuacaugggccccagccagcgcccccuguacacggccaucuccgaccccagcccguccgggccccagagccacucccccacccacugggagcagcccguguacaccacccugagccggccguga

SEQ ID NO: 1455 - RNA, 456 nt, Artificial Sequence
  AAH32457_variant
augagcauccccuucuccaacacccacuaccgcaucccgcagggcuucgggaaccugcucgagggccugacccgggagauccugcgcgagcagcccgacaacauccccgccuucgccgcggccuacuucgagagccuccuggagaagcgggagaagacgaacuucgaccccgccgaguggggguccaagguggaggaccgcuucuacaacaaccacgccuucgaggagcaggagccgcccgagaaguccgaccccaagcaggaggagagccagaucagcggcaaggaggaggagaccuccgucaccauccuggacagcuccgaggaggacaaggagaaggaggagguggccgcggugaagauccaggccgccuuccgggggcacaucgcccgcgaggaggcgaagaagaugaagaccaacagccuccagaacgaggagaaggaggagaacaaguga

SEQ ID NO: 1456 - RNA, 294 nt, Artificial Sequence
  AAF28420_variant
auggacaagcagagcuccgccggcggggugaagcgcagcguccccugcgacuccaacgaggccaacgagaugaugccggagacccccaccggcgacagcgacccccagcccgcgccgaagaagaugaagacguccgagagcuccaccauccugguggugcgguaccgccggaacuucaagcgcaccagccccgaggagcuccugaacgaccacgcccgggagaaccgcaucaacccccugcagauggaggaggaggaguucauggagaucauggucgagauccccgccaaguga

SEQ ID NO: 1457 - RNA, 426 nt, Artificial Sequence
  AAH62750_variant
auggagcagcccaccagcuccaccaacggcgagaagaccaagagcccgugcgaguccaacaacaagaagaacgacgagaugcaggaggugcccaaccgcguccuggcccccgagcagagccucaagaagacgaagaccuccgaguaccccaucaucuucguguacuaccugcggaaggggaagaagaucaacagcaaccagcuggagaacgagcagucccaggagaacagcaucaacccgauccagaaggaggaggacgagggcguggaccucuccgaggggagcuccaacgaggacgaggaccugggccccugcgaggggcccagcaaggaggacaaggaccuggacuccagcgagggcuccagccaggaggacgaggaccucggccuguccgaggggagcucccaggacagcggcgaggacuga

SEQ ID NO: 1458 - RNA, 567 nt, Artificial Sequence
  AAH01003_variant
augaacggcgacgacaccuucgccaagcgcccccgggacgacgccaaggcgagcgagaagcgcuccaaggccuucgacgacaucgccaccuacuucagcaagaaggaguggaagaagaugaaguacuccgagaagaucagcuacguguacaugaagcggaacuacaaggccaugacgaagcugggguucaaggucacccucccgcccuucaugugcaacaagcaggccaccgacuuccagggcaacgacuucgacaacgaccacaaccgccggauccagguggagcacccccagaugaccuucgggcgccugcaccggaucauccccaagaucaugccgaagaagcccgcggaggacgagaacgacuccaagggcgugagcgaggccuccgggccccagaacgacggcaagcagcugcacccgcccggcaaggccaacaucagcgagaagaucaacaagcgcuccgggcccaagcggggcaagcacgccuggacgcaccgccuccgggagcgcaagcagcuggucaucuacgaggagaucagcgaccccgaggaggacgacgaguga

SEQ ID NO: 1459 - RNA, 567 nt, Artificial Sequence
  AAH16957_variant
augaacggcgacgacgccuucgcccgccggcccaccgugggggcgcagaucccggagaagauccagaaggccuucgacgacaucgccaaguacuucagcaaggaggagugggagaagaugaaggccuccgagaagaucuucuacgucuacaugaagcgcaaguacgaggccaugaccaagcugggcuucaaggcgacgcucccgcccuucaugugcaacaagcgggccgaggacuuccaggggaacgaccuggacaacgaccccaaccgcggcaaccagguggagcggccccagaugaccuucgggcgccugcagggcaucagccccaagaucaugcccaagaagcccgccgaggagggcaacgacuccgaggaggugccggaggccagcgggccccagaacgacggcaaggagcucugcccgcccgggaagcccaccaccuccgagaagauccacgagcggagcggccccaagcgcggggagcacgcguggacgcaccggcugcgcgagcggaagcagcuggucaucuacgaggagaucuccgaccccgaggaggacgacgaguga

SEQ ID NO: 1460 - RNA, 567 nt, Artificial Sequence
  AAC05819_variant
augaacggcgacgacaccuucgcccgccggcccaccgugggggcccagaucccggagaagauccagaaggcguucgacgacaucgccaaguacuucagcaaggaggagugggagaagaugaaggucuccgagaagaucguguacguguacaugaagcgcaaguacgaggccaugacgaagcugggcuucaaggccauccuccccagcuucaugcggaacaagcgcgucaccgacuuccaggggaacgacuucgacaacgaccccaaccggggcaaccaggugcagcgcccccagaugaccuucgggcggcugcagggcaucuucccgaagaucaugcccaagaagcccgccgaggagggcaacguguccaaggagguccccgaggcgagcgggccgcagaacgacggcaagcagcugugcccgcccgggaagcccaccacguccgagaagaucaacaugaucagcggccccaagcgcggggagcacgccuggacccaccggcuccgcgagcggaagcagcuggugaucuacgaggagaucuccgaccccgaggaggacgacgaguga

SEQ ID NO: 1461 - RNA, 567 nt, Artificial Sequence
  AAC05820_variant
augaacggcgacgacgccuucgcccgccggccccgcgacgacgcgcagaucagcgagaagcugcggaaggccuucgacgacaucgccaaguacuucuccaagaaggagugggagaagaugaaguccagcgagaagaucguguacgucuacaugaagcucaacuacgaggugaugaccaagcugggguucaaggugacccugccgcccuucaugcgcagcaagcgggccgccgacuuccacggcaacgacuucgggaacgaccgcaaccaccggaaccaggucgagcgcccccagaugacguucggcucccuccagcggaucuuccccaagaucaugccgaagaagcccgcggaggaggagaacgggcugaaggaggugcccgaggccagcggcccccagaacgacggcaagcagcugugcccgcccgggaaccccuccacccucgagaagaucaacaagaccagcggccccaagcgcgggaagcacgccuggacccaccggcugcgcgagcggaagcagcugguggucuacgaggagaucuccgacccggaggaggacgacgaguga

SEQ ID NO: 1462 - RNA, 888 nt, Artificial Sequence
  CCDS32420.1_variant
auggagcugauccaggacaccagccggcccccgcucgaguacgugaagggcgucccccugaucaaguacuucgccgaggcccuggggccccuccaguccuuccaggcgcgccccgacgaccugcugaucagcaccuacccgaaguccggcacgaccugggugagccagauccucgacaugaucuaccagggcggggaccuggagaagugccaccgcgcccccaucuucaugcgggugcccuuccuggaguucaaggcccccgggaucccguccggcauggagacccucaaggacacccccgcgccccgccugcugaagacgcaccucccccuggcccugcucccgcagacccugcuggaccagaaggucaaggugguguacgucgcccggaacgccaaggacguggccgugagcuacuaccacuucuaccacauggccaagguccaccccgagcccggcaccugggacuccuuccucgagaaguucauggugggggaggugagcuacggcuccugguaccagcacguccaggaguggugggagcugagccgcacccaccccgugcuguaccucuucuacgaggacaugaaggagaacccgaagcgggagauccagaagauccuggaguucguggggcgcucccugcccgaggagacggucgacuucguggugcagcacaccagcuucaaggagaugaagaagaaccccaugaccaacuacaccacggucccccaggaguucauggaccacuccaucagcccguucaugcggaagggcauggcgggggacuggaagaccaccuucaccguggcccagaacgagcgcuucgacgccgacuacgccgagaagauggccggcugcucccucagcuuccgguccgagcuguga

SEQ ID NO: 1463 - RNA, 3807 nt, Artificial Sequence
  CCDS43990.1_variant
augaucgccgcccccgagaucccgaccgacuucaaccugcuccaggagagcgagacccacuucuccagcgacacggacuucgaggacaucgagggcaagaaccagaagcaggggaagggcaagaccugcaagaaggggaagaagggccccgcggagaaggggaagggcggcaacgggggcgggaagccgcccuccggccccaaccgcaugaacgggcaccaccagcagaacggcguggagaacaugaugcuguucgaggucgugaagaugggcaagagcgccaugcaguccguggucgacgacuggaucgagagcuacaagcacgaccgggacaucgcccugcucgaccugaucaacuucuucauccagugcuccgggugcaagggcguggugaccgccgagauguuccgccacaugcagaacagcgagaucauccggaagaugaccgaggaguucgacgaggacuccggggacuacccccugacgauggccggcccccaguggaagaaguucaagagcuccuucugcgaguucaucggcguccucgugcgccagugccaguacagcaucaucuacgacgaguacaugauggacaccgugaucucccugcugaccgggcucagcgacucccagguccgggcguuccgccacaccagcacgcuggccgccaugaagcugaugaccgcccucgugaacguggcgcugaaccuguccaucaacauggacaacacccagcggcaguacgaggccgagcgcaacaagaugaucggcaagcgggccaacgagcgccucgagcugcugcuccagaagcggaaggagcugcaggagaaccaggacgagaucgagaacaugaugaacgccaucuucaagggggucuucgugcaccgcuaccgggacgccaucgcggagauccgcgccaucugcaucgaggagaucggcaucuggaugaagauguacagcgacgccuuccugaacgacuccuaccucaaguacgugggguggaccaugcacgacaagcagggcgagguccggcugaagugccugacggcccuccagggccuguacuacaacaaggagcugaacagcaagcucgagcuguucaccagccgcuucaaggaccggaucguguccaugacccuggacaaggaguacgacguggccguccaggcgaucaagcuccugacccuggugcuccagagcuccgaggaggugcugacggccgaggacugcgagaacgucuaccaccugguguacagcgcccaccgccccguggccgucgccgcgggggaguuccucuacaagaagcuguucucccggcgcgacccggaggaggacggcaugaugaagcggcgcgggcgccagggccccaacgccaaccuggugaagacccucgucuucuucuuccuggagagcgagcugcacgagcacgccgccuaccucguggacuccaugugggacugcgccaccgagcugcugaaggacugggagugcaugaacagccuccugcuggaggagccccucuccggggaggaggcgcugaccgaccggcaggagagcgcccugaucgagaucaugcugugcacgauccgccaggccgccgagugccacccgcccgugggccggggcaccgggaagcgcguccucaccgcgaaggagaagaagacccagcuggacgaccggacgaagaucaccgagcuguucgccguggcccucccccagcugcuggccaaguacuccguggacgccgagaaggucaccaaccuccugcagcugccccaguacuucgaccucgagaucuacaccacgggccgccuggagaagcaccuggacgcgcuccugcggcagauccgcaacaucguggagaagcacaccgacaccgacgugcuggaggccugcagcaagaccuaccacgcccucugcaacgaggaguucacgaucuucaaccgggucgacaucucccgcagccagcugaucgacgagcuggccgacaaguucaaccggcuccuggaggacuuccugcaggagggggaggagcccgacgaggacgacgccuaccaggugcucuccacccugaagcgcaucaccgcguuccacaacgcccacgaccugagcaagugggaccucuucgccugcaacuacaagcugcugaagaccggcaucgagaacggggacaugccggagcagaucgugauccacgcccuccagugcacgcacuacgucauccuguggcagcuggccaagaucaccgaguccagcuccaccaaggaggaccuccugcggcugaagaagcagaugcgcguguucugccagaucugccagcacuaccucaccaacgugaacaccacggucaaggagcaggcguucaccauccugugcgacauccugaugaucuucagccaccagaucaugagcggcggccgggacaugcucgagccccugguguacacccccgacuccagccugcaguccgagcuccugagcuucauccuggaccacguguucaucgagcaggacgacgacaacaacuccgccgacgggcagcaggaggacgaggccagcaagaucgaggcccuccacaagcgccggaaccugcuggcggccuucugcaagcucaucgucuacaccgugguggagaugaacacggccgccgacaucuucaagcaguacaugaaguacuacaacgacuacggcgacaucaucaaggagaccauguccaagacccgccagaucgacaagauccagugcgccaagacccugauccugagccuccagcagcuguucaacgagaugauccaggagaacggguacaacuucgaccgguccagcuccacguucagcggcaucaaggagcuggcgcgccgcuucgcccucaccuucggccuggaccagcugaagacccgggaggccaucgccaugcuccacaaggacgggaucgaguucgccuucaaggagcccaacccgcagggcgagucccacccgccccugaaccuggcguuccucgacauccugagcgaguucuccagcaagcugcuccgccaggacaagcggaccgucuacguguaccuggagaaguucaugacguuccagaugucccugcgccgggaggacguguggcucccccugaugagcuaccgcaacagccugcucgccgggggcgacgacgacaccauguccgucaucagcgggaucuccagccggggcuccaccgugcgcagcaagaaguccaagcccagcaccggcaagcggaagguggucgaggggaugcagcugucccugacggaggagagcuccagcuccgacagcauguggcucucccgcgagcagacccugcacacccccgugaugaugcagacgccccagcugaccagcaccaucaugcgggagcccaagcgccuccggccggaggacuccuucaugagcguguaccccaugcagaccgagcaccaccagacgccccuggacuacaacacccaggucaccuggaugcuggcccagcgccagcaggaggaggcccggcagcagcaggagcgcgccgcgauguccuacgugaagcuccggaccaaccugcagcacgccauccgccggggcaccagccugauggaggacgacgaggagccgaucguggaggacgucaugaugagcuccgaggggcgcaucgaggaccucaacgagggcauggacuucgacacgauggacaucgaccugccgcccagcaagaaccggcgcgagcgcaccgagcugaagcccgacuucuucgaccccgccuccaucauggacgagagcgugcucgggguguccauguucuga

SEQ ID NO: 1464 - RNA, 1473 nt, Artificial Sequence
  CCDS5615.1_variant
auggagagcaucuccaugaugggcagccccaagucccugagcgagaccuuccucccgaacgggaucaacggcaucaaggacgcccgcaaggugaccgucggggugaucggcuccggggacuucgccaagagccugacgauccggcugauccgcugcggcuaccacguggucaucggcucccggaaccccaaguucgcgagcgaguucuucccccacgugguggacgucacccaccacgaggacgcccucaccaagaccaacaucaucuucguggccauccaccgcgagcacuacacgucccugugggaccugcggcaccuccugguggggaagauccugaucgacgucagcaacaacaugcgcaucaaccaguaccccgaguccaacgccgaguaccucgccagccuguucccggacucccugaucgugaagggcuucaacguggucagcgcgugggcccuccagcuggggcccaaggacgccucccgccagguguacaucugcagcaacaacauccaggcccggcagcaggucaucgagcuggcgcggcagcucaacuucauccccaucgaccugggcucccugagcuccgcccgcgagaucgagaaccucccccugcggcuguucacccucuggcgcgggccgguggugguggccaucagccuggccaccuucuucuuccuguacagcuucguccgggacgugauccaccccuacgcccgcaaccagcaguccgacuucuacaagauccccaucgagaucgugaacaagacccuccccaucgucgcgaucacgcugcugagccucguguaccuggccggccugcucgccgccgccuaccagcuguacuacggcaccaaguaccggcgcuucccgcccuggcuggagaccuggcuccagugccggaagcagcuggggcugcucuccuucuucuucgcgauggugcacgucgccuacagccugugccugcccaugcgccgguccgagcgcuaccucuuccugaacauggccuaccagcagguccacgccaacaucgagaacagcuggaacgaggaggagguguggcggaucgagauguacaucuccuucggcaucaugagccuggggcuccugucccugcucgccgugaccagcauccccuccgugagcaacgcgcugaacuggcgcgaguucuccuucauccagagcacgcugggcuacgucgcccuccugaucuccaccuuccacgugcugaucuacggcuggaagcgcgccuucgaggaggaguacuaccgguucuacaccccgcccaacuucgugcuggcccucguccugcccagcaucgugauccuggggaagaucauccucuuccugcccugcaucucccgcaagcugaagcggaucaagaagggcugggagaagucccaguuccucgaggaggggaugggcgggaccaucccgcacgugagccccgagcgcgucacggugauguga

SEQ ID NO: 1465 - RNA, 777 nt, Artificial Sequence
  EAW93749_variant
auggagagccgcaaggacaucaccaaccaggaggagaucuggaagaugaagccccggcgcaaccuggaggacaacgacuaccuccacaaggacaccggcgagacguccaugcugaagcggccggugcugcuccaccuccagcagaccgcccacgccgacgaguucgacugccccagcgagcugcagcacgcgcaggagcuguucccccaguggcaccuccccaucaagaucgccgccgucauggccucccugaccuuccuguacacccugcugcgcgaggugauccacccgcucgccacgagccaccagcaguacuucuacaagauccccauccuggugaucaacaagguccugcccaugguguccaucacccuccuggcgcugguguaccuccccggggucaucgccgccaucguccaggugcacaacggcaccaaguacaagaaguucccgcacuggcuggacaaguggaugcugacccggaagcaguucgggcuccugagccuguucuucgccgugcuccacgcgaucuacacgcuguccuacgccaugcgccggagcuaccgcuacaagcugcucaacugggccuaccagcagguccagcagaacaaggaggacgccuggaucgagcacgacguguggcggauggagaucuacgugucccugggcaucguggggcuggccauccucgcgcugcuggccgugaccagcauccccuccgucagcgacucccucaccuggcgcgaguuccacuacauccaggugaacaacaucuga

SEQ ID NO: 1466 - RNA, 1020 nt, Artificial Sequence
  AAD15620_variant
auggagagccgcaaggacaucaccaaccaggaggagcuguggaagaugaagccccggcgcaaccucgaggaggacgacuaccugcacaaggacaccggcgagacguccaugcugaagcggccggugcuccugcaccuccaccagaccgcccacgccgacgaguucgacugccccagcgagcugcagcacacccaggagcuguucccccaguggcaccuccccaucaagaucgcggccaucaucgccucccugaccuuccuguacacgcugcuccgcgaggucauccacccgcuggccaccagccaccagcaguacuucuacaagauccccauccuggugaucaacaaggugcuccccauggucuccaucacccugcuggcccucguguaccugcccggggugaucgcggccaucguccagcugcacaacggcaccaaguacaagaaguucccgcacuggcucgacaaguggaugcugacgcggaagcaguucgggcugcucagcuucuucuucgccgugcugcacgccaucuacucccugagcuaccccaugcgccgguccuaccgcuacaagcuccugaacugggcguaccagcagguccagcagaacaaggaggacgccuggaucgagcacgacguguggcggauggagaucuacgugagccugggcaucguggggcucgccauccuggcccugcucgccgucaccuccauccccagcguguccgacagccugaccuggcgcgaguuccacuacauccaguccaagcugggcaucgugagccuccugcugggcaccauccacgcgcucaucuucgccuggaacaaguggaucgacaucaagcaguucgucugguacacgcccccgaccuucaugaucgccguguuccugcccaucgugguccugaucuucaaguccauccucuuccugcccugccugcggaagaagauccucaagauccgccacgggugggaggacgugaccaagaucaacaagaccgagaucugcagccagcuguga

SEQ ID NO: 1467 - RNA, 498 nt, Artificial Sequence
  CCDS32752.1_variant
augggcgcccccacccugccgcccgccuggcagcccuuccucaaggaccaccgcaucagcaccuucaagaacuggcccuuccuggaggggugcgcgugcacgccggagcggauggccgaggccggcuucauccacugccccaccgagaacgagcccgaccuggcccagugcuucuucugcuucaaggagcucgaggggugggagcccgacgacgacccgaucggccccgggaccguggccuacgcgugcaacaccuccacgcugggcggccgcgggggccggaucacccgcgaggagcacaagaagcacagcuccgggugcgccuuccugagcgucaagaagcaguucgaggagcucacccugggcgaguuccugaagcucgaccgggagcgcgccaagaacaagaucgccaaggagaccaacaacaagaagaaggaguucgaggagacggcggagaaggugcggcgcgccaucgagcagcuggccgccauggacuga

SEQ ID NO: 1468 - RNA, 429 nt, Artificial Sequence
  AAC51660_variant
augggcgcccccacccugccgcccgccuggcagcccuuccucaaggaccaccgcaucagcaccuucaagaacuggcccuuccuggaggggugcgcgugcacgccggagcggauggccgaggccggcuucauccacugccccaccgagaacgagcccgaccuggcccagugcuucuucugcuucaaggagcucgaggggugggagcccgacgacgacccgaucgaggagcacaagaagcacuccagcggcugcgccuuccuguccgugaagaagcaguucgaggagcugacccucggggaguuccugaagcuggaccgcgagcgggcgaagaacaagaucgccaaggagaccaacaacaagaagaaggaguucgaggagacggccaagaagguccgccgggccaucgagcagcucgcggccauggacuga

SEQ ID NO: 1469 - RNA, 2931 nt, Artificial Sequence
  EAW56623_variant
auggagaagcagaagcccuucgcccuguucgugccgccccgcagcuccagcucccaggucagcgccgugaagccccagacccucggcggggacuccaccuucuucaagagcuucaacaagugcacggaggacgacuucgaguuccccuucgcgaagaccaaccuguccaagaacggcgagaacaucgacagcgacccggcccugcagaaggugaacuuccuccccguccuggagcaggucgggaacuccgacugccacuaccaggagggccugaaggacagcgaccucgagaacuccgaggggcugagccggguguacuccaagcuguacaaggaggccgagaagaucaagaaguggaaggugagcaccgaggccgagcuccgccagaaggaguccaagcugcaggagaaccggaagaucaucgaggcccagcgcaaggcgauccaggagcugcaguucggcaacgagaaggugagccucaagcuggaggagggcauccaggagaacaaggaccugaucaaggagaacaacgccacccggcaccucugcaaccugcugaaggagacgugcgcccgcuccgccgagaagaccaagaaguacgaguacgagcgggaggagacccgccagguguacauggaccucaacaacaacaucgagaagaugaucaccgcguucgaggagcugcggguccaggccgagaacagccgccuggagaugcacuucaagcucaaggaggacuacgagaagauccagcaccuggagcaggaguacaagaaggagaucaacgacaaggagaagcaggucucccugcuccugauccagaucacggagaaggagaacaagaugaaggaccugaccuuccuccuggaggagagccgggacaaggugaaccagcuggaggagaagaccaagcuccagagcgagaaccugaagcaguccaucgagaagcagcaccaccugaccaaggagcucgaggacaucaaggugagccugcagcgcuccgugagcacgcagaaggcccuggaggaggaccuccagaucgccaccaagaccaucugccagcugaccgaggagaaggagacgcagauggaggaguccaacaaggcccgggcggcccacagcuucguggucaccgaguucgagaccaccgugugcucccuggaggagcuccugcgcacggagcagcagcggcuggagaagaacgaggaccagcucaagauccugaccauggagcugcagaagaaguccagcgagcucgaggagaugaccaagcugaccaacaacaaggagguggagcuggaggagcucaagaagguccugggggagaaggagacgcugcuguacgagaacaagcaguucgagaagaucgccgaggagcucaagggcaccgagcaggagcugaucgggcugcuccaggcccgcgagaaggaggugcacgaccuggagauccagcugaccgccaucaccacgagcgagcaguacuacuccaaggaggugaaggaccucaagaccgagcuggagaacgagaagcugaagaacaccgagcucaccagccacugcaacaagcugucccuggagaacaaggagcucacgcaggagaccagcgacaugacccuggagcugaagaaccagcaggaggacaucaacaacaacaagaagcaggaggagcggaugcucaagcagaucgagaaccugcaggagaccgagacgcagcugcgcaacgagcucgaguacguccgggaggagcugaagcagaagcgcgacgaggugaagugcaagcuggacaaguccgaggagaacugcaacaaccuccggaagcaggucgagaacaagaacaaguacaucgaggagcugcagcaggagaacaaggcgcugaagaagaagggcaccgccgagagcaagcagcucaacguguacgagaucaaggugaacaagcuggagcuggagcucgaguccgccaagcagaaguucggggagaucaccgacaccuaccagaaggagaucgaggacaagaagaucagcgaggagaaccugcuggaggaggucgagaaggccaaggugaucgccgacgaggcggugaagcuccagaaggagaucgacaagcgcugccagcacaagaucgccgagauggucgcccugauggagaagcacaagcaccaguacgacaagaucaucgaggagcgcgacuccgagcugggccucuacaagagcaaggagcaggagcagagcucccugcgggccagccuggagaucgagcucuccaaccugaaggccgagcugcucagcgugaagaagcagcuggagaucgagcgcgaggagaaggagaagcugaagcgggaggcgaaggagaacaccgccacgcucaaggagaagaaggacaagaagacccagaccuuccugcuggagacccccgagaucuacuggaagcucgacuccaaggccgugcccagccagacggucucccgcaacuucaccagcguggaccacggcaucuccaaggacaagcgggacuaccuguggaccagcgccaagaacacccuguccacgccgcuccccaaggcguacaccgugaagacccccaccaagcccaagcugcagcagcgcgagaaccugaacaucccgaucgaggagagcaagaagaagcggaagauggccuucgaguucgacaucaacuccgacagcuccgagacgaccgaccuccugagcauggucuccgaggaggagacccugaagacccucuaccgcaacaacaacccgcccgccagccaccugugcgugaagacgcccaagaaggcccccagcucccugaccacccccgggagcacccucaaguucggcgccauccggaagaugcgcgaggaccggugggcggugaucgccaagauggaccgcaagaagaagcugaaggaggccgagaagcuguucgucuga

SEQ ID NO: 1470 - RNA, 2931 nt, Artificial Sequence
  AAI44020_variant
auggagaagcagaagcccuucgcccuguucgugccgccccgcagcuccagcucccaggucagcgccgugaagccccagacccucggcggggacuccaccuucuucaagagcuucaacaagugcacggaggacgacuucgaguuccccuucgcgaagaccaaccuguccaagaacggcgagaacaucgacagcgacccggcccugcagaaggugaacuuccuccccgucuucgagcaggucgggaacuccgacugccacuaccaggagggccugaaggacagcgaccuggagaacuccgaggggcucagccggguguacuccaagcuguacaaggaggccgagaagaucaagaaguggaaggugagcaccgaggccgagcugcgccagaaggaguccaagcuccaggagaaccggaagaucaucgaggcccagcgcaaggcgauccaggagcugcaguucggcaacgagaaggugagccugaagcucgaggagggcauccaggagaacaaggaccugaucaaggagaacaacgccacccggcaccugugcaaccuccugaaggagacgugcgcccgcuccgccgagaagaccaagaaguacgaguacgagcgggaggagacccgccagguguacauggaccugaacagcaacaucgagaagaugaucaccgcguucgaggagcuccggguccaggccgagaacucccgccuggagaugcacuucaagcugaaggaggacuacgagaagauccagcaccucgagcaggaguacaagaaggagaucaacgacaaggagaagcaggucagccugcugcucauccagaucacggagaaggagaacaagaugaaggaccugaccuuccugcucgaggagagccgggacaaggugaaccagcuggaggagaagaccaagcugcaguccgagaaccucaagcagagcaucgagaagcagcaccaccugaccaaggagcuggaggacaucaaggugucccuccagcgcagcguguccacgcagaaggcccuggaggaggaccugcagaucgccaccaagaccaucugccagcucaccgaggagaaggagacgcagauggaggagagcaacaaggcccgggcggcccacuccuucguggucaccgaguucgagaccaccgugugcagccuggaggagcugcuccgcacggagcagcagcggcuggagaagaacgaggaccagcugaagauccucaccauggagcugcagaagaaguccagcgagcuggaggagaugaccaagcucaccaacaacaaggagguggagcuggaggagcugaagaagguccucggggagaaggagacgcugcuguacgagaacaagcaguucgagaagaucgccgaggagcugaagggcaccgagcaggagcucaucgggcugcugcaggcccgcgagaaggaggugcacgaccucgagauccagcugaccgccaucaccacguccgagcaguacuacagcaaggaggugaaggaccugaagaccgagcucgagaacgagaagcugaagaacaccgagcugaccucccacugcaacaagcucagccuggagaacaaggagcugacgcaggagaccuccgacaugacccucgagcugaagaaccagcaggaggacaucaacaacaacaagaagcaggaggagcggaugcugaagcagaucgagaaccuccaggagaccgagacgcagcugcgcaacgagcuggaguacguccgggaggagcucaagcagaagcgcgacgaggugaagugcaagcuggacaagagcgaggagaacugcaacaaccugcggaagcaggucgagaacaagaacaaguacaucgaggagcuccagcaggagaacaaggcgcugaagaagaagggcaccgccgaguccaagcagcugaacguguacgagaucaaggugaacaagcucgagcuggagcuggagagcgccaagcagaaguucggggagaucaccgacaccuaccagaaggagaucgaggacaagaagaucuccgaggagaaccuccuggaggaggucgagaaggccaaggugaucgccgacgaggcggugaagcugcagaaggagaucgacaagcgcugccagcacaagaucgccgagauggucgcccucauggagaagcacaagcaccaguacgacaagaucaucgaggagcgcgacagcgagcugggccuguacaagagcaaggagcaggagcaguccagccuccgggccucccuggagaucgagcugagcaaccucaaggccgagcugcuguccgugaagaagcagcucgagaucgagcgcgaggagaaggagaagcugaagcgggaggcgaaggagaacaccgccacgcugaaggagaagaaggacaagaagacccagaccuuccuccuggagacccccgagaucuacuggaagcuggacagcaaggccgugcccucccagacggucagccgcaacuucaccuccguggaccacggcaucagcaaggacaagcgggacuaccucuggaccuccgccaagaacacccugagcacgccgcugcccaaggcguacaccgugaagacccccaccaagcccaagcuccagcagcgcgagaaccugaacaucccgaucgaggaguccaagaagaagcggaagauggccuucgaguucgacaucaacagcgacuccagcgagacgaccgaccugcucuccauggucagcgaggaggagacccugaagacccuguaccgcaacaacaacccgcccgccagccaccucugcgugaagacgcccaagaaggcccccuccagccugaccacccccggguccacccugaaguucggcgccauccggaagaugcgcgaggaccggugggcggugaucgccaagauggaccgcaagaagaagcucaaggaggccgagaagcuguucgucuga

SEQ ID NO: 1471 - RNA, 2931 nt, Artificial Sequence; identical to SEQ ID NO: 1469
  AAI26267_variant

SEQ ID NO: 1472 - RNA, 330 nt, Artificial Sequence
  AAI05300_variant
auggagaagcagaagcccuucgcccuguucgugccgccccgcagcuccagcucccaggugagcgccgugaagccccagacccucggcggggacuccaccuucuucaagagcuucaacaagugcacggaggacgacuucgaguuccccuucgcgaagaccaaccuguccaagaacggcgagaacaucgacagcgacccggcccugcagaacgugaacuuccuccccguccuggagcaggucgggaacuccgacugccacuaccaggagggccugaaggacagcgaccucgagaacuccgaggggcugagccggguguacuccaagcuguga

SEQ ID NO: 1473 - RNA, 1467 nt, Artificial Sequence
  BAF56181_variant
augagcguggccuucgccgcgccccgccagcggggcaagggggagaucaccccggccgccauccagaagaugcuggacgacaacaaccaccucauccagugcaucauggacucccagaacaagggcaagaccagcgagugcucccaguaccagcagaugcugcacacgaaccuggucuaccucgccaccaucgccgacagcaaccagaacaugcagucccugcugcccgcgccccccacccagaacaugccgauggggcccggcgggaugaaccagagcggcccccccccgcccccccgcucccacaacaugcccagcgacggcaugguggggggcgggccgcccgccccccacaugcagaaccagaugaacggccagaugcccgggccgaaccacaugcccaugcagggccccggccccaaccagcucaacaugaccaacuccagcaugaacaugccguccagcucccacgggagcaugggcggguacaaccacuccgugcccagcucccagagcaugcccguccagaaccagaugacgaugucccagggccagcccaugggcaacuacgggccgcggcccaacaugagcaugcagcccaaccagggccccaugaugcaccagcagccgcccagccagcaguacaacaugccccaggggggcgggcagcacuaccagggccagcagccgcccaugggcaugauggggcaggugaaccagggcaaccacaugauggggcagcgccagaucccccccuaccggccgccccagcagggccccccccagcaguacuccgggcaggaggacuacuacggcgaccaguacagccacggcgggcagggcccgcccgaggggaugaaccagcaguacuaccccgacggccacaacgacuacggguaccagcagcccuccuacccggagcagggcuacgaccgccccuacgaggacagcucccagcacuacuacgagggcgggaacagccaguacggccagcagcaggacgccuaccaggggccccccccgcagcagggcuaccccccccagcagcagcaguaccccggccagcagggguacccgggccagcagcagggguacggccccucccaggggggccccggcccccaguacccgaacuacccccaggggcagggccagcaguacgggggcuaccggcccacccagccggggcccccccagcccccgcagcagcgccccuacggcuacgaccagaucaugcccaagaagcccgccgaggacgagaacgacagcaagggcguguccgaggcgagcgggccgcagaacgacggcaagcagcugcacccccccgggaaggccaacaucuccgagaagaucaacaagcggagcggccccaagcgcgggaagcacgccuggacccaccggcugcgcgagcggaagcagcucgucaucuacgaggagaucuccgacccggaggaggacgacgaguga

SEQ ID NO: 1474 - RNA, 1374 nt, Artificial Sequence
  BAF56182_variant
augagcguggccuucgccgcgccccgccagcggggcaagggggagaucaccccggccgccauccagaagaugcuggacgacaacaaccaccucauccagugcaucauggacucccagaacaagggcaagaccagcgagugcucccaguaccagcagaugcugcacacgaaccuggucuaccucgccaccaucgccgacagcaaccagaacaugcagucccugcugcccgcgccccccacccagaacaugccgauggggcccggcgggaugaaccagagcggcccccccccgcccccccgcucccacaacaugcccagcgacggcaugguggggggcgggccgcccgccccccacaugcagaaccagaugaacggccagaugcccgggccgaaccacaugcccaugcagggccccggccccaaccagcucaacaugaccaacuccagcaugaacaugccguccagcucccacgggagcaugggcggguacaaccacuccgugcccagcucccagagcaugcccguccagaaccagaugacgaugucccagggccagcccaugggcaacuacgggccgcggcccaacaugagcaugcagcccaaccagggccccaugaugcaccagcagccgcccagccagcaguacaacaugccccaggggggcgggcagcacuaccagggccagcagccgcccaugggcaugauggggcaggugaaccagggcaaccacaugauggggcagcgccagaucccccccuaccggccgccccagcagggccccccccagcaguacuccgggcaggaggacuacuacggcgaccaguacagccacggcgggcagggcccgcccgaggggaugaaccagcaguacuaccccgacggcaacucccaguacgggcagcagcaggacgccuaccagggccccccgccccagcagggcuaccccccccagcagcagcaguacccggggcagcagggcuaccccgggcagcagcagggcuacggccccagccaggggggccccgggccgcaguaccccaacuacccccagggccaggggcagcaguacggcggcuaccgccccacccagccggggcccccccagccgccccagcagcggcccuacggcuacgaccagaucaugcccaagaagccggccgaggacgagaacgacuccaagggggugagcgaggcguccggcccccagaacgacgggaagcagcugcacccccccggcaaggccaacaucagcgagaagaucaacaagcgcuccggcccgaagcgggggaagcacgccuggacccaccgccugcgggagcgcaagcagcucgucaucuacgaggagaucagcgaccccgaggaggacgacgaguga

SEQ ID NO: 1475 - RNA, 1467 nt, Artificial Sequence
  BAF56183_variant
augagcguggccuucgccgcgccccgccagcggggcaagggggagaucaccccggccgccauccagaagaugcuggacgacaacaaccaccucauccagugcaucauggacucccagaacaagggcaagaccagcgagugcucccaguaccagcagaugcugcacacgaaccuggucuaccucgccaccaucgccgacagcaaccagaacaugcagucccugcugcccgcgccccccacccagaacaugccgauggggcccggcgggaugaaccagagcggcccccccccgcccccccgcucccacaacaugcccagcgacggcaugguggggggcgggccgcccgccccccacaugcagaaccagaugaacggccagaugcccgggccgaaccacaugcccaugcagggccccggccccaaccagcucaacaugaccaacuccagcaugaacaugccguccagcucccacgggagcaugggcggguacaaccacuccgugcccagcucccagagcaugcccguccagaaccagaugacgaugucccagggccagcccaugggcaacuacgggccgcggcccaacaugagcaugcagcccaaccagggccccaugaugcaccagcagccgcccagccagcaguacaacaugccccaggggggcgggcagcacuaccagggccagcagccgcccaugggcaugauggggcaggugaaccagggcaaccacaugauggggcagcgccagaucccccccuaccggccgccccagcagggccccccccagcaguacuccgggcaggaggacuacuacggcgaccaguacagccacggcgggcagggcccgcccgaggggaugaaccagcaguacuaccccgacggccacaacgacuacggguaccagcagcccuccuacccggagcagggcuacgaccgccccuacgaggacagcucccagcacuacuacgagggcgggaacagccaguacggccagcagcaggacgccuaccaggggccccccccgcagcagggcuaccccccccagcagcagcaguaccccggccagcagggguacccgggccagcagcagggguacggccccucccaggggggccccggcccccaguacccgaacuacccccaggggcagggccagcaguacgggggcuaccggcccacccagccggggcccccccagcccccgcagcagcgccccuacggcuacgaccagaucaugcccaagaagcccgccgaggagggcaacgacagcgaggaggugccggaggcguccgggccccagaacgacggcaaggagcugugcccccccgggaagccgaccaccagcgagaagauccacgagcgguccggccccaagcgcggggagcacgccuggacgcaccggcugcgcgagcggaagcagcucgucaucuacgaggagaucagcgaccccgaggaggacgacgaguga

SEQ ID NO: 1476 - RNA, 1374 nt, Artificial Sequence
  BAF56184_variant
augagcguggccuucgccgcgccccgccagcggggcaagggggagaucaccccggccgccauccagaagaugcuggacgacaacaaccaccucauccagugcaucauggacucccagaacaagggcaagaccagcgagugcucccaguaccagcagaugcugcacacgaaccuggucuaccucgccaccaucgccgacagcaaccagaacaugcagucccugcugcccgcgccccccacccagaacaugccgauggggcccggcgggaugaaccagagcggcccccccccgcccccccgcucccacaacaugcccagcgacggcaugguggggggcgggccgcccgccccccacaugcagaaccagaugaacggccagaugcccgggccgaaccacaugcccaugcagggccccggccccaaccagcucaacaugaccaacuccagcaugaacaugccguccagcucccacgggagcaugggcggguacaaccacuccgugcccagcucccagagcaugcccguccagaaccagaugacgaugucccagggccagcccaugggcaacuacgggccgcggcccaacaugagcaugcagcccaaccagggccccaugaugcaccagcagccgcccagccagcaguacaacaugccccaggggggcgggcagcacuaccagggccagcagccgcccaugggcaugauggggcaggugaaccagggcaaccacaugauggggcagcgccagaucccccccuaccggccgccccagcagggccccccccagcaguacuccgggcaggaggacuacuacggcgaccaguacagccacggcgggcagggcccgcccgaggggaugaaccagcaguacuaccccgacggcaacucccaguacgggcagcagcaggacgccuaccagggccccccgccccagcagggcuaccccccccagcagcagcaguacccggggcagcagggcuaccccgggcagcagcagggcuacggccccagccaggggggccccgggccgcaguaccccaacuacccccagggccaggggcagcaguacggcggcuaccgccccacccagccggggcccccccagccgccccagcagcggcccuacggcuacgaccagaucaugcccaagaagccggccgaggaggggaacgacuccgaggaggugcccgaggcgagcggcccccagaacgacgggaaggagcugugccccccgggcaagcccaccaccuccgagaagauccacgagcgcagcggccccaagcggggggagcacgccuggacgcaccgccugcgggagcgcaagcagcucgucaucuacgaggagaucuccgaccccgaggaggacgacgaguga

SEQ ID NO: 1477 - RNA, 336 nt, Artificial Sequence
  AAI05590_variant
augaagaccaacgacaccuacaugaaguucagcuggcugaccgugcccgagaagucccucgacaaggagcaccgcugcaucguccggcacgagaacaacaagaacggcguggaccaggagaucaucuucccgcccaucaagaccgacgugaucaccauggaccccaaggacaacugcagcaaggacgccaacgacacccugcugcuccagcugacgaacaccuccgccuacuacauguaccugcuccugcugcucaagagcgucguguacuucgcgaucaucacgugcugccugcugcgccggaccgccuucugcugcaacggggagaaguccuga

SEQ ID NO: 1478 - RNA, 177 nt, Artificial Sequence
  AAG29337_variant
augcagauguucccgcccagcccccuguucuucuuccuccagcugcugaagcaguccagccgccggcucgagcacaccuucguguuccugcgcaacuucucccugaugcuccugcgguacaucggcaagaagcgccgggccacccgcuucugggacccccggcgcgggacgcccuga

SEQ ID NO: 1479 - RNA, 1131 nt, Artificial Sequence
  AAF26776_variant
auggccaacagcgccaacaccaacaccgugcccaagcuguaccgcuccgucaucgaggacgugaucaacgacgugcgggacaucuuccucgacgacggcgucgacgagcagguccugauggagcugaagacgcucugggagaacaagcugaugcagagccgcgcgguggacggguuccacuccgaggagcagcagcugcuccuccaggugcagcagcagcaccagccgcagcagcagcagcaccaccaccaccaccaccaccagcaggcccagccccagcagaccgugccccagcaggcccagacccagcagguccugauccccgccagccagcaggccaccgcgccccaggugaucgugccggacuccaagcugauccagcacaugaacgccagcaacauguccgccgccgcgacggccgccacccuggcccugcccgccggcgugacccccguccagcagauccucaccaacagcgggcagcugcuccagguggugcgggcggccaacggcgcccaguacaucuuccagccgcagcaguccgucgugcugcagcagcaggucaucccccagaugcagcccgggggcgugcaggcccccgugauccagcagguccuggccccgcugcccggcgggaucagcccccagacgggcgugaucauccagccccagcagauccucuucaccgggaacaagacccaggugaucccgaccacgguggcggcccccacccccgcccaggcccagaucaccgccaccggccagcagcagccccaggcgcagccggcccagacgcaggcgccccugguccuccagguggacgggaccggcgacaccuccagcgaggaggacgaggacgaggaggaggacuacgacgacgacgaggaggaggacaaggagaaggacggcgccgaggacgggcaggucgaggaggagccccugaacuccgaggacgacgugagcgacgaggagggccaggagcuguucgacaccgagaacguggucgugugccaguacgacaagauccaccgcuccaagaacaaguggaaguuccaccugaaggacgggaucaugaaccucaacggccgggacuacaucuucagcaaggccaucggcgacgccgagugguga

SEQ ID NO: 1480 - RNA, 1173 nt, Artificial Sequence
  AAH00125_variant
augcccccgagcggccugcgccuccugcugcuccugcugccccuccuguggcugcucgugcugacccccgggcggcccgccgccggccuguccacgugcaagaccaucgacauggagcucgucaagcgcaagcggaucgaggcgauccgcgggcagauccugagcaagcugcggcucgccuccccgcccagccagggcgaggugccgcccgggccccugcccgaggccgugcuggcccucuacaacuccacccgcgaccgggucgccggcgagagcgcggagcccgagcccgagccggaggccgacuacuacgccaaggaggugacccgcgugcugauggucgagacccacaacgagaucuacgacaaguucaagcaguccacgcacagcaucuacauguucuucaacaccuccgagcugcgggaggccgugcccgagcccgugcuccugagccgcgcggagcugcggcuccugcgccugaagcucaaggucgagcagcacguggagcuguaccagaaguacuccaacaacagcuggcgguaccuguccaaccgccuccuggcccccagcgacuccccggaguggcugagcuucgacgugaccggcgucgugcggcaguggcucucccgcgggggcgagaucgagggguuccggcugagcgcccacugcuccugcgacagccgcgacaacacccuccagguggacaucaacggcuucacgaccgggcggcgcggcgaccuggccaccauccacggcaugaaccggcccuuccugcugcucauggccacgccccuggagcgcgcgcagcaccuccagagcucccgccaccggcgcgcccuggacaccaacuacugcuucagcuccaccgagaagaacugcugcguccggcagcuguacaucgacuuccgcaaggaccugggguggaaguggauccacgagcccaagggcuaccacgccaacuucugccucgggccgugccccuacaucuggagccuggacacccaguacuccaaggugcuggcccucuacaaccagcacaaccccggcgccagcgcggcccccugcugcgugccgcaggcccuggagccccugcccaucgucuacuacgugggccggaagcccaagguggagcagcuguccaacaugaucguccgcagcugcaagugcuccuga

SEQ ID NO: 1481 - RNA, 1704 nt, Artificial Sequence
  AAT70724_variant
augggccgcgggcugcuccggggccuguggccccugcacaucgugcucuggacccgcaucgccagcaccaucccgccccacguccagaaguccgugaacaacgacaugaucgugacggacaacaacggggccgucaaguucccccagcugugcaaguucugcgacgugcgguucagcacgugcgacaaccagaaguccugcaugagcaacugcuccaucaccagcaucugcgagaagccccaggaggugugcgucgcgguguggcgcaagaacgacgagaacaucacccuggagaccgugugccacgacccgaagcuccccuaccacgacuucauccuggaggacgccgccucccccaagugcaucaugaaggagaagaagaagcccggcgagaccuucuucaugugcagcugcuccagcgacgagugcaacgacaacaucaucuucuccgaggaguacaacaccagcaacccggaccugcuccuggucaucuuccaggugaccgggaucucccugcucccgccccugggcguggccaucagcgucaucaucaucuucuacugcuaccgggugaaccgccagcagaagcuguccagcacgugggagaccggcaagacccggaagcucauggaguucuccgagcacugcgccaucauccuggaggacgaccgcagcgacaucuccagcacgugcgcgaacaacaucaaccacaacaccgagcugcuccccaucgagcuggacacccugguggggaagggccgguucgccgaggucuacaaggccaagcucaagcagaacaccagcgagcaguucgagaccguggccgugaagaucuuccccuacgaggaguacgcguccuggaagacggagaaggacaucuucagcgacaucaaccugaagcacgagaacauccugcaguuccucaccgccgaggagcgcaagaccgagcuggggaagcaguacuggcugaucaccgccuuccacgccaagggcaaccuccaggaguaccugacgcggcacgucaucuccugggaggaccugcgcaagcucgggagcucccuggcccggggcaucgcgcaccuccacagcgaccacacccccugcggccgccccaagaugcccaucgugcaccgggaccugaaguccagcaacauccuggugaagaacgaccugaccugcugccucugcgacuucgggcugucccugcgccucgacccgacccugagcgucgacgaccuggccaacuccggccagguggggacggcccgguacauggcccccgaggugcucgagagccgcaugaaccuggagaacgucgaguccuucaagcagaccgacguguacagcauggcccugguccucugggagaugaccucccggugcaacgcggugggcgaggugaaggacuacgagccgcccuucggcagcaagguccgcgagcaccccugcguggaguccaugaaggacaacgugcugcgggaccgcgggcgccccgagauccccagcuucuggcugaaccaccagggcauccagauggucugcgagacccucacggagugcugggaccacgaccccgaggcccggcugaccgcccagugcguggccgagcgcuucuccgagcuggagcaccuggaccggcucagcgggcgcagcugcuccgaggagaagaucccggaggacggcagccugaacaccaccaaguga

SEQ ID NO: 1482 - RNA, 2055 nt, Artificial Sequence
  BAG35778_variant
augauggacgccagcaaggagcuccaggugcuccacaucgacuuccugaaccaggacaacgccgucucccaccacaccugggaguuccagaccagcucccccguguuccgccggggccagguguuccaccuccgccugguccugaaccagccgccccagagcuaccaccagcugaagcucgaguucuccacggggcccaaccccagcaucgcgaagcacacccugguggugcuggacccgcggacccccuccgaccacuacaacuggcaggccacccuccagaacgagagcggcaaggaggucacgguggccgugaccuccagccccaacgccauccuggggaaguaccagcugaacgucaagaccggcaaccacauccucaaguccgaggagaacauccuguaccugcuguucaaccccuggugcaaggaggacaugguguucaugccggacgaggacgagcgcaaggaguacauccugaacgacaccgggugccacuacgugggcgccgcgcggagcaucaagugcaagcccuggaacuucggccaguucgagaagaacguccuggacugcugcaucucccuccugacggagagcucccugaagcccaccgaccgccgggaccccgugcucgugugccgcgccaugugcgccaugaugagcuucgagaaggggcagggcguccugaucgggaacuggaccggcgacuacgagggcgggaccgccccguacaaguggacgggcuccgcgcccauccugcagcaguacuacaacaccaagcaggccgugugcuucgggcagugcuggguguucgccggcauccucaccaccguccugcgggcccuggggauccccgcccgcagcgugacgggcuucgacuccgcgcacgacaccgagcggaaccucaccguggacaccuacgucaacgagaacggcgagaagaucacgagcaugacccacgacagcguguggaacuuccacguguggaccgacgccuggaugaagcgccccgaccugccgaagggguacgacggcuggcaggccgucgacgccacgccccaggagcggucccaggggguguucugcugcggccccagcccccugaccgccauccgcaagggggacaucuucaucgucuacgacacccgguucguguucuccgaggugaacggcgaccgccucaucuggcuggucaagauggugaacggccaggaggagcugcacgugaucagcauggagaccaccuccaucgggaagaacaucagcacgaaggcggucggccaggaccggcgccgggacaucaccuacgaguacaaguacccggagggguccagcgaggagcgccaggugauggaccacgccuuccuccugcuguccagcgagcgggagcaccgccgccccgugaaggagaacuuccuccacauguccguccagagcgacgacgugcugcugggcaacuccgugaacuucaccgucauccucaagcggaagaccgccgcccugcagaacgugaacauccuggggagcuucgagcuccagcuguacacgggcaagaagauggccaagcugugcgaccucaacaagaccucccagauccagggccaggugagcgaggucacccugacccuggacuccaagacguacaucaacagccucgcgauccuggacgacgagcccgugauccgcggguucaucaucgccgagaucguggaguccaaggagaucauggccagcgaggucuucaccagcuuccaguaccccgaguucuccaucgagcugccgaacaccggccggaucgggcagcugcucgugugcaacugcaucuucaagaacacccuggccaucccccugaccgacgugaaguucagccucgagucccugggcaucagcucccugcagacgagcgaccacgggaccguccagcccggcgagaccauccagucccagaucaagugcacccccaucaagacgggcccgaagaaguucaucgugaagcucagcuccaagcaggucaaggagaucaacgcccagaagaucgugcugaucaccaaguga

SEQ ID NO: 1483 - RNA, 3375 nt, Artificial Sequence
  CCDS6519.1_variant
auggacagccuggccucccucgugcugugcggcgucagccugcuccuguccgggaccguggagggcgccauggaccugauccucaucaacagccugccccugguguccgacgcggagaccagccucacgugcaucgccuccggguggcgcccgcacgagcccaucaccaucggccgggacuucgaggcccugaugaaccagcaccaggacccccuggaggucacccaggacgugacccgcgagugggccaagaagguggucuggaagcgggagaaggccagcaagaucaacggggcguacuucugcgagggccgcgugcggggcgaggccauccgcauccggacgaugaagaugcgccagcaggccuccuuccuccccgccacccugaccaugaccguggacaagggggacaacgucaacaucagcuucaagaaggugcugaucaaggaggaggacgcggugaucuacaagaacggcuccuucauccacagcgucccgcggcacgaggugcccgacauccucgaggugcaccucccccacgcccagccccaggacgccggggucuacuccgcccgcuacaucggcgggaaccuguucacgagcgccuucacccggcucaucgugcgccggugcgaggcgcagaaguggggcccggagugcaaccaccugugcaccgccugcaugaacaacggcgugugccacgaggacaccggggagugcaucugcccgcccggcuucauggggcgcacgugcgagaaggccugcgagcugcacaccuucggccggaccugcaaggagcgcugcuccggccaggaggggugcaagagcuacgucuucugccuccccgaccccuacggcugcuccugcgccaccggguggaagggccugcagugcaacgaggccugccaccccggguucuacggccccgacugcaagcugcggugcagcugcaacaacggcgagaugugcgaccgcuuccaggggugccucugcucccccggcuggcaggggcugcagugcgagcgggagggcauccagcgcaugacgccgaagaucguggaccugcccgaccacaucgaggugaacagcgggaaguucaaccccaucugcaaggcgagcggcuggccccucccgaccaacgaggagaugacccuggucaagcccgacggcaccgugcugcaccccaaggacuucaaccacacggaccacuucuccguggccaucuucaccauccaccggauccugcccccggacagcggggucugggugugcuccgucaacaccguggccggcaugguggagaagcccuucaacaucagcgucaaggugcugcccaagccccugaacgccccgaacgugaucgacaccgggcacaacuucgccgucaucaacaucuccagcgagcccuacuucggcgacgggcccaucaaguccaagaagcuccuguacaagccggugaaccacuacgaggcguggcagcacauccaggugacgaacgagaucgucacccugaacuaccucgagccccgcaccgaguacgagcugugcgugcagcuggugcgccggggcgagggcggggagggccaccccgggcccguccgccgguucaccacggccagcaucggccucccgccgccccgcggccugaaccugcuccccaagucccagaccacccugaaccugaccuggcagcccaucuuccccagcuccgaggacgacuucuacguggagguggagcggcgcagcguccagaaguccgaccagcagaacaucaaggugcccgggaaccucacgagcgugcugcugaacaaccuccacccccgggagcaguacgucgugcgcgcccgggugaacaccaaggcccagggcgagugguccgaggaccugaccgccuggacccugagcgacauccugccgccccagcccgagaacaucaagaucuccaacaucacgcacagcuccgcggucaucagcuggaccauccucgacggguacagcaucuccagcaucaccauccgcuacaaggugcagggcaagaacgaggaccagcacguggacgucaagaucaagaacgccaccaucacccaguaccagcugaaggggcuggagcccgagacggccuaccagguggacaucuucgccgagaacaacaucggcuccagcaacccggcguucucccacgagcucgugacccugcccgagagccaggcccccgccgaccugggcgggggcaagaugcuccugaucgccauccugggguccgccggcaugaccugccucaccguccugcuggcguuccucaucauccugcagcugaagcgggccaacgugcagcgccggauggcccaggccuuccagaacgugcgcgaggagcccgccguccaguucaacagcgggacgcucgcgcugaaccggaaggugaagaacaacccggaccccaccaucuaccccgugcuggacuggaacgacaucaaguuccaggacgucaucggcgagggcaacuucggccaggugcucaaggcccgcaucaagaaggacgggcugcggauggacgccgccaucaagcgcaugaaggaguacgccuccaaggacgaccaccgggacuucgcgggggagcuggaggugcucugcaagcugggccaccaccccaacaucaucaaccugcucggggccugcgagcaccgcggcuaccuguaccuggccaucgaguacgccccgcacggcaaccuccuggacuuccugcgcaagagccggguccucgagaccgaccccgcguucgccaucgccaacuccaccgccagcacgcuguccagccagcagcugcuccacuucgccgcggacguggcccgcgggauggacuaccugucccagaagcaguucauccaccgggaccuggccgcccgcaacauccucgugggcgagaacuacgucgccaagaucgcggacuucgggcugagccggggccaggagguguacgugaagaagaccauggggcgccugcccguccgguggauggccaucgagucccucaacuacagcguguacaccaccaacagcgacgugugguccuacggcguccugcugugggagaucgugagccucggcgggacgccguacugcggcaugaccugcgccgagcuguacgagaagcugccccagggguaccgccucgagaagccccugaacugcgacgacgagguguacgaccugaugcggcagugcuggcgcgagaagcccuacgagcggccguccuucgcccagauccucgucagccugaaccgcaugcuggaggagcggaagaccuacgugaacaccacgcucuacgagaaguucaccuacgccggcaucgacugcuccgcggaggaggccgccuga

SEQ ID NO: 1484 - RNA, 1791 nt, Artificial Sequence
  BAF84950_variant
auggccgacgccgaggcgcgcgccgaguuccccgaggaggcccggccggaccgcggcacccuccaggugcugcaggacauggccagccggcugcgcauccacuccauccgggcgaccugcagcacguccagcgggcaccccaccuccugcagcuccagcuccgagaucaugagcguccuguucuucuacaucaugcgcuacaagcaguccgaccccgagaaccccgacaacgaccgguucgugcucgccaagcgccugagcuucguggacgucgccaccggcuggcuggggcagggccucgggguggccugcggcauggccuacaccggcaaguacuucgaccgggcguccuaccgcguguucugccugaugagcgacggggaguccagcgagggcuccgucugggaggccauggccuucgccagcuacuacucccuggacaaccucguggccaucuucgacgugaaccggcuggggcacagcggcgcgcugccggccgagcacugcaucaacaucuaccagcgccggugcgaggccuucggguggaacacguacgucguggacggccgcgacguggaggcccucugccaggucuucuggcaggccagccaggugaagcacaagcccaccgcgguggucgccaagaccuucaagggccgggggacccccuccaucgaggacgccgagagcuggcacgccaagcccaugccgcgcgagcgggccgacgcgaucaucaagcugaucgagucccagauccagacgagccgcaaccuggacccccagccgcccaucgaggacucccccgaggugaacaucaccgacgugcggaugaccagcccgcccgacuaccgcgucggcgacaagaucgccacccggaaggccugcgggcucgcccuggccaagcugggcuacgcgaacaaccgcguggugguccucgacggcgacacgcgcuacuccaccuucagcgagaucuucaacaaggaguaccccgagcgguucaucgagugcuucauggccgagcagaacaugguguccguggcccuggggugcgccagccgcggccggaccaucgcguucgccuccaccuucgccgccuuccugacgcgcgccuucgaccacauccggaucgggggccucgcggagagcaacaucaacaucaucgggucccacugcggcgucagcgugggcgacgacggggccucccagauggcccuggaggacaucgccauguuccgcaccauccccaagugcaccaucuucuaccccaccgacgccgucagcacggagcacgcgguggcccuggccgccaacgccaagggcaugugcuucauccggaccacccgccccgagaccauggugaucuacacgccccaggagcgguucgagaucgggcaggcgaagguccuccgccacugcguguccgacaaggugaccgucaucggcgccgggaucaccguguacgaggcccuggccgcggccgacgagcugagcaagcaggacaucuucauccgggugaucgaccucuucaccaucaagccgcuggacgucgccacgaucguguccagcgccaaggccaccgagggccgcaucaucaccguggaggaccacuacccccagggcgggaucggcgaggcggucugcgccgccgugagcauggaccccgacauccaggugcacucccuggccgucagcggggugccccaguccggcaagagcgaggagcuccuggacauguacgggaucuccgcccggcacaucaucguggcggucaagugcaugcugcucaacuga

SEQ ID NO: 1485 - RNA, 861 nt, Artificial Sequence
  EAW88722_variant
auggccgaggacggcgaggaggccgaguuccacuucgcggcccuguacaucagcgggcaguggccccgccuccgggccgacaccgaccugcagcgccugggcuccagcgccauggccccgucccggaaguucuucgucgggggcaacuggaagaugaacgggcgcaagcagagccucggcgagcugaucggcacccugaacgcggccaaggugcccgccgacacggagguggugugcgccccgcccaccgcguacaucgacuucgcccggcagaagcucgaccccaagaucgccgucgccgcccagaacugcuacaaggugaccaacggggcguucaccggcgagaucucccccgggaugaucaaggacugcggcgccacgugggugguccuggggcacagcgagcgccggcacguguucggcgaguccgacgagcugaucggccagaagguggcccacgcccucgccgaggggcugggcgucaucgcgugcaucggggagaagcuggacgagcgcgaggccggcaucaccgagaaggugguguucgagcagaccaaggucaucgccgacaacgugaaggacuggagcaaggugguccucgccuacgagcccgugugggccaucggcaccgggaagacggcgaccccgcagcaggcccaggaggugcacgagaagcugcggggcuggcugaaguccaacgucagcgacgccguggcccaguccacccgcaucaucuacgggggcagcgugaccggggccacgugcaaggagcucgcgucccagcccgacgucgacggcuuccuggugggcggggccagccugaagcccgaguucguggacaucaucaacgccaagcaguga

SEQ ID NO: 1486 - RNA, 357 nt, Artificial Sequence
  CAA72108_variant
augccccugguggucgccgugaucuucuucagccucuggguguucgcccugggccagcuggagcagccggagaucuccaucagccgccccgcgaacaaguccgcccacaucagcuggaaggccuccauccagggguucagcuccaagaucauccacugguacuggcagaagcccaacaagggccucgaguaccugcugcacgucuuccucaccaucagcgcccaggacugcuccgggggcaagaccaagaagcuggaggugagcaagaacgcccacacguccaccagcacccugaagaucaaguuccucgagaaggaggacgagguggucuaccacugcgcgugcuggauccggcac

SEQ ID NO: 1487 - RNA, 414 nt, Artificial Sequence
  EAL23985_variant
augcugagccuccugcacaccuccacccuggccgugcucggcgcccugugcgucuacggggcgggccaccuggagcagccccagaucagcuccacgaagacccucagcaagaccgcccgccuggagugcgugguguccgggaucaccaucagcgccacguccgucuacugguaccgggagcgcccgggcgaggugauccaguuccuggugagcaucuccuacgacgggaccguccggaaggagagcggcauccccuccggcaaguucgagguggaccgcauccccgagaccagcaccuccacgcucaccauccacaacguggagaagcaggacaucgccaccuacuacugcgcccugugggagguccacagcucccggcaguucgagcccagccacuccaucaacguguacuga

SEQ ID NO: 1488 - RNA, 366 nt, Artificial Sequence
  CAA30181_variant
augcugagccuccugcacaccuccacccuggccgugcucggcgcccugugcgucuacggggcgggccaccuggagcagccccagaucagcuccacgaagacccucagcaagaccgcccgccuggagugcgugguguccgggaucaccaucagcgccacguccgucuacugguaccgggagcgcccgggcgaggugauccaguuccuggugagcaucuccuacgacgggaccguccggaaggagagcggcauccccuccggcaaguucgagguggaccgcauccccgagaccagcaccuccacgcucaccauccacaacguggagaagcaggacaucgccaccuacuacugcgcccugugggagguc

SEQ ID NO: 1489 - RNA, 366 nt, Artificial Sequence
  CAA33345_variant
augcugagccuccugcacaccuccacccuggccgugcucggcgcccugugcgucuacggggcgggccaccuggagcagccccagaucagcuccacgaagacccucagcaagaccgcccgccuggagugcgugguguccgggaucaagaucagcgccaccuccgucuacugguaccgggagcgcccgggcgaggugauccaguuccuggugagcaucuccuacgacgggacgguccggaaggagagcggcauccccuccggcaaguucgagguggaccgcauccccgagaccagcaccuccacccucacgauccacaacguggagaagcaggacaucgccaccuacuacugcgcccugugggagguc

SEQ ID NO: 1490 - RNA, 2382 nt, Artificial Sequence
  AAA93251_variant
augauggccgcccuguaccccagcaccgaccucuccggcgcgagcuccagcucccugccgagcucccccagcuccagcucccccaacgaggugauggcccugaaggacguccgcgaggugaaggaggagaacacccucaacgagaagcuguuccugcucgccugcgacaagggggacuacuacauggugaagaagauccuggaggagaacagcuccggcgaccugaacaucaacugcgucgacgugcucgggcggaacgccgugacgaucaccaucgagaacgagaaccuggacauccugcagcuccugcuggacuacggcugccagagcgccgacgcgcuccuggucgccaucgacuccgagguggugggggccgucgacauccugcucaaccaccgccccaagcggagcucccgcccgaccaucgugaagcugauggagcggauccagaaccccgaguacagcaccacgauggacguggcccccgucauccuggcggcccaccgcaacaacuacgagauccucaccaugcugcugaagcaggacgugucccuccccaagccgcacgccgugggcugcgagugcacccugugcagcgccaagaacaagaaggacagccugcggcacucccgcuuccggcucgacaucuaccgcugccuggccagccccgcgcugaucaugcucaccgaggaggaccccauccugcgggccuucgagcuguccgccgaccucaaggagcugagccuggucgagguggaguuccgcaacgacuacgaggagcucgcccggcagugcaagauguucgccaaggaccugcuggcgcaggcccgcaacucccgggagcucgaggugauccugaaccacacgagcuccgacgagccccuggacaagcgcggccuccuggaggagcggaugaaccugagccgccucaagcuggccaucaaguacaaccagaaggaguucgucucccagagcaacugccagcaguuccugaacaccgugugguucgggcagauguccggcuaccggcgcaagccgaccugcaagaagaucaugaccgugcucacggucgggaucuucuggcccgugcugagccugugcuaccugaucgcccccaagucccaguucggccggaucauccacacccccuucaugaaguucaucauccacggggccagcuacuucaccuuccuccugcugcucaaccuguacucccugguguacaacgaggacaagaagaacaccaugggcccggcgcucgagcgcaucgacuaccugcugauccucuggaucaucggcaugaucuggagcgacaucaagcgccugugguacgaggggcuggaggacuuccucgaggagucccggaaccagcugagcuucgucaugaacucccuguaccucgccacguucgcccugaagguggucgcccacaacaaguuccacgacuucgccgaccgcaaggacugggacgcguuccaccccacccugguggccgagggccucuucgccuucgccaacgugcugagcuaccugcgccucuucuucauguacaccaccagcuccauccuggggccccugcagaucagcaugggccagaugcuccaggacuucggcaaguuccuggggauguuccugcucguccuguucuccuucacgaucggccugacccagcucuacgacaagggguacaccagcaaggagcagaaggacugcgugggcaucuucugcgagcagcaguccaacgacaccuuccacagcuucaucgggacgugcuucgcgcuguucugguacaucuucucccuggcccacguggccaucuucgucacccgguucagcuacggcgaggagcuccaguccuucgugggcgccgugaucgucgggaccuacaacgugguggucgugaucgugcugaccaagcugcucgucgccaugcugcacaagagcuuccagcugaucgcgaaccacgaggacaaggaguggaaguucgcccgggccaagcucuggcuguccuacuucgacgacaagugcacgcugcccccgcccuucaacaucauccccagccccaagaccaucugcuacaugaucuccagccucuccaaguggaucugcagccacaccuccaagggcaaggugaagcgccagaacagccugaaggaguggcggaaccugaagcagaagcgcgacgagaacuaccagaaggugaugugcugccucguccaccgguaccugaccagcaugcgccagaagaugcaguccacggaccaggccaccguggagaaccugaacgagcuccggcaggaccugagcaaguuccgcaacgagauccgggaccugcucggguuccgcaccuccaaguacgccauguucuacccgcggaacuga

SEQ ID NO: 1491 - RNA, 3315 nt, Artificial Sequence
  AAZ73614_variant
augagcuuccgcgccgcccggcuguccaugcgcaaccggcgcaacgacacccucgacagcacccggacgcuguacuccagcgcgucccgcagcaccgaccuguccuacagcgaguccgaccucgugaacuucauccaggccaacuucaagaagcgggagugcgucuucuucaccaaggacagcaaggccaccgagaacgugugcaagugcggcuacgcccagucccagcacauggaggggacgcagaucaaccagagcgagaaguggaacuacaagaagcacaccaaggaguuccccaccgacgccuucggcgacauccaguucgagacccuggggaagaagggcaaguacauccgccuguccugcgacacggacgcggagauccucuacgagcugcugacccagcacuggcaccucaagaccccgaaccuggugaucagcgucaccgggggcgccaagaacuucgcccugaagccccggaugcgcaagaucuucucccggcucaucuacaucgcccagagcaagggcgcguggauccugaccgggggcacgcacuacgggcugaugaaguacaucggcgagguggugcgcgacaacaccaucucccggagcuccgaggagaacaucgucgccaucgggaucgccgccuggggcauggugagcaaccgcgacacccucauccggaacugcgacgccgagggcuacuuccuggcgcaguaccugauggacgacuucacgcgcgacccccucuacauccuggacaacaaccacacccaccuccuccugguggacaacgggugccacggccaccccaccgucgaggccaagcugcggaaccagcucgagaaguacaucagcgagcgcaccauccaggacuccaacuacgggggcaagaucccgaucgugugcuucgcccagggcgggggcaaggagacgcugaaggccaucaacaccagcaucaagaacaagauccccugcguggucguggagggguccggccagaucgccgacgugaucgcgagccuggucgagguggaggacgcccucaccuccagcgccgugaaggagaagcugguccgguuccugccccgcaccgugucccggcuccccgaggaggagacggagagcuggaucaaguggcugaaggagauccuggagugcucccaccuccugaccgugaucaagauggaggaggccggggacgagaucgucagcaacgccaucuccuacgcgcuguacaaggccuucagcaccuccgagcaggacaaggacaacuggaacggccagcucaagcugcugcucgaguggaaccagcuggaccuggccaacgacgagaucuucaccaacgaccgccgcugggagagcgccgaccuccaggaggugauguucacggcccugaucaaggaccggccgaaguucgugcgccuguuccucgagaacggccugaaccugcggaaguuccucacccacgacguccugaccgagcuguucuccaaccacuucagcacccugguguaccgcaaccuccagaucgcgaagaacuccuacaacgacgcccugcugacguucgucuggaagcucguggccaacuuccggcgcggguuccggaaggaggaccgcaacggccgggacgagauggacaucgagcugcacgacgugagccccaucacccgccacccccugcaggcccucuucaucugggcgauccugcagaacaagaaggagcuguccaaggucaucugggagcagacccgggggugcacccucgccgcccugggcgccagcaagcugcucaagacgcuggccaaggugaagaacgacaucaacgcggccggggagagcgaggagcuggccaacgaguacgagacccgcgccguggagcuguucaccgagugcuacuccagcgacgaggaccuggccgagcagcugcucgucuacuccugcgaggcguggggcggcagcaacugccuggagcuggccguggaggccaccgaccagcacuucaucgcccagcccggggugcagaacuuccucuccaagcagugguacggcgagaucagccgggacaccaagaacuggaagaucauccugugccuguucaucaucccgcucgucgggugcggcuucguguccuuccgcaagaagcccguggacaagcacaagaagcugcugugguacuacgucgccuucuucacgagccccuucgugguguucuccuggaacgucguguucuacaucgcguuccuccugcuguucgccuacgugcuccugauggacuuccacagcgucccccacccgcccgagcuggugcucuacucccugguguucguccuguucugcgacgaggugcggcagugguacgugaacggggucaacuacuucaccgaccucuggaacgugauggacacccugggccuguucuacuucaucgccggcaucguguuccgccuccacagcuccaacaagagcucccuguacagcgggcgggucaucuucugccuggacuacaucaucuucacccuccgccugauccacaucuucacggugucccggaaccugggccccaagaucaucaugcuccagcgcaugcugaucgacguguucuucuuccuguuccucuucgccgucuggaugguggcguucgggguggcccgccagggcauccugcggcagaacgagcagcgcuggcgguggaucuuccgcagcgucaucuacgagcccuaccuggccauguucggccaggugccgagcgacguggacgggaccaccuacgacuucgcccacugcaccuucacgggcaacgaguccaagccccucugcgucgagcuggacgagcacaaccugccccgguuccccgaguggaucaccaucccgcucgugugcaucuacaugcugagcaccaacauccugcucgugaaccugcuggucgccauguucggguacaccgugggcacggugcaggagaacaacgaccaggucuggaaguuccagcgcuacuuccucgugcaggaguacugcucccggcugaacauccccuuccccuucaucguguucgcguacuucuacauggucgugaagaagugcuucaagugcugcugcaaggagaagaacauggagagcuccgugugcugcuucaagaacgaggacaacgagacccuggccugggagggggucaugaaggagaacuaccucgugaagaucaacaccaaggccaacgacaccagcgaggagaugcgccaccgguuccgccagcuggacacgaagcugaacgaccucaagggccugcugaaggagaucgccaacaagaucaaguga

SEQ ID NO: 1492 - RNA, 2097 nt, Artificial Sequence
  AAK13079_variant
augaugcgcagccgguccaagagcccccgccggccgucccccaccgcccgcggcgccaacugcgacguggagcugcucaagaccacgacccgggaccgcgaggagcugaagugcaugcuggagaaguacgagcggcaccucgcggagauccaggggaacgucaaggugcucaagagcgagcgcgacaagaucuuccugcuguacgagcaggcccaggaggagaucacccggcugcgccgggagaugaugaaguccugcaagagccccaaguccaccacggcccacgccauccugcgccggguggagaccgagcgcgacgucgccuucaccgaccuccggcgcaugaccacggagcgggacagccugcgcgagcggcugaagaucgcgcaggagaccgccuucaacgagaaggcccaccucgagcagcgcaucgaggagcuggagugcaccgugcacaaccuggacgacgagcggauggagcagauguccaacaugacccucaugaaggagacgaucagcaccguggagaaggagaugaagucccuggcccgcaaggcgauggacaccgagagcgagcugggccgccagaaggccgagaacaacucccuccggcugcuguacgagaacaccgagaaggaccucagcgacacgcagcgccaccuggccaagaagaaguacgagcugcagcucacccaggagaagaucaugugccuggacgagaagaucgacaacuucacccggcagaacaucgcccagcgcgaggagaucuccauccucgggggcacccugaacgaccuggccaaggagaaggagugccugcaggcgugccucgacaagaaguccgagaacaucgccagccugggggagagccuggccaugaaggagaagacgaucuccggcaugaagaacaucaucgccgagauggagcaggccagccggcagugcaccgaggcgcucaucgucugcgagcaggacgugagccgcaugcggcgccagcuggacgagaccaacgacgagcuggcccagaucgcccgggagcgcgacauccucgcccacgacaacgacaaccugcaggagcaguucgccaaggcgaagcaggagaaccaggcccuguccaagaagcucaacgacacccacaacgagcugaacgacaucaagcagaaggugcaggacacgaaccuggaggucaacaagcucaagaacauccucaagagcgaggaguccgagaaccggcagaugauggagcagcugcgcaaggccaacgaggacgccgagaacugggagaacaaggcccggcagagcgaggcggacaacaacacccugaagcuggagcugaucaccgccgaggccgagggcaaccgccucaaggagaagguggacucccugaaccgggagguggagcagcaccugaacgccgagcgcagcuacaagucccagaucagcacccugcacaaguccgucgugaagauggaggaggagcuccagaaggugcaguucgagaaggucagcgcgcuggccgaccuguccagcacgcgggagcucugcaucaagcuggacuccagcaaggagcugcucaaccgccagcugguggccaaggaccaggagaucgagaugcgggagaacgagcuggacuccgcccacagcgagaucgagcuccugcgcucccagauggccaacgagcgcaucagcaugcagaaccuggaggcgcuccugguggccaaccgggacaaggaguaccagucccagaucgcccugcaggagaaggagagcgagauccagcuccugaaggagcaccugugccucgccgagaacaagauggccauccagagccgcgacgucgcgcaguuccggaacguggugacccagcuggaggccgaccuggacaucaccaagcgccagcucgggaccgagcgguucgagcgcgagcgggccguccaggagcugcgccggcagaacuacuccagcaacgccuaccacauguccagcacgaugaagcccaacaccaagugccacuccccggagcgcgcccaccaccggagccccgaccgcggccuggaccggucccucgaggagaaccugugcuaccgcgacuucuga

SEQ ID NO: 1493 - RNA, 927 nt, Artificial Sequence
  CCDS48205.1_variant
augcgccccgagggcagccugaccuaccgggugccggagcgccuccggcagggguucugcggcgucgggcgcgccgcccaggcgcuggugugcgccuccgccaaggagggcaccgccuuccggauggaggccgugcaggagggggcggccggcgucgagagcgagcaggccgcccugggcgaggaggcggugcuccugcuggacgacaucauggccgagguggaggucguggccgaggaggaggggcucguggagcgccgggaggaggcccagcgcgcccagcaggcgguccccggccccgggcccaugacgccggaguccgcccccgaggagcugcuggccguccagguggagcucgagcccgugaacgcccaggcccggaaggcguucagccgccagcgggagaagauggagcgccggcgcaagccccaccuggaccggcgcggcgccgugauccaguccgugccgggguucugggccaacgucaucgccaaccacccccagaugagcgcccugaucaccgacgaggacgaggacaugcucuccuacauggugagccuggaggugggcgaggagaagcaccccguccaccugugcaagaucaugcuguucuuccgguccaaccccuacuuccagaacaaggugaucaccaaggaguaccucgugaacaucaccgaguaccgcgcgagccacuccacgccgaucgagugguaccccgacuacgaggucgaggccuaccggcgccggcaccacaacagcucccugaacuucuucaacugguucagcgaccacaacuucgccggcuccaacaagaucgccgagauccucugcaaggaccuguggcgcaacccccugcaguacuacaagcgcaugaagcccccggaggaggggaccgagaccagcggcgacucccagcuccugagcuga

SEQ ID NO: 1494 - RNA, 369 nt, Artificial Sequence
  M13231.1_variant
augcgcugggcccugcucgugcugcuggccuuccucagccccgcgucccagaaguccagcaaccuggagggccggaccaagagcgucacccgccagacgggguccagcgccgagaucacgugcgaccugaccgugaccaacaccuucuacauccacugguaccuccaccaggagggcaaggccccgcagcggcugcuguacuacgacguguccaccgcccgcgacguccucgagagcgggcugucccccggcaaguacuacacccacacgccccggcgcuggagcuggauccugcggcuccagaaccugaucgagaacgacuccgggguguacuacugcgccaccugggaccgccagaagcugcucuga

SEQ ID NO: 1495 - RNA, 804 nt, Artificial Sequence
  CCDS12619.1_variant
augggcgcccgccagauccagaccagcuccagccagaccucccccgaggaggccauggggacgccgcggauccagcaccuccugauccugcuggugcucggcgcgagccugcugaccuccgggcucgagcuguacugccagaagggccugagcaugaccgucgaggccgaccccgccaacauguucaacuggaccacggaggagguggagaccugcgacaagggggcccucugccaggagaccauccugaucaucaaggccggcaccgagacggcgauccuggccaccaagggcugcauccccgagggggaggaggccaucaccaucgugcagcacuccagcccgcccggccucaucgucaccuccuacagcaacuacugcgaggacuccuucugcaacgacaaggacagccugucccaguucugggaguucagcgagacgaccgccuccaccgugagcaccacgcugcacugcccgaccugcguggcgcucgggaccugcuucuccgcccccagccugcccugccccaacggcaccacgcgcugcuaccaggggaagcuggagaucaccggcggcgggaucgaguccagcgucgaggugaagggcugcaccgccaugaucgggugccggcucaugagcggcauccuggccgugggccccauguucguccgcgaggccugcccccaccagcugcucacccagccccggaagacggagaacggggcgaccugccugccgauccccguguggggccugcagcuccugcugccccuccugcugcccuccuucauccacuucagcuga

SEQ ID NO: 1496 - RNA, 1590 nt, Artificial Sequence
  AHZ44440_variant
augcugcucgccgugcuguacugccugcucuggagcuuccagaccuccgccggccacuucccccgcgcgugcgucagcuccaagaaccugauggagaaggagugcugcccgcccuggagcggggaccggucccccugcggccagcugagcgggcgcggcuccugccagaacauccuccugagcaacgcgccccuggggccgcaguuccccuucaccggcguggacgaccgggaguccuggcccagcguguucuacaaccgcacgugccagugcuccggcaacuucaugggguucaacugcggcaacugcaaguucggguucuggggccccaacugcaccgagcggcgccuccugguccggcgcaacaucuucgaccugagcgccccggagaaggacaaguucuucgccuaccucacccuggccaagcacaccaucuccagcgacuacgugauccccaucgggacguacggccagaugaagaacggcuccacccccauguucaacgacaucaacaucuacgaccuguucguguggaugcacuacuacgucagcauggacgcccuccucgggggcuccgagaucuggcgggacaucgacuucgcccacgaggcccccgccuuccugccguggcaccgccuguuccugcugcggugggagcaggagauccagaagcucaccggggacgagaacuucaccauccccuacugggacuggcgcgacgcggagaagugcgacaucugcacggacgaguacaugggcggccagcaccccaccaaccccaaccugcugagcccggccuccuucuucagcagcuggcagaucgugugcucccggcucgaggaguacaacagccaccagucccugugcaacgggacccccgagggcccccugcgccggaaccccgggaaccacgacaagagccgcaccccgcggcuccccuccagcgccgacguggaguucugccugucccugacgcaguacgagagcggcuccauggacaaggccgccaacuucagcuuccgcaacacccucgagggguucgcgagcccccugaccggcaucgccgacgccucccaguccagcaugcacaacgcccugcacaucuacaugaacggcaccaugucccagguccaggggagcgccaacgaccccaucuuccuccugcaccacgcguucguggacuccaucuucgagcaguggcugcggcgccaccggccgcuccaggagguguaccccgaggccaacgcccccauccgccacaaccgcgagagcuacaugguccccuucaucccgcuguaccggaacggcgacuucuucaucuccagcaaggaccugggguacgacuacagcuaccuccaggacuccgaccccgacagcuuccaggacuacaucaaguccuaccuggagcaggccagccgcaucugguccuggcugcucggcgccgcgauggugggggccgugcugacggcccugcucgccggccuggucagccugcucugccggcacaagcgcaagcagcugcccgaggagaagcagccgcugcugauggagaaggaggacuaccacucccucuaccagagccaccuguga

SEQ ID NO: 1497 - RNA, 1590 nt, Artificial Sequence
  AGV39051_variant
augcugcucgccgugcuguacugccugcucuggagcuuccagaccuccgccggccacuucccccgcgcgugcgucagcuccaagaaccugauggagaaggagugcugcccgcccuggagcggggaccggucccccugcggccagcugagcgggcgcggcuccugccagaacauccuccugagcaacgcgccccuggggccgcaguuccccuucaccggcguggacgaccgggaguccuggcccagcguguucuacaaccgcacgugccagugcuccggcaacuucaugggguucaacugcggcaacugcaaguucggguucuggggccccaacugcaccgagcggcgccuccugguccggcgcaacaucuucgaccugagcgccccggagaaggacaaguucuucgccuaccucacccuggccaagcacaccaucuccagcgacuacgugauccccaucgggacguacggccagaugaagaacggcuccacccccauguucaacgacaucaacaucuacgaccuguucguguggaugcacuacuacgucagcauggacgcccuccucgggggcuccgagaucuggcgggacaucgacuucgcccacgaggcccccgccuuccugccguggcaccgccuguuccugcugcggugggagcaggagauccagaagcucaccggggacgagaacuucaccauccccuacugggacuggcgcgacgcggagaagugcgacaucugcacggacgaguacaugggcggccagcaccccaccaaccccaaccugcugagcccggccuccuucuucagcagcuggcagaucgugugcucccggcucgaggaguacaacagccaccagucccugugcaacgggacccccgagggcccccugcgccggaaccccgggaaccacgacaagagccgcaccccgcggcuccccuccagcgccgacguggaguucugccugucccugacgcaguacgagagcggcuccauggacaaggccgccaacuucagcuuccgcaacacccucgagggguucgcgagcccccugaccggcaucgccgacgccucccaguccagcaugcacaacgcccugcacaucuacaugaacggcaccaugucccagguccaggggagcgccaacgaccccaucuuccuccugcaccacgcguucguggacuccaucuucgagcaguggcugcggcgccaccggccgcuccaggagguguaccccgaggccaacgcccccaucggccacaaccgcgagagcuacaugguccccuucaucccgcuguaccgcaacggggacuucuucaucuccagcaaggaccugggcuacgacuacagcuaccuccaggacuccgaccccgacagcuuccaggacuacaucaaguccuaccuggagcaggccagccggaucugguccuggcugcucggggccgcgauggugggcgccgugcugacggcccugcucgccggccuggucagccugcucugccgccacaagcggaagcagcugcccgaggagaagcagccgcugcugauggagaaggaggacuaccacucccucuaccagagccaccuguga

SEQ ID NO: 1498 - RNA, 1590 nt, Artificial Sequence
  AGV39049_variant
augcugcucgccgugcuguacugccugcucuggagcuuccagaccuccgccggccacuucccccgcgcgugcgucagcuccaagaaccugauggagaaggagugcugcccgcccuggagcggggaccggucccccugcggccagcugagcgggcgcggcuccugccagaacauccuccugagcaacgcgccccuggggccgcaguuccccuucaccggcguggacgaccgggaguccuggcccagcguguucuacaaccgcacgugccagugcuccggcaacuucaugggguucaacugcggcaacugcaaguucggguucuggggccccaacugcaccgagcggcgccuccugguccggcgcaacaucuucgaccugagcgccccggagaaggacaaguucuucgccuaccucacccuggccaagcacaccaucuccagcgacuacgugauccccaucgggacguacggccagaugaagaacggcuccacccccauguucaacgacaucaacaucuacgaccuguucguguggaugcacuacuacgucagcauggacgcccuccucgggggcuccgagaucuggcgggacaucgacuucgcccacgaggcccccgccuuccugccguggcaccgccuguuccugcugcggugggagcaggagauccagaagcucaccggggacgagaacuucaccauccccuacugggacuggcgcgacgcggagaagugcgacaucugcacggacgaguacaugggcggccagcaccccaccaaccccaaccugcugagcccggccuccuucuucagcagcuggcagaucgugugcucccggcucgaggaguacaacagccaccagucccugugcaacgggacccccgagggcccccugcgccggaaccccgggaaccacgacaagagccgcaccccgcggcuccccuccagcgccgacguggaguucugccugucccugacgcaguacgagagcggcuccauggacaaggccgccaacuucagcuuccgcaacacccucgagggguucgcgagcccccugaccggcaucgccgacgccucccaguccagcaugcacaacgcccugcacaucuacaugaacggcaccaugucccagguccaggggagcgccaacgaccccaucuuccuccugcaccacgcguucguggacuccaucuucgagcaguggcugcagcggcaccgcccgcuccaggagguguaccccgaggccaacgcccccaucggccacaaccgggagagcuacaugguccccuucaucccgcuguaccgcaacggggacuucuucaucuccagcaaggaccugggcuacgacuacagcuaccuccaggacuccgaccccgacagcuuccaggacuacaucaaguccuaccuggagcaggccagccgcaucugguccuggcugcucggggccgcgauggugggcgccgugcugacggcccugcucgccggccuggucagccugcucugccggcacaagcgcaagcagcugcccgaggagaagcagccgcugcugauggagaaggaggacuaccacucccucuaccagagccaccuguga

SEQ ID NO: 1499 - RNA, 1590 nt, Artificial Sequence
  AGV39050_variant
augcugcucgccgugcuguacugccugcucuggagcuuccagaccuccgccggccacuucccccgcgcgugcgucagcuccaagaaccugauggagaaggagugcugcccgcccuggagcggggaccggucccccugcggccagcugagcgggcgcggcuccugccagaacauccuccugagcaacgcgccccuggggccgcaguuccccuucaccggcguggacgaccgggaguccuggcccagcguguucuacaaccgcacgugccagugcuccggcaacuucaugggguucaacugcggcaacugcaaguucggguucuggggccccaacugcaccgagcggcgccuccugguccggcgcaacaucuucgaccugagcgccccggagaaggacaaguucuucgccuaccucacccuggccaagcacaccaucuccagcgacuacgugauccccaucgggacguacggccagaugaagaacggcuccacccccauguucaacgacaucaacaucuacgaccuguucguguggaugcacuacuacgucagcauggacgcccuccucgggggcuacgagaucuggcgggacaucgacuucgcccacgaggcccccgccuuccugccguggcaccgccuguuccugcugcggugggagcaggagauccagaagcucaccggggacgagaacuucaccauccccuacugggacuggcgcgacgcggagaagugcgacaucugcacggacgaguacaugggcggccagcaccccaccaaccccaaccugcuguccccggccagcuucuucuccagcuggcagaucgugugcagccggcucgaggaguacaacucccaccagagccugugcaacgggacccccgagggcccccugcgccggaaccccgggaaccacgacaagucccgcaccccgcggcuccccagcuccgccgacguggaguucugccugagccugacgcaguacgaguccggcagcauggacaaggccgccaacuucuccuuccgcaacacccucgagggguucgcgagcccccugaccggcaucgccgacgccucccagagcuccaugcacaacgcccugcacaucuacaugaacggcaccaugagccagguccagggguccgccaacgaccccaucuuccuccugcaccacgcguucguggacagcaucuucgagcaguggcugcggcgccaccggccgcuccaggagguguaccccgaggccaacgcccccaucggccacaaccgcgaguccuacaugguccccuucaucccgcuguaccgcaacggggacuucuucaucagcuccaaggaccugggcuacgacuacagcuaccuccaggacagcgaccccgacuccuuccaggacuacaucaagagcuaccuggagcaggccucccggaucuggagcuggcugcucggggccgcgauggugggcgccgugcugacggcccugcucgccggccuggucucccugcucugccgccacaagcggaagcagcugcccgaggagaagcagccgcugcugauggagaaggaggacuaccacagccucuaccagucccaccuguga

SEQ ID NO: 1500 - RNA, 714 nt, Artificial Sequence
  CAA04137_variant
augagcccccugugguggggcuuccuccuguccugccuggggugcaagauccucccgggcgcccaggggcaguucccccgcgugugcaugaccgucgacagccuggugaacaaggagugcugcccccggcugggcgccgaguccgcgaacgugugcgggagccagcagggccgcggccagugcaccgagguccgggccgacacgcgccccugguccgggccguacauccuccggaaccaggacgaccgcgagcuguggccccggaaguucuuccaccggaccugcaagugcaccggcaacuucgccggguacaacugcggcgacugcaaguucggguggaccggccccaacugcgagcgcaagaagcccccggugauccgccagaacauccacagccugagcccccaggagcgggagcaguuccucggcgcccuggaccuggccaagaagcgcgugcaccccgacuacgucaucacgacccagcacuggguggggcuccugggccccaacgggacccagccgcaguucgcgaacugcuccguguacgacuucuucgucuggcugcacuacuacuccgugcgggacacccuccugggcggcuucuuccccuggcugaagguguacuacuaccgcuucgucaucgggcuccggguguggcagugggaggugaucagcugcaagcugaucaagcgcgccacgacccggcagcccuga

SEQ ID NO: 1501 - RNA, 1590 nt, Artificial Sequence; identical to SEQ ID NO: 1497
  AAA61242_variant

SEQ ID NO: 1502 - RNA, 1590 nt, Artificial Sequence
  AGV39054_variant
augcugcucgccgugcuguacugccugcucuggagcuuccagaccuccgccggccacuucccccgcgcgugcgucagcuccaagaaccugauggagaaggagugcugcccgcccuggagcggggaccggucccccugcggccagcugagcgggcgcggcuccugccagaacauccuccugagcaacgcgccccuggggccgcaguuccccuucaccggcguggacgaccgggaguccuggcccagcguguucuacaaccgcacgugccagugcuccggcaacuucaugggguucaacugcggcaacugcaaguucggguucuggggccccaacugcaccgagcggcgccuccugguccggcgcaacaucuucgaccugagcgccccggagaaggacaaguucuucgccuaccucacccuggccaagcacaccaucuccagcgacuacgugauccccaucgggacguacggccagaugaagaacggcuccacccccauguucaacgacaucaacaucuacgaccuguucguguggaugcacuacuacgucagcauggacgcccuccucgggggcuccgagaucuggcgggacaucgacuucgcccacgaggcccccgccuuccugccguggcaccgccuguuccugcugcggugggagcaggagauccagaagcucaccggggacgagaacuucaccauccccuacugggacuggcgcgacgcggagaagugcgacaucugcacggacgaguacgugggcggccagcaccccaccaaccccaaccugcugagcccggccuccuucuucagcagcuggcagaucgugugcucccggcucgaggaguacaacagccaccagucccugugcaacgggacccccgagggcccccugcgccggaaccccgggaaccacgacaagagccgcaccccgcggcuccccuccagcgccgacgucgaguucugccugucccugacgcaguacgagagcggcuccauggacaaggccgccaacuucagcuuccgcaacacccucgagggguucgcgagcccccugaccggcaucgccgacgccucccaguccagcaugcacaacgcccugcacaucuacaugaacggcaccaugucccaggugcaggggagcgccaacgaccccaucuuccuccugcaccacgcguucguggacuccaucuucgagcaguggcugcggcgccaccggccgcuccaggaggucuaccccgaggccaacgcccccaucggccacaaccgcgagagcuacauggugcccuucaucccgcuguaccgcaacggggacuucuucaucuccagcaaggaccugggcuacgacuacagcuaccuccaggacuccgaccccgacagcuuccaggacuacaucaaguccuaccuggagcaggccagccggaucugguccuggcugcucggggccgcgauggugggcgccguccugacggcccugcucgccggccuggugagccugcucugccgccacaagcggaagcagcugcccgaggagaagcagccgcugcugauggagaaggaggacuaccacucccucuaccagagccaccuguga

SEQ ID NO: 1503 - RNA, 1590 nt, Artificial Sequence
  AGV39162_variant
augcugcucgccgugcuguacugccugcucuggagcuuccagaccuccgccggccacuucccccgcgcgugcgucagcuccaagaaccugauggagaaggagugcugcccgcccuggagcggggaccggucccccugcggccagcugagcgggcgcggcuccugccagaacauccuccugagcaacgcgccccuggggccgcaguuccccuucaccggcguggacgaccgggaguccuggcccagcguguucuacaaccgcacgugccagugcuccggcaacuucaugggguucaacugcggcaacugcaaguucggguucuggggccccaacugcaccgagcggcgccuccugguccggcgcaacaucuucgaccugagcgccccggagaaggacaaguucuucgccuaccucacccuggccaagcacaccaucuccagcgacuacgugauccccaucgggacguacggccagaugaagaacggcuccacccccauguucaacgacaucaacaucuacgaccuguucguguggaugcacuacuacgucagcauggacgcccuccucgggggcuccgagaucuggcgggacaucgacuucgcccacgaggcccccgccuuccugccguggcaccgccuguuccugcugcggugggagcaggagauccagaagcucaccggggacgagaacuucaccauccccuacugggacuggcgcgacgcggagaagugcgacaucugcacggacgaguacaugggcggccagcaccccaccaaccccaaccugcugagcccggccuccuucuucagcagcuggcagaucgugugcucccggcucgaggaguacaacagccaccagucccugugcaacgggacccccgagggcccccugcgccggaaccccgggaaccacgacaagagccgcaccccgcggcuccccuccagcgccgacguggaguucugccugucccugacgcaguacgagagcggcuccauggacaaggccgccaacuucagcuuccgcaacacccucgagggguucgcgagcccccugaccggcaucgccgacgccucccaguccagcaugcacaacgcccugcacaucuacaugaacggcaccaugucccagguccaggggagcgccaacgaccccaucuuccuccugcaccacgcguucguggacuccaucuucgagcaguggcugcggcgccaccggcuccugcaggagguguacccggaggccaacgcccccaucggccacaaccgcgagagcuacaugguccccuucaucccccuguaccgcaacggggacuucuucaucuccagcaaggaccucggcuacgacuacagcuaccugcaggacuccgacccggacagcuuccaggacuacaucaaguccuaccuggagcaggccagccggaucugguccuggcuccugggggccgcgauggugggcgccgugcugacggcccuccuggccggccuggucagccuccugugccgccacaagcggaagcagcugcccgaggagaagcagccccugcucauggagaaggaggacuaccacucccuguaccagagccaccuguga

SEQ ID NO: 1504 - RNA, 1590 nt, Artificial Sequence
  AGV39086_variant
augcugcucgccgugcuguacugccugcucuggagcuuccagaccuccgccggccacuucccccgcgcgugcgucagcuccaagaaccugauggagaaggagugcugcccgcccuggagcggggaccggucccccugcggccagcugagcgggcgcggcuccugccagaacauccuccugagcaacgcgccccuggggccgcaguuccccuucaccggcguggacgaccgggaguccuggcccagcguguucuacaaccgcacgugccagugcuccggcaacuucaugggguucaacugcggcaacugcaaguucggguucuggggccccaacugcaccgagcggcgccuccugguccggcgcaacaucuucgaccugagcgccccggagaaggacaaguucuucgccuaccucacccuggccaagcacaccaucuccagcgacuacgugauccccaucgggacguacggccagaugaagaacggcuccacccccauguucaacgacaucaacaucuacgaccuguucguguggaugcacuacuacgucagcauggacgcccuccucgggggcuccgagaucuggcgggacaucgacuucgcccacgaggcccccgccuuccugccguggcaccgccuguuccugcugcggugggagcaggagauccagaagcucaccggggacgagaacuucaccauccccuacugggacuggcgcgacgcggagaagugcgacaucugcacggacgaguacaugggcggccagcaccccaccaaccccaaccugcugagcccggccuccuucuucagcagcuggcagaucgugugcucccggcucgaggaguacaacagccaccagucccugugcaacgggacccccgagggcccccugcgccggaaccccgggaaccacgacaagagccgcaccccgcggcuccccuccagcgccgacguggaguucugccugucccugacgcaguacgagagcggcuccauggacaaggccgccaacuucagcuuccgcaacacccucgagggguucgcgagcccccugaccggcaucgccgacgccucccaguccagcaugcacaacgcccugcacaucuacaugaacggcaccaugucccagguccaggggagcgccaacgaccccaucuuccuccugcaccacgcguucguggacuccauguucgagcaguggcugcggcgccaccggccgcuccaggagguguaccccgaggccaacgcccccaucggccacaaccgcgagagcuacaugguccccuucaucccgcuguaccgcaacggggacuucuucaucuccagcaaggaccugggcuacgacuacagcuaccuccaggacuccgaccccgacagcuuccaggacuacaucaaguccuaccuggagcaggccagccggaucugguccuggcugcucggggccgcgauggugggcgccgugcugacggcccugcucgccggccuggucagccugcucugccgccacaagcggaagcagcugcccgaggagaagcagccgcugcugauggagaaggaggacuaccacucccucuaccagagccaccuguga

SEQ ID NO: 1505 - RNA, 1614 nt, Artificial Sequence
  AAC15468_variant
augagcgcccccaagcugcucucccugggcugcaucuucuucccgcugcuccuguuccagcaggcccgcgcgcaguucccccggcagugcgccaccguggaggcccugcgcagcgggaugugcugccccgaccucucccccgucagcggcccggggaccgaccggugcggcuccagcuccgggcgcggccggugcgaggccgugacggccgacagccgcccccacagcccccaguacccccacgacggccgggacgaccgcgagguguggccgcugcgguucuucaaccggaccugccacugcaacgggaacuucuccggccacaacugcgggaccugccgccccggcuggcgcggggcggccugcgaccagcggguccugaucgugcgccggaaccuccuggaccuguccaaggaggagaagaaccacuucgugcgcgcccucgacauggccaagcggaccacgcacccccuguucgucaucgcgacccgccggagcgaggagauccugggccccgacggcaacaccccgcaguucgagaacaucuccaucuacaacuacuucguguggacccacuacuacagcgugaagaagacguuccucggggucggccaggaguccuucggggagguggacuucagccacgagggccccgccuuccugaccuggcaccgcuaccaccuccugcggcuggagaaggacaugcaggagaugcugcaggagcccuccuucagccuccccuacuggaacuucgccaccggcaagaacgugugcgacaucugcaccgacgaccugauggggucccgcagcaacuucgacagcacgcugaucuccccgaacagcgucuucucccaguggcgcguggugugcgacagccucgaggacuacgacacccugggcacccugugcaacuccaccgaggacgggcccauccggcgcaaccccgccggcaacgucgcccggcccauggugcagcgccucccggagccccaggacguggcgcagugccuggaggucgggcuguucgacacgccgcccuucuacagcaacuccaccaacagcuuccggaacaccguggagggcuacuccgaccccaccggcaaguacgaccccgccgugcgcagccuccacaaccuggcccaccuguuccucaacgggacgggcgggcagacccaccugucccccaacgaccccaucuucguccugcuccacaccuucaccgacgccguguucgacgaguggcugcggcgcuacaacgccgacaucagcacguucccgcuggagaacgcgcccaucggccacaaccggcaguacaacauggugcccuucuggccgcccgucaccaacaccgagauguucgugaccgcccccgacaaccucggguacacguacgagauccaguggcccucccgcgaguucagcgucccggagaucaucgccaucgccguggugggcgcccugcugcucgucgcgcugaucuucggcaccgccuccuaccugauccgggcccgccggagcauggacgaggccaaccagccccuccugaccgaccaguaccagugcuacgccgaggaguacgagaagcugcagaaccccaaccaguccgugguguga

SEQ ID NO: 1506 - RNA, 1560 nt, Artificial Sequence
  AAA20870_variant
augagcccccugugguggggcuuccuccuguccugccuggggugcaagauccucccgggcgcccaggggcaguucccccgcgugugcaugaccgucgacagccuggugaacaaggagugcugcccccggcugggcgccgaguccgcgaacgugugcgggagccagcagggccgcggccagugcaccgagguccgggccgacacgcgccccugguccgggccguacauccuccggaaccaggacgaccgcgagcuguggccccggaaguucuuccaccggaccugcaagugcaccggcaacuucgccggguacaacugcggcgacugcaaguucggguggaccggccccaacugcgagcgcaagaagcccccggugauccgccagaacauccacagccugagcccccaggagcgggagcaguuccucggcgcccuggaccuggccaagaagcgcgugcaccccgacuacgucaucacgacccagcacuggcucgggcugcugggccccaacgggacccagccgcaguucgcgaacugcuccguguacgacuucuucguguggcuccacuacuacuccguccgggacacccugcugggccccggccgccccuaccgggccaucgacuucagccaccaggggcccgccuucgugacguggcaccgcuaccaccuccugugccuggagcgggaccuccagcgccugaucggcaacgaguccuucgcccugccguacuggaacuucgcgaccgggcggaacgagugcgacgugugcaccgaccagcuguucggcgccgcccgccccgacgaccccacccucaucagccggaacucccgcuucagcuccugggagacggucugcgacagccuggacgacuacaaccaccucgugacccugugcaacgggaccuacgagggccugcuccgccggaaccagaugggccgcaacuccaugaagcugcccacccugaaggacauccgggacugccucagccugcagaaguucgacaacccgcccuucuuccagaacuccacguucagcuuccgcaacgcccuggagggguucgacaaggccgacggcacccucgacagccaggugaugucccugcacaaccugguccacagcuuccucaacgggaccaacgcgcugccccacuccgccgccaacgaccccaucuucguggugcugcacagcuucaccgacgccaucuucgacgaguggaugaagcgguucaacccgcccgccgacgcguggccccaggagcucgcccccaucggccacaaccgcauguacaacauggucccguucuucccgcccgugacgaacgaggagcuguuccugaccuccgaccagcucggguacagcuacgccaucgaccugcccguguccgucgaggagacccccggcuggcccaccacgcugcucguggugaugggcacccuggucgcccugguggggcuguucguccuccuggccuuccugcaguaccggcgccuccggaagggcuacacgccccugauggagacccaccugagcuccaagcgcuacaccgaggaggcguga

SEQ ID NO: 1507 - RNA, 456 nt, Artificial Sequence
  CCDS7679.1_variant
augcgccggcugcuccuggugaccagccuggucguggugcuccugugggaggccggcgccguccccgcgcccaaggugcccaucaagaugcaggucaagcacuggcccuccgagcaggaccccgagaaggccuggggcgcccgcgugguggagccgcccgagaaggacgaccagcuggugguccucuuccccgugcagaagcccaagcugcugaccacggaggagaagccgcgggggcaggggcgcggccccauccuccccgggaccaaggccuggauggagaccgaggacacccugggccacgugcugagccccgagccggaccacgacucccucuaccacccgccgcccgaggaggaccagggcgaggagcggccccgccugugggucaugcccaaccaccaggugcugcucgggcccgaggaggaccaggaccacaucuaccacccccaguga

SEQ ID NO: 1508 - RNA, 525 nt, Artificial Sequence
  ACF47598_variant
auggugagcuacugggacaccggcguccugcucugcgcccugcuguccugccuccugcugaccgggagcuccagcggcuccaagcucaaggaccccgagcugagccugaaggggacgcagcacaucaugcaggccggccagacccuccaccuccagugccgcggggaggcggcccacaaguggucccugccggagauggugagcaaggaguccgagcggcugagcaucaccaaguccgccugcggccgcaacggcaagcaguucugcagcacccugacgcugaacaccgcccaggccaaccacaccggguucuacuccugcaaguaccucgcggugcccaccagcaagaagaaggagacggaguccgccaucuacaucuucaucagcgacaccggccggcccuucgucgagauguacuccgagauccccgagaucauccacaugaccgaggggcgcgagcuggugaucccgugccgggugaccagccccaacaucacggucacccugaagaagaagaaggccuga

SEQ ID NO: 1509 - RNA, 750 nt, Artificial Sequence
  BAR92607_variant
augggcagcgacgugcgcgaccugaacgcccuccugcccgccguccccucccucgggggcgggggcgggugcgcgcugcccgugagcggcgccgcccagugggcccccgugcuggacuucgcgccgcccggcgccuccgccuacgggagccugggcgggcccgcgcccccgcccgcgcccccgcccccgcccccgcccccgccccacuccuucaucaagcaggagcccagcuggggcggggccgagccccacgaggagcagugccucuccgccuucaccguccacuucagcggccaguucaccggcacggccggggccugccgguacggccccuucgggccgccgccgcccucccaggccagcuccggccaggcccgcauguuccccaacgcccccuaccugcccagcugccuggagucccagcccgccauccggaaccagggcuacagcaccgugaccuucgacgggacccccuccuacggccacacgcccagccaccacgccgcccaguuccccaaccacuccuucaagcacgaggaccccauggggcagcagggcagccucggggagcagcaguacuccgugcccccgcccgucuacggcugccacacccccaccgacagcugcaccggcagccaggcgcugcugcuccgcacgcccuacuccagcgacaaccuguaccagaugaccucccagcuggagugcaugaccuggaaccagaugaaccucggggccacccugaagggcuga

SEQ ID NO: 1510 - RNA, 1350 nt, Artificial Sequence
  AAA61299_variant
augggcagcgacgugcgcgaccugaacgcccuccugcccgccgucccgucccucgggggcgggggcgggugcgcgcugcccgugagcggcgccgcccagugggcccccgugcuggacuucgcgccgcccggcgccuccgccuacgggagccugggcgggcccgcgcccccgcccgcgcccccgcccccgcccccgcccccgccccacuccuucaucaagcaggagcccagcuggggcggggccgagccccacgaggagcagugccucuccgccuucaccguccacuucagcggccaguucaccggcacggccggggccugccgguacggccccuucgggcccccgccgcccucccaggccagcuccggccaggcccgcauguuccccaacgcccccuaccugcccagcugccuggagucccagcccgccauccggaaccagggcuacagcaccgugaccuucgacgggacccccuccuacggccacacgcccagccaccacgccgcccaguuccccaaccacuccuucaagcacgaggaccccauggggcagcagggcagccucggggagcagcaguacuccgugccgccgcccgucuacggcugccacacccccaccgacagcugcaccggcagccaggcgcugcugcuccgcacgcccuacuccagcgacaaccuguaccagaugaccucccagcuggagugcaugaccuggaaccagaugaaccucggggccacccugaagggcguggccgccgggagcuccagcuccgugaaguggacggagggccagagcaaccacuccaccggguacgagagcgacaaccacaccacccccauccugugcggcgcccaguaccggauccacacgcacggcgucuuccgcgggauccaggacgugcggcgcgugcccggcgucgcgcccacccucgugcgguccgccagcgagaccuccgagaagcgccccuucaugugcgccuaccccgggugcaacaagcgguacuucaagcugagccaccuccagaugcacucccgcaagcacaccggcgagaagccguaccagugcgacuucaaggacugcgagcggcgcuucagccgguccgaccagcugaagcgccaccagcggcgccacacgggggugaagcccuuccagugcaagaccugccagcggaaguucagccgcuccgaccaccugaagacccacacccggacgcacaccggcaagaccagcgagaagcccuucagcugccgcuggcccuccugccagaagaaguucgcccgcagcgacgagcugguccggcaccacaacaugcaccagcgcaacaugaccaagcuccagcuggcccuguga

SEQ ID NO: 1511 - RNA, 279 nt, Artificial Sequence
  AAA63269_variant
augcagcgccggggccagccccuggagaaccacguggcccucauccacuggcagagcgccgggaucccggcguccaagguccacaacuacugcaacaugaagaagucccgccugggccggucccgcgccgugcggaucagccagccccugcucagcccccgccggugcccccugcaccugaccgagcgcggggccggccuccugcagccgcagccccaggggcccgugcggacccccggcccgcccagcggcucccaccccgccgccgcggacaacuga

SEQ ID NO: 1512 - RNA, 246 nt, Artificial Sequence
  AAP35763_variant
auggagagccccaagaagaagaaccagcagcugaaggugggcauccuccaccuggggucccgccagaagaagauccggauccagcugcgcagccagugcgccaccuggaaggucaucugcaaguccugcaucagccagaccccgggcaucaaccucgaccugggguccggcgugaaggugaagaucauccccaaggaggagcacugcaagaugcccgaggccggggaggagcagccccaggucuga

SEQ ID NO: 1513 - RNA, 1098 nt, Artificial Sequence
  AAA59652 variant
auggccgucauggccccccgcacccuccuccuccuccucuccggcgcccucgcccucacccagaccugggccggcucccacuccaugcgcuacuucuucaccuccgucucccgccccggccgcggcgagccccgcuucaucgccgucggcuacgucgacgacacccaguucguccgcuucgacuccgacgccgccucccagaagauggagccccgcgcccccuggaucgagcaggagggccccgaguacugggaccaggagacccgcaacaugaaggcccacucccagaccgaccgcgccaaccucggcacccuccgcggcuacuacaaccaguccgaggacggcucccacaccauccagaucauguacggcugcgacgucggccccgacggccgcuuccuccgcggcuaccgccaggacgccuacgacggcaaggacuacaucgcccucaacgaggaccuccgcuccuggaccgccgccgacauggccgcccagaucaccaagcgcaagugggaggccguccacgccgccgagcagcgccgcgucuaccucgagggccgcugcgucgacggccuccgccgcuaccucgagaacggcaaggagacccuccagcgcaccgacccccccaagacccacaugacccaccaccccaucuccgaccacgaggccacccuccgcugcugggcccucggcuucuaccccgccgagaucacccucaccuggcagcgcgacggcgaggaccagacccaggacaccgagcucgucgagacccgccccgccggcgacggcaccuuccagaagugggccgccgucgucguccccuccggcgaggagcagcgcuacaccugccacguccagcacgagggccuccccaagccccucacccuccgcugggagcucuccucccagcccaccauccccaucgucggcaucaucgccggccucguccuccucggcgccgucaucaccggcgccgucgucgccgccgucauguggcgccgcaaguccuccgaccgcaagggcggcuccuacacccaggccgccuccuccgacuccgcccagggcuccgacgucucccucaccgccugcaaggucuga

SEQ ID NO: 1514 - RNA, 1098 nt, Artificial Sequence
  AAA59606 variant
auggccgucauggccccccgcacccucguccuccuccucuccggcgcccucgcccucacccagaccugggccggcucccacuccaugcgcuacuucuucaccuccgucucccgccccggccgcggcgagccccgcuucaucgccgucggcuacgucgacgacacccaguucguccgcuucgacuccgacgccgccucccagcgcauggagccccgcgcccccuggaucgagcaggagggccccgaguacugggacggcgagacccgcaaggucaaggcccacucccagacccaccgcgucgaccucggcacccuccgcggcuacuacaaccaguccgaggccggcucccacaccguccagcgcauguacggcugcgacgucggcuccgacuggcgcuuccuccgcggcuaccaccaguacgccuacgacggcaaggacuacaucgcccucaaggaggaccuccgcuccuggaccgccgccgacauggccgcccagaccaccaagcacaagugggaggccgcccacgucgccgagcagcuccgcgccuaccucgagggcaccugcgucgaguggcuccgccgcuaccucgagaacggcaaggagacccuccagcgcaccgacgcccccaagacccacaugacccaccacgccgucuccgaccacgaggccacccuccgcugcugggcccucuccuucuaccccgccgagaucacccucaccuggcagcgcgacggcgaggaccagacccaggacaccgagcucgucgagacccgccccgccggcgacggcaccuuccagaagugggccgccgucgucguccccuccggccaggagcagcgcuacaccugccacguccagcacgagggccuccccaagccccucacccuccgcugggagcccuccucccagcccaccauccccaucgucggcaucaucgccggccucguccucuucggcgccgucaucaccggcgccgucgucgccgccgucauguggcgccgcaaguccuccgaccgcaagggcggcuccuacucccaggccgccuccuccgacuccgcccagggcuccgacgucucccucaccgccugcaaggucuga

SEQ ID NO: 1515 - RNA, 1263 nt, Artificial Sequence
  AAH37161 variant
augcccggcggcugcucccgcggccccgccgccggcgacggccgccuccgccucgcccgccucgcccucguccuccucggcugggucuccuccuccucccccaccuccuccgccuccuccuucuccuccuccgcccccuuccucgccuccgccgucuccgcccagcccccccuccccgaccagugccccgcccucugcgagugcuccgaggccgcccgcaccgucaagugcgucaaccgcaaccucaccgagguccccaccgaccuccccgccuacguccgcaaccucuuccucaccggcaaccagcucgccguccuccccgccggcgccuucgcccgccgccccccccucgccgagcucgccgcccucaaccucuccggcucccgccucgacgagguccgcgccggcgccuucgagcaccuccccucccuccgccagcucgaccucucccacaacccccucgccgaccucucccccuucgccuucuccggcuccaacgccuccgucuccgcccccuccccccucgucgagcucauccucaaccacaucgucccccccgaggacgagcgccagaaccgcuccuucgagggcauggucgucgccgcccuccucgccggccgcgcccuccagggccuccgccgccucgagcucgccuccaaccacuuccucuaccucccccgcgacguccucgcccagcuccccucccuccgccaccucgaccucuccaacaacucccucgucucccucaccuacgucuccuuccgcaaccucacccaccucgagucccuccaccucgaggacaacgcccucaagguccuccacaacggcacccucgccgagcuccagggccucccccacauccgcgucuuccucgacaacaaccccugggucugcgacugccacauggccgacauggucaccuggcucaaggagaccgaggucguccagggcaaggaccgccucaccugcgccuaccccgagaagaugcgcaaccgcguccuccucgagcucaacuccgccgaccucgacugcgaccccauccucccccccucccuccagaccuccuacgucuuccucggcaucguccucgcccucaucggcgccaucuuccuccucguccucuaccucaaccgcaagggcaucaagaaguggaugcacaacauccgcgacgccugccgcgaccacauggagggcuaccacuaccgcuacgagaucaacgccgacccccgccucaccaaccucuccuccaacuccgacgucuga

SEQ ID NO: 1516 - RNA, 1632 nt, Artificial Sequence
  AAH33010 variant
augcgcaagcccgccgccggcuuccuccccucccuccucaagguccuccuccucccccucgcccccgccgccgcccaggacuccacccaggccuccacccccggcuccccccucucccccaccgaguacgagcgcuucuucgcccuccucacccccaccuggaaggccgagaccaccugccgccuccgcgccacccacggcugccgcaaccccacccucguccagcucgaccaguacgagaaccacggccucguccccgacggcgccgucugcuccaaccuccccuacgccuccugguucgaguccuucugccaguucacccacuaccgcugcuccaaccacgucuacuacgccaagcgcguccucugcucccagcccgucuccauccucucccccaacacccucaaggagaucgaggccuccgccgaggucucccccaccaccaugaccucccccaucuccccccacuucaccgucaccgagcgccagaccuuccagcccuggcccgagcgccucuccaacaacgucgaggagcuccuccaguccucccucucccucggcggccaggagcaggcccccgagcacaagcaggagcagggcgucgagcaccgccaggagcccacccaggagcacaagcaggaggagggccagaagcaggaggagcaggaggaggagcaggaggaggagggcaagcaggaggagggccagggcaccaaggagggccgcgaggccgucucccagcuccagaccgacuccgagcccaaguuccacuccgagucccucuccuccaaccccuccuccuucgccccccgcguccgcgaggucgaguccacccccaugaucauggagaacauccaggagcucauccgcuccgcccaggagaucgacgagaugaacgagaucuacgacgagaacuccuacuggcgcaaccagaaccccggcucccuccuccagcucccccacaccgaggcccuccucguccucugcuacuccaucgucgagaacaccugcaucaucacccccaccgccaaggccuggaaguacauggaggaggagauccucggcuucggcaaguccgucugcgacucccucggccgccgccacauguccaccugcgcccucugcgacuucugcucccucaagcucgagcagugccacuccgaggccucccuccagcgccagcagugcgacaccucccacaagacccccuucgucuccccccuccucgccucccagucccucuccaucggcaaccaggucggcucccccgaguccggccgcuucuacggccucgaccucuacggcggccuccacauggacuucuggugcgcccgccucgccaccaagggcugcgaggacguccgcgucuccggcuggcuccagaccgaguuccucuccuuccaggacggcgacuuccccaccaagaucugcgacaccgacuacauccaguaccccaacuacugcuccuucaagucccagcagugccucaugcgcaaccgcaaccgcaaggucucccgcaugcgcugccuccagaacgagaccuacuccgcccucucccccggcaaguccgaggacgucguccuccgcuggucccaggaguucuccacccucacccucggccaguucggcuga

SEQ ID NO: 1517 - RNA, 1830 nt, Artificial Sequence
  AAB58754 variant
augaagugggucgaguccaucuuccucaucuuccuccucaacuucaccgagucccgcacccuccaccgcaacgaguacggcaucgccuccauccucgacuccuaccagugcaccgccgagaucucccucgccgaccucgccaccaucuucuucgcccaguucguccaggaggccaccuacaaggaggucuccaagauggucaaggacgcccucaccgccaucgagaagcccaccggcgacgagcaguccuccggcugccucgagaaccagcuccccgccuuccucgaggagcucugccacgagaaggagauccucgagaaguacggccacuccgacugcugcucccaguccgaggagggccgccacaacugcuuccucgcccacaagaagcccacccccgccuccaucccccucuuccagguccccgagcccgucaccuccugcgaggccuacgaggaggaccgcgagaccuucaugaacaaguucaucuacgagaucgcccgccgccaccccuuccucuacgcccccaccauccuccucugggccgcccgcuacgacaagaucauccccuccugcugcaaggccgagaacgccgucgagugcuuccagaccaaggccgccaccgucaccaaggagcuccgcgaguccucccuccucaaccagcacgccugcgccgucaugaagaacuucggcacccgcaccuuccaggccaucaccgucaccaagcucucccagaaguucaccaaggucaacuucaccgagauccagaagcucguccucgacgucgcccacguccacgagcacugcugccgcggcgacguccucgacugccuccaggacggcgagaagaucauguccuacaucugcucccagcaggacacccucuccaacaagaucaccgagugcugcaagcucaccacccucgagcgcggccagugcaucauccacgccgagaacgacgagaagcccgagggccucucccccaaccucaaccgcuuccucggcgaccgcgacuucaaccaguucuccuccggcgagaagaacaucuuccucgccuccuucguccacgaguacucccgccgccacccccagcucgccgucuccgucauccuccgcgucgccaagggcuaccaggagcuccucgagaagugcuuccagaccgagaacccccucgagugccaggacaagggcgaggaggagcuccagaaguacauccaggagucccaggcccucgccaagcgcuccugcggccucuuccagaagcucggcgaguacuaccuccagaacgccuuccucgucgccuacaccaagaaggccccccagcucaccuccuccgagcucauggccaucacccgcaagauggccgccaccgccgccaccugcugccagcucuccgaggacaagcuccucgccugcggcgagggcgccgccgacaucaucaucggccaccucugcauccgccacgagaugacccccgucaaccccggcgucggccagugcugcaccuccuccuacgccaaccgccgccccugcuucuccucccucgucgucgacgagaccuacgucccccccgccuucuccgacgacaaguucaucuuccacaaggaccucugccaggcccagggcgucgcccuccagaccaugaagcaggaguuccucaucaaccucgucaagcagaagccccagaucaccgaggagcagcucgaggccgucaucgccgacuucuccggccuccucgagaagugcugccagggccaggagcaggaggucugcuucgccgaggagggccagaagcucaucuccaagacccgcgccgcccucggcgucuga

SEQ ID NO: 1518 - RNA, 2565 nt, Artificial Sequence
  AAI26251 variant
augauggccuacuccgacaccaccaugauguccgacgacaucgacuggcuccgcucccaccgcggcgucugcaaggucgaccucuacaaccccgagggccagcaggaccaggaccgcaaggucaucugcuucgucgacgucuccacccucaacgucgaggacaaggacuacaaggacgccgccuccuccuccuccgagggcaaccucaaccucggcucccucgaggagaaggagaucaucgucaucaaggacaccgagaagaaggaccaguccaagaccgagggcuccgucugccucuucaagcaggcccccuccgaccccgucuccguccucaacuggcuccucuccgaccuccagaaguacgcccucggcuuccagcacgcccucucccccuccaccuccaccugcaagcacaaggucggcgacaccgagggcgaguaccaccgcgccuccuccgagaacugcuacuccgucuacgccgaccaggucaacaucgacuaccucaugaaccgcccccagaaccuccgccucgagaugaccgccgccaagaacaccaacaacaaccagucccccuccgccccccccgccaagccccccuccacccagcgcgccgucaucucccccgacggcgagugcuccaucgacgaccucuccuucuacgucaaccgccucuccucccucgucauccagauggcccacaaggagaucaaggagaagcucgagggcaaguccaagugccuccaccacuccaucugccccucccccggcaacaaggagcgcaucuccccccgcacccccgccuccaagaucgccuccgagauggccuacgaggccgucgagcucaccgccgccgagaugcgcggcaccggcgaggagucccgcgagggcggccagaaguccuuccucuacuccgagcucuccaacaaguccaaguccggcgacaagcagaugucccagcgcgaguccaaggaguucgccgacuccaucuccaagggccucauggucuacgccaaccaggucgccuccgacaugauggucucccucaugaagacccucaagguccacuccuccggcaagcccauccccgccuccgucguccucaagcgcguccuccuccgccacaccaaggagaucgucuccgaccucaucgacuccugcaugaagaaccuccacaacaucaccggcguccucaugaccgacuccgacuucgucuccgccgucaagcgcaaccucuucaaccaguggaagcagaacgccaccgacaucauggaggccaugcucaagcgccucgucuccgcccucaucggcgaggagaaggagaccaagucccagucccucuccuacgccucccucaaggccggcucccacgaccccaagugccgcaaccagucccucgaguucuccaccaugaaggccgagaugaaggagcgcgacaagggcaagaugaaguccgaccccugcaagucccucaccuccgccgagaaggucggcgagcacauccucaaggagggccucaccaucuggaaccagaagcagggcaacuccugcaaggucgccaccaaggccugcuccaacaaggacgagaagggcgagaagaucaacgccuccaccgacucccucgccaaggaccucaucgucuccgcccucaagcucauccaguaccaccucacccagcagaccaagggcaaggacaccugcgaggaggacugccccggcuccaccaugggcuacauggcccaguccacccaguacgagaagugcggcggcggccaguccgccaaggcccucuccgucaagcagcucgagucccaccgcgcccccggccccuccaccugccagaaggagaaccagcaccucgacucccagaagauggacauguccaacaucguccucaugcucauccagaagcuccucaacgagaaccccuucaagugcgaggaccccugcgagggcgagaacaagugcuccgagccccgcgccuccaaggccgccuccauguccaaccgcuccgacaaggccgaggagcagugccaggagcaccaggagcucgacugcaccuccggcaugaagcaggccaacggccaguucaucgacaagcucgucgaguccgucaugaagcucugccucaucauggccaaguacuccaacgacggcgccgcccucgccgagcucgaggagcaggccgccuccgccaacaagcccaacuuccgcggcacccgcugcauccacuccggcgccaugccccagaacuaccaggacucccucggccacgaggucaucgucaacaaccagugcuccaccaacucccuccagaagcagcuccaggccguccuccaguggaucgccgccucccaguucaacguccccaugcucuacuucaugggcgacaaggacggccagcucgagaagcucccccaggucuccgccaaggccgccgagaagggcuacuccgucggcggccuccuccaggaggucaugaaguucgccaaggagcgccagcccgacgaggccgucggcaaggucgcccgcaagcagcuccucgacuggcuccucgccaaccucuga

SEQ ID NO: 1519 - RNA, 1251 nt, Artificial Sequence
  BAG61782 variant
auggucgacuaccacgccgccaaccaguccuaccaguacggccccuccuccgccggcaacggcgccggcggcggcggcuccaugggcgacuacauggcccaggaggacgacugggaccgcgaccuccuccucgaccccgccugggagaagcagcagcgcaagaccuucaccgccuggugcaacucccaccuccgcaaggccggcacccagaucgagaacaucgacgaggacuuccgcgacggccucaagcucaugcuccuccucgaggucaucuccggcgagcgccuccccaagcccgagcgcggcaagaugcgcguccacaagaucaacaacgucaacaaggcccucgacuucaucgccuccaagggcgucaagcucgucuccaucggcgccgaggagaucgucgacggcaacgccaagaugacccucggcaugaucuggaccaucauccuccgcuucgccauccaggacaucuccgucgaggagaccuccgccaaggagggccuccuccucuggugccagcgcaagaccgcccccuacaagaacgucaacguccagaacuuccacaucuccuggaaggacggccucgccuucaacgcccucauccaccgccaccgccccgagcucaucgaguacgacaagcuccgcaaggacgaccccgucaccaaccucaacaacgccuucgaggucgccgagaaguaccucgacauccccaagaugcucgacgccgaggacaucgucaacaccgcccgccccgacgagaaggccaucaugaccuacgucuccuccuucuaccacgccuucuccggcgcccagaaggccgagaccgccgccaaccgcaucugcaagguccucgccgucaaccaggagaacgagcaccucauggaggacuacgagaagcucgccuccgaccuccucgaguggauccgccgcaccauccccuggcucgaggaccgcgucccccagaagaccauccaggagaugcagcagaagcucgaggacuuccgcgacuaccgccgcguccacaagccccccaagguccaggagaagugccagcucgagaucaacuucaacacccuccagaccaagcuccgccucuccaaccgccccgccuucaugcccuccuggcgcucccgcgccuccuccucccccaccuccaccugcgccgccuccucccccgcccgccccaugcucuggggccccggcucccgcccccgcuggcgccgcuccggcgccuccccccuccgcuga

SEQ ID NO: 1520 - RNA, 1689 nt, Artificial Sequence
  BAG65349 variant
auggucgacuaccacgccgccaaccaguccuaccaguacggccccuccuccgccggcaacggcgccggcggcggcggcuccaugggcgacuacauggcccaggaggacgacugggaccgcgaccuccuccucgaccccgccugggagaagcagcagcgcaagaccuucaccgccuggugcaacucccaccuccgcaaggccggcacccagaucgagaacaucgacgaggacuuccgcgacggccucaagcucaugcuccuccucgaggucaucuccggcgagcgccuccccaagcccgagcgcggcaagaugcgcguccacaagaucaacaacgucaacaaggcccucgacuucaucgccuccaagggcgucaagcucgucuccaucggcgccgaggagaucgucgacggcaacgccaagaugacccucggcaugaucuggaccaucauccuccgcuucgccauccaggacaucuccgucgaggagaccuccgccaaggagggccuccuccucuggugccagcgcaagaccgcccccuacaagaacgucaacguccagaacuuccacaucuccuggaaggacggccucgccuucaacgcccucauccaccgccaccgccccgagcucaucgaguacgacaagcuccgcaaggacgaccccgucaccaaccucaacaacgccuucgaggucgccgagaaguaccucgacauccccaagaugcucgacgccgaggacaucgucaacaccgcccgccccgacgagaaggccaucaugaccuacgucuccuccuucuaccacgccuucuccggcgcccagaaggccgagaccgccgccaaccgcaucugcaagguccucgccgucaaccaggagaacgagcaccucauggaggacuacgagaagcucgccuccgaccuccucgaguggauccagcgcaccauccccuggcucgaggaccgcgucccccagaaggccauccaggagaugcagcagaagcucgaggacuuccgcgacuaccgccgcguccacaagccccccaagguccaggagaagugccagcucgagaucaacuucaacacccuccagaccaagcuccgccucuccaaccgccccgccuucaugcccuccgagggcaagauggucuccgacaucaacaacggcuggcagcaccucgagcaggccgagaagggcuacgaggaguggcuccucaacgagauccgccgccucgagcgccucgaccaccucgccgagaaguuccgccagaaggccuccauccacgaggccuggaccgacggcaaggaggccaugcucaagcaccgcgacuacgagaccgccacccucuccgacaucaaggcccucauccgcaagcacgaggccuucgaguccgaccucgccgcccaccaggaccgcgucgagcagaucgccgccaucgcccaggagcucaacgagcucgacuacuacgacucccacaacgucaacacccccgacggccuccaggagggccccggccagccccacucccccauccccccccucugcaucuacgccaagcacucccuccaguccuccggcgucggcggcugggccggccgcggcuggggccgccucuccccccucucccucugcggccucgcccgccgcuucccccgccccggcuggggcgaccucggccccgcccuccucgucugguga

SEQ ID NO: 1521 - RNA, 2736 nt, Artificial Sequence
  AAH05033 variant
auggucgacuaccacgccgccaaccaguccuaccaguacggccccuccuccgccggcaacggcgccggcggcggcggcuccaugggcgacuacauggcccaggaggacgacugggaccgcgaccuccuccucgaccccgccugggagaagcagcagcgcaagaccuucaccgccuggugcaacucccaccuccgcaaggccggcacccagaucgagaacaucgacgaggacuuccgcgacggccucaagcucaugcuccuccucgaggucaucuccggcgagcgccuccccaagcccgagcgcggcaagaugcgcguccacaagaucaacaacgucaacaaggcccucgacuucaucgccuccaagggcgucaagcucgucuccaucggcgccgaggagaucgucgacggcaacgccaagaugacccucggcaugaucuggaccaucauccuccgcuucgccauccaggacaucuccgucgaggagaccuccgccaaggagggccuccuccucuggugccagcgcaagaccgcccccuacaagaacgucaacguccagaacuuccacaucuccuggaaggacggccucgccuucaacgcccucauccaccgccaccgccccgagcucaucgaguacgacaagcuccgcaaggacgaccccgucaccaaccucaacaacgccuucgaggucgccgagaaguaccucgacauccccaagaugcucgacgccgaggacaucgucaacaccgcccgccccgacgagaaggccaucaugaccuacgucuccuccuucuaccacgccuucuccggcgcccagaaggccgagaccgccgccaaccgcaucugcaagguccucgccgucaaccaggagaacgagcaccucauggaggacuacgagaagcucgccuccgaccuccucgaguggauccgccgcaccauccccuggcucgaggaccgcgucccccagaagaccauccaggagaugcagcagaagcucgaggacuuccgcgacuaccgccgcguccacaagccccccaagguccaggagaagugccagcucgagaucaacuucaacacccuccagaccaagcuccgccucuccaaccgccccgccuucaugcccuccgagggcaagauggucuccgacaucaacaacggcuggcagcaccucgagcaggccgagaagggcuacgaggaguggcuccucaacgagauccgccgccucgagcgccucgaccaccucgccgagaaguuccgccagaaggccuccauccacgaggccuggaccgacggcaaggaggccaugcucaagcaccgcgacuacgagaccgccacccucuccgacaucaaggcccucauccgcaagcacgaggccuucgaguccgaccucgccgcccaccaggaccgcgucgagcagaucgccgccaucgcccaggagcucaacgagcucgacuacuacgacucccacaacgucaacacccgcugccagaagaucugcgaccagugggacgcccucggcucccucacccacucccgccgcgaggcccucgagaagaccgagaagcagcucgaggccaucgaccagcuccaccucgaguacgccaagcgcgccgcccccuucaacaacuggauggaguccgccauggaggaccuccaggacauguucaucguccacaccaucgaggagaucgagggccucaucuccgcccacgaccaguucaaguccacccuccccgacgccgaccgcgagcgcgaggccauccucgccauccacaaggaggcccagcgcaucgccgaguccaaccacaucaagcucuccggcuccaaccccuacaccaccgucaccccccagaucaucaacuccaagugggagaagguccagcagcucguccccaagcgcgaccacgcccuccucgaggagcaguccaagcagcaguccaacgagcaccuccgccgccaguucgccucccaggccaacgucgucggccccuggauccagaccaagauggaggagaucggccgcaucuccaucgagaugaacggcacccucgaggaccagcucucccaccucaagcaguacgagcgcuccaucgucgacuacaagcccaaccucgaccuccucgagcagcagcaccagcucauccaggaggcccucaucuucgacaacaagcacaccaacuacaccauggagcacauccgcgucggcugggagcagcuccucaccaccaucgcccgcaccaucaacgaggucgagaaccagauccucacccgcgacgccaagggcaucucccaggagcagaugcaggaguuccgcgccuccuucaaccacuucgacaaggaccacggcggcgcccucggccccgaggaguucaaggccugccucaucucccucggcuacgacgucgagaacgaccgccagggcgaggccgaguucaaccgcaucaugucccucgucgaccccaaccacuccggccucgucaccuuccaggccuucaucgacuucaugucccgcgagaccaccgacaccgacaccgccgaccaggucaucgccuccuucaagguccucgccggcgacaagaacuucaucaccgccgaggagcuccgccgcgagcucccccccgaccaggccgaguacugcaucgcccgcauggcccccuaccagggccccgacgccguccccggcgcccucgacuacaaguccuucuccaccgcccucuacggcgaguccgaccucuga

SEQ ID NO: 1522 - RNA, 597 nt, Artificial Sequence
  EAX10817 variant
auggcccuccagggcaucuccgucauggagcucuccggccucgcccccggccccuucugcgccaugguccucgccgacuucggcgcccgcgucguccgcgucgaccgccccggcucccgcuacgacgucucccgccucggccgcggcaagcgcucccucguccucgaccucaagcagccccgcggcgccgccguccuccgccgccucugcaagcgcuccgacguccuccucgagcccuuccgccgcggcgucauggagaagcuccagcucggccccgagauccuccagcgcgagaacccccgccucaucuacgcccgccucuccggcuucggccaguccggcuccuucugccgccucgccggccacgacaucaacuaccucgcccucuccggcggccgcaacuccaucuucaaguucuucuccgucgagaacuccgagaucgaguccgucggcuccaccucccgcaccgagcacgucggcuggugguccaccuuccucuacgaccuccaggacucccgcuggggcauccacggcugcugguccaaccgcacccccguccuccgcgccgccgaccagcgcaccuggaccaaggucuga

SEQ ID NO: 1523 - RNA, 597 nt, Artificial Sequence
  BAF85677 variant
auggcccuccagggcaucuccgucgucgagcucuccggccucgcccccggccccuucugcgccaugguccucgccgacuucggcgcccgcgucguccgcgucgaccgccccggcucccgcuacgacgucucccgccucggccgcggcaagcgcucccucguccucgaccucaagcagccccgcggcgccgccguccuccgccgccucugcaagcgcuccgacguccuccucgagcccuuccgccgcggcgucauggagaagcuccagcucggccccgagauccuccagcgcgagaacccccgccucaucuacgcccgccucuccggcuucggccaguccggcuccuucugccgccucgccggccacgacaucaacuaccucgcccucuccggcggccgcaacuccaucuucaaguucuucuccgucgagaacuccgagaucgaguccgucggcuccaccucccgcaccgagcacgucggcuggugguccaccuuccucuacgaccuccaggacucccgcuggggcauccacggcugcugguccaaccgcacccccuuccuccgcgccgccgaccagcgcaccuggaccaaggucuga

SEQ ID NO: 1524 - RNA, 2763 nt, Artificial Sequence
  EAX05380 variant
auggagguccagcucggccucggccgcgucuacccccgcccccccuccaagaccuaccgcggcgccuuccagaaccucuuccaguccguccgcgaggucauccagaaccccggcccccgccaccccgaggccgccuccgccgccccccccggcgccucccuccuccuccuccagcagcagcagcagcagcagcagcagcagcagcagcagcagcagcagcagcagcagcagcagcagcaggagaccuccccccgccagcagcagcagcagcagggcgaggacggcuccccccaggcccaccgccgcggccccaccggcuaccucguccucgacgaggagcagcagcccucccagccccaguccgcccucgagugccaccccgagcgcggcugcguccccgagcccggcgccgccgucgccgccuccaagggccucccccagcagcuccccgccccccccgacgaggacgacuccgccgcccccuccacccucucccuccucggccccaccuuccccggccucuccuccugcuccgccgaccucaaggacauccucuccgaggccuccaccaugcagcuccuccagcagcagcagcaggaggccgucuccgagggcuccuccuccggccgcgcccgcgaggccuccggcgcccccaccuccuccaaggacaacuaccucggcggcaccuccaccaucuccgacaacgccaaggagcucugcaaggccgucuccgucuccaugggccucggcgucgaggcccucgagcaccucucccccggcgagcagcuccgcggcgacugcauguacgccccccuccucggcgucccccccgccguccgccccacccccugcgccccccucgccgagugcaagggcucccuccucgacgacuccgccggcaaguccaccgaggacaccgccgaguacucccccuucaagggcggcuacaccaagggccucgagggcgagucccucggcugcuccggcuccgccgccgccggcuccuccggcacccucgagcuccccuccacccucucccucuacaaguccggcgcccucgacgaggccgccgccuaccagucccgcgacuacuacaacuucccccucgcccucgccggccccccccccccccccccccccccccacccccacgcccgcaucaagcucgagaacccccucgacuacggcuccgccugggccgccgccgccgcccagugccgcuacggcgaccucgccucccuccacggcgccggcgccgccggccccggcuccggcucccccuccgccgccgccuccuccuccuggcacacccucuucaccgccgaggagggccagcucuacggccccugcggcggcggcggcggcggcggcggcggcggcggcggcggcggcggcggcggcggcggcggcggcggcggcgaggccggcgccgucgcccccuacggcuacacccgccccccccagggccucgccggccaggaguccgacuucaccgcccccgacgucugguaccccggcggcauggucucccgcguccccuaccccucccccaccugcgucaaguccgagaugggccccuggauggacuccuacuccggccccuacggcgacaugcgccucgagaccgcccgcgaccacguccuccccaucgacuacuacuuccccccccagaagaccugccucaucugcggcgacgaggccuccggcugccacuacggcgcccucaccugcggcuccugcaaggucuucuucaagcgcgccgccgagggcaagcagaaguaccucugcgccucccgcaacgacugcaccaucgacaaguuccgccgcaagaacugccccuccugccgccuccgcaagugcuacgaggccggcaugacccucggcgcccgcaagcucaagaagcucggcaaccucaagcuccaggaggagggcgaggccuccuccaccaccucccccaccgaggagaccacccagaagcucaccgucucccacaucgagggcuacgagugccagcccaucuuccucaacguccucgaggccaucgagcccggcgucgucugcgccggccacgacaacaaccagcccgacuccuucgccgcccuccucuccucccucaacgagcucggcgagcgccagcucguccacgucgucaagugggccaaggcccuccccggcuuccgcaaccuccacgucgacgaccagauggccgucauccaguacuccuggaugggccucauggucuucgccaugggcuggcgcuccuucaccaacgucaacucccgcaugcucuacuucgcccccgaccucgucuucaacgaguaccgcaugcacaagucccgcauguacucccagugcguccgcaugcgccaccucucccaggaguucggcuggcuccagaucaccccccaggaguuccucugcaugaaggcccuccuccucuucuccaucauccccgucgacggccucaagaaccagaaguucuucgacgagcuccgcaugaacuacaucaaggagcucgaccgcaucaucgccugcaagcgcaagaaccccaccuccugcucccgccgcuucuaccagcucaccaagcuccucgacuccguccagcccaucgcccgcgagcuccaccaguucaccuucgaccuccucaucaagucccacauggucuccgucgacuuccccgagaugauggccgagaucaucuccguccagguccccaagauccucuccggcaaggucaagcccaucuacuuccacacccaguga

SEQ ID NO: 1525 - RNA, 1239 nt, Artificial Sequence
  AAH64630 variant
auggcccccgucgagcacgucgucgccgacgccggcgccuuccuccgccacgccgcccuccaggacaucggcaagaacaucuacaccauccgcgaggucgucaccgagauccgcgacaaggccacccgccgccgccucgccguccuccccuacgagcuccgcuucaaggagccccuccccgaguacguccgccucgucaccgaguucuccaagaagaccggcgacuaccccucccucuccgccaccgacauccagguccucgcccucaccuaccagcucgaggccgaguucgucggcgucucccaccucaagcaggagccccagaaggucaaggucuccuccuccauccagcaccccgagaccccccuccacaucuccggcuuccaccuccccuacaagcccaagcccccccaggagaccgagaagggccacuccgccugcgagcccgagaaccucgaguucuccuccuucauguucuggcgcaacccccuccccaacaucgaccacgagcuccaggagcuccucaucgaccgcggcgaggacguccccuccgaggaggaggaggaggaggagaacggcuucgaggaccgcaaggacgacuccgacgacgacggcggcggcuggaucacccccuccaacaucaagcagauccagcaggagcucgagcagugcgacguccccgaggacguccgcgucggcugccucaccaccgacuucgccaugcagaacguccuccuccagaugggccuccacguccucgccgucaacggcaugcucauccgcgaggcccgcuccuacauccuccgcugccacggcugcuucaagaccaccuccgacaugucccgcgucuucugcucccacugcggcaacaagacccucaagaaggucuccgucaccgucuccgacgacggcacccuccacaugcacuucucccgcaaccccaagguccucaacccccgcggccuccgcuacucccuccccacccccaagggcggcaaguacgccaucaacccccaccucaccgaggaccagcgcuucccccagcuccgccucucccagaaggcccgccagaagaccaacgucuucgcccccgacuacaucgccggcgucucccccuucgucgagaacgacaucuccucccgcuccgccacccuccagguccgcgacuccacccucggcgccggccgccgccgccucaaccccaacgccucccgcaagaaguucgucaagaagcgcuga

SEQ ID NO: 1526 - RNA, 984 nt, Artificial Sequence
  AAH69102 variant
augcagaugcccgccaugaugucccuccuccucgucuccgucggccucauggaggcccuccaggcccagucccaccccaucacccgccgcgaccucuucucccaggagauccagcucgacauggcccucgccuccuucgacgaccaguacgccggcugcgccgccgccaugaccgccgcccuccccgaccucaaccacaccgaguuccaggccaaccaggucuacgccgacuccuggacccucgccuccucccaguggcaggagcgccaggcccgcuggcccgaguggucccucucccccacccgccccuccccccccccccucggcuuccgcgacgagcacggcgucgcccuccucgccuacaccgccaacuccccccuccacaaggaguucaacgccgccguccgcgaggccggccgcucccgcgcccacuaccuccaccacuucuccuucaagacccuccacuuccuccucaccgaggcccuccagcuccucggcuccggccagcgccccccccgcugccaccaggucuuccgcggcguccacggccuccgcuuccgccccgccggcccccgcgccaccguccgccucggcggcuucgccuccgccucccucaagcacgucgccgcccagcaguucggcgaggacaccuucuucggcaucuggaccugccucggcgcccccaucaagggcuacuccuucuuccccggcgaggaggagguccucaucccccccuucgagaccuuccaggucaucaacgccucccgccucgcccagggccccgcccgcaucuaccuccgcgcccucggcaagcacuccaccuacaacugcgaguacaucaaggacaagaagugcaaguccggccccugccaccucgacaacuccgccaugggccaguccccccucuccgccgucuggucccuccuccuccuccucugguuccucgucguccgcgccuuccccgacggccccggccuccucuga

SEQ ID NO: 1527 - RNA, 1035 nt, Artificial Sequence
  AAH09751 variant
auggcccagaaggagaacuccuaccccuggcccuacggccgccagaccgcccccuccggccucuccacccucccccagcgcguccuccgcaaggagcccgucacccccuccgcccucguccucaugucccgcuccaacguccagcccaccgccgcccccggccagaaggucauggagaacuccuccggcacccccgacauccucacccgccacuucaccaucgacgacuucgagaucggccgcccccucggcaagggcaaguucggcaacgucuaccucgcccgcgagaagaagucccacuucaucgucgcccucaagguccucuucaagucccagaucgagaaggagggcgucgagcaccagcuccgccgcgagaucgagauccaggcccaccuccaccaccccaacauccuccgccucuacaacuacuucuacgaccgccgccgcaucuaccucauccucgaguacgccccccgcggcgagcucuacaaggagcuccagaaguccugcaccuucgacgagcagcgcaccgccaccaucauggaggagcucgccgacgcccucauguacugccacggcaagaaggucauccaccgcgacaucaagcccgagaaccuccuccucggccucaagggcgagcucaagaucgccgacuucggcugguccguccacgcccccucccuccgccgcaagaccaugugcggcacccucgacuaccucccccccgagaugaucgagggccgcaugcacaacgagaaggucgaccucuggugcaucggcguccucugcuacgagcuccucgucggcaacccccccuucgaguccgccucccacaacgagaccuaccgccgcaucgucaaggucgaccucaaguuccccgccuccguccccaugggcgcccaggaccucaucuccaagcuccuccgccacaaccccuccgagcgccucccccucgcccaggucuccgcccaccccuggguccgcgccaacucccgccgcguccucccccccuccgcccuccaguccgucgccuga

SEQ ID NO: 1528 - RNA, 360 nt, Artificial Sequence
  AAD48083 variant
augucccgcuccgucgcccucgccguccucgcccuccucucccucuccggccucgaggccauccagcgcacccccaagauccaggucuacucccgccaccccgccgagaacggcaaguccaacuuccucaacugcuacgucuccggcuuccaccccuccgacaucgaggucgaccuccucaagaacggcgagcgcaucgagaaggucgagcacuccgaccucuccuucuccaaggacugguccuucuaccuccucuacuacaccgaguucacccccaccgagaaggacgaguacgccugccgcgucaaccacgucacccucucccagcccaagaucgucaagugggaccgcgacauguga

SEQ ID NO: 1529 - RNA, 1137 nt, Artificial Sequence
  AAH28058 variant
augcgcaugcucgucuccggccgccgcgucaagaaguggcagcucaucauccagcucuucgccaccugcuuccucgccucccucauguucuucugggagcccaucgacaaccacaucgucucccacaugaaguccuacuccuaccgcuaccucaucaacuccuacgacuucgucaacgacacccucucccucaagcacaccuccgccggcccccgcuaccaguaccucaucaaccacaaggagaagugccaggcccaggacguccuccuccuccucuucgucaagaccgcccccgagaacuacgaccgccgcuccggcauccgccgcaccuggggcaacgagaacuacguccgcucccagcucaacgccaacaucaagacccucuucgcccucggcacccccaacccccucgagggcgaggagcuccagcgcaagcucgccugggaggaccagcgcuacaacgacaucauccagcaggacuucgucgacuccuucuacaaccucacccucaagcuccucaugcaguucuccugggccaacaccuacugcccccacgccaaguuccucaugaccgccgacgacgacaucuucauccacaugcccaaccucaucgaguaccuccagucccucgagcagaucggcguccaggacuucuggaucggccgcguccaccgcggcgccccccccauccgcgacaaguccuccaaguacuacgucuccuacgagauguaccaguggcccgccuaccccgacuacaccgccggcgccgccuacgucaucuccggcgacgucgccgccaaggucuacgaggccucccagacccucaacuccucccucuacaucgacgacgucuucaugggccucugcgccaacaagaucggcaucgucccccaggaccacgucuucuucuccggcgagggcaagacccccuaccaccccugcaucuacgagaagaugaugaccucccacggccaccucgaggaccuccaggaccucuggaagaacgccaccgaccccaaggucaagaccaucuccaagggcuucuucggccagaucuacugccgccucaugaagaucauccuccucugcaagaucuccuacgucgacaccuaccccugccgcgccgccuucaucuga

SEQ ID NO: 1530 - RNA, 1602 nt, Artificial Sequence
  AAA35516 variant
auguggcucggccgccgcgcccucugcgcccucguccuccuccucgccugcgccucccucggccuccucuacgccuccacccgcgacgcccccggccuccgccucccccucgcccccugggcccccccccaguccccccgccgccccgagcuccccgaccucgcccccgagccccgcuacgcccacauccccguccgcaucaaggagcaggucgucggccuccucgccuggaacaacugcuccugcgaguccuccggcggcggccucccccuccccuuccagaagcagguccgcgccaucgaccucaccaaggccuucgaccccgccgagcuccgcgccgccuccgccacccgcgagcaggaguuccaggccuuccucucccgcucccagucccccgccgaccagcuccucaucgcccccgccaacuccccccuccaguacccccuccagggcgucgagguccagccccuccgcuccauccucguccccggccucucccuccaggccgccuccggccaggaggucuaccaggucaaccucaccgccucccucggcaccugggacgucgccggcgaggucaccggcgucacccucaccggcgagggccaggccgaccucacccucgucucccccggccucgaccagcucaaccgccagcuccagcucgucaccuacuccucccgcuccuaccagaccaacaccgccgacaccguccgcuucuccaccgagggccacgaggccgccuucaccauccgcauccgccacccccccaacccccgccucuacccccccggcucccucccccagggcgcccaguacaacaucuccgcccucgucaccaucgccaccaagaccuuccuccgcuacgaccgccuccgcgcccucaucaccuccauccgccgcuucuaccccaccgucaccgucgucaucgccgacgacuccgacaagcccgagcgcgucuccggccccuacgucgagcacuaccucaugcccuucggcaagggcugguucgccggccgcaaccucgccgucucccaggucaccaccaaguacguccucugggucgacgacgacuucgucuucaccgcccgcacccgccucgagcgccucgucgacguccucgagcgcaccccccucgaccucgucggcggcgccguccgcgagaucuccggcuucgccaccaccuaccgccagcuccucuccgucgagcccggcgcccccggccucggcaacugccuccgccagcgccgcggcuuccaccacgagcucgucggcuuccccggcugcgucgucaccgacggcgucgucaacuucuuccucgcccgcaccgacaagguccgcgaggucggcuucgacccccgccucucccgcgucgcccaccucgaguucuuccucgacggccucggcucccuccgcgucggcuccugcuccgacgucgucgucgaccacgccuccaagcucaagcuccccuggaccucccgcgacgccggcgccgagaccuacgcccgcuaccgcuaccccggcucccucgacgagucccagauggccaagcaccgccuccucuucuucaagcaccgccuccagugcaugaccucccaguga

SEQ ID NO: 1531 - RNA, 849 nt, Artificial Sequence
  AAH74729 variant
auggccucccucggccagauccucuucugguccaucaucuccaucaucaucauccucgccggcgccaucgcccucaucaucggcuucggcaucuccggccgccacuccaucaccgucaccaccgucgccuccgccggcaacaucggcgaggacggcauccucuccugcaccuucgagcccgacaucaagcucuccgacaucgucauccaguggcucaaggagggcguccucggccucguccacgaguucaaggagggcaaggacgagcucuccgagcaggacgagauguuccgcggccgcaccgccgucuucgccgaccaggucaucgucggcaacgccucccuccgccucaagaacguccagcucaccgacgccggcaccuacaagugcuacaucaucaccuccaagggcaagggcaacgccaaccucgaguacaagaccggcgccuucuccaugcccgaggucaacgucgacuacaacgccuccuccgagacccuccgcugcgaggccccccgcugguucccccagcccaccgucgucugggccucccaggucgaccagggcgccaacuucuccgaggucuccaacaccuccuucgagcucaacuccgagaacgucaccaugaaggucgucuccguccucuacaacgucaccaucaacaacaccuacuccugcaugaucgagaacgacaucgccaaggccaccggcgacaucaaggucaccgaguccgagaucaagcgccgcucccaccuccagcuccucaacuccaaggccucccucugcgucuccuccuucuucgccaucuccugggcccuccucccccucucccccuaccucaugcucaaguga

SEQ ID NO: 1532 - RNA, 132 nt, Artificial Sequence
  AAC50123 variant
auggccgcccgcgccgucuuccucgcccucuccgcccagcuccuccaggcccgccucaugaaggaggagucccccgucgucuccuggcgccucgagcccgaggacggcaccgcccucugcuucaucuucuga

SEQ ID NO: 1533 - RNA, 1158 nt, Artificial Sequence
  AAN40694 variant
auggccgccgcccucuucguccuccucggcuucgcccuccucggcacccacggcgccuccggcgccgccggcuucguccaggccccccucucccagcagcgcugggucggcggcuccgucgagcuccacugcgaggccgucggcucccccguccccgagauccaguggugguucgagggccagggccccaacgacaccugcucccagcucugggacggcgcccgccucgaccgcguccacauccacgccaccuaccaccagcacgccgccuccaccaucuccaucgacacccucgucgaggaggacaccggcaccuacgagugccgcgccuccaacgaccccgaccgcaaccaccucacccgcgccccccgcgucaaguggguccgcgcccaggccgucguccucguccucgagcccggcaccgucuucaccaccgucgaggaccucggcuccaagauccuccucaccugcucccucaacgacuccgccaccgaggucaccggccaccgcuggcucaagggcggcgucguccucaaggaggacgcccuccccggccagaagaccgaguucaaggucgacuccgacgaccaguggggcgaguacuccugcgucuuccuccccgagcccaugggcaccgccaacauccagcuccacggccccccccgcgucaaggccgucaaguccuccgagcacaucaacgagggcgagaccgccaugcucgucugcaaguccgaguccgucccccccgucaccgacugggccugguacaagaucaccgacuccgaggacaaggcccucaugaacggcuccgagucccgcuucuucgucuccuccucccagggccgcuccgagcuccacaucgagaaccucaacauggaggccgaccccggccaguaccgcugcaacggcaccuccuccaagggcuccgaccaggccaucaucacccuccgcguccgcucccaccucgccgcccucuggcccuuccucggcaucgucgccgagguccucguccucgucaccaucaucuucaucuacgagaagcgccgcaagcccgaggacguccucgacgacgacgacgccggcuccgccccccucaaguccuccggccagcaccagaacgacaagggcaagaacguccgccagcgcaacuccuccuga

SEQ ID NO: 1534 - RNA, 720 nt, Artificial Sequence
  ABX60202 variant
auggcccacgccggccgcaccggcuacgacaaccgcgagaucgucaugaaguacauccacuacaagcucucccagcgcggcuacgagugggacgccggcgacgucggcgccgccccccccggcgccgcccccgcccccggcaucuucuccucccagcccggccacaccccccaccccgccgccucccgcgaccccgucgcccgcaccuccccccuccagacccccgccgcccccggcgccgccgccggccccgcccucucccccgucccccccgucguccaccucacccuccgccaggccggcgacgacuucucccgccgcuaccgccgcgacuucgccgagauguccucccagcuccaccucacccccuucaccgcccgcggccgcuucgccaccgucgucgaggagcucuuccgcgacggcgucaacuggggccgcaucgucgccuucuucgaguucggcggcgucaugugcgucgaguccgucaaccgcgagauguccccccucgucgacaacaucgcccucuggaugaccgaguaccucaaccgccaccuccacaccuggauccaggacaacggcggcugggacgccuucgucgagcucuacggccccuccaugcgcccccucuucgacuucuccuggcucucccucaagacccuccucucccucgcccucgucggcgccugcaucacccucggcgccuaccucucccacaaguga

SEQ ID NO: 1535 - RNA, 1290 nt, Artificial Sequence
  ABX82700 variant
auggucgaccccgucggcuucgccgaggccuggaaggcccaguuccccgacuccgagcccccccgcauggagcuccgcuccgucggcgacaucgagcaggagcucgagcgcugcaaggccuccauccgccgccucgagcaggaggucaaccaggagcgcuuccgcaugaucuaccuccagacccuccucgccaaggagaagaaguccuacgaccgccagcgcuggggcuuccgccgcgccgcccaggcccccgacggcgccuccgagccccgcgccuccgccucccgcccccagcccgcccccgccgacggcgccgaccccccccccgccgaggagcccgaggcccgccccgacggcgagggcucccccggcaaggcccgccccggcaccgcccgccgccccggcgccgccgccuccggcgagcgcgacgaccgcggcccccccgccuccgucgccgcccuccgcuccaacuucgagcgcauccgcaagggccacggccagcccggcgccgacgccgagaagcccuucuacgucaacgucgaguuccaccacgagcgcggccucgucaaggucaacgacaaggaggucuccgaccgcaucuccucccucggcucccaggccaugcagauggagcgcaagaagucccagcacggcgccggcuccuccgucggcgacgccucccgcccccccuaccgcggccgcuccuccgaguccuccugcggcgucgacggcgacuacgaggacgccgagcucaacccccgcuuccucaaggacaaccucaucgacgccaacggcggcucccgcccccccuggcccccccucgaguaccagcccuaccaguccaucuacgucggcggcaugauggagggcgagggcaagggcccccuccuccgcucccaguccaccuccgagcaggagaagcgccucaccuggccccgccgcuccuacuccccccgcuccuucgaggacugcggcggcggcuacacccccgacugcuccuccaacgagaaccucaccuccuccgaggaggacuucuccuccggccaguccucccgcgucucccccucccccaccaccuaccgcauguuccgcgacaagucccgcucccccucccagaacucccagcaguccuucgacuccuccuccccccccaccccccagugccacaagcgccaccgccacugccccgucgucgucuccgaggccaccaucgucggcguccgcaagaccggccagaucuggcccaacgacggcgagggcgccuuccacggcgacgccgacggcggcuga

SEQ ID NO: 1536 - RNA, 1665 nt, Artificial Sequence
  ABX82703 variant
auggucgaccccgucggcuucgccgaggccuggaaggcccaguuccccgacuccgagcccccccgcauggagcuccgcuccgucggcgacaucgagcaggagcucgagcgcugcaaggccuccauccgccgccucgagcaggaggucaaccaggagcgcuuccgcaugaucuaccuccagacccuccucgccaaggagaagaaguccuacgaccgccagcgcuggggcuuccgccgcgccgcccaggcccccgacggcgccuccgagccccgcgccuccgccucccgcccccagcccgcccccgccgacggcgccgaccccccccccgccgaggagcccgaggcccgccccgacggcgagggcucccccggcaaggcccgccccggcaccgcccgccgccccggcgccgccgccuccggcgagcgcgacgaccgcggcccccccgccuccgucgccgcccuccgcuccaacuucgagcgcauccgcaagggccacggccagcccggcgccgacgccgagaagcccuucuacgucaacgucgaguuccaccacgagcgcggccucgucaaggucaacgacaaggaggucuccgaccgcaucuccucccucggcucccaggccaugcagauggagcgcaagaagucccagcacggcgccggcuccuccgucggcgacgccucccgcccccccuaccgcggccgcuccuccgaguccuccugcggcgucgacggcgacuacgaggacgccgagcucaacccccgcuuccucaaggacaaccucaucgacgccaacggcggcucccgcccccccuggcccccccucgaguaccagcccuaccaguccaucuacgucggcggcaugauggagggcgagggcaagggcccccuccuccgcucccaguccaccuccgagcaggagaagcgccucaccuggccccgccgcuccuacuccccccgcuccuucgaggacugcggcggcggcuacacccccgacugcuccuccaacgagaaccucaccuccuccgaggaggacuucuccuccggccaguccucccgcgucucccccucccccaccaccuaccgcauguuccgcgacaagucccgcucccccucccagaacucccagcaguccuucgacuccuccuccccccccaccccccagugccacaagcgccaccgccacugccccgucgucgucuccgaggccaccaucgucggcguccgcaagaccggccagaucuggcccaacgacggcgagggcgccuuccacggcgacgccgacggcuccuucggcaccccccccggcuacggcugcgccgccgaccgcgccgaggagcagcgccgccaccaggacggccuccccuacaucgacgacucccccuccuccuccccccaccucuccuccaagggccgcggcucccgcgacgcccucgucuccggcgcccucgaguccaccaaggccuccgagcucgaccucgagaagggccucgagaugcgcaaguggguccucuccggcauccucgccuccgaggagaccuaccucucccaccucgaggcccuccuccuccccaugaagccccucaaggccgccgccaccaccucccagcccguccucaccucccagcagaucgagaccaucuucuucaagguccccgaccuccucuga

SEQ ID NO: 1537 - RNA, 1545 nt, Artificial Sequence
  ABX82704 variant
auggucgaccccgucggcuucgccgaggccuggaaggcccaguuccccgacuccgagcccccccgcauggagcuccgcuccgucggcgacaucgagcaggagcucgagcgcugcaaggccuccauccgccgccucgagcaggaggucaaccaggagcgcuuccgcaugaucuaccuccagacccuccucgccaaggagaagaaguccuacgaccgccagcgcuggggcuuccgccgcgccgcccaggcccccgacggcgccuccgagccccgcgccuccgccucccgcccccagcccgcccccgccgacggcgccgaccccccccccgccgaggagcccgaggcccgccccgacggcgagggcucccccggcaaggcccgccccggcaccgcccgccgccccggcgccgccgccuccggcgagcgcgacgaccgcggcccccccgccuccgucgccgcccuccgcuccaacuucgagcgcauccgcaagggccacggccagcccggcgccgacgccgagaagcccuucuacgucaacgucgaguuccaccacgagcgcggccucgucaaggucaacgacaaggaggucuccgaccgcaucuccucccucggcucccaggccaugcagauggagcgcaagaagucccagcacggcgccggcuccuccgucggcgacgccucccgcccccccuaccgcggccgcuccuccgaguccuccugcggcgucgacggcgacuacgaggacgccgagcucaacccccgcuuccucaaggacaaccucaucgacgccaacggcggcucccgcccccccuggcccccccucgaguaccagcccuaccaguccaucuacgucggcggcaugauggagggcgagggcaagggcccccuccuccgcucccaguccaccuccgagcaggagaagcgccucaccuggccccgccgcuccuacuccccccgcuccuucgaggacugcggcggcggcuacacccccgacugcuccuccaacgagaaccucaccuccuccgaggaggacuucuccuccggccaguccucccgcgucucccccucccccaccaccuaccgcauguuccgcgacaagucccgcucccccucccagaacucccagcaguccuucgacuccuccuccccccccaccccccagugccacaagcgccaccgccacugccccgucgucgucuccgaggccaccaucgucggcguccgcaagaccggccagaucuggcccaacgacggcgagggcgccuuccacggcgacgccgacggcuccuucggcaccccccccggcuacggcugcgccgccgaccgcgccgaggagcagcgccgccaccaggacggccuccccuacaucgacgacucccccuccuccuccccccaccucuccuccaagggccgcggcucccgcgacgcccucgucuccggcgcccucgaguccaccaaggccuccgagcucgaccucgagaagggccucgagaugcgcaaguggguccucuccggcauccucgccuccgaggagaucacccucuga

SEQ ID NO: 1538 - RNA, 1326 nt, Artificial Sequence
  ABX82705 variant
auggucgaccccgucggcuucgccgaggccuggaaggcccaguuccccgacuccgagcccccccgcauggagcuccgcuccgucggcgacaucgagcaggagcucgagcgcugcaaggccuccauccgccgccucgagcaggaggucaaccaggagcgcuuccgcaugaucuaccuccagacccuccucgccaaggagaagaaguccuacgaccgccagcgcuggggcuuccgccgcgccgcccaggcccccgacggcgccuccgagccccgcgccuccgccucccgcccccagcccgcccccgccgacggcgccgaccccccccccgccgaggagcccgaggcccgccccgacggcgagggcucccccggcaaggcccgccccggcaccgcccgccgccccggcgccgccgccuccggcgagcgcgacgaccgcggcccccccgccuccgucgccgcccuccgcuccaacuucgagcgcauccgcaagggccacggccagcccggcgccgacgccgagaagcccuucuacgucaacgucgaguuccaccacgagcgcggccucgucaaggucaacgacaaggaggucuccgaccgcaucuccucccucggcucccaggccaugcagauggagcgcaagaagucccagcacggcgccggcuccuccgucggcgacgccucccgcccccccuaccgcggccgcuccuccgaguccuccugcggcgucgacggcgacuacgaggacgccgagcucaacccccgcuuccucaaggacaaccucaucgacgccaacggcggcucccgcccccccuggcccccccucgaguaccagcccuaccaguccaucuacgucggcggcaugauggagggcgagggcaagggcccccuccuccgcucccaguccaccuccgagcaggagaagcgccucaccuggccccgccgcuccuacuccccccgcuccuucgaggacugcggcggcggcuacacccccgacugcuccuccaacgagaaccucaccuccuccgaggaggacuucuccuccggccaguccucccgcgucucccccucccccaccaccuaccgcauguuccgcgacaagucccgcucccccucccagaacucccagcaguccuucgacuccuccuccccccccaccccccagugccacaagcgccaccgccacugccccgucgucgucuccgaggccaccaucgucggcguccgcaagaccggccagaucuggcccaacgacggcgagggcgccuuccacggcgacgccgacggcucccucgagcuccagggcaagcccucccgcuggacccaguga

SEQ ID NO: 1539 - RNA, 1575 nt, Artificial Sequence
  ABX82706 variant
auggucgaccccgucggcuucgccgaggccuggaaggcccaguuccccgacuccgagcccccccgcauggagcuccgcuccgucggcgacaucgagcaggagcucgagcgcugcaaggccuccauccgccgccucgagcaggaggucaaccaggagcgcuuccgcaugaucuaccuccagacccuccucgccaaggagaagaaguccuacgaccgccagcgcuggggcuuccgccgcgccgcccaggcccccgacggcgccuccgagccccgcgccuccgccucccgcccccagcccgcccccgccgacggcgccgaccccccccccgccgaggagcccgaggcccgccccgacggcgagggcucccccggcaaggcccgccccggcaccgcccgccgccccggcgccgccgccuccggcgagcgcgacgaccgcggcccccccgccuccgucgccgcccuccgcuccaacuucgagcgcauccgcaagggccacggccagcccggcgccgacgccgagaagcccuucuacgucaacgucgaguuccaccacgagcgcggccucgucaaggucaacgacaaggaggucuccgaccgcaucuccucccucggcucccaggccaugcagauggagcgcaagaagucccagcacggcgccggcuccuccgucggcgacgccucccgcccccccuaccgcggccgcuccuccgaguccuccugcggcgucgacggcgacuacgaggacgccgagcucaacccccgcuuccucaaggacaaccucaucgacgccaacggcggcucccgcccccccuggcccccccucgaguaccagcccuaccaguccaucuacgucggcggcaugauggagggcgagggcaagggcccccuccuccgcucccaguccaccuccgagcaggagaagcgccucaccuggccccgccgcuccuacuccccccgcuccuucgaggacugcggcggcggcuacacccccgacugcuccuccaacgagaaccucaccuccuccgaggaggacuucuccuccggccaguccucccgcgucucccccucccccaccaccuaccgcauguuccgcgacaagucccgcucccccucccagaacucccagcaguccuucgacuccuccuccccccccaccccccagugccacaagcgccaccgccacugccccgucgucgucuccgaggccaccaucgucggcguccgcaagaccggccagaucuggcccaacgacggcgagggcgccuuccacggcgacgccgacggcuccuucggcaccccccccggcuacggcugcgccgccgaccgcgccgaggagcagcgccgccaccaggacggccuccccuacaucgacgacucccccuccuccuccccccaccucuccuccaagggccgcggcucccgcgacgcccucgucuccggcgcccucgaguccaccaaggccuccgagcucgaccucgagaagggccucgagaugcgcaagugggaccccgucaagaugacccccaccuucucccuccacugcaugauccucuggcccgucgagaucacccucuga

SEQ ID NO: 1540 - RNA, 1398 nt, Artificial Sequence
  ABX82707 variant
auggucgaccccgucggcuucgccgaggccuggaaggcccaguuccccgacuccgagcccccccgcauggagcuccgcuccgucggcgacaucgagcaggagcucgagcgcugcaaggccuccauccgccgccucgagcaggaggucaaccaggagcgcuuccgcaugaucuaccuccagacccuccucgccaaggagaagaaguccuacgaccgccagcgcuggggcuuccgccgcgccgcccaggcccccgacggcgccuccgagccccgcgccuccgccucccgcccccagcccgcccccgccgacggcgccgaccccccccccgccgaggagcccgaggcccgccccgacggcgagggcucccccggcaaggcccgccccggcaccgcccgccgccccggcgccgccgccuccggcgagcgcgacgaccgcggcccccccgccuccgucgccgcccuccgcuccaacuucgagcgcauccgcaagggccacggccagcccggcgccgacgccgagaagcccuucuacgucaacgucgaguuccaccacgagcgcggccucgucaaggucaacgacaaggaggucuccgaccgcaucuccucccucggcucccaggccaugcagauggagcgcaagaagucccagcacggcgccggcuccuccgucggcgacgccucccgcccccccuaccgcggccgcuccuccgaguccuccugcggcgucgacggcgacuacgaggacgccgagcucaacccccgcuuccucaaggacaaccucaucgacgccaacggcggcucccgcccccccuggcccccccucgaguaccagcccuaccaguccaucuacgucggcggcaugauggagggcgagggcaagggcccccuccuccgcucccaguccaccuccgagcaggagaagcgccucaccuggccccgccgcuccuacuccccccgcuccuucgaggacugcggcggcggcuacacccccgacugcuccuccaacgagaaccucaccuccuccgaggaggacuucuccuccggccaguccucccgcgucucccccucccccaccaccuaccgcauguuccgcgacaagucccgcucccccucccagaacucccagcaguccuucgacuccuccuccccccccaccccccagugccacaagcgccaccgccacugccccgucgucgucuccgaggccaccaucgucggcguccgcaagaccggccagaucuggcccaacgacggcgagggcgccuuccacggcgagcaccccggcgccgccgaggaggucuuccagaagcuccuccccgacauccgcggcgccgccgacgccgaccagcucgucugcgagacccccgacugcccccagcacuccgccgaccaccaguga

SEQ ID NO: 1541 - RNA, 1377 nt, Artificial Sequence
  ABX82709 variant
auggucgaccccgucggcuucgccgaggccuggaaggcccaguuccccgacuccgagcccccccgcauggagcuccgcuccgucggcgacaucgagcaggagcucgagcgcugcaaggccuccauccgccgccucgagcaggaggucaaccaggagcgcuuccgcaugaucuaccuccagacccuccucgccaaggagaagaaguccuacgaccgccagcgcuggggcuuccgccgcgccgcccaggcccccgacggcgccuccgagccccgcgccuccgccucccgcccccagcccgcccccgccgacggcgccgaccccccccccgccgaggagcccgaggcccgccccgacggcgagggcucccccggcaaggcccgccccggcaccgcccgccgccccggcgccgccgccuccggcgagcgcgacgaccgcggcccccccgccuccgucgccgcccuccgcuccaacuucgagcgcauccgcaagggccacggccagcccggcgccgacgccgagaagcccuucuacgucaacgucgaguuccaccacgagcgcggccucgucaaggucaacgacaaggaggucuccgaccgcaucuccucccucggcucccaggccaugcagauggagcgcaagaagucccagcacggcgccggcuccuccgucggcgacgccucccgcccccccuaccgcggccgcuccuccgaguccuccugcggcgucgacggcgacuacgaggacgccgagcucaacccccgcuuccucaaggacaaccucaucgacgccaacggcggcucccgcccccccuggcccccccucgaguaccagcccuaccaguccaucuacgucggcggcaugauggagggcgagggcaagggcccccuccuccgcucccaguccaccuccgagcaggagaagcgccucaccuggccccgccgcuccuacuccccccgcuccuucgaggacugcggcggcggcuacacccccgacugcuccuccaacgagaaccucaccuccuccgaggaggacuucuccuccggccaguccucccgcgucucccccucccccaccaccuaccgcauguuccgcgacaagucccgcucccccucccagaacucccagcaguccuucgacuccuccuccccccccaccccccagugccacaagcgccaccgccacugccccgucgucgucuccgaggccaccaucgucggcguccgcaagaccggccagaucuggcccaacgacggcgagggcgccuuccacggcgacgccgacggcuccuucggcaccccccccggcuacugcugccucugccuccccgccuggcccuccggcugcaccgccgccaccgcccgcgucacccgcuccuga

SEQ ID NO: 1542 - RNA, 1365 nt, Artificial Sequence
  ABX82710 variant
auggucgaccccgucggcuucgccgaggccuggaaggcccaguuccccgacuccgagcccccccgcauggagcuccgcuccgucggcgacaucgagcaggagcucgagcgcugcaaggccuccauccgccgccucgagcaggaggucaaccaggagcgcuuccgcaugaucuaccuccagacccuccucgccaaggagaagaaguccuacgaccgccagcgcuggggcuuccgccgcgccgcccaggcccccgacggcgccuccgagccccgcgccuccgccucccgcccccagcccgcccccgccgacggcgccgaccccccccccgccgaggagcccgaggcccgccccgacggcgagggcucccccggcaaggcccgccccggcaccgcccgccgccccggcgccgccgccuccggcgagcgcgacgaccgcggcccccccgccuccgucgccgcccuccgcuccaacuucgagcgcauccgcaagggccacggccagcccggcgccgacgccgagaagcccuucuacgucaacgucgaguuccaccacgagcgcggccucgucaaggucaacgacaaggaggucuccgaccgcaucuccucccucggcucccaggccaugcagauggagcgcaagaagucccagcacggcgccggcuccuccgucggcgacgccucccgcccccccuaccgcggccgcuccuccgaguccuccugcggcgucgacggcgacuacgaggacgccgagcucaacccccgcuuccucaaggacaaccucaucgacgccaacggcggcucccgcccccccuggcccccccucgaguaccagcccuaccaguccaucuacgucggcggcaugauggagggcgagggcaagggcccccuccuccgcucccaguccaccuccgagcaggagaagcgccucaccuggccccgccgcuccuacuccccccgcuccuucgaggacugcggcggcggcuacacccccgacugcuccuccaacgagaaccucaccuccuccgaggaggacuucuccuccggccaguccucccgcgucucccccucccccaccaccuaccgcauguuccgcgacaagucccgcucccccucccagaacucccagcaguccuucgacuccuccuccccccccaccccccagugccacaagcgccaccgccacugccccgucgucgucuccgaggccaccaucgucggcguccgcaagaccggccagaucuggcccaacgacggcgagggcgccuuccacggcgacgccgacggcuccuucggcaccccccccggcuacggcugcgccgccggccgccccccccaccucaccgagcuccccguccagcaccaguga

SEQ ID NO: 1543 - RNA, 1404 nt, Artificial Sequence
  ABX82711 variant
auggucgaccccgucggcuucgccgaggccuggaaggcccaguuccccgacuccgagcccccccgcauggagcuccgcuccgucggcgacaucgagcaggagcucgagcgcugcaaggccuccauccgccgccucgagcaggaggucaaccaggagcgcuuccgcaugaucuaccuccagacccuccucgccaaggagaagaaguccuacgaccgccagcgcuggggcuuccgccgcgccgcccaggcccccgacggcgccuccgagccccgcgccuccgccucccgcccccagcccgcccccgccgacggcgccgaccccccccccgccgaggagcccgaggcccgccccgacggcgagggcucccccggcaaggcccgccccggcaccgcccgccgccccggcgccgccgccuccggcgagcgcgacgaccgcggcccccccgccuccgucgccgcccuccgcuccaacuucgagcgcauccgcaagggccacggccagcccggcgccgacgccgagaagcccuucuacgucaacgucgaguuccaccacgagcgcggccucgucaaggucaacgacaaggaggucuccgaccgcaucuccucccucggcucccaggccaugcagauggagcgcaagaagucccagcacggcgccggcuccuccgucggcgacgccucccgcccccccuaccgcggccgcuccuccgaguccuccugcggcgucgacggcgacuacgaggacgccgagcucaacccccgcuuccucaaggacaaccucaucgacgccaacggcggcucccgcccccccuggcccccccucgaguaccagcccuaccaguccaucuacgucggcggcaugauggagggcgagggcaagggcccccuccuccgcucccaguccaccuccgagcaggagaagcgccucaccuggccccgccgcuccuacuccccccgcuccuucgaggacugcggcggcggcuacacccccgacugcuccuccaacgagaaccucaccuccuccgaggaggacuucuccuccggccaguccucccgcgucucccccucccccaccaccuaccgcauguuccgcgacaagucccgcucccccucccagaacucccagcaguccuucgacuccuccuccccccccaccccccagugccacaagcgccaccgccacugccccgucgucgucuccgaggccaccaucgucggcguccgcaagaccggccagaucuggcccaacgacggcgagggcgccuuccacggcgacgccguccucaagaccgaggucccccaccagggcguccgccgcgcccgccucucccucgaggcccucggcgaggaccccuccuuccucuuccccgccuccgacggcccccgccacuccuccaccugguga

SEQ ID NO: 1544 - RNA, 1542 nt, Artificial Sequence
  ABX82712 variant
auggucgaccccgucggcuucgccgaggccuggaaggcccaguuccccgacuccgagcccccccgcauggagcuccgcuccgucggcgacaucgagcaggagcucgagcgcugcaaggccuccauccgccgccucgagcaggaggucaaccaggagcgcuuccgcaugaucuaccuccagacccuccucgccaaggagaagaaguccuacgaccgccagcgcuggggcuuccgccgcgccgcccaggcccccgacggcgccuccgagccccgcgccuccgccucccgcccccagcccgcccccgccgacggcgccgaccccccccccgccgaggagcccgaggcccgccccgacggcgagggcucccccggcaaggcccgccccggcaccgcccgccgccccggcgccgccgccuccggcgagcgcgacgaccgcggcccccccgccuccgucgccgcccuccgcuccaacuucgagcgcauccgcaagggccacggccagcccggcgccgacgccgagaagcccuucuacgucaacgucgaguuccaccacgagcgcggccucgucaaggucaacgacaaggaggucuccgaccgcaucuccucccucggcucccaggccaugcagauggagcgcaagaagucccagcacggcgccggcuccuccgucggcgacgccucccgcccccccuaccgcggccgcuccuccgaguccuccugcggcgucgacggcgacuacgaggacgccgagcucaacccccgcuuccucaaggacaaccucaucgacgccaacggcggcucccgcccccccuggcccccccucgaguaccagcccuaccaguccaucuacgucggcggcaugauggagggcgagggcaagggcccccuccuccgcucccaguccaccuccgagcaggagaagcgccucaccuggccccgccgcuccuacuccccccgcuccuucgaggacugcggcggcggcuacacccccgacugcuccuccaacgagaaccucaccuccuccgaggaggacuucuccuccggccaguccucccgcgucucccccucccccaccaccuaccgcauguuccgcgacaagucccgcucccccucccagaacucccagcaguccuucgacuccuccuccccccccaccccccagugccacaagcgccaccgccacugccccgucgucgucuccgaggccaccaucgucggcguccgcaagaccggccagaucuggcccaacgacggcgagggcgccuuccacggcgacgccgacggcuccuucggcaccccccccggcuacggcugcgccgccgaccgcgccgaggagcagcgccgccaccaggacggccuccccuacaucgacgacucccccuccuccuccccccaccucuccuccaagggccgcggcucccgcgacgcccucgucuccggcgcccucgaguccaccaaggccuccgagcucgaccccgucaagaugacccccaccuucucccuccacugcaugauccucuggcccgucgagaucacccucuga

SEQ ID NO: 1545 - RNA, 1221 nt, Artificial Sequence
  ABX82714 variant
auggucgaccccgucggcuucgccgaggccuggaaggcccaguuccccgacuccgagcccccccgcauggagcuccgcuccgucggcgacaucgagcaggagcucgagcgcugcaaggccuccauccgccgccucgagcaggaggucaaccaggagcgcuuccgcaugaucuaccuccagacccuccucgccaaggagaagaaguccuacgaccgccagcgcuggggcuuccgccgcgccgcccaggcccccgacggcgccuccgagccccgcgccuccgccucccgcccccagcccgcccccgccgacggcgccgaccccccccccgccgaggagcccgaggcccgccccgacggcgagggcucccccggcaaggcccgccccggcaccgcccgccgccccggcgccgccgccuccggcgagcgcgacgaccgcggcccccccgccuccgucgccgcccuccgcuccaacuucgagcgcauccgcaagggccacggccagcccggcgccgacgccgagaagcccuucuacgucaacgucgaguuccaccacgagcgcggccucgucaaggucaacgacaaggaggucuccgaccgcaucuccucccucggcucccaggccaugcagauggagcgcaagaagucccagcacggcgccggcuccuccgucggcgacgccucccgcccccccuaccgcggccgcuccuccgaguccuccugcggcgucgacggcgacuacgaggacgccgagcucaacccccgcuuccucaaggacaaccucaucgacgccaacggcggcucccgcccccccuggcccccccucgaguaccagcccuaccaguccaucuacgucggcggcaugauggagggcgagggcaagggcccccuccuccgcucccaguccaccuccgagcaggagaagcgccucaccuggccccgccgcuccuacuccccccgcuccuucgaggacugcggcggcggcuacacccccgacugcuccuccaacgagaaccucaccuccuccgaggaggacuucuccuccggccaguccucccgcgucucccccucccccaccaccuaccgcauguuccgcgacaagucccgcucccccucccagaacucccagcaguccuucgacuccuccuccccccccaccccccagugccacaagcgccaccgccacugccccgucgucgucuccgaggccaccuccggccaguga

SEQ ID NO: 1546 - RNA, 2346 nt, Artificial Sequence
  AAH58926 variant
auggccacccaggccgaccucauggagcucgacauggccauggagcccgaccgcaaggccgccgucucccacuggcagcagcaguccuaccucgacuccggcauccacuccggcgccaccaccaccgcccccucccucuccggcaagggcaaccccgaggaggaggacgucgacaccucccagguccucuacgagugggagcagggcuucucccaguccuucacccaggagcaggucgccgacaucgacggccaguacgccaugacccgcgcccagcgcguccgcgccgccauguuccccgagacccucgacgagggcaugcagauccccuccacccaguucgacgccgcccaccccaccaacguccagcgccucgccgagcccucccagaugcucaagcacgccgucgucaaccucaucaacuaccaggacgacgccgagcucgccacccgcgccauccccgagcucaccaagcuccucaacgacgaggaccaggucgucgucaacaaggccgccgucaugguccaccagcucuccaagaaggaggccucccgccacgccaucaugcgcuccccccagauggucuccgccaucguccgcaccaugcagaacaccaacgacgucgagaccgcccgcugcaccgccggcacccuccacaaccucucccaccaccgcgagggccuccucgccaucuucaaguccggcggcauccccgcccucgucaagaugcucggcucccccgucgacuccguccucuucuacgccaucaccacccuccacaaccuccuccuccaccaggagggcgccaagauggccguccgccucgccggcggccuccagaagauggucgcccuccucaacaagaccaacgucaaguuccucgccaucaccaccgacugccuccagauccucgccuacggcaaccaggaguccaagcucaucauccucgccuccggcggcccccaggcccucgucaacaucaugcgcaccuacaccuacgagaagcuccucuggaccaccucccgcguccucaagguccucuccgucugcuccuccaacaagcccgccaucgucgaggccggcggcaugcaggcccucggccuccaccucaccgaccccucccagcgccucguccagaacugccucuggacccuccgcaaccucuccgacgccgccaccaagcaggagggcauggagggccuccucggcacccucguccagcuccucggcuccgacgacaucaacgucgucaccugcgccgccggcauccucuccaaccucaccugcaacaacuacaagaacaagaugauggucugccaggucggcggcaucgaggcccucguccgcaccguccuccgcgccggcgaccgcgaggacaucaccgagcccgccaucugcgcccuccgccaccucaccucccgccaccaggaggccgagauggcccagaacgccguccgccuccacuacggccuccccgucgucgucaagcuccuccacccccccucccacuggccccucaucaaggccaccgucggccucauccgcaaccucgcccucugccccgccaaccacgccccccuccgcgagcagggcgccaucccccgccucguccagcuccucguccgcgcccaccaggacacccagcgccgcaccuccaugggcggcacccagcagcaguucgucgagggcguccgcauggaggagaucgucgagggcugcaccggcgcccuccacauccucgcccgcgacguccacaaccgcaucgucauccgcggccucaacaccaucccccucuucguccagcuccucuacucccccaucgagaacauccagcgcgucgccgccggcguccucugcgagcucgcccaggacaaggaggccgccgaggccaucgaggccgagggcgccaccgccccccucaccgagcuccuccacucccgcaacgagggcgucgccaccuacgccgccgccguccucuuccgcauguccgaggacaagccccaggacuacaagaagcgccucuccgucgagcucaccuccucccucuuccgcaccgagcccauggccuggaacgagaccgccgaccucggccucgacaucggcgcccagggcgagccccucggcuaccgccaggacgaccccuccuaccgcuccuuccacuccggcggcuacggccaggacgcccucggcauggaccccaugauggagcacgagaugggcggccaccaccccggcgccgacuaccccgucgacggccuccccgaccucggccacgcccaggaccucauggacggccucccccccggcgacuccaaccagcucgccugguucgacaccgaccucuga

SEQ ID NO: 1547 - RNA, 1692 nt, Artificial Sequence
  AAI21007 variant
auggacgucggcgagcuccucuccuaccagcccaaccgcggcaccaagcgcccccgcgacgacgaggaggaggagcagaagaugcgccgcaagcagaccggcacccgcgagcgcggccgcuaccgcgaggaggagaugaccgucgucgaggaggccgacgacgacaagaagcgccuccuccagaucaucgaccgcgacggcgaggaggaggaggaggaggaggagccccucgacgaguccuccgucaagaagaugauccucaccuucgagaagcgcuccuacaagaaccaggagcuccgcaucaaguuccccgacaaccccgagaaguucauggaguccgagcucgaccucaacgacaucauccaggagaugcacgucgucgccaccaugcccgaccucuaccaccuccucgucgagcucaacgccguccagucccuccucggccuccucggccacgacaacaccgacgucuccaucgccgucgucgaccuccuccaggagcucaccgacaucgacacccuccacgaguccgaggagggcgccgagguccucaucgacgcccucgucgacggccaggucgucgcccuccucguccagaaccucgagcgccucgacgaguccgucaaggaggaggccgacggcguccacaacacccucgccaucgucgagaacauggccgaguuccgccccgagaugugcaccgagggcgcccagcagggccuccuccaguggcuccucaagcgccucaaggccaagaugcccuucgacgccaacaagcucuacugcuccgagguccucgccauccuccuccaggacaacgacgagaaccgcgagcuccucggcgagcucgacggcaucgacguccuccuccagcagcucuccgucuucaagcgccacaaccccuccaccgccgaggagcaggagaugauggagaaccucuucgacucccucugcuccugccucaugcucuccuccaaccgcgagcgcuuccucaagggcgagggccuccagcucaugaaccucaugcuccgcgagaagaagaucucccgcuccuccgcccucaagguccucgaccacgccaugaucggccccgagggcaccgacaacugccacaaguucgucgacauccucggccuccgcaccaucuucccccucuucaugaaguccccccgcaagaucaagaaggucggcaccaccgagaaggagcacgaggagcacgucugcuccauccucgccucccuccuccgcaaccuccgcggccagcagcgcacccgccuccucaacaaguucaccgagaacgacuccgagaaggucgaccgccucauggagcuccacuucaaguaccucggcgccaugcaggucgccgacaagaagaucgagggcgagaagcacgacaugguccgccgcggcgagaucaucgacaacgacaccgaggaggaguucuaccuccgccgccucgacgccggccucuucguccuccagcacaucugcuacaucauggccgagaucugcaacgccaacgucccccagauccgccagcgcguccaccagauccucaacaugcgcggcuccuccaucaagaucguccgccacaucaucaaggaguacgccgagaacaucggcgacggccgcucccccgaguuccgcgagaacgagcagaagcgcauccucggccuccucgagaacuucuga

SEQ ID NO: 1548 - RNA, 1833 nt, Artificial Sequence
  CCDS4772.1 variant
auggagaccgcccccaagcccggcaaggacgucccccccaagaaggacaagcuccagaccaagcgcaagaagccccgccgcuacugggaggaggagaccguccccaccaccgccggcgccucccccggccccccccgcaacaagaagaaccgcgagcuccgcccccagcgccccaagaacgccuacauccucaagaagucccgcaucuccaagaagccccagguccccaagaagccccgcgaguggaagaaccccgagucccagcgcggccucuccggcacccaggaccccuuccccggccccgcccccguccccgucgaggucguccagaaguucugccgcaucgacaagucccgcaagcucccccacuccaaggccaagacccgcucccgccucgaggucgccgaggccgaggaggaggagaccuccaucaaggccgcccgcuccgagcuccuccucgccgaggagcccggcuuccucgagggcgaggacggcgaggacaccgccaagaucugccaggccgacaucgucgaggccgucgacaucgccuccgccgccaagcacuucgaccucaaccuccgccaguucggccccuaccgccucaacuacucccgcaccggccgccaccucgccuucggcggccgccgcggccacgucgccgcccucgacugggucaccaagaagcucaugugcgagaucaacgucauggaggccguccgcgacauccgcuuccuccacuccgaggcccuccucgccgucgcccagaaccgcuggcuccacaucuacgacaaccagggcaucgagcuccacugcauccgccgcugcgaccgcgucacccgccucgaguuccuccccuuccacuuccuccucgccaccgccuccgagaccggcuuccucaccuaccucgacgucuccgucggcaagaucgucgccgcccucaacgcccgcgccggccgccucgacgucaugucccagaaccccuacaacgccgucauccaccucggccacuccaacggcaccgucucccucuggucccccgccaugaaggagccccucgccaagauccucugccaccgcggcggcguccgcgccgucgccgucgacuccaccggcaccuacauggccaccuccggccucgaccaccagcucaagaucuucgaccuccgcggcaccuaccagccccucuccacccgcacccucccccacggcgccggccaccucgccuucucccagcgcggccuccucgucgccggcaugggcgacgucgucaacaucugggccggccagggcaaggccuccccccccucccucgagcagcccuaccucacccaccgccucuccggccccguccacggccuccaguucugccccuucgaggacguccucggcgucggccacaccggcggcaucaccuccaugcucguccccggcgccggcgagcccaacuucgacggccucgaguccaaccccuaccgcucccgcaagcagcgccaggagugggaggucaaggcccuccucgagaagguccccgccgagcucaucugccucgacccccgcgcccucgccgaggucgacgucaucucccucgagcagggcaagaaggagcagaucgagcgccucggcuacgacccccaggccaaggcccccuuccagcccaagcccaagcagaagggccgcuccuccaccgccucccucgucaagcgcaagcgcaaggucauggacgaggagcaccgcgacaagguccgccagucccuccagcagcagcaccacaaggaggccaaggccaagcccaccggcgcccgccccuccgcccucgaccgcuucguccgcuga

SEQ ID NO: 1549 - RNA, 897 nt, Artificial Sequence
  AAG37878 variant
augggccccaaggacuccgccaagugccuccaccgcggcccccagcccucccacugggccgccggcgacggccccacccaggagcgcugcggcccccgcucccucggcucccccguccucggccucgacaccugccgcgccugggaccacgucgacggccagauccucggccagcuccgcccccucaccgaggaggaggaggaggagggcgccggcgccacccucucccgcggccccgccuuccccggcaugggcuccgaggagcuccgccucgccuccuucuacgacuggccccucaccgccgaggucccccccgagcuccucgccgccgccggcuucuuccacaccggccaccaggacaagguccgcugcuucuucugcuacggcggccuccaguccuggaagcgcggcgacgaccccuggaccgagcacgccaagugguuccccuccugccaguuccuccuccgcuccaagggccgcgacuucguccacuccguccaggagacccacucccagcuccucggcuccugggaccccugggaggagcccgaggacgccgcccccgucgcccccuccguccccgccuccggcuaccccgagcuccccaccccccgccgcgagguccaguccgaguccgcccaggagcccggcggcgucucccccgccgaggcccagcgcgccugguggguccucgagccccccggcgcccgcgacgucgaggcccagcuccgccgccuccaggaggagcgcaccugcaaggucugccucgaccgcgccgucuccaucgucuucguccccugcggccaccucgucugcgccgagugcgcccccggccuccagcucugccccaucugccgcgcccccguccgcucccgcguccgcaccuuccucuccuga

SEQ ID NO: 1550 - RNA, 2280 nt, Artificial Sequence
  EAW60925 variant
auggaccucuccgcccuccgcgucgaggagguccagaacgucaucaacgccaugcagaagauccucgagugccccaucugccucgagcucaucaaggagcccgucuccaccaagugcgaccacaucuucugcaaguucugcaugcucaagcuccucaaccagaagaagggccccucccagugcccccucugcaagaacgacaucaccaagcgcucccuccaggaguccacccgcuucucccagcucgucgaggagcuccucaagaucaucugcgccuuccagcucgacaccggccucgaguacgccaacuccuacaacuucgccaagaaggagaacaacucccccgagcaccucaaggacgaggucuccaucauccaguccaugggcuaccgcaaccgcgccaagcgccuccuccaguccgagcccgagaaccccucccuccaggagaccucccucuccguccagcucuccaaccucggcaccguccgcacccuccgcaccaagcagcgcauccagccccagaagaccuccgucuacaucgagcucggcuccgacuccuccgaggacaccgucaacaaggccaccuacugcuccgucggcgaccaggagcuccuccagaucaccccccagggcacccgcgacgagaucucccucgacuccgccaagaaggccgccugcgaguucuccgagaccgacgucaccaacaccgagcaccaccagcccuccaacaacgaccucaacaccaccgagaagcgcgccgccgagcgccaccccgagaaguaccagggcgaggccgccuccggcugcgaguccgagaccuccgucuccgaggacugcuccggccucuccucccaguccgacauccucaccacccagcagcgcgacaccaugcagcacaaccucaucaagcuccagcaggagauggccgagcucgaggccguccucgagcagcacggcucccagcccuccaacuccuaccccuccaucaucuccgacuccuccgcccucgaggaccuccgcaaccccgagcaguccaccuccgagaagguccucaccucccagaaguccuccgaguaccccaucucccagaaccccgagggccucuccgccgacaaguucgaggucuccgccgacuccuccaccuccaagaacaaggagcccggcgucgagcgcuccucccccuccaagugccccucccucgacgaccgcugguacaugcacuccugcuccggcucccuccagaaccgcaacuaccccucccaggaggagcucaucaaggucgucgacgucgaggagcagcagcucgaggaguccggcccccacgaccucaccgagaccuccuaccucccccgccaggaccucgagggcacccccuaccucgaguccggcaucucccucuucuccgacgaccccgaguccgaccccuccgaggaccgcgcccccgaguccgcccgcgucggcaacauccccuccuccaccuccgcccucaaggucccccagcucaaggucgccgaguccgcccagucccccgccgccgcccacaccaccgacaccgccggcuacaacgccauggaggaguccgucucccgcgagaagcccgagcucaccgccuccaccgagcgcgucaacaagcgcauguccauggucgucuccggccucacccccgaggaguucaugcucgucuacaaguucgcccgcaagcaccacaucacccucaccaaccucaucaccgaggagaccacccacgucgucaugaagaccgacgccgaguucgucugcgagcgcacccucaaguacuuccucggcaucgccggcggcaagugggucgucuccuacuucugggucacccaguccaucaaggagcgcaagaugcucaacgagcacgacuucgagguccgcggcgacgucgucaacggccgcaaccaccagggccccaagcgcgcccgcgagucccaggaccgcaagaucuuccgcggccucgagaucugcugcuacggccccuucaccaacaugcccaccgaccagcucgaguggaugguccagcucugcggcgccuccgucgucaaggagcucuccuccuucacccucggcaccggcguccaccccaucgucgucguccagcccgacgccuggaccgaggacaacggcuuccacgccaucggccagaugugcgaggcccccgucgucacccgcgaguggguccucgacuccgucgcccucuaccagugccaggagcucgacaccuaccucaucccccagaucccccacucccacuacuga

SEQ ID NO: 1551 - RNA, 2160 nt, Artificial Sequence
  EAW60922 variant
auggaccucuccgcccuccgcgucgaggagguccagaacgucaucaacgccaugcagaagauccucgagugccccaucugccucgagcucaucaaggagcccgucuccaccaagugcgaccacaucuucugcaaguucugcaugcucaagcuccucaaccagaagaagggccccucccagugcccccucugcaagaacgacaucaccaagcgcucccuccaggaguccacccgcuucucccagcucgucgaggagcuccucaagaucaucugcgccuuccagcucgacaccggccucgaguacgccaacuccuacaacuucgccaagaaggagaacaacucccccgagcaccucaaggacgaggucuccaucauccaguccaugggcuaccgcaaccgcgccaagcgccuccuccaguccgagcccgagaaccccucccuccaggagaccucccucuccguccagcucuccaaccucggcaccguccgcacccuccgcaccaagcagcgcauccagccccagaagaccuccgucuacaucgagcucgccgccugcgaguucuccgagaccgacgucaccaacaccgagcaccaccagcccuccaacaacgaccucaacaccaccgagaagcgcgccgccgagcgccaccccgagaaguaccagggcgaggccgccuccggcugcgaguccgagaccuccgucuccgaggacugcuccggccucuccucccaguccgacauccucaccacccagcagcgcgacaccaugcagcacaaccucaucaagcuccagcaggagauggccgagcucgaggccguccucgagcagcacggcucccagcccuccaacuccuaccccuccaucaucuccgacuccuccgcccucgaggaccuccgcaaccccgagcaguccaccuccgagaaggccguccucaccucccagaaguccuccgaguaccccaucucccagaaccccgagggccucuccgccgacaaguucgaggucuccgccgacuccuccaccuccaagaacaaggagcccggcgucgagcgcuccucccccuccaagugccccucccucgacgaccgcugguacaugcacuccugcuccggcucccuccagaaccgcaacuaccccucccaggaggagcucaucaaggucgucgacgucgaggagcagcagcucgaggaguccggcccccacgaccucaccgagaccuccuaccucccccgccaggaccucgagggcacccccuaccucgaguccggcaucucccucuucuccgacgaccccgaguccgaccccuccgaggaccgcgcccccgaguccgcccgcgucggcaacauccccuccuccaccuccgcccucaaggucccccagcucaaggucgccgaguccgcccagucccccgccgccgcccacaccaccgacaccgccggcuacaacgccauggaggaguccgucucccgcgagaagcccgagcucaccgccuccaccgagcgcgucaacaagcgcauguccauggucgucuccggccucacccccgaggaguucaugcucgucuacaaguucgcccgcaagcaccacaucacccucaccaaccucaucaccgaggagaccacccacgucgucaugaagaccgacgccgaguucgucugcgagcgcacccucaaguacuuccucggcaucgccggcggcaagugggucgucuccuacuucugggucacccaguccaucaaggagcgcaagaugcucaacgagcacgacuucgagguccgcggcgacgucgucaacggccgcaaccaccagggccccaagcgcgcccgcgagucccaggaccgcaagaucuuccgcggccucgagaucugcugcuacggccccuucaccaacaugcccaccgaccagcucgaguggaugguccagcucugcggcgccuccgucgucaaggagcucuccuccuucacccucggcaccggcguccaccccaucgucgucguccagcccgacgccuggaccgaggacaacggcuuccacgccaucggccagaugugcgaggcccccgucgucacccgcgaguggguccucgacuccgucgcccucuaccagugccaggagcucgacaccuaccucaucccccagaucccccacucccacuacuga

SEQ ID NO: 1552 - RNA, 2166 nt, Artificial Sequence
  EAW60923 variant
auggaccucuccgcccuccgcgucgaggagguccagaacgucaucaacgccaugcagaagauccucgagugccccaucugccucgagcucaucaaggagcccgucuccaccaagugcgaccacaucuucugcaaguucugcaugcucaagcuccucaaccagaagaagggccccucccagugcccccucugcaagaacgacaucaccaagcgcucccuccaggaguccacccgcuucucccagcucgucgaggagcuccucaagaucaucugcgccuuccagcucgacaccggccucgaguacgccaacuccuacaacuucgccaagaaggagaacaacucccccgagcaccucaaggacgaggucuccaucauccaguccaugggcuaccgcaaccgcgccaagcgccuccuccaguccgagcccgagaaccccucccuccaggagaccucccucuccguccagcucuccaaccucggcaccguccgcacccuccgcaccaagcagcgcauccagccccagaagaccuccgucuacaucgagcucggcuccgacuccuccgaggacaccgucaacaaggccaccuacugcuccgucggcgaccaggagcuccuccagaucaccccccagggcacccgcgacgagaucucccucgacuccgccaagaagggcgaggccgccuccggcugcgaguccgagaccuccgucuccgaggacugcuccggccucuccucccaguccgacauccucaccacccagcagcgcgacaccaugcagcacaaccucaucaagcuccagcaggagauggccgagcucgaggccguccucgagcagcacggcucccagcccuccaacuccuaccccuccaucaucuccgacuccuccgcccucgaggaccuccgcaaccccgagcaguccaccuccgagaaggccguccucaccucccagaaguccuccgaguaccccaucucccagaaccccgagggccucuccgccgacaaguucgaggucuccgccgacuccuccaccuccaagaacaaggagcccggcgucgagcgcuccucccccuccaagugccccucccucgacgaccgcugguacaugcacuccugcuccggcucccuccagaaccgcaacuaccccucccaggaggagcucaucaaggucgucgacgucgaggagcagcagcucgaggaguccggcccccacgaccucaccgagaccuccuaccucccccgccaggaccucgagggcacccccuaccucgaguccggcaucucccucuucuccgacgaccccgaguccgaccccuccgaggaccgcgcccccgaguccgcccgcgucggcaacauccccuccuccaccuccgcccucaaggucccccagcucaaggucgccgaguccgcccagucccccgccgccgcccacaccaccgacaccgccggcuacaacgccauggaggaguccgucucccgcgagaagcccgagcucaccgccuccaccgagcgcgucaacaagcgcauguccauggucgucuccggccucacccccgaggaguucaugcucgucuacaaguucgcccgcaagcaccacaucacccucaccaaccucaucaccgaggagaccacccacgucgucaugaagaccgacgccgaguucgucugcgagcgcacccucaaguacuuccucggcaucgccggcggcaagugggucgucuccuacuucugggucacccaguccaucaaggagcgcaagaugcucaacgagcacgacuucgagguccgcggcgacgucgucaacggccgcaaccaccagggccccaagcgcgcccgcgagucccaggaccgcaagaucuuccgcggccucgagaucugcugcuacggccccuucaccaacaugcccaccgaccagcucgaguggaugguccagcucugcggcgccuccgucgucaaggagcucuccuccuucacccucggcaccggcguccaccccaucgucgucguccagcccgacgccuggaccgaggacaacggcuuccacgccaucggccagaugugcgaggcccccgucgucacccgcgaguggguccucgacuccgucgcccucuaccagugccaggagcucgacaccuaccucaucccccagaucccccacucccacuacuga

SEQ ID NO: 1553 - RNA, 36 nt, Artificial Sequence
  AIC83575 variant
auggaccucuccgcccuccgcgucgaggaggucuga

SEQ ID NO: 1554 - RNA, 522 nt, Artificial Sequence
  ABC59810 variant
auggacgccgaguucgucugcgagcgcacccucaaguacuuccucggcaucgccggcggcaagugggucgucuccuacuucugggucacccaguccaucaaggagcgcaagaugcucaacgagcacgacuucgagguccgcggcgacgucgucaacggccgcaaccaccagggccccaagcgcgcccgcgagucccaggaccgcaagaucuuccgcggccucgagaucugcugcuacggccccuucaccaacaugcccaccgaccagcucgaguggaugguccagcucugcggcgccuccgucgucaaggagcucuccuccuucacccucggcaccggcguccaccccaucgucgucguccagcccgacgccuggaccgaggacaacggcuuccacgccaucggccagaugugcgaggcccccgucgucacccgcgaguggguccucgacuccgucgcccucuaccagugccaggagcucgacaccuaccucaucccccagaucccccacucccacuacuga

SEQ ID NO: 1555 - RNA, 1065 nt, Artificial Sequence
  ABC88652 variant
augcacuccugcuccggcucccuccagaaccgcaacuaccccucccaggaggagcucaucaaggucgucgacgucgaggagcagcagcucgaggaguccggcccccacgaccucaccgagaccuccuaccucccccgccaggaccucgagggcacccccuaccucgaguccggcaucucccucuucuccgacgaccccgaguccgaccccuccgaggaccgcgcccccgaguccgcccgcgucggcaacauccccuccuccaccuccgcccucaaggucccccagcucaaggucgccgaguccgcccagggccccgccgccgcccacaccaccgacaccgccggcuacaacgccauggaggaguccgucucccgcgagaagcccgagcucaccgccuccaccgagcgcgucaacaagcgcauguccauggucgucuccggccucacccccgaggaguucaugcucgucuacaaguucgcccgcaagcaccacaucacccucaccaaccucaucaccgaggagaccacccacgucgucaugaagaccgacgccgaguucgucugcgagcgcacccucaaguacuuccucggcaucgccggcggcaagugggucgucuccuacuucugggucacccaguccaucaaggagcgcaagaugcucaacgagcacgacuucgagguccgcggcgacgucgucaacggccgcaaccaccagggccccaagcgcgcccgcgagucccaggaccgcaagaucuuccgcggccucgagaucugcugcuacggccccuucaccaacaugcccaccgaccagcucgaguggaugguccagcucugcggcgccuccgucgucaaggagcucuccuccuucacccucggcaccggcguccaccccaucgucgucguccagcccgacgccuggaccgaggacaacggcuuccacgccaucggccagaugugcgagacccccgucgucacccgcgaguggguccucgacuccgucgcccucuaccagugccaggagcucgacaccuaccucaucccccagaucccccacucccacuacuga

SEQ ID NO: 1556 - RNA, 2043 nt, Artificial Sequence
  EAW60939 variant
auggaccucuccgcccuccgcgucgaggagguccagaacgucaucaacgccaugcagaagauccucgagugccccaucugccucgagcucaucaaggagcccgucuccaccaagugcgaccacaucuucugcaaguucugcaugcucaagcuccucaaccagaagaagggccccucccagugcccccucugcaagaacgacaucaccaagcgcucccuccaggaguccacccgcuucucccagcucgucgaggagcuccucaagaucaucugcgccuuccagcucgacaccggccucgaguacgccaacuccuacaacuucgccaagaaggagaacaacucccccgagcaccucaaggacgaggucuccaucauccaguccaugggcuaccgcaaccgcgccaagcgccuccuccaguccgagcccgagaaccccucccuccaggagaccucccucuccguccagcucuccaaccucggcaccguccgcacccuccgcaccaagcagcgcauccagccccagaagaccuccgucuacaucgagcucggcgaggccgccuccggcugcgaguccgagaccuccgucuccgaggacugcuccggccucuccucccaguccgacauccucaccacccagcagcgcgacaccaugcagcacaaccucaucaagcuccagcaggagauggccgagcucgaggccguccucgagcagcacggcucccagcccuccaacuccuaccccuccaucaucuccgacuccuccgcccucgaggaccuccgcaaccccgagcaguccaccuccgagaaggccguccucaccucccagaaguccuccgaguaccccaucucccagaaccccgagggccucuccgccgacaaguucgaggucuccgccgacuccuccaccuccaagaacaaggagcccggcgucgagcgcuccucccccuccaagugccccucccucgacgaccgcugguacaugcacuccugcuccggcucccuccagaaccgcaacuaccccucccaggaggagcucaucaaggucgucgacgucgaggagcagcagcucgaggaguccggcccccacgaccucaccgagaccuccuaccucccccgccaggaccucgagggcacccccuaccucgaguccggcaucucccucuucuccgacgaccccgaguccgaccccuccgaggaccgcgcccccgaguccgcccgcgucggcaacauccccuccuccaccuccgcccucaaggucccccagcucaaggucgccgaguccgcccagucccccgccgccgcccacaccaccgacaccgccggcuacaacgccauggaggaguccgucucccgcgagaagcccgagcucaccgccuccaccgagcgcgucaacaagcgcauguccauggucgucuccggccucacccccgaggaguucaugcucgucuacaaguucgcccgcaagcaccacaucacccucaccaaccucaucaccgaggagaccacccacgucgucaugaagaccgacgccgaguucgucugcgagcgcacccucaaguacuuccucggcaucgccggcggcaagugggucgucuccuacuucugggucacccaguccaucaaggagcgcaagaugcucaacgagcacgacuucgagguccgcggcgacgucgucaacggccgcaaccaccagggccccaagcgcgcccgcgagucccaggaccgcaagaucuuccgcggccucgagaucugcugcuacggccccuucaccaacaugcccaccgaccagcucgaguggaugguccagcucugcggcgccuccgucgucaaggagcucuccuccuucacccucggcaccggcguccaccccaucgucgucguccagcccgacgccuggaccgaggacaacggcuuccacgccaucggccagaugugcgaggcccccgucgucacccgcgaguggguccucgacuccgucgcccucuaccagugccaggagcucgacaccuaccucaucccccagaucccccacucccacuacuga

SEQ ID NO: 1557 - RNA, 546 nt, Artificial Sequence
  AAC72302 variant
augcuccucgagcccggccgcggcugcugcgcccucgccauccuccucgccaucgucgacauccaguccggcggcugcaucaacaucaccuccuccgccucccaggagggcacccgccucaaccucaucugcaccgucuggcacaagaaggaggaggccgagggcuucgucgucuuccucugcaaggaccgcuccggcgacugcucccccgagaccucccucaagcagcuccgccucaagcgcgaccccggcaucgacggcgucggcgagaucuccucccagcucauguucaccaucucccaggucaccccccuccacuccggcaccuaccagugcugcgcccgcucccagaaguccggcauccgccuccagggccacuucuucuccauccucuucaccgagaccggcaacuacaccgucaccggccucaagcagcgccagcaccucgaguucucccacaacgagggcacccucuccuccggcuuccuccaggagaaggucugggucaugcucgucaccucccucgucgcccuccaggcccucuga

SEQ ID NO: 1558 - RNA, 639 nt, Artificial Sequence
  BAG58223 variant
augcuccucuccgucuacuucaaggagcaguuccucgacggcgacggcuggaccucccgcuggaucgaguccaagcacaaguccgacuucggcaaguucguccucuccuccggcaaguucuacggcgacgaggagaaggacaagggccuccagaccucccaggacgcccgcuucuacgcccucuccgccuccuucgagcccuucuccaacaagggccagacccucgucguccaguucaccgucaagcacgagcagaacaucgacugcggcggcggcuacgucaagcucuuccccaacucccucgaccagaccgacaugcacggcgacuccgaguacaacaucauguucggccccgacaucugcggccccggcaccaagaagguccacgucaucuucaacuacaagggcaagaacguccucaucaacaaggacauccgcugcaaggacgacgaguucacccaccucuacacccucaucguccgccccgacaacaccuacgaggucaagaucgacaacucccaggucgaguccggcucccucgaggacgacugggacuuccucccccccaagaagaucaaggaccccgacgccuccaagcccgaggacugggacgagcgcgccaagaucgacgaccccuga

SEQ ID NO: 1559 - RNA, 891 nt, Artificial Sequence
  BAG65301 variant
augcacggcgacuccgaguacaacaucauguucggccccgacaucugcggccccggcaccaagaagguccacgucaucuucaacuacaagggcaagaacguccucaucaacaaggacauccgcugcaaggacgacgaguucacccaccucuacacccucaucguccgccccgacaacaccuacgaggucaagaucgacaacucccaggucgaguccggcucccucgaggacgacugggacuuccucccccccaagaagaucaaggaccccgacgccuccaagcccgaggacugggacgagcgcgccaagaucgacgaccccaccgacuccaagcccgaggacugggacaagcccgagcacauccccgaccccgacgccaagaagcccgaggacugggacgaggagauggacggcgagugggagccccccgucauccagaaccccgaguacaagggcgaguggaagccccgccagaucgacaaccccgacuacaagggcaccuggauccaccccgagaucgacaaccccgaguacucccccgaccccuccaucuacgccuacgacaacuucggcguccucggccucgaccucuggcaggucaaguccggcaccaucuucgacaacuuccucaucaccaacgacgaggccuacgccgaggaguucggcaacgagaccuggggcgucaccaaggccgccgagaagcagaugaaggacaagcaggacgaggagcagcgccucaaggaggaggaggaggacaagaagcgcaaggaggaggaggaggccgaggacaaggaggacgacgaggacaaggacgaggacgaggaggacgaggaggacaaggaggaggacgaggaggaggacguccccggccaggccaaggacgagcucuga

SEQ ID NO: 1560 - RNA, 1254 nt, Artificial Sequence
  AAA36582 variant
augcuccucuccgucccccuccuccucggccuccucggccucgccgucgccgagcccgccgucuacuucaaggagcaguuccucgacggcgacggcuggaccucccgcuggaucgaguccaagcacaaguccgacuucggcaaguucguccucuccuccggcaaguucuacggcgacgaggagaaggacaagggccuccagaccucccaggacgcccgcuucuacgcccucuccgccuccuucgagcccuucuccaacaagggccagacccucgucguccaguucaccgucaagcacgagcagaacaucgacugcggcggcggcuacgucaagcucuuccccaacucccucgaccagaccgacaugcacggcgacuccgaguacaacaucauguucggccccgacaucugcggccccggcaccaagaagguccacgucaucuucaacuacaagggcaagaacguccucaucaacaaggacauccgcugcaaggacgacgaguucacccaccucuacacccucaucguccgccccgacaacaccuacgaggucaagaucgacaacucccaggucgaguccggcucccucgaggacgacugggacuuccucccccccaagaagaucaaggaccccgacgccuccaagcccgaggacugggacgagcgcgccaagaucgacgaccccaccgacuccaagcccgaggacugggacaagcccgagcacauccccgaccccgacgccaagaagcccgaggacugggacgaggagauggacggcgagugggagccccccgucauccagaaccccgaguacaagggcgaguggaagccccgccagaucgacaaccccgacuacaagggcaccuggauccaccccgagaucgacaaccccgaguacucccccgaccccuccaucuacgccuacgacaacuucggcguccucggccucgaccucuggcaggucaaguccggcaccaucuucgacaacuuccucaucaccaacgacgaggccuacgccgaggaguucggcaacgagaccuggggcgucaccaaggccgccgagaagcagaugaaggacaagcaggacgaggagcagcgccucaaggaggaggaggaggacaagaagcgcaaggaggaggaggaggccgaggacaaggaggacgacgaggacaaggacgaggacgaggaggacgaggaggacaaggaggaggacgaggaggaggacguccccggccaggccaaggacgagcucuga

SEQ ID NO: 1561 - RNA, 1155 nt, Artificial Sequence
  BAB71655 variant
auggcccgcgcccucguccagcucugggccaucugcaugcuccgcgucgcccucgccaccgucuacuuccaggaggaguuccucgacggcgagcacuggcgcaaccgcuggcuccaguccaccaacgacucccgcuucggccacuuccgccucuccuccggcaaguucuacggccacaaggagaaggacaagggccuccagaccacccagaacggccgcuucuacgccaucuccgcccgcuucaagcccuucuccaacaagggcaagacccucgucauccaguacaccgucaagcacgagcagaagauggacugcggcggcggcuacaucaaggucuuccccgccgacaucgaccagaagaaccucaacggcaagucccaguacuacaucauguucggccccgacaucugcggcuucgacaucaagaagguccacgucauccuccacuucaagaacaaguaccacgagaacaagaagcucauccgcugcaaggucgacggcuucacccaccucuacacccucauccuccgccccgaccucuccuacgacgucaagaucgacggccaguccaucgaguccggcuccaucgaguacgacuggaaccucaccucccucaagaaggagaccucccccgccgaguccaaggacugggagcagaccaaggacaacaaggcccaggacugggagaagcacuuccucgacgccuccaccuccaagcaguccgacuggaacggcgaccucgacggcgacuggcccgcccccaugcuccagaagccccccuaccaggacggccucaagcccgagggcauccacaaggacgucuggcuccaccgcaagaugaagaacaccgacuaccucacccaguacgaccucuccgaguucgagaacaucggcgccaucggccucgagcucuggcagguccgcuccggcaccaucuucgacaacuuccucaucaccgacgacgaggaguacgccgacaacuucggcaaggccaccuggggcgagaccaagggccccgagcgcgagauggacgccauccaggccaaggaggagaugaagaaggcccgcgaggaggaggaggaggagcuccucuccggcaagaucaaccgccacgagcacuacuucaaccaguuccaccgccgcaacgagcucuga

SEQ ID NO: 1562 - RNA, 330 nt, Artificial Sequence
  CAA10193 variant
augcucauggcccaggaggcccucgccuuccucauggcccagggcgccaugcucgccgcccaggagcgccgcgucccccgcgccgccgagguccccggcgcccagggccagcagggcccccgcggccgcgaggaggccccccgcggcguccgcauggccgucccccuccuccgccgcauggagggcgcccccgccggccccggcggccgcaccgccgccugcuucuccugcaccucccgcugccucucccgccgccccuggaagcgcuccugguccgccggcuccugccccggcaugccccaccucucccccgaccagggccgcuucuga

SEQ ID NO: 1563 - RNA, 1440 nt, Artificial Sequence
  CAA66853 variant
auggacuucucccgcaaccucuacgacaucggcgagcagcucgacuccgaggaccucgccucccucaaguuccucucccucgacuacaucccccagcgcaagcaggagcccaucaaggacgcccucaugcucuuccagcgccuccaggagaagcgcaugcucgaggaguccaaccucuccuuccucaaggagcuccucuuccgcaucaaccgccucgaccuccucaucaccuaccucaacacccgcaaggaggagauggagcgcgagcuccagacccccggccgcgcccagaucuccgccuaccgcgucaugcucuaccagaucuccgaggaggucucccgcuccgagcuccgcuccuucaaguuccuccuccaggaggagaucuccaagugcaagcucgacgacgacaugaaccuccucgacaucuucaucgagauggagaagcgcgucauccucggcgagggcaagcucgacauccucaagcgcgucugcgcccagaucaacaagucccuccucaagaucaucaacgacuacgaggaguucuccaaggagcgcuccuccucccucgagggcucccccgacgaguucuccaacggcgaggagcucugcggcgucaugaccaucuccgacuccccccgcgagcaggacuccgagucccagacccucgacaaggucuaccagaugaaguccaagccccgcggcuacugccucaucaucaacaaccacaacuucgccaaggcccgcgagaagguccccaagcuccacuccauccgcgaccgcaacggcacccaccucgacgccggcgcccucaccaccaccuucgaggagcuccacuucgagaucaagccccacgacgacugcaccgucgagcagaucuacgagauccucaagaucuaccagcucauggaccacuccaacauggacugcuucaucugcugcauccucucccacggcgacaagggcaucaucuacggcaccgacggccaggaggcccccaucuacgagcucaccucccaguucaccggccucaagugccccucccucgccggcaagcccaaggucuucuucauccaggccugccagggcgacaacuaccagaagggcauccccgucgagaccgacuccgaggagcagcccuaccucgagauggaccucuccuccccccagacccgcuacauccccgacgaggccgacuuccuccucggcauggccaccgucaacaacugcgucuccuaccgcaaccccgccgagggcaccugguacauccagucccucugccagucccuccgcgagcgcugcccccgcggcgacgacauccucaccauccucaccgaggucaacuacgaggucuccaacaaggacgacaagaagaacaugggcaagcagaugccccagcccaccuucacccuccgcaagaagcucgucuuccccuccgacuga

SEQ ID NO: 1564 - RNA, 1569 nt, Artificial Sequence
  CCDS2340.1 variant
augaagucccagggccagcacugguacuccuccuccgacaagaacugcaaggucuccuuccgcgagaagcuccucaucaucgacuccaaccucggcguccaggacgucgagaaccucaaguuccucugcaucggccucguccccaacaagaagcucgagaaguccuccuccgccuccgacgucuucgagcaccuccucgccgaggaccuccucuccgaggaggaccccuucuuccucgccgagcuccucuacaucauccgccagaagaagcuccuccagcaccucaacugcaccaaggaggaggucgagcgccuccuccccacccgccagcgcgucucccucuuccgcaaccuccucuacgagcucuccgagggcaucgacuccgagaaccucaaggacaugaucuuccuccucaaggacucccuccccaagaccgagaugaccucccucuccuuccucgccuuccucgagaagcagggcaagaucgacgaggacaaccucaccugccucgaggaccucugcaagaccgucguccccaagcuccuccgcaacaucgagaaguacaagcgcgagaaggccauccagaucgucaccccccccgucgacaaggaggccgaguccuaccagggcgaggaggagcucgucucccagaccgacgucaagaccuuccucgaggcccucccccaggaguccuggcagaacaagcacgccggcuccaacggcaaccgcgccaccaacggcgcccccucccucgucucccgcggcaugcagggcgccuccgccaacacccucaacuccgagaccuccaccaagcgcgccgccgucuaccgcaugaaccgcaaccaccgcggccucugcgucaucgucaacaaccacuccuucaccucccucaaggaccgccagggcacccacaaggacgccgagauccucucccacgucuuccaguggcucggcuucaccguccacauccacaacaacgucaccaaggucgagauggagaugguccuccagaagcagaagugcaaccccgcccacgccgacggcgacugcuucgucuucugcauccucacccacggccgcuucggcgccgucuacuccuccgacgaggcccucauccccauccgcgagaucaugucccacuucaccgcccuccagugcccccgccucgccgagaagcccaagcucuucuucauccaggccugccagggcgaggagauccagcccuccgucuccaucgaggccgacgcccucaaccccgagcaggcccccaccucccuccaggacuccauccccgccgaggccgacuuccuccucggccucgccaccguccccggcuacgucuccuuccgccacgucgaggagggcuccugguacauccagucccucugcaaccaccucaagaagcucgucccccgccacgaggacauccucuccauccucaccgccgucaacgacgacgucucccgccgcgucgacaagcagggcaccaagaagcagaugccccagcccgccuucacccuccgcaagaagcucgucuuccccgucccccucgacgcccucucccucuga

SEQ ID NO: 1565 - RNA, 1020 nt, Artificial Sequence
  EAW65632 variant
auguggcagcucugggccucccucugcugccuccucguccucgccaacgcccgcucccgccccuccuuccacccccucuccgacgagcucgucaacuacgucaacaagcgcaacaccaccuggcaggccggccacaacuucuacaacgucgacauguccuaccucaagcgccucugcggcaccuuccucggcggccccaagcccccccagcgcgucauguucaccgaggaccucaagcuccccgccuccuucgacgcccgcgagcaguggccccagugccccaccaucaaggagauccgcgaccagggcuccugcggcuccugcugggccuucggcgccgucgaggccaucuccgaccgcaucugcauccacaccaacgcccacgucuccgucgaggucuccgccgaggaccuccucaccugcugcggcuccaugugcggcgacggcugcaacggcggcuaccccgccgaggccuggaacuucuggacccgcaagggccucgucuccggcggccucuacgagucccacgucggcugccgccccuacuccaucccccccugcgagcaccacgucaacggcucccgcccccccugcaccggcgagggcgacacccccaagugcuccaagaucugcgagcccggcuacucccccaccuacaagcaggacaagcacuacggcuacaacuccuacuccgucuccaacuccgagaaggacaucauggccgagaucuacaagaacggccccgucgagggcgccuucuccgucuacuccgacuuccuccucuacaaguccggcgucuaccagcacgucaccggcgagaugaugggcggccacgccauccgcauccucggcuggggcgucgagaacggcacccccuacuggcucgucgccaacuccuggaacaccgacuggggcgacaacggcuucuucaagauccuccgcggccaggaccacugcggcaucgaguccgaggucgucgccggcaucccccgcaccgaccaguacugggagaagaucuga

SEQ ID NO: 1566 - RNA, 1020 nt, Artificial Sequence; identical to SEQ ID NO: 1565
  AAC37547 variant

SEQ ID NO: 1567 - RNA, 1002 nt, Artificial Sequence
  EAW62731 variant
augaaccccacccucauccucgccgccuucugccucggcaucgccuccgccacccucaccuucgaccacucccucgaggcccaguggaccaaguggaaggccaugcacaaccgccucuacggcaugaacgaggagggcuggcgccgcgccgucugggagaagaacaugaagaugaucgagcuccacaaccaggaguaccgcgagggcaagcacuccuucaccauggccaugaacgccuucggcgacaugaccuccgaggaguuccgccaggucaugaacggcuuccagaaccgcaagccccgcaagggcaaggucuuccaggagccccucuucuacgaggccccccgcuccgucgacuggcgcgagaagggcuacgucacccccgucaagaaccagggccagugcggcuccugcugggccuucuccgccaccggcgcccucgagggccagauguuccgcaagaccggccgccucaucucccucuccgagcagaaccucgucgacugcuccggcccccagggcaacgagggcugcaacggcggccucauggacuacgccuuccaguacguccaggacaacggcggccucgacuccgaggaguccuaccccuacgaggccaccgaggaguccugcaaguacaaccccaaguacuccgucgccaacgacaccggcuucgucgacauccccaagcaggagaaggcccucaugaaggccgucgccaccgucggccccaucuccgucgccaucgacgccggccacgaguccuuccucuucuacaaggagggcaucuacuucgagcccgacugcuccuccgaggacauggaccacggcguccucgucgucggcuacggcuucgaguccaccgaguccgacaacaacaaguacuggcucgucaagaacuccuggggcgaggaguggggcaugggcggcuacgucaagauggccaaggaccgccgcaaccacugcggcaucgccuccgccgccuccuaccccaccgucuga

SEQ ID NO: 1568 - RNA, 1002 nt, Artificial Sequence; identical to SEQ ID NO: 1567
  AAA66974 variant

SEQ ID NO: 1569 - RNA, 456 nt, Artificial Sequence
  AAG17239 variant
auggacuacgccuuccaguacguccaggacaacggcggccucgacuccgaggaguccuaccccuacgaggccaccgaggaguccugcaaguacaaccccaaguacuccgucgccaacgacaccggcuucgucgacauccccaagcaggagaaggcccucaugaaggccgucgccaccgucggccccaucuccgucgccaucgacgccggccacgaguccuuccucuucuacaaggagggcaucuacuucgagcccgacugcuccuccgaggacauggaccacggcguccucgucgucggcuacggcuucgaguccaccgaguccgacaacaacaaguacuggcucgucaagaacuccuggggcgaggaguggggcaugggcggcuacgucaagauggccaaggaccgccgcaaccacugcggcaucgccuccgccgccuccuaccccaccgucuga

SEQ ID NO: 1570 - RNA, 984 nt, Artificial Sequence
  AAA51932 variant
augcucuuccuccuccucccccuccucgccguccuccccggcgacggcaacgccgacggccucaaggagccccucuccuuccacgucaccuggaucgccuccuucuacaaccacuccuggaagcagaaccucgucuccggcuggcucuccgaccuccagacccacaccugggacuccaacuccuccaccaucgucuuccucugccccuggucccgcggcaacuucuccaacgaggaguggaaggagcucgagacccucuuccgcauccgcaccauccgcuccuucgagggcauccgccgcuacgcccacgagcuccaguucgaguaccccuucgagauccaggucaccggcggcugcgagcuccacuccggcaaggucuccggcuccuuccuccagcucgccuaccagggcuccgacuucgucuccuuccagaacaacuccuggcuccccuaccccgucgccggcaacauggccaagcacuucugcaagguccucaaccagaaccagcacgagaacgacaucacccacaaccuccucuccgacaccugcccccgcuucauccucggccuccucgacgccggcaaggcccaccuccagcgccaggucaagcccgaggccuggcucucccacggccccucccccggccccggccaccuccagcucgucugccacgucuccggcuucuaccccaagcccgucugggucauguggaugcgcggcgagcaggagcagcagggcacccagcgcggcgacauccuccccuccgccgacggcaccugguaccuccgcgccacccucgaggucgccgccggcgaggccgccgaccucuccugccgcgucaagcacuccucccucgagggccaggacaucguccucuacugggagcaccacuccuccgucggcuucaucauccucgccgucaucgucccccuccuccuccucaucggccucgcccucugguuccgcaagcgcugcuucugcuga

SEQ ID NO: 1571 - RNA, 1002 nt, Artificial Sequence
  AAA51939 variant
augcuccuccuccccuuccagcuccucgccguccucuuccccggcggcaacuccgagcacgccuuccagggccccaccuccuuccacgucauccagaccuccuccuucaccaacuccaccugggcccagacccagggcuccggcuggcucgacgaccuccagauccacggcugggacuccgacuccggcaccgccaucuuccucaagcccugguccaagggcaacuucuccgacaaggaggucgccgagcucgaggagaucuuccgcgucuacaucuucggcuucgcccgcgagguccaggacuucgccggcgacuuccagaugaaguaccccuucgagauccagggcaucgccggcugcgagcuccacuccggcggcgccaucgucuccuuccuccgcggcgcccucggcggccucgacuuccucuccgucaagaacgccuccugcguccccucccccgagggcggcucccgcgcccagaaguucugcgcccucaucauccaguaccagggcaucauggagaccguccgcauccuccucuacgagaccugcccccgcuaccuccucggcguccucaacgccggcaaggccgaccuccagcgccaggucaagcccgaggccuggcucuccuccggccccucccccggccccggccgccuccagcucgucugccacgucuccggcuucuaccccaagcccgucugggucauguggaugcgcggcgagcaggagcagcagggcacccagcucggcgacauccuccccaacgccaacuggaccugguaccuccgcgccacccucgacgucgccgacggcgaggccgccggccucuccugccgcgucaagcacuccucccucgagggccaggacaucauccucuacuggcgcaaccccaccuccaucggcuccaucguccucgccaucaucguccccucccuccuccuccuccucugccucgcccucugguacaugcgccgccgcuccuaccagaacauccccuga

SEQ ID NO: 1572 - RNA, 1002 nt, Artificial Sequence
  AAI26466 variant
augcucuuccuccaguuccuccuccucgcccuccuccuccccggcggcgacaacgccgacgccucccaggagcacgucuccuuccacgucauccagaucuucuccuucgucaaccaguccugggcccgcggccagggcuccggcuggcucgacgagcuccagacccacggcugggacuccgaguccggcaccaucaucuuccuccacaacugguccaagggcaacuucuccaacgaggagcucuccgaccucgagcuccucuuccgcuucuaccucuucggccucacccgcgagauccaggaccacgccucccaggacuacuccaaguaccccuucgagguccaggucaaggccggcugcgagcuccacuccggcaagucccccgagggcuucuuccaggucgccuucaacggccucgaccuccucuccuuccagaacaccaccuggguccccucccccggcugcggcucccucgcccaguccgucugccaccuccucaaccaccaguacgagggcgucaccgagaccgucuacaaccucauccgcuccaccugcccccgcuuccuccucggccuccucgacgccggcaagauguacguccaccgccagguccgccccgaggccuggcucuccucccgccccucccucggcuccggccagcuccuccucgucugccacgccuccggcuucuaccccaagcccgucugggucaccuggaugcgcaacgagcaggagcagcucggcaccaagcacggcgacauccuccccaacgccgacggcaccugguaccuccaggucauccucgaggucgccuccgaggagcccgccggccucuccugccgcguccgccacuccucccucggcggccaggacaucauccucuacuggggccaccacuucuccaugaacuggaucgcccucgucgucaucgucccccucgucauccucaucguccucguccucugguucaagaagcacugcuccuaccaggacauccucuga

SEQ ID NO: 1573 - RNA, 1008 nt, Artificial Sequence
  AAA59672 variant
augggcugccuccucuuccuccuccucugggcccuccuccaggccuggggcuccgccgaggucccccagcgccucuucccccuccgcugccuccagaucuccuccuucgccaacuccuccuggacccgcaccgacggccucgccuggcucggcgagcuccagacccacuccugguccaacgacuccgacaccguccgcucccucaagcccuggucccagggcaccuucuccgaccagcagugggagacccuccagcacaucuuccgcgucuaccgcuccuccuucacccgcgacgucaaggaguucgccaagaugcuccgccucuccuacccccucgagcuccaggucuccgccggcugcgagguccaccccggcaacgccuccaacaacuucuuccacgucgccuuccagggcaaggacauccucuccuuccagggcaccuccugggagcccacccaggaggccccccucugggucaaccucgccauccagguccucaaccaggacaaguggacccgcgagaccguccaguggcuccucaacggcaccugcccccaguucgucuccggccuccucgaguccggcaaguccgagcucaagaagcaggucaagcccaaggccuggcucucccgcggccccucccccggccccggccgccuccuccucgucugccacgucuccggcuucuaccccaagcccgucugggucaaguggaugcgcggcgagcaggagcagcagggcacccagcccggcgacauccuccccaacgccgacgagaccugguaccuccgcgccacccucgacgucgucgccggcgaggccgccggccucuccugccgcgucaagcacuccucccucgagggccaggacaucguccucuacuggggcggcuccuacaccuccaugggccucaucgcccucgccguccucgccugccuccucuuccuccucaucgucggcuucaccucccgcuucaagcgccagaccuccuaccagggcguccucuga

SEQ ID NO: 1574 - RNA, 1167 nt, Artificial Sequence
  EAW52830 variant
augcuccuccucuuccuccucuucgagggccucugcugccccggcgagaacaccgccgccccccaggcccuccaguccuaccaccucgccgccgaggagcagcucuccuuccgcaugcuccagaccuccuccuucgccaaccacuccugggcccacuccgagggcuccggcuggcucggcgaccuccagacccacggcugggacaccguccucggcaccauccgcuuccucaagcccuggucccacggcaacuucuccaagcaggagcucaagaaccuccagucccucuuccagcucuacuuccacuccuucauccagaucguccaggccuccgccggccaguuccagcucgaguaccccuucgagauccagauccucgccggcugccgcaugaacgccccccagaucuuccucaacauggccuaccagggcuccgacuuccucuccuuccagggcaucuccugggagcccucccccggcgccggcauccgcgcccagaacaucugcaagguccucaaccgcuaccucgacaucaaggagauccuccagucccuccucggccacaccugcccccgcuuccucgccggccucauggaggccggcgaguccgagcucaagcgcaaggucaagcccgaggccuggcucuccugcggccccucccccggccccggccgccuccagcucgucugccacgucuccggcuucuaccccaagcccgucugggucauguggaugcgcggcgagcaggagcagcgcggcacccagcgcggcgacguccuccccaacgccgacgagaccugguaccuccgcgccacccucgacgucgccgccggcgaggccgccggccucuccugccgcgucaagcacuccucccucggcggccacgaccucaucauccacuggggcggcuacuccaucuuccucauccucaucugccucaccgucaucgucacccucgucauccucgucgucgucgacucccgccucaagaagcaguccuccaacaagaacauccucuccccccacacccccucccccgucuuccucaugggcgccaacacccaggacaccaagaacucccgccaccaguucugccucgcccaggucuccuggaucaagaaccgcguccucaagaaguggaagacccgccucaaccagcucugguga

SEQ ID NO: 1575 - RNA, 894 nt, Artificial Sequence
  AAA35581 variant
augaccaccccccgcaacuccgucaacggcaccuuccccgccgagcccaugaagggccccaucgccaugcaguccggccccaagccccucuuccgccgcauguccucccucgucggccccacccaguccuucuucaugcgcgaguccaagacccucggcgccguccagaucaugaacggccucuuccacaucgcccucggcggccuccucaugauccccgccggcaucuacgcccccaucugcgucaccgucugguacccccucuggggcggcaucauguacaucaucuccggcucccuccucgccgccaccgagaagaacucccgcaagugccucgucaagggcaagaugaucaugaacucccucucccucuucgccgccaucuccggcaugauccucuccaucauggacauccucaacaucaagaucucccacuuccucaagauggagucccucaacuucauccgcgcccacacccccuacaucaacaucuacaacugcgagcccgccaaccccuccgagaagaacucccccuccacccaguacugcuacuccauccagucccucuuccucggcauccucuccgucaugcucaucuucgccuucuuccaggagcucgucaucgccggcaucgucgagaacgaguggaagcgcaccugcucccgccccaaguccaacaucguccuccucuccgccgaggagaagaaggagcagaccaucgagaucaaggaggaggucgucggccucaccgagaccuccucccagcccaagaacgaggaggacaucgagaucauccccauccaggaggaggaggaggaggagaccgagaccaacuuccccgagcccccccaggaccaggaguccucccccaucgagaacgacuccucccccuga

SEQ ID NO: 1576 - RNA, 1989 nt, Artificial Sequence
  AAC18956 variant
auggaguccaagaccgagaaguggauggagcgcauccaccucaacgucuccgagcgccccuuccccccccacauccagcucccccccgagauccaggagucccaggaggucacccucaccugccuccucaacuucuccugcuacggcuaccccauccagcuccaguggcuccucgagggcguccccaugcgccaggccgccgucaccuccaccucccucaccaucaaguccgucuucacccgcuccgagcucaaguucuccccccaguggucccaccacggcaagaucgucaccugccagcuccaggacgccgacggcaaguuccucuccaacgacaccguccagcucaacgucaagcacacccccaagcucgagaucaaggucacccccuccgacgccaucguccgcgagggcgacuccgucaccaugaccugcgaggucuccuccaccaaccccgaguacaccaccgucuccuggcucaaggacggcaccucccucaagaagcagaacaccuucacccucaaccuccgcgaggucaccaaggaccaguccggcaaguacugcugccaggucuccaacgacgucggccccggccgcuccgaggaggucuuccuccagguccaguacgcccccgagcccuccaccguccagauccuccacucccccgccgucgagggcucccaggucgaguuccucugcaugucccucgccaacccccuccccaccaacuacaccugguaccacaacggcaaggagaugcagggccgcaccgaggagaagguccacauccccaagauccuccccuggcacgccggcaccuacuccugcgucgccgagaacauccucggcaccggccagcgcggccccggcgccgagcucgacguccaguacccccccaagaaggucaccaccgucauccagaaccccaugcccauccgcgagggcgacaccgucacccucuccugcaacuacaacuccuccaaccccuccgucacccgcuacgaguggaagccccacggcgccugggaggagcccucccucggcguccucaagauccagaaggucggcugggacaacaccaccaucgccugcgcccgcugcaacuccuggugcuccugggccucccccgucgcccucaacguccaguacgccccccgcgacguccgcguccgcaagaucaagccccucuccgagauccacuccggcaacuccgucucccuccagugcgacuucuccuccucccaccccaaggagguccaguucuucugggagaagaacggccgccuccucggcaaggagucccagcucaacuucgacuccaucucccccgaggacgccggcuccuacuccugcugggucaacaacuccaucggccagaccgccuccaaggccuggacccucgagguccucuacgccccccgccgccuccgcgucuccaugucccccggcgaccaggucauggagggcaaguccgccacccuccgcugcgaguccgacgccaacccccccgucucccacuacaccugguucgacuggaacaaccagucccuccccuaccacucccagaagcuccgccucgagcccgucaagguccagcacuccggcgccuacuggugccagggcaccaacuccgucggcaagggccgcuccccccucuccacccucaccgucuacuacucccccgagaccaucggccgccgcgucgccgucggccucggcuccugccucgccauccucauccucgccaucugcggccucaagcuccagcgccgcgacgccgaguccuccgagaugcagcgccccccccgcaccugcgacgacaccgucaccuacuccgcccuccacaagcgccaggucggcgacuacgagaacgucauccccgacuuccccgaggacgagggcauccacuacuccgagcucauccaguucggcgucggcgagcgcccccaggcccaggagaacgucgacuacgucauccucaagcacuga

SEQ ID NO: 1577 - RNA, 2544 nt, Artificial Sequence
  AAB06448 variant
augcaccuccucggccccuggcuccuccuccucguccucgaguaccucgccuucuccgacuccuccaagugggucuucgagcaccccgagacccucuacgccugggagggcgccugcgucuggauccccugcaccuaccgcgcccucgacggcgaccucgaguccuucauccucuuccacaaccccgaguacaacaagaacaccuccaaguucgacggcacccgccucuacgaguccaccaaggacggcaagguccccuccgagcagaagcgcguccaguuccucggcgacaagaacaagaacugcacccucuccauccaccccguccaccucaacgacuccggccagcucggccuccgcauggaguccaagaccgagaaguggauggagcgcauccaccucaacgucuccgagcgccccuuccccccccacauccagcucccccccgagauccaggagucccaggaggucacccucaccugccuccucaacuucuccugcuacggcuaccccauccagcuccaguggcuccucgagggcguccccaugcgccaggccgccgucaccuccaccucccucaccaucaaguccgucuucacccgcuccgagcucaaguucuccccccaguggucccaccacggcaagaucgucaccugccagcuccaggacgccgacggcaaguuccucuccaacgacaccguccagcucaacgucaagcacacccccaagcucgagaucaaggucacccccuccgacgccaucguccgcgagggcgacuccgucaccaugaccugcgaggucuccuccuccaaccccgaguacaccaccgucuccuggcucaaggacggcaccucccucaagaagcagaacaccuucacccucaaccuccgcgaggucaccaaggaccaguccggcaaguacugcugccaggucuccaacgacgucggccccggccgcuccgaggaggucuuccuccagguccaguacgcccccgagcccuccaccguccagauccuccacucccccgccgucgagggcucccaggucgaguuccucugcaugucccucgccaacccccuccccaccaacuacaccugguaccacaacggcaaggagaugcagggccgcaccgaggagaagguccacauccccaagauccuccccuggcacgccggcaccuacuccugcgucgccgagaacauccucggcaccggccagcgcggccccggcgccgagcucgacguccaguacccccccaagaaggucaccaccgucauccagaaccccaugcccauccgcgagggcgacaccgucacccucuccugcaacuacaacuccuccaaccccuccgucacccgcuacgaguggaagccccacggcgccugggaggagcccucccucggcguccucaagauccagaacgucggcugggacaacaccaccaucgccugcgccgccugcaacuccuggugcuccugggccucccccgucgcccucaacguccaguacgccccccgcgacguccgcguccgcaagaucaagccccucuccgagauccacuccggcaacuccgucucccuccagugcgacuucuccuccucccaccccaaggagguccaguucuucugggagaagaacggccgccuccucggcaaggagucccagcucaacuucgacuccaucucccccgaggacgccggcuccuacuccugcugggucaacaacuccaucggccagaccgccuccaaggccuggacccucgagguccucuacgccccccgccgccuccgcgucuccaugucccccggcgaccaggucauggagggcaaguccgccacccucaccugcgaguccgacgccaacccccccgucucccacuacaccugguucgacuggaacaaccagucccuccccuaccacucccagaagcuccgccucgagcccgucaagguccagcacuccggcgccuacuggugccagggcaccaacuccgucggcaagggccgcuccccccucuccacccucaccgucuacuacucccccgagaccaucggccgccgcgucgccgucggccucggcuccugccucgccauccucauccucgccaucugcggccucaagcuccagcgccgcuggaagcgcacccagucccagcagggccuccaggagaacuccuccggccaguccuucuucguccgcaacaagaagguccgccgcgccccccucuccgagggcccccacucccucggcugcuacaaccccaugauggaggacggcaucuccuacaccacccuccgcuuccccgagaugaacaucccccgcaccggcgacgccgaguccuccgagaugcagcgccccccccccgacugcgacgacaccgucaccuacuccgcccuccacaagcgccaggucggcgacuacgagaacgucauccccgacuuccccgaggacgagggcauccacuacuccgagcucauccaguucggcgucggcgagcgcccccaggcccaggagaacgucgacuacgucauccucaagcacuga

SEQ ID NO: 1578 - RNA, 2544 nt, Artificial Sequence; identical to SEQ ID NO: 1577
  ABK41939 variant

SEQ ID NO: 1579 - RNA, 1605 nt, Artificial Sequence
  CAE47548 variant
augcuccgccgccgcggcucccccggcaugggcguccacgucggcgccgcccucggcgcccucugguucugccucaccggcgcccucgagguccagguccccgaggaccccgucgucgcccucgucggcaccgacgccacccucugcugcuccuucucccccgagcccggcuucucccucgcccagcucaaccucaucuggcagcucaccgacaccaagcagcucguccacuccuucgccgagggccaggaccagggcuccgccuacgccaaccgcaccgcccucuuccccgaccuccucgcccagggcaacgccucccuccgccuccagcgcguccgcgucgccgacgagggcuccuucaccugcuucgucuccauccgcgacuucggcuccgccgccgucucccuccaggucgccgcccccuacuccaagcccuccaugacccucgagcccaacaaggaccuccgccccggcgacaccgucaccaucaccugcuccuccuaccagggcuaccccgaggccgaggucuucuggcaggacggccagggcgucccccucaccggcaacgucaccaccucccagauggccaacgagcagggccucuucgacguccacuccauccuccgcgucguccucggcgccaacggcaccuacuccugccucguccgcaaccccguccuccagcaggacgcccacuccuccgucaccaucaccccccagcgcucccccaccggcgccgucgagguccagguccccgaggaccccgucgucgcccucgucggcaccgacgccacccuccgcugcuccuucucccccgagcccggcuucucccucgcccagcucaaccucaucuggcagcucaccgacaccaagcagcucguccacuccuucaccgagggccgcgaccagggcuccgccuacgccaaccgcaccgcccucuuccccgaccuccucgcccagggcaacgccucccuccgccuccagcgcguccgcgucgccgacgagggcuccuucaccugcuucgucuccauccgcgacuucggcuccgccgccgucucccuccaggucgccgcccccuacuccaagcccuccaugacccucgagcccaacaaggaccuccgccccggcgacaccgucaccaucaccugcuccuccuaccgcggcuaccccgaggccgaggucuucuggcaggacggccagggcgucccccucaccggcaacgucaccaccucccagauggccaacgagcagggccucuucgacguccacuccguccuccgcgucguccucggcgccaacggcaccuacuccugccucguccgcaaccccguccuccagcaggacgcccacggcuccgucaccaucaccggccagcccaugaccuucccccccgaggcccucugggucaccgucggccucuccgucugccucaucgcccuccucgucgcccucgccuucgucugcuggcgcaagaucaagcaguccugcgaggaggagaacgccggcgccgaggaccaggacggcgagggcgagggcuccaagaccgcccuccagccccucaagcacuccgacuccaaggaggacgacggccaggagaucgccuga

SEQ ID NO: 1580 - RNA, 639 nt, Artificial Sequence
  BAG57312 variant
augccccuccuccuccuccucccccuccucugggccgaccucacccaccgccccaagauccucauccccggcacccucgagcccggccacuccaagaaccucaccugcuccgucuccugggccugcgagcagggcaccccccccaucuucuccuggcucuccgccgcccccaccucccucggcccccgcaccacccacuccuccguccucaucaucaccccccgcccccaggaccacggcaccaaccucaccugccaggucaaguucgccggcgccggcgucaccaccgagcgcaccauccagcucaacgucaccuacgucccccagaaccccaccaccggcaucuuccccggcgacggcuccggcaagcaggagacccgcgccggcgucguccacggcgccaucggcggcgccggcgucaccgcccuccucgcccucugccucugccucaucuucuucaucgucaagacccaccgccgcaaggccgcccgcaccgccgucggccgcaacgacacccaccccaccaccggcuccgccucccccgucuccgacggcgccuccuggcaccccgucugccccgccgacaccuccucccagugcggcccccccuccugccccauccagcacuuccagaacuga

SEQ ID NO: 1581 - RNA, 1095 nt, Artificial Sequence
  AAK83654 variant
augccccuccuccuccuccucccccuccucugggccggcgcccucgccauggaccccaacuucuggcuccagguccaggaguccgucaccguccaggagggccucugcguccucguccccugcaccuucuuccaccccauccccuacuacgacaagaacucccccguccacggcuacugguuccgcgagggcgccaucaucucccgcgacucccccgucgccaccaacaagcucgaccaggagguccaggaggagacccagggccgcuuccgccuccucggcgaccccucccgcaacaacugcucccucuccaucgucgacgcccgccgccgcgacaacggcuccuacuucuuccgcauggagcgcggcuccaccaaguacuccuacaaguccccccagcucuccguccacgucaccgaccucacccaccgccccaagauccucauccccggcacccucgagcccggccacuccaagaaccucaccugcuccgucuccugggccugcgagcagggcaccccccccaucuucuccuggcucuccgccgcccccaccucccucggcccccgcaccacccacuccuccguccucaucaucaccccccgcccccaggaccacggcaccaaccucaccugccaggucaaguucgccggcgccggcgucaccaccgagcgcaccauccagcucaacgucaccuacgucccccagaaccccaccaccggcaucuuccccggcgacggcuccggcaagcaggagacccgcgccggcgucguccacggcgccaucggcggcgccggcgucaccgcccuccucgcccucugccucugccucaucuucuucaucgucaagacccaccgccgcaaggccgcccgcaccgccgucggccgcaacgacacccaccccaccaccggcuccgccucccccaagcaccagaagaaguccaagcuccacggccccaccgagaccuccuccugcuccggcgccgcccccaccgucgagauggacgaggagcuccacuacgccucccucaacuuccacggcaugaaccccuccaaggacaccuccaccgaguacuccgagguccgcacccaguga

SEQ ID NO: 1582 - RNA, 1095 nt, Artificial Sequence; identical to SEQ ID NO: 1581
  CAD36509 variant

SEQ ID NO: 1583 - RNA, 624 nt, Artificial Sequence
  AAA52295 variant
augcaguccggcacccacuggcgcguccucggccucugccuccucuccgucggcgucuggggccaggacggcaacgaggagaugggcggcaucacccagacccccuacaaggucuccaucuccggcaccaccgucauccucaccugcccccaguaccccggcuccgagauccucuggcagcacaacgacaagaacaucggcggcgacgaggacgacaagaacaucggcuccgacgaggaccaccucucccucaaggaguucuccgagcucgagcaguccggcuacuacgucugcuacccccgcggcuccaagcccgaggacgccaacuucuaccucuaccuccgcgcccgcgucugcgagaacugcauggagauggacgucauguccgucgccaccaucgucaucgucgacaucugcaucaccggcggccuccuccuccucgucuacuacugguccaagaaccgcaaggccaaggccaagcccgucacccgcggcgccggcgccggcggccgccagcgcggccagaacaaggagcgccccccccccguccccaaccccgacuacgagcccauccgcaagggccagcgcgaccucuacuccggccucaaccagcgccgcaucuga

SEQ ID NO: 1584 - RNA, 495 nt, Artificial Sequence
  AAH25703 variant
augaaguggaaggcccucuucaccgccgccauccuccaggcccagcuccccaucaccgaggcccaguccuucggccuccucgaccccaagcucugcuaccuccucgacggcauccucuucaucuacggcgucauccucaccgcccucuuccuccgcgucaaguucucccgcuccgccgacgcccccgccuaccagcagggccagaaccagcucuacaacgagcucaaccucggccgccgcgaggaguacgacguccucgacaagcgccgcggccgcgaccccgagaugggcggcaagccccagcgccgcaagaacccccaggagggccucuacaacgagcuccagaaggacaagauggccgaggccuacuccgagaucggcaugaagggcgagcgccgccgcggcaagggccacgacggccucuaccagggccucuccaccgccaccaaggacaccuacgacgcccuccacaugcaggcccuccccccccgcuga

SEQ ID NO: 1585 - RNA, 2229 nt, Artificial Sequence
  CCDS7897.1 variant
auggacaaguucugguggcacgccgccuggggccucugccucgucccccucucccucgcccagaucgaccucaacaucaccugccgcuucgccggcgucuuccacgucgagaagaacggccgcuacuccaucucccgcaccgaggccgccgaccucugcaaggccuucaacuccacccuccccaccauggcccagauggagaaggcccucuccaucggcuucgagaccugccgcuacggcuucaucgagggccacgucgucaucccccgcauccaccccaacuccaucugcgccgccaacaacaccggcgucuacauccucaccuccaacaccucccaguacgacaccuacugcuucaacgccuccgccccccccgaggaggacugcaccuccgucaccgaccuccccaacgccuucgacggccccaucaccaucaccaucgucaaccgcgacggcacccgcuacguccagaagggcgaguaccgcaccaaccccgaggacaucuaccccuccaaccccaccgacgacgacgucuccuccggcuccuccuccgagcgcuccuccaccuccggcggcuacaucuucuacaccuucuccaccguccaccccauccccgacgaggacucccccuggaucaccgacuccaccgaccgcauccccgccaccacccucauguccaccuccgccaccgccaccgagaccgccaccaagcgccaggagaccugggacugguucuccuggcucuuccuccccuccgaguccaagaaccaccuccacaccaccacccagauggccggcaccuccuccaacaccaucuccgccggcugggagcccaacgaggagaacgaggacgagcgcgaccgccaccucuccuucuccggcuccggcaucgacgacgacgaggacuucaucuccuccaccaucuccaccaccccccgcgccuucgaccacaccaagcagaaccaggacuggacccaguggaaccccucccacuccaaccccgagguccuccuccagaccaccacccgcaugaccgacgucgaccgcaacggcaccaccgccuacgagggcaacuggaaccccgaggcccaccccccccucauccaccacgagcaccacgaggaggaggagaccccccacuccaccuccaccauccaggccacccccuccuccaccaccgaggagaccgccacccagaaggagcagugguucggcaaccgcuggcacgagggcuaccgccagacccccaaggaggacucccacuccaccaccggcaccgccgccgccuccgcccacaccucccaccccaugcagggccgcaccacccccucccccgaggacuccuccuggaccgacuucuucaaccccaucucccaccccaugggccgcggccaccaggccggccgccgcauggacauggacuccucccacuccaucacccuccagcccaccgccaaccccaacaccggccucgucgaggaccucgaccgcaccggcccccucuccaugaccacccagcaguccaacucccaguccuucuccaccucccacgagggccucgaggaggacaaggaccaccccaccaccuccacccucaccuccuccaaccgcaacgacgucaccggcggccgccgcgaccccaaccacuccgagggcuccaccacccuccucgagggcuacaccucccacuacccccacaccaaggagucccgcaccuucauccccgucaccuccgccaagaccggcuccuucggcgucaccgccgucaccgucggcgacuccaacuccaacgucaaccgcucccucuccggcgaccaggacaccuuccaccccuccggcggcucccacaccacccacggcuccgaguccgacggccacucccacggcucccaggagggcggcgccaacaccaccuccggccccauccgcaccccccagauccccgaguggcucaucauccucgccucccuccucgcccucgcccucauccucgccgucugcaucgccgucaacucccgccgccgcugcggccagaagaagaagcucgucaucaacuccggcaacggcgccgucgaggaccgcaagcccuccggccucaacggcgaggccuccaagucccaggagaugguccaccucgucaacaaggaguccuccgagacccccgaccaguucaugaccgccgacgagacccgcaaccuccagaacgucgacaugaagaucggcgucuga

SEQ ID NO: 1586 - RNA, 2100 nt, Artificial Sequence
  XM_006718388.1 variant
auggacaaguucugguggcacgccgccuggggccucugccucgucccccucucccucgcccagaucgaccucaacaucaccugccgcuucgccggcgucuuccacgucgagaagaacggccgcuacuccaucucccgcaccgaggccgccgaccucugcaaggccuucaacuccacccuccccaccauggcccagauggagaaggcccucuccaucggcuucgagaccugccgcuacggcuucaucgagggccacgucgucaucccccgcauccaccccaacuccaucugcgccgccaacaacaccggcgucuacauccucaccuccaacaccucccaguacgacaccuacugcuucaacgccuccgccccccccgaggaggacugcaccuccgucaccgaccuccccaacgccuucgacggccccaucaccaucaccaucgucaaccgcgacggcacccgcuacguccagaagggcgaguaccgcaccaaccccgaggacaucuaccccuccaaccccaccgacgacgacgucuccuccggcuccuccuccgagcgcuccuccaccuccggcggcuacaucuucuacaccuucuccaccguccaccccauccccgacgaggacucccccuggaucaccgacuccaccgaccgcauccccgccaccacccucauguccaccuccgccaccgccaccgagaccgccaccaagcgccaggagaccugggacugguucuccuggcucuuccuccccuccgaguccaagaaccaccuccacaccaccacccagauggccggcaccuccuccaacaccaucuccgccggcugggagcccaacgaggagaacgaggacgagcgcgaccgccaccucuccuucuccggcuccggcaucgacgacgacgaggacuucaucuccuccaccaucuccaccaccccccgcgccuucgaccacaccaagcagaaccaggacuggacccaguggaaccccucccacuccaaccccgagguccuccuccagaccaccacccgcaugaccgacgucgaccgcaacggcaccaccgccuacgagggcaacuggaaccccgaggcccaccccccccucauccaccacgagcaccacgaggaggaggagaccccccacuccaccuccaccaccgccuccgcccacaccucccaccccaugcagggccgcaccacccccucccccgaggacuccuccuggaccgacuucuucaaccccaucucccaccccaugggccgcggccaccaggccggccgccgcauggacauggacuccucccacuccaucacccuccagcccaccgccaaccccaacaccggccucgucgaggaccucgaccgcaccggcccccucuccaugaccacccagcaguccaacucccaguccuucuccaccucccacgagggccucgaggaggacaaggaccaccccaccaccuccacccucaccuccuccaaccgcaacgacgucaccggcggccgccgcgaccccaaccacuccgagggcuccaccacccuccucgagggcuacaccucccacuacccccacaccaaggagucccgcaccuucauccccgucaccuccgccaagaccggcuccuucggcgucaccgccgucaccgucggcgacuccaacuccaacgucaaccgcucccucuccggcgaccaggacaccuuccaccccuccggcggcucccacaccacccacggcuccgaguccgacggccacucccacggcucccaggagggcggcgccaacaccaccuccggccccauccgcaccccccagauccccgaguggcucaucauccucgccucccuccucgcccucgcccucauccucgccgucugcaucgccgucaacucccgccgccgcugcggccagaagaagaagcucgucaucaacuccggcaacggcgccgucgaggaccgcaagcccuccggccucaacggcgaggccuccaagucccaggagaugguccaccucgucaacaaggaguccuccgagacccccgaccaguucaugaccgccgacgagacccgcaaccuccagaacgucgacaugaagaucggcgucuga

SEQ ID NO: 1587 - RNA, 1377 nt, Artificial Sequence
  AAA35572 variant
augaaccgcggcguccccuuccgccaccuccuccucguccuccagcucgcccuccuccccgccgccacccagggcaagaaggucguccucggcaagaagggcgacaccgucgagcucaccugcaccgccucccagaagaaguccauccaguuccacuggaagaacuccaaccagaucaagauccucggcaaccagggcuccuuccucaccaagggccccuccaagcucaacgaccgcgccgacucccgccgcucccucugggaccagggcaacuucccccucaucaucaagaaccucaagaucgaggacuccgacaccuacaucugcgaggucgaggaccagaaggaggagguccagcuccucgucuucggccucaccgccaacuccgacacccaccuccuccagggccagucccucacccucacccucgaguccccccccggcuccucccccuccguccagugccgcuccccccgcggcaagaacauccagggcggcaagacccucuccgucucccagcucgagcuccaggacuccggcaccuggaccugcaccguccuccagaaccagaagaaggucgaguucaagaucgacaucgucguccucgccuuccagaaggccuccuccaucgucuacaagaaggagggcgagcaggucgaguucuccuucccccucgccuucaccgucgagaagcucaccggcuccggcgagcucugguggcaggccgagcgcgccuccuccuccaaguccuggaucaccuucgaccucaagaacaaggaggucuccgucaagcgcgucacccaggaccccaagcuccagaugggcaagaagcucccccuccaccucacccucccccaggcccucccccaguacgccggcuccggcaaccucacccucgcccucgaggccaagaccggcaagcuccaccaggaggucaaccucgucgucaugcgcgccacccagcuccagaagaaccucaccugcgaggucuggggccccaccucccccaagcucaugcucucccucaagcucgagaacaaggaggccaaggucuccaagcgcgagaaggccgucuggguccucaaccccgaggccggcauguggcagugccuccucuccgacuccggccagguccuccucgaguccaacaucaagguccuccccaccugguccacccccguccagcccauggcccucaucguccucggcggcgucgccggccuccuccucuucaucggccucggcaucuucuucugcguccgcugccgccaccgccgccgccaggccgagcgcaugucccagaucaagcgccuccucuccgagaagaagaccugccagugcccccaccgcuuccagaagaccugcucccccaucuga

SEQ ID NO: 1588 - RNA, 186 nt, Artificial Sequence
  CAA44323 variant
augaagcgcuuccucuuccuccuccucaccaucucccuccucgucaugguccagauccagaccggccucuccggccagaacgacaccucccagaccuccucccccuccgccuccuccaacaucuccggcggcaucuuccucuucuucgucgccaacgccaucauccaccucuucugcuucuccuga

SEQ ID NO: 1589 - RNA, 186 nt, Artificial Sequence
  AAP35780 variant
augaagcgcuuccucuuccuccuccucaccaucucccuccucgucaugguccagauccagaccggccucuccggccagaacgacaccucccagaccuccucccccuccgccuccuccuccauguccggcggcaucuuccucuucuucgucgccaacgccaucauccaccucuucugcuucuccuga

SEQ ID NO: 1590 - RNA, 186 nt, Artificial Sequence; identical to SEQ ID NO: 1588
  ACS44650 variant

SEQ ID NO: 1591 - RNA, 954 nt, Artificial Sequence
  EAW93489 variant
augaccgucgcccgccccuccguccccgccgcccucccccuccucggcgagcucccccgccuccuccuccucguccuccucugccuccccgccgucuggggcgacugcggccucccccccgacguccccaacgcccagcccgcccucgagggccgcaccuccuuccccgaggacaccgucaucaccuacaagugcgaggaguccuucgucaagauccccggcgagaaggacuccgucaucugccucaagggcucccagugguccgacaucgaggaguucugcaaccagaaguccugccccaaccccggcgagauccgcaacggccagaucgacguccccggcggcauccucuucggcgccaccaucuccuucuccugcaacaccggcuacaagcucuucggcuccaccuccuccuucugccucaucuccggcuccuccguccagugguccgacccccuccccgagugccgcgagaucuacugccccgcccccccccagaucgacaacggcaucauccagggcgagcgcgaccacuacggcuaccgccaguccgucaccuacgccugcaacaagggcuucaccaugaucggcgagcacuccaucuacugcaccgucaacaacgacgagggcgagugguccggccccccccccgagugccgcggcaagucccucaccuccaaggucccccccaccguccagaagcccaccaccgucaacguccccaccaccgaggucucccccaccucccagaagaccaccaccaagaccaccacccccaacgcccaggccacccgcuccacccccgucucccgcaccaccaagcacuuccacgagaccacccccaacaagggcuccggcaccaccuccggcaccacccgccuccucuccggccacaccugcuucacccucaccggccuccucggcacccucgucaccaugggccuccucaccuga

SEQ ID NO: 1592 - RNA, 882 nt, Artificial Sequence
  EAW93497 variant
augaucggcgagcacuccaucuacugcaccgucaacaacgacgagggcgagugguccggccccccccccgagugccgcggcaagucccucaccuccaaggucccccccaccguccagaagcccaccaccgucaacguccccaccaccgaggucucccccaccucccagaagaccaccaccaagaccaccacccccaacgcccagggcaccgagacccccuccguccuccagaagcacaccaccgagaacgucuccgccacccgcaccccccccaccccccagaagcccaccaccgucaacguccccgccaccaucgucacccccaccccccagaagcccaccaccaucaacguccccgccaccggcgucuccuccaccccccagcgccacaccaucgucaacgucuccgccaccggcacccuccccacccuccagaagcccacccgcgccaacgacuccgccaccaagucccccgccgccgcccagaccuccuucaucuccaagacccucuccaccaagacccccuccgccgcccagaaccccaugaugaccaacgccuccgccacccaggccacccucaccgcccagaaguucaccaccgccaaggucgccuucacccagucccccuccgccgcccgcaaguccaccaacguccacucccccgucaccaacggccucaaguccacccagcgcuuccccuccgcccacaucaccgccacccgcuccacccccgucucccgcaccaccaagcacuuccacgagaccacccccaacaagggcuccggcaccaccuccggcaccacccgccuccucuccggccacaccugcuucacccucaccggccuccucggcacccucgucaccaugggccuccucaccuga

SEQ ID NO: 1593 - RNA, 804 nt, Artificial Sequence
  EAW93493 variant
augaucggcgagcacuccaucuacugcaccgucaacaacgacgagggcgagugguccggccccccccccgagugccgcggcaagucccucaccuccaaggucccccccaccguccagaagcccaccaccgucaacguccccaccaccgaggucucccccaccucccagaagaccaccaccaagaccaccacccccaacgcccagggcaccgagacccccuccguccuccagaagcacaccaccgagaacgucuccgccacccgcaccccccccaccccccagaagcccaccaccgucaacguccccgccaccaucgucacccccaccccccagaagcccaccaccaucaacguccccgccaccggcgucuccuccaccccccagcgccacaccaucgucaacgucuccgccaccggcacccuccccacccuccagaagcccacccgcgccaacgacuccgccaccaagucccccgccgccgcccagaccuccuucaucuccaagacccucuccaccaagacccccuccgccgcccagaaccccaugaugaccaacgccuccgccacccaggccacccucaccgcccagaaguucaccaccgccaaggucgccuucacccagucccccuccgccgcccccacccgcuccacccccgucucccgcaccaccaagcacuuccacgagaccacccccaacaagggcuccggcaccaccuccggcaccacccgccuccucuccggccacaccugcuucacccucaccggccuccucggcacccucgucaccaugggccuccucaccuga

SEQ ID NO: 1594 - RNA, 1146 nt, Artificial Sequence
  AAA52168 variant
augaccgucgcccgccccuccguccccgccgcccucccccuccucggcgagcucccccgccuccuccuccucguccuccucugccuccccgccgucuggggcgacugcggccucccccccgacguccccaacgcccagcccgcccucgagggccgcaccuccuuccccgaggacaccgucaucaccuacaagugcgaggaguccuucgucaagauccccggcgagaaggacuccgucaucugccucaagggcucccagugguccgacaucgaggaguucugcaaccgcuccugcgagguccccacccgccucaacuccgccucccucaagcagcccuacaucacccagaacuacuuccccgucggcaccgucgucgaguacgagugccgccccggcuaccgccgcgagcccucccucucccccaagcucaccugccuccagaaccucaagugguccaccgccgucgaguucugcaagaagaaguccugccccaaccccggcgagauccgcaacggccagaucgacguccccggcggcauccucuucggcgccaccaucuccuucuccugcaacaccggcuacaagcucuucggcuccaccuccuccuucugccucaucuccggcuccuccguccagugguccgacccccuccccgagugccgcgagaucuacugccccgcccccccccagaucgacaacggcaucauccagggcgagcgcgaccacuacggcuaccgccaguccgucaccuacgccugcaacaagggcuucaccaugaucggcgagcacuccaucuacugcaccgucaacaacgacgagggcgagugguccggccccccccccgagugccgcggcaagucccucaccuccaaggucccccccaccguccagaagcccaccaccgucaacguccccaccaccgaggucucccccaccucccagaagaccaccaccaagaccaccacccccaacgcccaggccacccgcuccacccccgucucccgcaccaccaagcacuuccacgagaccacccccaacaagggcuccggcaccaccuccggcaccacccgccuccucuccggccacaccugcuucacccucaccggccuccucggcacccucgucaccaugggccuccucaccuga

SEQ ID NO: 1595 - RNA, 2577 nt, Artificial Sequence
  CCDS73385.1 variant
augcuccagaccaaggaccucaucuggacccucuucuuccucggcaccgccgucucccuccaggucgacaucguccccucccagggcgagaucuccgucggcgaguccaaguucuuccucugccaggucgccggcgacgccaaggacaaggacaucuccugguucucccccaacggcgagaagcucacccccaaccagcagcgcaucuccgucgucuggaacgacgacuccuccuccacccucaccaucuacaacgccaacaucgacgacgccggcaucuacaagugcgucgucaccggcgaggacggcuccgaguccgaggccaccgucaacgucaagaucuuccagaagcucauguucaagaacgcccccaccccccaggaguuccgcgagggcgaggacgccgucaucgucugcgacgucgucuccucccucccccccaccaucaucuggaagcacaagggccgcgacgucauccucaagaaggacguccgcuucaucguccucuccaacaacuaccuccagauccgcggcaucaagaagaccgacgagggcaccuaccgcugcgagggccgcauccucgcccgcggcgagaucaacuucaaggacauccaggucaucgucaacgucccccccaccauccaggcccgccagaacaucgucaacgccaccgccaaccucggccaguccgucacccucgucugcgacgccgagggcuuccccgagcccaccauguccuggaccaaggacggcgagcagaucgagcaggaggaggacgacgagaaguacaucuucuccgacgacuccucccagcucaccaucaagaaggucgacaagaacgacgaggccgaguacaucugcaucgccgagaacaaggccggcgagcaggacgccaccauccaccucaaggucuucgccaagcccaagaucaccuacgucgagaaccagaccgccauggagcucgaggagcaggucacccucaccugcgaggccuccggcgaccccauccccuccaucaccuggcgcaccuccacccgcaacaucuccuccgaggagaaggccuccuggacccgccccgagaagcaggagacccucgacggccacauggucguccgcucccacgcccgcgucuccucccucacccucaaguccauccaguacaccgacgccggcgaguacaucugcaccgccuccaacaccaucggccaggacucccaguccauguaccucgagguccaguacgcccccaagcuccagggccccgucgccgucuacaccugggagggcaaccaggucaacaucaccugcgaggucuucgccuaccccuccgccaccaucuccugguuccgcgacggccagcuccuccccuccuccaacuacuccaacaucaagaucuacaacacccccuccgccuccuaccucgaggucacccccgacuccgagaacgacuucggcaacuacaacugcaccgccgucaaccgcaucggccaggagucccucgaguucauccucguccaggccgacacccccuccucccccuccaucgaccaggucgagcccuacuccuccaccgcccagguccaguucgacgagcccgaggccaccggcggcguccccauccucaaguacaaggccgaguggcgcgccgucggcgaggaggucuggcacuccaagugguacgacgccaaggaggccuccauggagggcaucgucaccaucgucggccucaagcccgagaccaccuacgccguccgccucgccgcccucaacggcaagggccucggcgagaucuccgccgccuccgaguucaagacccagcccguccagggcgagcccuccgcccccaagcucgagggccagaugggcgaggacggcaacuccaucaaggucaaccucaucaagcaggacgacggcggcucccccauccgccacuaccucguccgcuaccgcgcccucuccuccgaguggaagcccgagauccgccuccccuccggcuccgaccacgucaugcucaagucccucgacuggaacgccgaguacgaggucuacgucgucgccgagaaccagcagggcaaguccaaggccgcccacuucgucuuccgcaccuccgcccagcccaccgccauccccgccaacggcucccccaccuccggccucuccaccggcgccaucgucggcauccucaucgucaucuucguccuccuccucgucgucgucgacaucaccugcuacuuccucaacaagugcggccucuucaugugcaucgccgucaaccucugcggcaaggccggccccggcgccaagggcaaggacauggaggagggcaaggccgccuucuccaaggacgaguccaaggagcccaucgucgagguccgcaccgaggaggagcgcacccccaaccacgacggcggcaagcacaccgagcccaacgagaccaccccccucaccgagcccgagaagggccccgucgaggccaagcccgagugccaggagaccgagaccaagcccgcccccgccgaggucaagaccguccccaacgacgccacccagaccaaggagaacgaguccaaggccuga

SEQ ID NO: 1596 - RNA, 867 nt, Artificial Sequence
  ABK41933 variant
augggccacacccgccgccagggcaccucccccuccaagugccccuaccucaacuucuuccagcuccucguccucgccggccucucccacuucugcuccggcgucauccacgucaccaaggaggucaaggaggucgccacccucuccugcggccacaacgucuccgucgaggagcucgcccagacccgcaucuacuggcagaaggagaagaagaugguccucaccaugauguccggcgacaugaacaucuggcccgaguacaagaaccgcaccaucuucgacaucaccaacaaccucuccaucgucauccucgcccuccgccccuccgacgagggcaccuacgagugcgucguccucaaguacgagaaggacgccuucaagcgcgagcaccucgccgaggucacccucuccgucaaggccgacuuccccacccccuccaucuccgacuucgagauccccaccuccaacauccgccgcaucaucugcuccaccuccggcggcuuccccgagccccaccucuccuggcucgagaacggcgaggagcucaacgccaucaacaccaccgucucccaggaccccgagaccgagcucuacgccgucuccuccaagcucgacuucaacaugaccaccaaccacuccuucaugugccucaucaaguacggccaccuccgcgucaaccagaccuucaacuggaacaccaccaagcaggagcacuuccccgacaaccuccuccccuccugggccaucacccucaucuccgucaacggcaucuucgucaucugcugccucaccuacugcuucgccccccgcugccgcgagcgccgccgcaacgagcgccuccgccgcgaguccguccgccccgucuga

SEQ ID NO: 1597 - RNA, 867 nt, Artificial Sequence; identical to SEQ ID NO: 1596
  AAA36045 variant

SEQ ID NO: 1598 - RNA, 990 nt, Artificial Sequence
  CCDS3009.1 variant
auggacccccagugcaccaugggccucuccaacauccucuucgucauggccuuccuccucuccggcgccgccccccucaagauccaggccuacuucaacgagaccgccgaccuccccugccaguucgccaacucccagaaccagucccucuccgagcucgucgucuucuggcaggaccaggagaaccucguccucaacgaggucuaccucggcaaggagaaguucgacuccguccacuccaaguacaugggccgcaccuccuucgacuccgacuccuggacccuccgccuccacaaccuccagaucaaggacaagggccucuaccagugcaucauccaccacaagaagcccaccggcaugauccgcauccaccagaugaacuccgagcucuccguccucgccaacuucucccagcccgagaucguccccaucuccaacaucaccgagaacgucuacaucaaccucaccugcuccuccauccacggcuaccccgagcccaagaagauguccguccuccuccgcaccaagaacuccaccaucgaguacgacggcgucaugcagaagucccaggacaacgucaccgagcucuacgacgucuccaucucccucuccgucuccuuccccgacgucaccuccaacaugaccaucuucugcauccucgagaccgacaagacccgccuccucuccucccccuucuccaucgagcucgaggacccccagcccccccccgaccacauccccuggaucaccgccguccuccccaccgucaucaucugcgucauggucuucugccucauccucuggaaguggaagaagaagaagcgcccccgcaacuccuacaagugcggcaccaacaccauggagcgcgaggaguccgagcagaccaagaagcgcgagaagauccacauccccgagcgcuccgacgaggcccagcgcgucuucaaguccuccaagaccuccuccugcgacaaguccgacaccugcuucuga

SEQ ID NO: 1599 - RNA, 708 nt, Artificial Sequence
  AAA59674 variant
auggcccuccccgucaccgcccuccuccucccccucgcccuccuccuccacgccgcccgccccucccaguuccgcgucuccccccucgaccgcaccuggaaccucggcgagaccgucgagcucaagugccagguccuccucuccaaccccaccuccggcugcuccuggcucuuccagccccgcggcgccgccgccucccccaccuuccuccucuaccucucccagaacaagcccaaggccgccgagggccucgacacccagcgcuucuccggcaagcgccucggcgacaccuucguccucacccucuccgacuuccgccgcgagaacgagggcuacuacuucugcuccgcccucuccaacuccaucauguacuucucccacuucguccccgucuuccuccccgccaagcccaccaccacccccgccccccgcccccccacccccgcccccaccaucgccucccagccccucucccuccgccccgaggccugccgccccgccgccggcggcgccguccacacccgcggccucgacuucgccugcgacaucuacaucugggccccccucgccggcaccugcggcguccuccuccucucccucgucaucacccucuacugcaaccaccgcaaccgccgccgcgucugcaagugcccccgccccgucgucaaguccggcgacaagcccucccucuccgcccgcuacgucuga

SEQ ID NO: 1600 - RNA, 2472 nt, Artificial Sequence
  EAW57688 variant
augaccguccuccaggagcccguccaggccgccaucuggcaggcccucaaccacuacgccuaccgcgacgccgucuuccucgccgagcgccucuacgccgagguccacuccgaggaggcccucuuccuccucgccaccugcuacuaccgcuccggcaaggccuacaaggccuaccgccuccucaagggccacuccugcaccaccccccagugcaaguaccuccucgccaagugcugcgucgaccucuccaagcucgccgagggcgagcagauccucuccggcggcgucuucaacaagcagaagucccacgacgacaucgucaccgaguucggcgacuccgccugcuucacccucucccuccucggccacgucuacugcaagaccgaccgccucgccaagggcuccgagugcuaccagaagucccucucccucaaccccuuccucuggucccccuucgagucccucugcgagaucggcgagaagcccgaccccgaccagaccuucaaguucaccucccuccagaacuucuccaacugccuccccaacuccugcaccacccagguccccaaccacucccucucccaccgccagcccgagaccguccucaccgagaccccccaggacaccaucgagcucaaccgccucaaccucgaguccuccaacuccaaguacucccucaacaccgacuccuccgucuccuacaucgacuccgccgucaucucccccgacaccgucccccucggcaccggcaccuccauccucuccaagcagguccagaacaagcccaagaccggccgcucccuccucggcggccccgccgcccucuccccccucacccccuccuucggcauccucccccucgagacccccucccccggcgacggcuccuaccuccagaacuacaccaacaccccccccgucaucgacguccccuccaccggcgcccccuccaagaaguccgucgcccgcaucggccagaccggcaccaaguccgucuucucccaguccggcaacucccgcgaggucacccccauccucgcccagacccaguccuccggcccccagaccuccaccaccccccagguccucucccccaccaucaccuccccccccaacgcccucccccgccgcuccucccgccucuucaccuccgacuccuccaccaccaaggagaacuccaagaagcucaagaugaaguucccccccaagauccccaaccgcaagaccaaguccaagaccaacaagggcggcaucacccagcccaacaucaacgacucccucgagaucaccaagcucgacuccuccaucaucuccgagggcaagaucuccaccaucaccccccagauccaggccuucaaccuccagaaggccgccgccggccucaugucccuccuccgcgagaugggcaagggcuaccucgcccucugcuccuacaacugcaaggaggccaucaacauccucucccaccuccccucccaccacuacaacaccggcuggguccucugccagaucggccgcgccuacuucgagcucuccgaguacaugcaggccgagcgcaucuucuccgagguccgccgcaucgagaacuaccgcgucgagggcauggagaucuacuccaccacccucuggcaccuccagaaggacgucgcccucuccguccucuccaaggaccucaccgacauggacaagaacucccccgaggccuggugcgccgccggcaacugcuucucccuccagcgcgagcacgacaucgccaucaaguucuuccagcgcgccauccaggucgaccccaacuacgccuacgccuacacccuccucggccacgaguucguccucaccgaggagcucgacaaggcccucgccugcuuccgcaacgccauccgcgucaacccccgccacuacaacgccugguacggccucggcaugaucuacuacaagcaggagaaguucucccucgccgagaugcacuuccagaaggcccucgacaucaacccccaguccuccguccuccucugccacaucggcgucguccagcacgcccucaagaaguccgagaaggcccucgacacccucaacaaggccaucgucaucgaccccaagaacccccucugcaaguuccaccgcgccuccguccucuucgccaacgagaaguacaaguccgcccuccaggagcucgaggagcucaagcagaucguccccaaggagucccucgucuacuuccucaucggcaaggucuacaagaagcucggccagacccaccucgcccucaugaacuucuccugggccauggaccucgaccccaagggcgccaacaaccagaucaaggaggccaucgacaagcgcuaccuccccgacgacgaggagcccaucacccaggaggagcagaucaugggcaccgacgagucccaggaguccuccaugaccgacgccgacgacacccagcuccacgccgccgaguccgacgaguucuga

SEQ ID NO: 1601 - RNA, 2475 nt, Artificial Sequence
  AAB34378 variant
augaccguccuccaggagcccguccaggccgccaucuggcaggcccucaaccacuacgccuaccgcgacgccgucuuccucgccgagcgccucuacgccgagguccacuccgaggaggcccucuuccuccucgccaccugcuacuaccgcuccggcaaggccuacaaggccuaccgccuccucaagggccacuccugcaccaccccccagugcaaguaccuccucgccaagugcugcgucgaccucuccaagcucgccgagggcgagcagauccucuccggcggcgucuucaacaagcagaagucccacgacgacaucgucaccgaguucggcgacuccgccugcuucacccucucccuccucggccacgucuacugcaagaccgaccgccucgccaagggcuccgagugcuaccagaagucccucucccucaaccccuuccucuggucccccuucgagucccucugcgagaucggcgagaagcccgaccccgaccagaccuucaaguucaccucccuccagaacuucuccaacugccuccccaacuccugcaccacccagguccccaaccacucccucucccaccgccagcccgagaccguccucaccgagaccccccaggacaccaucgagcucaaccgccucaaccucgaguccuccaacuccaaguacucccucaacaccgacuccuccgucuccuacaucgacuccgccgucaucucccccgacaccgucccccucggcaccggcaccuccauccucuccaagcagguccagaacaagcccaagaccggccgcucccuccucggcggccccgccgcccucuccccccucacccccuccuucggcauccucccccucgagacccccucccccggcgacggcuccuaccuccagaacuacaccaacaccccccccgucaucgacguccccuccaccggcgcccccuccaagaaguccgucgcccgcaucggccagaccggcaccaaguccgucuucucccaguccggcaacucccgcgaggucacccccauccucgcccagacccaguccuccggcccccagaccuccaccaccccccagguccucucccccaccaucaccuccccccccaacgcccucccccgccgcuccucccgccucuucaccuccgacuccuccaccaccaaggagaacuccaagaagcucaagaugaaguucccccccaagauccccaaccgcaagaccaaguccaagaccaacaagggcggcaucacccagcccaacaucaacgacucccucgagaucaccaagcucgacuccuccaucaucuccgagggcaagaucuccaccaucaccccccagauccaggccuucaaccuccagaaggccgccgccgagggccucaugucccuccuccgcgagaugggcaagggcuaccucgcccucugcuccuacaacugcaaggaggccaucaacauccucucccaccuccccucccaccacuacaacaccggcuggguccucugccagaucggccgcgccuacuucgagcucuccgaguacaugcaggccgagcgcaucuucuccgagguccgccgcaucgagaacuaccgcgucgagggcauggagaucuacuccaccacccucuggcaccuccagaaggacgucgcccucuccguccucuccaaggaccucaccgacauggacaagaacucccccgaggccuggugcgccgccggcaacugcuucucccuccagcgcgagcacgacaucgccaucaaguucuuccagcgcgccauccaggucgaccccaacuacgccuacgccuacacccuccucggccacgaguucguccucaccgaggagcucgacaaggcccucgccugcuuccgcaacgccauccgcgucaacccccgccacuacaacgccugguacggccucggcaugaucuacuacaagcaggagaaguucucccucgccgagaugcacuuccagaaggcccucgacaucaacccccaguccuccguccuccucugccacaucggcgucguccagcacgcccucaagaaguccgagaaggcccucgacacccucaacaaggccaucgucaucgaccccaagaacccccucugcaaguuccaccgcgccuccguccucuucgccaacgagaaguacaaguccgcccuccaggagcucgaggagcucaagcagaucguccccaaggagucccucgucuacuuccucaucggcaaggucuacaagaagcucggccagacccaccucgcccucaugaacuucuccugggccauggaccucgaccccaagggcgccaacaaccagaucaaggaggccaucgacaagcgcuaccuccccgacgacgaggagcccaucacccaggaggagcagaucaugggcaccgacgagucccaggaguccuccaugaccgacgccgacgacacccagcuccacgccgccgaguccgacgaguucuga

SEQ ID NO: 1602 - RNA, 1788 nt, Artificial Sequence
  AAA51947 variant
augcgcguccuccucgccgcccucggccuccucuuccucggcgcccuccgcgccuucccccaggaccgccccuucgaggacaccugccacggcaaccccucccacuacuacgacaaggccguccgccgcugcugcuaccgcugccccaugggccucuuccccacccagcagugcccccagcgccccaccgacugccgcaagcagugcgagcccgacuacuaccucgacgaggccgaccgcugcaccgccugcgucaccugcucccgcgacgaccucgucgagaagacccccugcgccuggaacuccucccgcgucugcgagugccgccccggcauguucugcuccaccuccgccgucaacuccugcgcccgcugcuucuuccacuccgucugccccgccggcaugaucgucaaguuccccggcaccgcccagaagaacaccgucugcgagcccgccucccccggcgucucccccgccugcgccucccccgagaacugcaaggagcccuccuccggcaccaucccccaggccaagcccacccccgucucccccgccaccuccuccgccuccaccaugcccguccgcggcggcacccgccucgcccaggaggccgccuccaagcucacccgcgcccccgacucccccuccuccgucggccgccccuccuccgaccccggccucucccccacccagcccugccccgagggcuccggcgacugccgcaagcagugcgagcccgacuacuaccucgacgaggccggccgcugcaccgccugcgucuccugcucccgcgacgaccucgucgagaagacccccugcgccuggaacuccucccgcaccugcgagugccgccccggcaugaucugcgccaccuccgccaccaacuccugcgcccgcugcguccccuaccccaucugcgccgccgagaccgucaccaagccccaggacauggccgagaaggacaccaccuucgaggcccccccccucggcacccagcccgacugcaaccccacccccgagaacggcgaggcccccgccuccaccucccccacccagucccuccucgucgacucccaggccuccaagacccuccccauccccaccuccgcccccgucgcccucuccuccaccggcaagcccguccucgacgccggccccguccucuucugggucauccucguccucgucgucgucgucggcuccuccgccuuccuccucugccaccgccgcgccugccgcaagcgcauccgccagaagcuccaccucugcuaccccguccagaccucccagcccaagcucgagcucgucgacucccgcccccgccgcuccuccacccagcuccgcuccggcgccuccgucaccgagcccgucgccgaggagcgcggccucaugucccagccccucauggagaccugccacuccgucggcgccgccuaccucgagucccucccccuccaggacgccucccccgccggcggccccuccuccccccgcgaccuccccgagccccgcgucuccaccgagcacaccaacaacaagaucgagaagaucuacaucaugaaggccgacaccgucaucgucggcaccgucaaggccgagcuccccgagggccgcggccucgccggccccgccgagcccgagcucgaggaggagcucgaggccgaccacaccccccacuaccccgagcaggagaccgagcccccccucggcuccugcuccgacgucaugcucuccgucgaggaggagggcaaggaggacccccuccccaccgccgccuccggcaaguga

SEQ ID NO: 1603 - RNA, 912 nt, Artificial Sequence
  EAW97060 variant
auggccaccucccgcuacgagcccgucgccgagaucggcgucggcgccuacggcaccgucuacaaggcccgcgacccccacuccggccacuucgucgcccucaaguccguccgcguccccaacggcggcggcggcggcggcggccuccccaucuccaccguccgcgaggucgcccuccuccgccgccucgaggccuucgagcaccccaacgucguccgccucauggacgucugcgccaccucccgcaccgaccgcgagaucaaggucacccucgucuucgagcacgucgaccaggaccuccgcaccuaccucgacaaggcccccccccccggccuccccgccgagaccaucaaggaccucaugcgccaguuccuccgcggccucgacuuccuccacgccaacugcaucguccaccgcgaccucaagcccgagaacauccucgucaccuccggcggcaccgucaagcucgccgacuucggccucgcccgcaucuacuccuaccagauggcccucacccccgucgucgucacccucugguaccgcgcccccgagguccuccuccaguccaccuacgccacccccgucgacaugugguccgucggcugcaucuucgccgagauguuccgccgcaagccccucuucugcggcaacuccgaggccgaccagcucggcaagaucuucgaccucaucggccucccccccgaggacgacuggccccgcgacgucucccucccccgcggcgccuuccccccccgcggcccccgccccguccaguccgucguccccgagauggaggaguccggcgcccagcuccuccucgagaugcucaccuucaacccccacaagcgcaucuccgccuuccgcgcccuccagcacuccuaccuccacaaggacgagggcaaccccgaguga

SEQ ID NO: 1604 - RNA, 912 nt, Artificial Sequence; identical to SEQ ID NO: 1603
  AAA35673 variant

SEQ ID NO: 1605 - RNA, 690 nt, Artificial Sequence
  AAB50213 variant
auggacgucugcgccaccucccgcaccgaccgcgagaucaaggucacccucgucuucgagcacgucgaccaggaccuccgcaccuaccucgacaaggcccccccccccggccuccccgccgagaccaucaaggaccucaugcgccaguuccuccgcggccucgacuuccuccacgccaacugcaucguccaccgcgaccucaagcccgagaacauccucgucaccuccggcggcaccgucaagcucgccgacuucggccucgcccgcaucuacuccuaccagauggcccucacccccgucgucgucacccucugguaccgcgcccccgagguccuccuccaguccaccuacgccacccccgucgacaugugguccgucggcugcaucuucgccgagauguuccgccgcaagccccucuucugcggcaacuccgaggccgaccagcucggcaagaucuucgaccucaucggccucccccccgaggacgacuggccccgcgacgucucccucccccgcggcgccuuccccccccgcggcccccgccccguccaguccgucguccccgagauggaggaguccggcgcccagcuccuccucgagaugcucaccuucaacccccacaagcgcaucuccgccuuccgcgcccuccagcacuccuaccuccacaaggacgagggcaaccccgaguga

SEQ ID NO: 1606 - RNA, 336 nt, Artificial Sequence
  AAH15669 variant
auggccaccucccgcuacgagcccgucgccgagaucggcgucggcgccuacggcaccgucuacaaggcccgcgacccccacuccggccacuucgucgcccucaaguccguccgcguccccaacggcggcggcggcggcggcggccuccccaucuccaccguccgcgaggucgcccuccuccgccgccucgaggccuucgagcaccccaacgucguccgccucauggacgucugcgccaccucccgcaccgaccgcgagaucaagcgcugcuucgucgagucccucuccuccgucgagacccucaagcccaccuccugggccaagucccucaccuga

SEQ ID NO: 1607 - RNA, 429 nt, Artificial Sequence
  ACY78326 variant
auggagcccgccgccggcuccuccauggagcccuccgccgacuggcucgccaccgccgccgcccgcggccgcgucgaggagguccgcgcccuccucgaggccggcgcccuccccaacgcccccaacuccuacggccgccgccccauccaggucaugaugaugggcuccgcccgcgucgccgagcuccuccuccuccacggcgccgagcccaacugcgccgaccccgccacccucacccgccccguccacgacgccgcccgcgagggcuuccucgacacccucgucguccuccaccgcgccggcgcccccugcgccaugcccggcgccgucugccccuggaccuggcuccgcuccugggccaucgccaugucccacggcaccugcgcccgccuccgcggcgcccccgaggccgucaccaugcccgccuga

SEQ ID NO: 1608 - RNA, 351 nt, Artificial Sequence
  EAW58598 variant
auggagcccgccgccggcuccuccauggagcccuccgccgacuggcucgccaccgccgccgcccgcggccgcgucgaggagguccgcgcccuccucgaggccggcgcccuccccaacgcccccaacuccuacggccgccgccccauccaggucggccgcggcuccgccgccggcgccggcgacggcggccgccucuggcgcaccaaguucgccggcgagcucgaguccggcuccgccuccauccuccgcaagaagggccgccuccccggcgaguucuccgagggcgucugcaaccaccgccccccccccggcgacgcccucggcgccugggaggccaaggaggaggaguga

SEQ ID NO: 1609 - RNA, 471 nt, Artificial Sequence
  AFN61598 variant
auggagcccgccgccggcuccuccauggagcccuccgccgacuggcucgccaccgccgccgcccgcggccgcgucgaggagguccgcgcccuccucgaggccggcgcccuccccaacgcccccaacuccuacggccgccgccccauccaggucaugaugaugggcuccgcccgcgucgccgagcuccuccuccuccacggcgccgagcccaacugcgccgaccccgccacccucacccgccccguccacgacgccgcccgcgagggcuuccucgacacccucgucguccuccaccgcgccggcgcccgccucgacguccgcgacgccuggggccgccuccccgucgaccucgccgaggagcucggccaccgcgacgucgcccgcuaccuccgcgccgccgccggcggcacccgcggcuccaaccacgcccgcaucgacgccgccgagggccccuccgacauccccgacuga

SEQ ID NO: 1610 - RNA, 327 nt, Artificial Sequence
  CCQ43815 variant
auggaggucaugaugaugggcuccgcccgcgucgccgagcuccuccuccuccacggcgccgagcccaacugcgccgaccccgccacccucacccgccccguccacgacgccgcccgcgagggcuuccucgacacccucgucguccuccaccgcgccggcgcccgccucgacguccgcgacgccuggggccgccuccccgucgaccucgccgaggagcucggccaccgcgacgucgcccgcuaccuccgcgccgccgccggcggcacccgcggcuccaaccacgcccgcaucgacgccgccgagggccccuccgacauccccgacuga

SEQ ID NO: 1611 - RNA, 399 nt, Artificial Sequence
  AAA82236 variant
augguccgccgcuuccucgucacccuccgcauccgccgcgccugcggccccccccgcguccgcgucuucgucguccacaucccccgccucaccggcgagugggccgcccccggcgcccccgccgccgucgcccucguccucaugcuccuccgcucccagcgccucggccagcagccccucccccgccgccccggccacgacgacggccagcgccccuccggcggcgccgccgccgccccccgccgcggcgcccagcuccgccgcccccgccacucccaccccacccgcgcccgccgcugccccggcggccuccccggccacgccggcggcgccgcccccggccgcggcgccgccggccgcgcccgcugccucggccccuccgcccgcggccccggcuga

SEQ ID NO: 1612 - RNA, 2109 nt, Artificial Sequence
  CCDS12584.1 variant
auggagucccccuccgcccccccccaccgcuggugcauccccuggcagcgccuccuccucaccgccucccuccucaccuucuggaacccccccaccaccgccaagcucaccaucgaguccacccccuucaacgucgccgagggcaaggagguccuccuccucguccacaaccucccccagcaccucuucggcuacuccugguacaagggcgagcgcgucgacggcaaccgccagaucaucggcuacgucaucggcacccagcaggccacccccggccccgccuacuccggccgcgagaucaucuaccccaacgccucccuccucauccagaacaucauccagaacgacaccggcuucuacacccuccacgucaucaaguccgaccucgucaacgaggaggccaccggccaguuccgcgucuaccccgagcuccccaagcccuccaucuccuccaacaacuccaagcccgucgaggacaaggacgccgucgccuucaccugcgagcccgagacccaggacgccaccuaccucuggugggucaacaaccagucccuccccgucuccccccgccuccagcucuccaacggcaaccgcacccucacccucuucaacgucacccgcaacgacaccgccuccuacaagugcgagacccagaaccccgucuccgcccgccgcuccgacuccgucauccucaacguccucuacggccccgacgcccccaccaucuccccccucaacaccuccuaccgcuccggcgagaaccucaaccucuccugccacgccgccuccaacccccccgcccaguacuccugguucgucaacggcaccuuccagcaguccacccaggagcucuucauccccaacaucaccgucaacaacuccggcuccuacaccugccaggcccacaacuccgacaccggccucaaccgcaccaccgucaccaccaucaccgucuacgccgagccccccaagcccuucaucaccuccaacaacuccaaccccgucgaggacgaggacgccgucgcccucaccugcgagcccgagauccagaacaccaccuaccucuggugggucaacaaccagucccuccccgucuccccccgccuccagcucuccaacgacaaccgcacccucacccuccucuccgucacccgcaacgacgucggccccuacgagugcggcauccagaacgagcucuccgucgaccacuccgaccccgucauccucaacguccucuacggccccgacgaccccaccaucucccccuccuacaccuacuaccgccccggcgucaaccucucccucuccugccacgccgccuccaacccccccgcccaguacuccuggcucaucgacggcaacauccagcagcacacccaggagcucuucaucuccaacaucaccgagaagaacuccggccucuacaccugccaggccaacaacuccgccuccggccacucccgcaccaccgucaagaccaucaccgucuccgccgagcuccccaagcccuccaucuccuccaacaacuccaagcccgucgaggacaaggacgccgucgccuucaccugcgagcccgaggcccagaacaccaccuaccucuggugggucaacggccagucccuccccgucuccccccgccuccagcucuccaacggcaaccgcacccucacccucuucaacgucacccgcaacgacgcccgcgccuacgucugcggcauccagaacuccgucuccgccaaccgcuccgaccccgucacccucgacguccucuacggccccgacacccccaucaucuccccccccgacuccuccuaccucuccggcgccaaccucaaccucuccugccacuccgccuccaaccccuccccccaguacuccuggcgcaucaacggcaucccccagcagcacacccagguccucuucaucgccaagaucacccccaacaacaacggcaccuacgccugcuucgucuccaaccucgccaccggccgcaacaacuccaucgucaaguccaucaccgucuccgccuccggcaccucccccggccucuccgccggcgccaccgucggcaucaugaucggcguccucgucggcgucgcccucaucuga

SEQ ID NO: 1613 - RNA, 1035 nt, Artificial Sequence
  AAA51739 variant
augggcccccccuccgccccccccugccgccuccacguccccuggaaggagguccuccucaccgccucccuccucaccuucuggaacccccccaccaccgccaagcucaccaucgaguccacccccuucaacgucgccgagggcaaggagguccuccuccucgcccacaaccucccccagaaccgcaucggcuacuccugguacaagggcgagcgcgucgacggcaacucccucaucgucggcuacgucaucggcacccagcaggccacccccggccccgccuacuccggccgcgagaccaucuaccccaacgccucccuccucauccagaacgucacccagaacgacaccggcuucuacacccuccaggucaucaaguccgaccucgucaacgaggaggccaccggccaguuccacgucuaccccgagcuccccaagcccuccaucuccuccaacaacuccaaccccgucgaggacaaggacgccgucgccuucaccugcgagcccgagguccagaacaccaccuaccucuggugggucaacggccagucccuccccgucuccccccgccuccagcucuccaacggcaacaugacccucacccuccucuccgucaagcgcaacgacgccggcuccuacgagugcgagauccagaaccccgccuccgccaaccgcuccgaccccgucacccucaacguccucuacggccccgacggccccaccaucucccccuccaaggccaacuaccgccccggcgagaaccucaaccucuccugccacgccgccuccaacccccccgcccaguacuccugguucaucaacggcaccuuccagcaguccacccaggagcucuucauccccaacaucaccgucaacaacuccggcuccuacaugugccaggcccacaacuccgccaccggccucaaccgcaccaccgucaccaugaucaccgucuccggcuccgcccccguccucuccgccgucgccaccgucggcaucaccaucggcguccucgcccgcgucgcccucaucuga

SEQ ID NO: 1614 - RNA, 1173 nt, Artificial Sequence
  AAB04533 variant
augggcgccaccaccauggaccagaagucccucugggccggcgucgucguccuccuccuccuccagggcggcuccgccuacaagcucgucugcuacuucaccaacuggucccaggaccgccaggagcccggcaaguucacccccgagaacaucgaccccuuccucugcucccaccucaucuacuccuucgccuccaucgagaacaacaaggucaucaucaaggacaaguccgaggucaugcucuaccagaccaucaacucccucaagaccaagaaccccaagcucaagauccuccucuccaucggcggcuaccucuucggcuccaagggcuuccaccccauggucgacuccuccaccucccgccucgaguucaucaacuccaucauccucuuccuccgcaaccacaacuucgacggccucgacgucuccuggaucuaccccgaccagaaggagaacacccacuucaccguccucauccacgagcucgccgaggccuuccagaaggacuucaccaaguccaccaaggagcgccuccuccucaccgccggcgucuccgccggccgccagaugaucgacaacuccuaccaggucgagaagcucgccaaggaccucgacuucaucaaccuccucuccuucgacuuccacggcuccugggagaagccccucaucaccggccacaacuccccccucuccaagggcuggcaggaccgcggccccuccuccuacuacaacgucgaguacgccgucggcuacuggauccacaagggcaugcccuccgagaaggucgucaugggcauccccaccuacggccacuccuucacccucgccuccgccgagaccaccgucggcgcccccgccuccggccccggcgccgccggccccaucaccgaguccuccggcuuccucgccuacuacgagaucugccaguuccucaagggcgccaagaucacccgccuccaggaccagcagguccccuacgccgucaagggcaaccagugggucggcuacgacgacgucaaguccauggagaccaagguccaguuccucaagaaccucaaccucggcggcgccaugaucugguccaucgacauggacgacuucaccggcaaguccugcaaccagggccccuacccccucguccaggccgucaagcgcucccucggcucccucuga

SEQ ID NO: 1615 - RNA, 2832 nt, Artificial Sequence
  AAD40367 variant
augacccagcgcuccaucgccggccccaucugcaaccucaaguucgucacccuccucgucgcccucuccuccgagcuccccuuccucggcgccggcguccagcuccaggacaacggcuacaacggccuccucaucgccaucaacccccagguccccgagaaccagaaccucaucuccaacaucaaggagaugaucaccgaggccuccuucuaccucuucaacgccaccaagcgccgcgucuucuuccgcaacaucaagauccucauccccgccaccuggaaggccaacaacaacuccaagaucaagcaggaguccuacgagaaggccaacgucaucgucaccgacugguacggcgcccacggcgacgaccccuacacccuccaguaccgcggcugcggcaaggagggcaaguacauccacuucacccccaacuuccuccucaacgacaaccucaccgccggcuacggcucccgcggccgcgucuucguccacgagugggcccaccuccgcuggggcgucuucgacgaguacaacaacgacaagcccuucuacaucaacggccagaaccagaucaaggucacccgcugcuccuccgacaucaccggcaucuucgucugcgagaagggccccugcccccaggagaacugcaucaucuccaagcucuucaaggagggcugcaccuucaucuacaacuccacccagaacgccaccgccuccaucauguucaugcagucccucuccuccgucgucgaguucugcaacgccuccacccacaaccaggaggcccccaaccuccagaaccagaugugcucccuccgcuccgccugggacgucaucaccgacuccgccgacuuccaccacuccuuccccaugaacggcaccgagcucccccccccccccaccuucucccucguccaggccggcgacaaggucgucugccucguccucgacgucuccuccaagauggccgaggccgaccgccuccuccagcuccagcaggccgccgaguucuaccucaugcagaucgucgagauccacaccuucgucggcaucgccuccuucgacuccaagggcgagauccgcgcccagcuccaccagaucaacuccaacgacgaccgcaagcuccucgucuccuaccuccccaccaccgucuccgccaagaccgacaucuccaucugcuccggccucaagaagggcuucgaggucgucgagaagcucaacggcaaggccuacggcuccgucaugauccucgucaccuccggcgacgacaagcuccucggcaacugccuccccaccguccucuccuccggcuccaccauccacuccaucgcccucggcuccuccgccgcccccaaccucgaggagcucucccgccucaccggcggccucaaguucuucguccccgacaucuccaacuccaacuccaugaucgacgccuucucccgcaucuccuccggcaccggcgacaucuuccagcagcacauccagcucgaguccaccggcgagaacgucaagccccaccaccagcucaagaacaccgucaccgucgacaacaccgucggcaacgacaccauguuccucgucaccuggcaggccuccggcccccccgagaucauccucuucgaccccgacggccgcaaguacuacaccaacaacuucaucaccaaccucaccuuccgcaccgccucccucuggauccccggcaccgccaagcccggccacuggaccuacacccucaacaacacccaccacucccuccaggcccucaaggucaccgucaccucccgcgccuccaacuccgccgucccccccgccaccgucgaggccuucgucgagcgcgacucccuccacuucccccaccccgucaugaucuacgccaacgucaagcagggcuucuaccccauccucaacgccaccgucaccgccaccgucgagcccgagaccggcgaccccgucacccuccgccuccucgacgacggcgccggcgccgacgucaucaagaacgacggcaucuacucccgcuacuucuucuccuucgccgccaacggccgcuacucccucaagguccacgucaaccacucccccuccaucuccacccccgcccacuccauccccggcucccacgccauguacguccccggcuacaccgccaacggcaacauccagaugaacgccccccgcaaguccgucggccgcaacgaggaggagcgcaaguggggcuucucccgcgucuccuccggcggcuccuucuccguccucggcguccccgccggcccccaccccgacgucuucccccccugcaagaucaucgaccucgaggccgucaaggucgaggaggagcucacccucuccuggaccgcccccggcgaggacuucgaccagggccaggccaccuccuacgagauccgcauguccaagucccuccagaacauccaggacgacuucaacaacgccauccucgucaacaccuccaagcgcaacccccagcaggccggcauccgcgagaucuucaccuucuccccccagaucuccaccaacggccccgagcaccagcccaacggcgagacccacgagucccaccgcaucuacgucgccauccgcgccauggaccgcaacucccuccaguccgccgucuccaacaucgcccaggccccccucuucaucccccccaacuccgaccccguccccgcccgcgacuaccucauccucaagggcguccucaccgccaugggccucaucggcaucaucugccucaucaucgucgucacccaccacacccucucccgcaagaagcgcgccgacaagaaggagaacggcaccaagcuccucuga

SEQ ID NO: 1616 - RNA, 708 nt, Artificial Sequence
  AAF82135 variant
auggaggaggagacccacaccgacgccaagauccgcgccgagaacggcaccggcuccuccccccgcggccccggcugcucccuccgccacuucgccugcgagcagaaccuccucucccgccccgacggcuccgccuccuuccuccagggcgacaccuccguccucgccggcgucuacggccccgccgaggucaaggucuccaaggagaucuucaacaaggccacccucgaggucauccuccgccccaagaucggccuccccggcgucgccgagaagucccgcgagcgccucauccgcaacaccugcgaggccgucguccucggcacccuccacccccgcaccuccaucaccgucguccuccaggucgucuccgacgccggcucccuccucgccugcugccucaacgccgccugcauggcccucgucgacgccggcguccccaugcgcgcccucuucugcggcgucgccugcgcccucgacuccgacggcacccucguccucgaccccaccuccaagcaggagaaggaggcccgcgccguccucaccuucgcccucgacuccgucgagcgcaagcuccucauguccuccaccaagggccucuacuccgacaccgagcuccagcagugccucgccgccgcccaggccgccucccagcacgucuuccgcuucuaccgcgagucccuccagcgccgcuacuccaaguccuga

SEQ ID NO: 1617 - RNA, 1752 nt, Artificial Sequence
  CCDS6312.1 variant
auggaggucgccgccaacugcucccuccgcgucaagcgcccccuccucgacccccgcuucgagggcuacaagcucucccucgagccccuccccugcuaccagcucgagcucgacgccgccgucgccgaggucaagcuccgcgacgaccaguacacccucgagcacaugcacgccuucggcauguacaacuaccuccacugcgacuccugguaccaggacuccgucuacuacaucgacacccucggccgcaucaugaaccucaccgucaugcucgacaccgcccucggcaagccccgcgaggucuuccgccuccccaccgaccucaccgccugcgacaaccgccucugcgccuccauccacuucuccuccuccaccugggucacccucuccgacggcaccggccgccucuacgucaucggcaccggcgagcgcggcaacuccgccuccgagaagugggagaucauguucaacgaggagcucggcgaccccuucaucaucauccacuccaucucccuccucaacgccgaggagcacuccaucgccacccuccuccuccgcaucgagaaggaggagcucgacaugaagggcuccggcuucuacgucucccucgagugggucaccaucuccaagaagaaccaggacaacaagaaguacgagaucaucaagcgcgacauccuccgcggcaaguccgucccccacuacgccgccaucgagcccgacggcaacggccucaugaucgucuccuacaagucccucaccuucguccaggccggccaggaccucgaggagaacauggacgaggacaucuccgagaagaucaaggagccccucuacuacuggcagcagaccgaggacgaccucaccgucaccauccgccuccccgaggacuccaccaaggaggacauccagauccaguuccuccccgaccacaucaacaucguccucaaggaccaccaguuccucgagggcaagcucuacuccuccaucgaccacgaguccuccaccuggaucaucaaggaguccaacucccucgagaucucccucaucaagaagaacgagggccucaccuggcccgagcucgucaucggcgacaagcagggcgagcucauccgcgacuccgcccagugcgccgccaucgccgagcgccucaugcaccucaccuccgaggagcucaaccccaaccccgacaaggagaagccccccugcaacgcccaggagcucgaggagugcgacaucuucuucgaggaguccuccucccucugccgcuucgacggcaacacccucaagaccacccacgucgucaaccucggcuccaaccaguaccucuucuccgucaucgucgaccccaaggagaugcccugcuucugccuccgccacgacgucgacgcccuccucuggcagccccacuccuccaagcaggacgacaugugggagcacaucgccaccuucaacgcccucggcuacguccaggccuccaagcgcgacaagaaguucuucgccugcgcccccaacuacuccuacgccgcccucugcgagugccuccgccgcgucuucaucuaccgccagcccgcccccauguccaccguccucuacaaccgcaaggagggccgccaggucggccaggucgccaagcagcaggucgccucccucgagaccaacgaccccauccucggcuuccaggccaccaacgagcgccucuucguccucaccaccaagaaccucuuccucaucaaggucaacaccgagaacuga

SEQ ID NO: 1618 - RNA, 1563 nt, Artificial Sequence
  CCDS41288.1 variant
auguccuccccccucgccucccucuccaagacccgcaaggucccccuccccuccgagcccaugaaccccggccgccgcggcauccgcaucuacggcgacgaggacgaggucgacaugcucuccgacggcugcggcuccgaggagaagaucuccguccccuccugcuacggcggcaucggcgcccccgucucccgccagguccccgccucccacgacuccgagcucauggccuucaugacccgcaagcucugggaccucgagcagcaggucaaggcccagaccgacgagauccucuccaaggaccagaagaucgccgcccucgaggaccucguccagacccuccgcccccaccccgccgaggccacccuccagcgccaggaggagcucgagaccaugugcguccagcuccagcgccagguccgcgagauggagcgcuuccucuccgacuacggccuccagugggucggcgagcccauggaccaggaggacuccgaguccaagaccgucuccgagcacggcgagcgcgacuggaugaccgccaagaaguucuggaagcccggcgacucccucgccccccccgaggucgacuucgaccgccuccucgccucccuccaggaccucuccgagcucgucgucgagggcgacacccaggucacccccguccccggcggcgcccgccuccgcacccucgagcccaucccccucaagcucuaccgcaacggcaucaugauguucgacggccccuuccagcccuucuacgaccccuccacccagcgcugccuccgcgacauccucgacggcuucuuccccuccgagcuccagcgccucuaccccaacggcguccccuucaaggucuccgaccuccgcaaccaggucuaccucgaggacggccucgaccccuuccccggcgagggccgcgucgucggccgccagcucaugcacaaggcccucgaccgcgucgaggagcaccccggcucccgcaugaccgccgagaaguuccucaaccgccuccccaaguucgucauccgccagggcgaggucaucgacauccgcggccccauccgcgacacccuccagaacugcugcccccuccccgcccgcauccaggagaucgucgucgagacccccacccucgccgccgagcgcgagcgcucccaggagucccccaacacccccgcccccccccucuccaugcuccgcaucaaguccgagaacggcgagcaggccuuccuccucaugaugcagcccgacaacaccaucggcgacguccgcgcccuccucgcccaggcccgcgucauggacgccuccgccuucgagaucuucuccaccuucccccccacccucuaccaggacgacacccucacccuccaggccgccggccucguccccaaggccgcccuccuccuccgcgcccgccgcgcccccaaguccucccucaaguucucccccggccccugccccggccccggccccggccccucccccggccccggccccggccccucccccggccccggccccggccccucccccugccccggccccucccccuccccccaguga

SEQ ID NO: 1619 - RNA, 429 nt, Artificial Sequence
  AAA88022 variant
auggccaccaagaucgacaaggaggccugccgcgccgccuacaaccucguccgcgacgacggcuccgccgucaucugggucaccuucaaguacgacggcuccaccaucguccccggcgagcagggcgccgaguaccagcacuucauccagcagugcaccgacgacguccgccucuucgccuucguccgcuucaccaccggcgacgccauguccaagcgcuccaaguucgcccucaucaccuggaucggcgagaacgucuccggccuccagcgcgccaagaccggcaccgacaagacccucgucaaggaggucguccagaacuucgccaaggaguucgucaucuccgaccgcaaggagcucgaggaggacuucaucaaguccgagcucaagaaggccggcggcgccaacuacgacgcccagaccgaguga

SEQ ID NO: 1620 - RNA, 495 nt, Artificial Sequence
  CCQ43891 variant
auggccacccgcgaccccugggucuggauggccucccccgacuuccaggcccgcaagggcaagcgcguccaccaggagacccucgcccccggcgagaccaaggacaagauggagcuccucggccuccgcggcccccucgaccuccucggccccggcgcccuccucgccacccucggcaagauggcccccggcgagcacaaggcccagcgcgcccccaaggagucccccgacaagaccgcccgcugggcccagcgcgacccccagggcccccgcgucucccucgaguaccucgagcgccgcgccaccaugggccaccaggccucccucgaccaccagggcccccgcgccucccagggcgccuggggccucggcgagcgcaccgucuggaccgucccccaggaccgccgcggcucccucgccaccgaggcccgcauggagcuccagggccccggcgucccccaggccucccgcgccucccgcgagacccagugguga

SEQ ID NO: 1621 - RNA, 1623 nt, Artificial Sequence
  AAO18361 variant
augggccccggcgagcgcgccggcggcggcggcgacgccggcaagggcaacgccgccggcggcggcggcggcggccgcuccgccaccaccgccggcucccgcgccgucuccgcccucugccuccuccucuccgucggcuccgccgccgccugccuccuccucggcguccaggccgccgcccuccagggccgcgucgccgcccucgaggaggagcgcgagcuccuccgccgcgccggcccccccggcgcccucgacgccugggccgagccccaccucgagcgccuccuccgcgagaagcucgacggccucgccaagauccgcaccgcccgcgaggcccccuccgagugcgucugcccccccggcccccccggccgccgcggcaagcccggccgccgcggcgaccccggcccccccggccaguccggccgcgacggcuaccccggcccccucggccucgacggcaagcccggccuccccggccccaagggcgagaagggcgcccccggcgacuucggcccccgcggcgaccagggccaggacggcgccgccggcccccccggcccccccggcccccccggcgcccgcggcccccccggcgacaccggcaaggacggcccccgcggcgcccagggccccgccggccccaagggcgagcccggccaggacggcgagaugggccccaagggcccccccggccccaagggcgagcccggcguccccggcaagaagggcgacgacggcacccccucccagcccggcccccccggccccaagggcgagcccggcuccaugggcccccgcggcgagaacggcgucgacggcgcccccggccccaagggcgagcccggccaccgcggcaccgacggcgccgccggcccccgcggcgcccccggccucaagggcgagcagggcgacaccgucgucaucgacuacgacggccgcauccucgacgcccucaagggcccccccggcccccagggcccccccggcccccccggcauccccggcgccaagggcgagcucggccuccccggcgcccccggcaucgacggcgagaagggccccaagggccagaagggcgaccccggcgagcccggccccgccggccucaagggcgaggccggcgagaugggccucuccggccuccccggcgccgacggccucaagggcgagaagggcgaguccgccuccgacucccuccaggagucccucgcccagcucaucgucgagcccggcccccccggcccccccggcccccccggccccaugggccuccagggcauccagggccccaagggccucgacggcgccaagggcgagaagggcgccuccggcgagcgcggccccuccggccuccccggccccgucggcccccccggccucaucggccuccccggcaccaagggcgagaagggccgccccggcgagcccggccucgacggcuuccccggcccccgcggcgagaagggcgaccgcuccgagcgcggcgagaagggcgagcgcggcguccccggccgcaagggcgucaagggccagaagggcgagcccggcccccccggccucgaccagcccugccccgucggccccgacggccuccccguccccggcugcuggcacaaguga

SEQ ID NO: 1622 - RNA, 492 nt, Artificial Sequence
  CAG25548 variant
augcucgcccgcgcccuccuccucugcgccguccucgcccucucccacaccgccaaccccugcugcucccaccccugccagaaccgcggcgucugcauguccgucggcuucgaccaguacaagugcgacugcacccgcaccggcuucuacggcgagaacugcuccacccccgaguuccucacccgcaucaagcucuuccucaagcccacccccaacaccguccacuacauccucacccacuucaagggcuucuggaacgucgucaacaacauccccuuccuccgcaacgccaucauguccuacguccucaccucccgcucccaccucaucgacuccccccccaccuacaacgccgacuacggcuacaaguccugggaggccuucuccaaccucuccuacuacacccgcgcccucccccccguccccgacgacugccccaccccccucggcgucaaggcccuccacgccuccgucuuccaggaccgcuccuga

SEQ ID NO: 1623 - RNA, 1632 nt, Artificial Sequence
  AAC50809 variant
augggcaccucccucucccccaacgaccccuggccccucaacccccucuccauccagcagaccacccuccuccuccuccucuccguccucgccaccguccacgucggccagcgccuccuccgccagcgccgccgccagcuccgcuccgccccccccggccccuucgccuggccccucaucggcaacgccgccgccgucggccaggccgcccaccucuccuucgcccgccucgcccgccgcuacggcgacgucuuccagauccgccucggcuccugccccaucgucguccucaacggcgagcgcgccauccaccaggcccucguccagcagggcuccgccuucgccgaccgccccgccuucgccuccuuccgcgucgucuccggcggccgcuccauggccuucggccacuacuccgagcacuggaagguccagcgccgcgccgcccacuccaugaugcgcaacuucuucacccgccagccccgcucccgccagguccucgagggccacguccucuccgaggcccgcgagcucgucgcccuccucguccgcggcuccgccgacggcgccuuccucgacccccgcccccucaccgucgucgccgucgccaacgucauguccgccgucugcuucggcugccgcuacucccacgacgaccccgaguuccgcgagcuccucucccacaacgaggaguucggccgcaccgucggcgccggcucccucgucgacgucaugcccuggcuccaguacuuccccaaccccguccgcaccgucuuccgcgaguucgagcagcucaaccgcaacuucuccaacuucauccucgacaaguuccuccgccacugcgagucccuccgccccggcgccgccccccgcgacaugauggacgccuucauccucuccgccgagaagaaggccgccggcgacucccacggcggcggcgcccgccucgaccucgagaacguccccgccaccaucaccgacaucuucggcgccucccaggacacccucuccaccgcccuccaguggcuccuccuccucuucacccgcuaccccgacguccagacccgcguccaggccgagcucgaccaggucgucggccgcgaccgccuccccugcaugggcgaccagcccaaccuccccuacguccucgccuuccucuacgaggccaugcgcuucuccuccuucguccccgucaccaucccccacgccaccaccgccaacaccuccguccucggcuaccacauccccaaggacaccgucgucuucgucaaccagugguccgucaaccacgacccccucaaguggcccaaccccgagaacuucgaccccgcccgcuuccucgacaaggacggccucaucaacaaggaccucaccucccgcgucaugaucuucuccgucggcaagcgccgcugcaucggcgaggagcucuccaagaugcagcucuuccucuucaucuccauccucgcccaccagugcgacuuccgcgccaaccccaacgagcccgccaagaugaacuucuccuacggccucaccaucaagcccaaguccuucaaggucaacgucacccuccgcgaguccauggagcuccucgacuccgccguccagaaccuccaggccaaggagaccugccaguga

SEQ ID NO: 1624 - RNA, 333 nt, Artificial Sequence
  NM_001129828 variant
auguggaugggccucauccagcucgucgagggcgucaagcgcaaggaccagggcuuccucgagaaggaguucuaccacaagaccaacaucaagaugcgcugcgaguuccucgccugcuggcccgccuucaccguccucggcgaggccuggcgcgaccaggucgacuggucccgccuccuccgcgacgccggccucgucaagaugucccgcaagccccgcgccuccuccccccucuccaacaaccacccccccacccccaagcgcuucccccgccagcccggccgcgagaagggccccaucaaggagguccccggcaccaagggcucccccuga

SEQ ID NO: 1625 - RNA, 384 nt, Artificial Sequence
  NM_001129826 variant
auguggaugggccucauccagcucgucgagggcgucaagcgcaaggaccagggcuuccucgagaaggaguucuaccacaagaccaacaucaagaugcgcugcgaguuccucgccugcuggcccgccuucaccguccucggcgaggccuggcgcgaccaggucgacuggucccgccuccuccgcgacgccggccucgucaagaugucccgcaagccccgcgccuccuccccccucuccaacaaccacccccccacccccaagcgccgcggcuccggccgccacccccucaaccccggccccgaggcccucuccaaguucccccgccagcccggccgcgagaagggccccaucaaggagguccccggcaccaagggcucccccuga

SEQ ID NO: 1626 - RNA, 570 nt, Artificial Sequence
  AAI40914 variant
augaccgacaagaccgagaaggucgccgucgaccccgagaccgucuucaagcgcccccgcgagugcgacucccccuccuaccagaagcgccagcgcauggcccuccucgcccgcaagcagggcgccggcgacucccucaucgccggcuccgccauguccaaggccaagaagcucaugaccggccacgccaucccccccucccagcucgacucccagaucgacgacuucaccggcuucuccaaggaccgcaugaugcagaagcccggcuccaacgcccccgucggcggcaacgucaccuccuccuucuccggcgacgaccucgagugccgcgagaccgccuccucccccaagucccagcgcgagaucaacgccgacaucaagcgcaagcucgucaaggagcuccgcugcgucggccagaaguacgagaagaucuucgagaugcucgagggcguccagggccccaccgccguccgcaagcgcuucuucgaguccaucaucaaggaggccgcccgcugcaugcgccgcgacuucgucaagcaccucaagaagaagcucaagcgcaugaucuga

SEQ ID NO: 1627 - RNA, 795 nt, Artificial Sequence
  AAH20662 variant
augcuccgccuccuccgccucgcccucgccuucuacggccgcaccgccgaccccgccgagcgccagggcccccagcagcagggccucccccagggcgacacccagcucaccaccguccagggcgucgucaccuccuucugcggcgacuacggcaugaucgacgaguccaucuacuucuccuccgacgucgucaccggcaacgucccccucaaggucggccagaaggucaacgucgucgucgaggaggacaagccccacuacggccuccgcgccaucaaggucgacgucgucccccgccaccucuacggcgccggccccuccgacuccggcacccgcguccucaucggcugcgucaccuccaucaacgaggacaacaucuacaucuccaacuccaucuacuucuccaucgccaucgucuccgaggacuucguccccuacaagggcgaccuccucgaggucgaguacuccaccgagcccggcaucuccaacaucaaggccaccuccgucaagcccauccgcugcauccacaccgaggaggucugcaucaccuccguccacggccgcaacggcgucaucgacuacaccaucuucuucacccucgacuccgucaagcuccccgacggcuacgucccccaggucgacgacaucgucaacgucgucauggucgaguccauccaguucugcuucaucuggcgcgccaucuccaucacccccguccacaaguccuccuccggcuuccaggacgacggcggccucggccgccccaagcgcgagcgccgcucccaguccaucuga

SEQ ID NO: 1628 - RNA, 2844 nt, Artificial Sequence
  CCDS735.1 variant
augucccuccccucccgccagaccgccaucaucgucaacccccccccccccgaguacaucaacaccaagaagaacggccgccucaccaaccagcuccaguaccuccagaaggucguccucaaggaccucuggaagcacuccuucuccuggcccuuccagcgccccgucgacgccgucaagcuccagcuccccgacuacuacaccaucaucaagaaccccauggaccucaacaccaucaagaagcgccucgagaacaaguacuacgccaaggccuccgagugcaucgaggacuucaacaccauguucuccaacugcuaccucuacaacaagcccggcgacgacaucguccucauggcccaggcccucgagaagcucuucaugcagaagcucucccagaugccccaggaggagcaggucgucggcgucaaggagcgcaucaagaagggcacccagcagaacaucgccgucuccuccgccaaggagaaguccucccccuccgccaccgagaaggucuucaagcagcaggagauccccuccgucuuccccaagaccuccaucuccccccucaacgucguccagggcgccuccgucaacuccuccucccagaccgccgcccaggucaccaagggcgucaagcgcaaggccgacaccaccacccccgccaccuccgccgucaaggccuccuccgaguucucccccaccuucaccgagaaguccgucgcccucccccccaucaaggagaacaugcccaagaacguccuccccgacucccagcagcaguacaacgucgucaagaccgucaaggucaccgagcagcuccgccacugcuccgagauccucaaggagaugcucgccaagaagcacuucuccuacgccuggcccuucuacaaccccgucgacgucaacgcccucggccuccacaacuacuacgacgucgucaagaaccccauggaccucggcaccaucaaggagaagauggacaaccaggaguacaaggacgccuacaaguucgccgccgacguccgccucauguucaugaacugcuacaaguacaacccccccgaccacgaggucgucaccauggcccgcaugcuccaggacgucuucgagacccacuucuccaagauccccaucgagcccgucgaguccaugccccucugcuacaucaagaccgacaucaccgagaccaccggccgcgagaacaccaacgaggccuccuccgagggcaacuccuccgacgacuccgaggacgagcgcgucaagcgccucgccaagcuccaggagcagcucaaggccguccaccagcagcuccagguccucucccagguccccuuccgcaagcucaacaagaagaaggagaaguccaagaaggagaagaagaaggagaaggucaacaacuccaacgagaacccccgcaagaugugcgagcagaugcgccucaaggagaaguccaagcgcaaccagcccaagaagcgcaagcagcaguucaucggccucaaguccgaggacgaggacaacgccaagcccaugaacuacgacgagaagcgccagcucucccucaacaucaacaagcuccccggcgacaagcucggccgcgucguccacaucauccagucccgcgagcccucccucuccaacuccaaccccgacgagaucgagaucgacuucgagacccucaaggccuccacccuccgcgagcucgagaaguacgucuccgccugccuccgcaagcgcccccucaagccccccgccaagaagaucaugauguccaaggaggagcuccacucccagaagaagcaggagcucgagaagcgccuccucgacgucaacaaccagcucaacucccgcaagcgccagaccaaguccgacaagacccagcccuccaaggccgucgagaacgucucccgccucuccgaguccuccuccuccuccuccuccuccuccgaguccgaguccuccuccuccgaccucuccuccuccgacuccuccgacuccgaguccgagauguuccccaaguucaccgaggucaagcccaacgacucccccuccaaggagaacgucaagaagaugaagaacgagugcaucccccccgagggccgcaccggcgucacccagaucggcuacugcguccaggacaccaccuccgccaacaccacccucguccaccagaccacccccucccacgucaugccccccaaccaccaccagcucgccuucaacuaccaggagcucgagcaccuccagaccgucaagaacaucuccccccuccagauccucccccccuccggcgacuccgagcagcucuccaacggcaucaccgucaugcaccccuccggcgacuccgacaccaccaugcucgaguccgagugccaggcccccguccagaaggacaucaagaucaagaacgccgacuccuggaagucccucggcaagcccgucaagcccuccggcgucaugaaguccuccgacgagcucuucaaccaguuccgcaaggccgccaucgagaaggaggucaaggcccgcacccaggagcucauccgcaagcaccucgagcagaacaccaaggagcucaaggccucccaggagaaccagcgcgaccucggcaacggccucaccgucgaguccuucuccaacaagauccagaacaagugcuccggcgaggagcagaaggagcaccagcaguccuccgaggcccaggacaaguccaagcucuggcuccucaaggaccgcgaccucgcccgccagaaggagcaggagcgccgccgccgcgaggccauggucggcaccaucgacaugacccuccaguccgacaucaugaccauguucgagaacaacuucgacuga

SEQ ID NO: 1629 - RNA, 543 nt, Artificial Sequence
  CCDS35455.1 variant
augcaggccgagggccgcggcaccggcggcuccaccggcgacgccgacggccccggcggccccggcauccccgacggccccggcggcaacgccggcggccccggcgaggccggcgccaccggcggccgcggcccccgcggcgccggcgccgcccgcgccuccggcccccgcggcggcgccccccgcggcccccacggcggcgccgccuccgcccaggacggccgcugccccugcggcgcccgccgccccgacucccgccuccucgagcuccacaucaccaugcccuucuccucccccauggaggccgagcucguccgccgcauccucucccgcgacgccgccccccucccccgccccggcgccguccucaaggacuucaccgucuccggcaaccuccucuucauccgccucaccgccgccgaccaccgccagcuccagcucuccaucuccuccugccuccagcagcucucccuccucauguggaucacccagugcuuccuccccgucuuccucgcccaggcccccuccggccagcgccgcuga

SEQ ID NO: 1630 - RNA, 633 nt, Artificial Sequence
  CAA10196 variant
augcaggccgagggccagggcaccggcggcuccaccggcgacgccgacggccccggcggccccggcauccccgacggccccggcggcaacgccggcggccccggcgaggccggcgccaccggcggccgcggcccccgcggcgccggcgccgcccgcgccuccggcccccgcggcggcgccccccgcggcccccacggcggcgccgccuccgcccaggacggccgcugccccugcggcgcccgccgccccgacucccgccuccuccagcuccacaucaccaugcccuucuccucccccauggaggccgagcucguccgccgcauccucucccgcgacgccgccccccucccccgccccggcgccguccucaaggacuucaccgucuccggcaaccuccucuucauguccguccgcgaccaggaccgcgagggcgccggccgcaugcgcgucgucggcuggggccucggcuccgccucccccgagggccagaaggcccgcgaccuccgcacccccaagcacaaggucuccgagcagcgccccggcacccccggcccccccccccccgagggcgcccagggcgacggcugccgcggcgucgccuucaacgucauguucuccgccccccacaucuga

SEQ ID NO: 1631 - RNA, 1992 nt, Artificial Sequence
  CCDS13459.1 variant
auggccgccaccgagaucuccguccucuccgagcaguucaccaagaucaaggagcucgagcucaugcccgagaagggccucaaggaggaggagaaggacggcgucugccgcgagaaggaccaccgcucccccuccgagcucgaggccgagcgcaccuccggcgccuuccaggacuccguccucgaggaggaggucgagcucguccucgcccccuccgaggaguccgagaaguacauccucacccuccagaccguccacuucaccuccgaggccgucgagcuccaggacaugucccuccucuccauccagcagcaggagggcguccaggucgucguccagcagcccggccccggccuccucuggcucgaggagggcccccgccagucccuccagcagugcgucgccaucuccauccagcaggagcucuacuccccccaggagauggagguccuccaguuccacgcccucgaggagaacgucauggucgccuccgaggacuccaagcucgccgucucccucgccgagaccaccggccucaucaagcucgaggaggagcaggagaagaaccagcuccucgccgagcgcaccaaggagcagcucuucuucgucgagaccauguccggcgacgagcgcuccgacgagaucguccucaccgucuccaacuccaacgucgaggagcaggaggaccagcccaccgccggccaggccgacgccgagaaggccaaguccaccaagaaccagcgcaagaccaagggcgccaagggcaccuuccacugcgacgucugcauguucaccuccucccgcauguccuccuucaaccgccacaugaagacccacaccuccgagaagccccaccucugccaccucugccucaagaccuuccgcaccgucacccuccuccgcaaccacgucaacacccacaccggcacccgccccuacaagugcaacgacugcaacauggccuucgucaccuccggcgagcucguccgccaccgccgcuacaagcacacccacgagaagcccuucaagugcuccaugugcaaguacgccuccgucgaggccuccaagcucaagcgccacguccgcucccacaccggcgagcgccccuuccagugcugccagugcuccuacgccucccgcgacaccuacaagcucaagcgccacaugcgcacccacuccggcgagaagcccuacgagugccacaucugccacacccgcuucacccaguccggcaccaugaagauccacauccuccagaagcacggcgagaacguccccaaguaccagugcccccacugcgccaccaucaucgcccgcaaguccgaccuccgcguccacaugcgcaaccuccacgccuacuccgccgccgagcucaagugccgcuacugcuccgccgucuuccacgagcgcuacgcccucauccagcaccagaagacccacaagaacgagaagcgcuucaagugcaagcacugcuccuacgccugcaagcaggagcgccacaugaccgcccacauccgcacccacaccggcgagaagcccuucaccugccucuccugcaacaagugcuuccgccagaagcagcuccucaacgcccacuuccgcaaguaccacgacgccaacuucauccccaccgucuacaagugcuccaagugcggcaagggcuucucccgcuggaucaaccuccaccgccacuccgagaagugcggcuccggcgaggccaaguccgccgccuccggcaagggccgccgcacccgcaagcgcaagcagaccauccucaaggaggccaccaagggccagaaggaggccgccaagggcuggaaggaggccgccaacggcgacgaggccgccgccgaggaggccuccaccaccaagggcgagcaguuccccggcgagauguuccccgucgccugccgcgagaccaccgcccgcgucaaggaggaggucgacgagggcgucaccugcgagaugcuccucaacaccauggacaaguga

SEQ ID NO: 1632 - RNA, 2148 nt, Artificial Sequence
  CCDS11368.1 variant
augucccaggucauguccuccccccuccucgccggcggccacgccgucucccucgcccccugcgacgagccccgccgcacccuccaccccgcccccucccccucccuccccccccagugcuccuacuacaccaccgagggcuggggcgcccaggcccucauggcccccguccccugcaugggcccccccggccgccuccagcaggccccccaggucgaggccaaggccaccugcuuccuccccucccccggcgagaaggcccucggcacccccgaggaccucgacuccuacaucgacuucucccucgagucccucaaccagaugauccucgagcucgaccccaccuuccagcuccucccccccggcaccggcggcucccaggccgagcucgcccaguccaccauguccaugcgcaagaaggaggaguccgaggcccucgacaucaaguacaucgaggucaccuccgcccgcucccgcugccacgacggcccccagcacugcuccucccccuccgucaccccccccuucggcucccuccgcuccggcggccuccuccucucccgcgacgucccccgcgagacccgcuccuccuccgagucccucaucuucuccggcaaccagggccgcggccaccagcgcccccucccccccuccgagggccucuccccccgcccccccaacucccccuccaucuccauccccugcaugggcuccaaggccuccuccccccacggccucggcuccccccucgucgccuccccccgccucgagaagcgccucggcggccucgccccccagcgcggcucccgcaucuccguccucuccgccucccccgucuccgacgucuccuacauguucggcuccucccagucccuccuccacuccuccaacuccucccaccaguccuccucccgcucccucgagucccccgccaacuccuccuccucccuccacucccucggcuccgucucccucugcacccgccccuccgacuuccaggccccccgcaaccccacccucaccaugggccagccccgcaccccccacucccccccccucgccaaggagcacgccuccuccugcccccccuccaucaccaacuccauggucgacauccccaucguccucaucaacggcugccccgagcccggcuccucccccccccagcgcacccccggccaccagaacuccguccagcccggcgccgccucccccuccaaccccugccccgccacccgcuccaacucccagacccucuccgacgcccccuucaccaccugccccgagggccccgcccgcgacaugcagcccaccaugaaguucgucauggacaccuccaaguacugguucaagcccaacaucacccgcgagcaggccaucgagcuccuccgcaaggaggagcccggcgccuucgucauccgcgacuccuccuccuaccgcggcuccuucggccucgcccucaagguccaggagguccccgccuccgcccagucccgccccggcgaggacuccaacgaccucauccgccacuuccucaucgaguccuccgccaagggcguccaccucaagggcgccgacgaggagcccuacuucggcucccucuccgccuucgucugccagcacuccaucauggcccucgcccuccccugcaagcucaccaucccccagcgcgagcucggcggcgccgacggcgccuccgacuccaccgacucccccgccuccugccagaagaaguccgccggcugccacacccucuaccucuccuccgucuccgucgagacccucaccggcgcccucgccguccagaaggccaucuccaccaccuucgagcgcgacauccuccccacccccaccgucguccacuucaaggucaccgagcagggcaucacccucaccgacguccagcgcaaggucuucuuccgccgccacuacccccucaccacccuccgcuucugcggcauggaccccgagcagcgcaaguggcagaaguacugcaagcccuccuggaucuucggcuucgucgccaagucccagaccgagccccaggagaacgucugccaccucuucgccgaguacgacaugguccagcccgccucccaggucaucggccucgucaccgcccuccuccaggacgccgagcgcauguga

SEQ ID NO: 1633 - RNA, 1302 nt, Artificial Sequence
  AAH06510 variant
auggcccuccgcgucacccgcaacuccaagaucaacgccgagaacaaggccaagaucaacauggccggcgccaagcgcguccccaccgcccccgccgccaccuccaagcccggccuccgcccccgcaccgcccucggcgacaucggcaacaaggucuccgagcagcuccaggccaagaugcccaugaagaaggaggccaagcccuccgccaccggcaaggucaucgacaagaagcuccccaagccccucgagaagguccccaugcucguccccguccccgucuccgagcccguccccgagcccgagcccgagcccgagcccgagcccgucaaggaggagaagcucucccccgagcccauccucgucgacaccgccucccccucccccauggagaccuccggcugcgcccccgccgaggaggaccucugccaggccuucuccgacgucauccucgccgucaacgacgucgacgccgaggacggcgccgaccccaaccucugcuccgaguacgucaaggacaucuacgccuaccuccgccagcucgaggaggagcaggccguccgccccaaguaccuccucggccgcgaggucaccggcaacaugcgcgccauccucaucgacuggcucguccagguccagaugaaguuccgccuccuccaggagaccauguacaugaccgucuccaucaucgaccgcuucaugcagaacaacugcguccccaagaagaugcuccagcucgucggcgucaccgccauguucaucgccuccaaguacgaggagauguacccccccgagaucggcgacuucgccuucgucaccgacaacaccuacaccaagcaccagauccgccagauggagaugaagauccuccgcgcccucaacuucggccucggccgcccccucccccuccacuuccuccgccgcgccuccaagaucggcgaggucgacgucgagcagcacacccucgccaaguaccucauggagcucaccaugcucgacuacgacaugguccacuucccccccucccagaucgccgccggcgccuucugccucgcccucaagauccucgacaacggcgaguggacccccacccuccagcacuaccucuccuacaccgaggagucccuccuccccgucaugcagcaccucgccaagaacgucgucauggucaaccagggccucaccaagcacaugaccgucaagaacaaguacgccaccuccaagcacgccaagaucuccacccucccccagcucaacuccgcccucguccaggaccucgccaaggccgucgccaaggucuga

SEQ ID NO: 1634 - RNA, 888 nt, Artificial Sequence
  AAA58392 variant
auggagcaccagcuccucugcugcgaggucgagaccauccgccgcgccuaccccgacgccaaccuccucaacgaccgcguccuccgcgccaugcucaaggccgaggagaccugcgcccccuccgucuccuacuucaagugcguccagaaggagguccuccccuccaugcgcaagaucgucgccaccuggaugcucgaggucugcgaggagcagaagugcgaggaggaggucuucccccucgccaugaacuaccucgaccgcuuccucucccucgagcccgucaagaagucccgccuccagcuccucggcgccaccugcauguucgucgccuccaagaugaaggagaccaucccccucaccgccgagaagcucugcaucuacaccgacaacuccauccgccccgaggagcuccuccagauggagcuccuccucgucaacaagcucaaguggaaccucgccgccaugaccccccacgacuucaucgagcacuuccucuccaagaugcccgaggccgaggagaacaagcagaucauccgcaagcacgcccagaccuucgucgcccucugcgccaccgacgucaaguucaucuccaacccccccuccauggucgccgccggcuccgucgucgccgccguccagggccucaaccuccgcucccccaacaacuuccucuccuacuaccgccucacccgcuuccucucccgcgucaucaagugcgaccccgacugccuccgcgccugccaggagcagaucgaggcccuccucgaguccucccuccgccaggcccagcagaacauggaccccaaggccgccgaggaggaggaggaggaggaggaggaggucgaccucgccugcacccccaccgacguccgcgacgucgacaucuga

SEQ ID NO: 1635 - RNA, 651 nt, Artificial Sequence
  AAA36601 variant
augcuccgccucuccgagcgcaacaugaagguccuccucgccgccgcccucaucgccggcuccgucuucuuccuccuccuccccggccccuccgccgccgacgagaagaagaagggccccaaggucaccgucaaggucuacuucgaccuccgcaucggcgacgaggacgucggccgcgucaucuucggccucuucggcaagaccguccccaagaccgucgacaacuucgucgcccucgccaccggcgagaagggcuucggcuacaagaacuccaaguuccaccgcgucaucaaggacuucaugauccagggcggcgacuucacccgcggcgacggcaccggcggcaaguccaucuacggcgagcgcuuccccgacgagaacuucaagcucaagcacuacggccccggcugggucuccauggccaacgccggcaaggacaccaacggcucccaguucuucaucaccaccgucaagaccgccuggcucgacggcaagcacgucgucuucggcaagguccucgagggcauggaggucguccgcaaggucgaguccaccaagaccgacucccgcgacaagccccucaaggacgucaucaucgccgacugcggcaagaucgaggucgagaagcccuucgccaucgccaaggaguga

SEQ ID NO: 1636 - RNA, 1044 nt, Artificial Sequence
  AAD10634 variant
augccccgcggccagaaguccaagcuccgcgcccgcgagaagcgccgcaaggcccgcgaggagacccagggccucaaggucgcccacgccaccgccgccgagaaggaggagugccccuccuccucccccguccucggcgacacccccaccuccucccccgccgccggcaucccccagaagccccagggcgccccccccaccaccaccgccgccgccgccgucuccugcaccgaguccgacgagggcgccaagugccagggcgaggagaacgccuccuucucccaggccaccaccuccaccgaguccuccgucaaggaccccgucgccugggaggccggcaugcucaugcacuucauccuccgcaaguacaagaugcgcgagcccaucaugaaggccgacaugcucaaggucgucgacgagaaguacaaggaccacuucaccgagauccucaacggcgccucccgccgccucgagcucgucuucggccucgaccucaaggaggacaaccccuccggccacaccuacacccucgucuccaagcucaaccucaccaacgacggcaaccucuccaacgacugggacuucccccgcaacggccuccucaugccccuccucggcgucaucuuccucaagggcaacuccgccaccgaggaggagaucuggaaguucaugaacguccucggcgccuacgacggcgaggagcaccucaucuacggcgagccccgcaaguucaucacccaggaccucguccaggagaaguaccucaaguacgagcagguccccaacuccgaccccccccgcuaccaguuccucuggggcccccgcgccuacgccgagaccaccaagaugaagguccucgaguuccucgccaagaugaacggcgccaccccccgcgacuuccccucccacuacgaggaggcccuccgcgacgaggaggagcgcgcccagguccgcuccuccguccgcgcccgccgccgcaccaccgccaccaccuuccgcgcccgcucccgcgcccccuucucccgcuccucccaccccauguga

SEQ ID NO: 1637 - RNA, 2436 nt, Artificial Sequence
  BAF91373 variant
auggagucccagggcgucccccccggccccuaccgcgccaccaagcucuggaacgaggucaccaccuccuuccgcgccggcaugccccuccgcaagcaccgccagcacuucaagaaguacggcaacugcuucaccgccggcgaggccgucgacuggcucuacgaccuccuccgcaacaacuccaacuucggccccgaggucacccgccagcagaccauccagcuccuccgcaaguuccucaagaaccacgucaucgaggacaucaagggccgcuggggcuccgagaacgucgacgacaacaaccagcucuuccgcuuccccgccaccuccccccucaagacccucccccgccgcuaccccgagcuccgcaagaacaacaucgagaacuucuccaaggacaaggacuccaucuucaagcuccgcaaccucucccgccgcacccccaagcgccacggccuccaccucucccaggagaacggcgagaagaucaagcacgagaucaucaacgaggaccaggagaacgccaucgacaaccgcgagcucucccaggaggacgucgaggaggucuggcgcuacgucauccucaucuaccuccagaccauccucggcguccccucccucgaggaggucaucaaccccaagcaggucaucccccaguacaucauguacaacauggccaacaccuccaagcgcggcgucgucauccuccagaacaaguccgacgaccucccccacuggguccucuccgccaugaagugccucgccaacuggccccgcuccaacgacaugaacaaccccaccuacgucggcuucgagcgcgacgucuuccgcaccaucgccgacuacuuccucgaccuccccgagccccuccucaccuucgaguacuacgagcucuucgucaacauccucgucgucugcggcuacaucaccgucuccgaccgcuccuccggcauccacaagauccaggacgacccccaguccuccaaguuccuccaccucaacaaccucaacuccuucaaguccaccgagugccuccuccucucccuccuccaccgcgagaagaacaaggaggaguccgacuccaccgagcgccuccagaucuccaaccccggcuuccaggagcgcugcgccaagaagaugcagcucgucaaccuccgcaaccgccgcgucuccgccaacgacaucaugggcggcuccugccacaaccucaucggccucuccaacaugcacgaccucuccuccaacuccaagccccgcugcugcucccucgagggcaucgucgacguccccggcaacuccuccaaggaggccuccuccgucuuccaccaguccuuccccaacaucgagggccagaacaacaagcucuuccucgaguccaagcccaagcaggaguuccuccucaaccuccacuccgaggagaacauccagaagcccuucuccgccggcuucaagcgcaccuccacccucaccguccaggaccaggaggagcucugcaacggcaagugcaaguccaagcagcucugccgcucccagucccuccuccuccgcuccuccacccgccgcaacuccuacaucaacacccccgucgccgagaucaucaugaagcccaacgucggccagggcuccaccuccguccagaccgccauggaguccgagcucggcgaguccuccgccaccaucaacaagcgccucugcaaguccaccaucgagcucuccgagaacucccuccuccccgccuccuccaugcucaccggcacccagucccuccuccagccccaccucgagcgcgucgccaucgacgcccuccagcucugcugccuccuccuccccccccccaaccgccgcaagcuccagcuccucaugcgcaugaucucccgcaugucccagaacgucgacaugcccaagcuccacgacgccaugggcacccgcucccucaugauccacaccuucucccgcugcguccucugcugcgccgaggaggucgaccucgacgagcuccucgccggccgccucgucuccuuccucauggaccaccaccaggagauccuccagguccccuccuaccuccagaccgccgucgagaagcaccucgacuaccucaagaagggccacaucgagaaccccggcgacggccucuucgccccccuccccaccuacuccuacugcaagcagaucuccgcccaggaguucgacgagcagaaggucuccaccucccaggccgccaucgccgagcuccucgagaacaucaucaagaaccgcucccucccccucaaggagaagcgcaagaagcucaagcaguuccagaaggaguacccccucaucuaccagaagcgcuuccccaccaccgaguccgaggccgcccucuucggcgacaagcccaccaucaagcagcccaugcucauccuccgcaagcccaaguuccgcucccuccgcuga

SEQ ID NO: 1638 - RNA, 297 nt, Artificial Sequence
  AAA46940 variant
augcacggcgacacccccacccuccacgaguacaugcucgaccuccagcccgagaccaccgaccucuacugcuacgagcagcucaacgacuccuccgaggaggaggacgagaucgacggccccgccggccaggccgagcccgaccgcgcccacuacaacaucgucaccuucugcugcaagugcgacuccacccuccgccucugcguccaguccacccacgucgacauccgcacccucgaggaccuccucaugggcacccucggcaucgucugccccaucugcucccagaagcccuga

SEQ ID NO: 1639 - RNA, 318 nt, Artificial Sequence
  AAA46947 variant
augcacggccccaaggccacccuccaggacaucguccuccaccucgagccccagaacgagauccccgucgaccuccucugccacgagcagcucuccgacuccgaggaggagaacgacgagaucgacggcgucaaccaccagcaccuccccgcccgccgcgccgagccccagcgccacaccaugcucugcaugugcugcaagugcgaggcccgcaucaagcucgucgucgaguccuccgccgacgaccuccgcgccuuccagcagcucuuccucaacacccucuccuucgucugccccuggugcgccucccagcaguga

SEQ ID NO: 1640 - RNA, 297 nt, Artificial Sequence
  AAA46951 variant
augcgcggcgagacccccacccuccaggacuacguccucgaccuccagcccgaggccaccgaccuccacugcuacgagcagcuccccgacuccuccgacgaggaggacgucaucgacucccccgccggccaggccgagcccgacaccuccaacuacaacaucgucaccuucugcugccagugcaaguccacccuccgccucugcguccaguccacccaggucgacauccgcauccuccaggagcuccucaugggcuccuucggcaucgucugccccaacugcuccacccgccucuga

SEQ ID NO: 1641 - RNA, 294 nt, Artificial Sequence
  AAA46959 variant
augcgcggccacaagcccacccucaaggaguacguccucgaccucuaccccgagcccaccgaccucuacugcuacgagcagcucuccgacuccuccgacgaggacgagggccucgaccgccccgacggccaggcccagcccgccaccgccgacuacuacaucgucaccugcugccacaccugcaacaccaccguccgccucugcgucaacuccaccgccuccgaccuccgcaccauccagcagcuccucaugggcaccgucaacaucgucugccccaccugcgcccagcaguga

SEQ ID NO: 1642 - RNA, 300 nt, Artificial Sequence
  AAA46967 variant
augcacggcgagaucaccacccuccaggacuacguccucgaccucgagcccgaggccaccgaccucuacugcuacgagcagcucugcgacuccuccgaggaggaggaggacaccaucgacggccccgccggccaggccaagcccgacaccuccaacuacaacaucgucaccuccugcugcaagugcgaggccacccuccgccucugcguccaguccacccacaucgacauccgcaagcucgaggaccuccucaugggcaccuucggcaucgucugccccggcugcucccagcgcgccuga

SEQ ID NO: 1643 - RNA, 330 nt, Artificial Sequence
  AAA47051 variant
augcgcggccccaagcccacccuccaggagaucguccucgaccucugccccuacaacgagauccagcccgucgaccucgucugccacgagcagcucggcgaguccgaggacgagaucgacgagcccgaccacgccgucaaccaccagcaccagcuccucgcccgccgcgacgagccccagcgccacaccauccagugcuccugcugcaagugcaacaacacccuccagcucgucgucgaggccucccgcgacacccuccgccagcuccagcagcucuucauggacucccucggcuucgucugccccuggugcgccaccgccaaccaguga

SEQ ID NO: 1644 - RNA, 321 nt, Artificial Sequence
  CAA52574 variant
augcacggcccccgcgagacccuccaggagaucguccuccaccucgagccccagaacgagcucgaccccgucgaccuccucugcuacgagcagcucuccgaguccgaggaggagaacgacgaggccgacggcgucucccacgcccagcuccccgcccgccgcgccgagccccagcgccacaagauccucugcgucugcugcaagugcgacggccgcaucgagcucaccgucgaguccuccgccgaggaccuccgcacccuccagcagcucuuccucuccacccucuccuucgucugccccuggugcgccaccaaccaguga

SEQ ID NO: 1645 - RNA, 306 nt, Artificial Sequence
  M62877.1 variant
augcgcggcaacgucccccagcucaaggacgucguccuccaccucaccccccagaccgagaucgaccuccagugcuacgagcaguucgacuccuccgaggaggaggacgaggucgacaacaugcgcgaccagcuccccgagcgccgcgccggccaggccaccugcuaccgcaucgaggcccccugcugccgcugcuccuccgucguccagcucgccgucgaguccuccggcgacacccuccgcgucguccagcagaugcucaugggcgagcucucccucgucugccccugcugcgccaacaacuga

SEQ ID NO: 1646 - RNA, 300 nt, Artificial Sequence
  CAA52586 variant
augcgcggcgacaaggccaccaucaaggacuacauccucgaccuccagcccgagaccaccgaccuccacugcuacgagcagcucggcgacuccuccgacgaggaggacaccgacggcgucgaccgccccgacggccaggccgagcaggccaccuccaacuacuacaucgucaccuacugccacuccugcgacuccacccuccgccucugcauccacuccaccgccaccgaccuccgcacccuccagcagaugcuccucggcacccuccaggucgucugccccggcugcgcccgccucuga

SEQ ID NO: 1647 - RNA, 318 nt, Artificial Sequence
  CAA52597 variant
augcacggcaagguccccacccuccaggacgucguccucgagcucaccccccagaccgagaucgaccuccagugcaacgagcagcucgacuccuccgaggacgaggacgaggacgaggucgaccaccuccaggagcgcccccagcaggcccgccaggccaagcagcacaccugcuaccucauccacguccccugcugcgagugcaaguucgucguccagcucgacauccaguccaccaaggaggaccuccgcgucguccagcagcuccucaugggcgcccucaccgucaccugcccccucugcgccuccuccaacuga

SEQ ID NO: 1648 - RNA, 297 nt, Artificial Sequence
  AAF13691 variant
augcgcggcaacaaccccacccuccgcgaguacauccucgaccuccaccccgagcccaccgaccucuucugcuacgagcagcucugcgacuccuccgacgaggacgagaucggccucgaccgccccgacggccaggcccagcccgccaccgccaacuacuacaucgucaccugcugcuacaccugcgacaccaccguccgccucugcaucaacuccaccaccaccgacguccgcacccuccagcagcuccucaugggcaccugcaccaucgucugccccuccugcgcccagcaguga

SEQ ID NO: 1649 - RNA, 324 nt, Artificial Sequence
  ACL12335 variant
augcacggccccaaggccacccucugcgacaucguccucgaccucgagccccagaacuacgaggaggucgaccucgucugcuacgagcagcuccccgacuccgacuccgagaacgagaaggacgagcccgacggcgucaaccacccccuccuccucgcccgccgcgccgagccccagcgccacaacaucgucugcgucugcugcaagugcaacaaccagcuccagcucgucgucgagaccucccaggacggccuccgcgcccuccagcagcucuucauggacacccucuccuucgucugcccccucugcgccgccaaccaguga

SEQ ID NO: 1650 - RNA, 318 nt, Artificial Sequence
  AAA79500 variant
augcacggcaagguccccacccuccaggaggucauccucgagcucgccccccagaccgagaucgaccuccagugcaacgagcagcucgacuccuccgaggacgaggacgaggacgagaucgaccaccuccucgagcgcccccagcaggcccgccaggccgagcagcacaagugcuaccucauccacguccccugcugcaagugcgagcucgucguccagcucgacauccaguccaccaaggaggagcuccgcgucguccagcagcuccucaugggcgcccucaccgucaccugcccccucugcgccuccuccaaguga

SEQ ID NO: 1651 - RNA, 1392 nt, Artificial Sequence
  AAF80488 variant
augggcaaggagaagacccacaucaacaucgucgucaucggccacgucgacuccggcaaguccaccaccaccggccaccucaucuacaagugcggcggcaucgacaagcgcaccaucgagaaguucgagaaggaggccgccgagaugggcaagggcuccuucaaguacgccuggguccucgacaagcucaaggccgagcgcgagcgcggcaucaccaucgacaucucccucuggaaguucgagaccaccaaguacuacaucaccaucaucgacgcccccggccaccgcgacuucaucaagaacaugaucaccggcaccucccaggccgacugcgccguccucaucgucgccgccggcgucggcgaguucgaggccggcaucuccaagaacggccagacccgcgagcacgcccuccucgccuacacccucggcgucaagcagcucaucgucggcgucaacaagauggacuccaccgagcccgccuacuccgagaagcgcuacgacgagaucgucaaggaggucuccgccuacaucaagaagaucggcuacaaccccgccaccguccccuucguccccaucuccggcuggcacggcgacaacaugcucgagcccucccccaacaugcccugguucaagggcuggaaggucgagcgcaaggagggcaacgccuccggcgucucccuccucgaggcccucgacaccauccucccccccacccgccccaccgacaagccccuccgccucccccuccaggacgucuacaagaucggcggcaucggcaccguccccgucggccgcgucgagaccggcauccuccgccccggcauggucgucaccuucgcccccgucaacaucaccaccgaggucaaguccgucgagaugcaccacgaggcccucuccgaggcccuccccggcgacaacgucggcuucaacgucaagaacgucuccgucaaggacauccgccgcggcaacgucugcggcgacuccaaguccgaccccccccaggaggccgcccaguucaccucccaggucaucauccucaaccaccccggccagaucuccgccggcuacucccccgucaucgacugccacaccgcccacaucgccugcaaguucgccgagcucaaggagaagaucgaccgccgcuccggcaagaagcucgaggacaaccccaagucccucaaguccggcgacgccgccaucgucgagaugguccccggcaagcccaugugcgucgaguccuucucccaguaccccccccucggccgcuucgccguccgcgacaugcgccagaccgucgccgucggcgucaucaagaacgucgagaagaaguccggcggcgccggcaaggucaccaaguccgcccagaaggcccagaaggccggcaaguga

SEQ ID NO: 1652 - RNA, 2919 nt, Artificial Sequence
  EAW51573 variant
auggacaccgaccucuacgacgaguucggcaacuacaucggccccgagcucgacuccgacgaggacgacgacgagcucggccgcgagaccaaggaccucgacgagauggacgacgacgacgacgacgacgacgucggcgaccacgacgacgaccaccccggcauggaggucguccuccacgaggacaagaaguacuaccccaccgccgaggaggucuacggccccgaggucgagaccaucguccaggaggaggacacccagccccucaccgagcccaucaucaagcccgucaagaccaagaaguucacccucauggagcagacccuccccgucaccgucuacgagauggacuuccucgccgaccucauggacaacuccgagcucauccgcaacgucacccucugcggccaccuccaccacggcaagaccugcuucgucgacugccucaucgagcagacccaccccgagauccgcaagcgcuacgaccaggaccucugcuacaccgacauccucuucaccgagcaggagcgcggcgucggcaucaaguccacccccgucaccgucguccuccccgacaccaagggcaaguccuaccucuucaacaucauggacacccccggccacgucaacuucuccgacgaggucaccgccggccuccgcaucuccgacggcgucguccucuucaucgacgccgccgagggcgucaugcucaacaccgagcgccucaucaagcacgccguccaggagcgccucgccgucaccgucugcaucaacaagaucgaccgccucauccucgagcucaagcucccccccaccgacgccuacuacaagcuccgccacaucgucgacgaggucaacggccucaucuccauguacuccaccgacgagaaccucauccucuccccccuccucggcaacgucugcuucuccuccucccaguacuccaucugcuucacccucggcuccuucgccaagaucuacgccgacaccuucggcgacaucaacuaccaggaguucgccaagcgccucuggggcgacaucuacuucaaccccaagacccgcaaguucaccaagaaggcccccaccuccuccucccagcgcuccuucgucgaguucauccucgagccccucuacaagauccucgcccaggucgucggcgacgucgacaccucccucccccgcacccucgacgagcucggcauccaccucaccaaggaggagcucaagcucaacauccgcccccuccuccgccucgucugcaagaaguucuucggcgaguucaccggcuucgucgacaugugcguccagcacauccccucccccaaggucggcgccaagcccaagaucgagcacaccuacaccggcggcgucgacuccgaccucggcgaggccauguccgacugcgaccccgacggcccccucaugugccacaccaccaagauguacuccaccgacgacggcguccaguuccacgccuucggccgcguccucuccggcaccauccacgccggccagcccgucaagguccucggcgagaacuacacccucgaggacgaggaggacucccagaucugcaccgucggccgccucuggaucuccgucgcccgcuaccacaucgaggucaaccgcguccccgccggcaacuggguccucaucgagggcgucgaccagcccaucgucaagaccgccaccaucaccgagccccgcggcaacgaggaggcccagaucuuccgcccccucaaguucaacaccaccuccgucaucaagaucgccgucgagcccgucaaccccuccgagcuccccaagaugcucgacggccuccgcaaggucaacaaguccuaccccucccucaccaccaaggucgaggaguccggcgagcacgucauccucggcaccggcgagcucuaccucgacugcgucaugcacgaccuccgcaagauguacuccgagaucgacaucaaggucgccgaccccgucgucaccuucugcgagaccgucgucgagaccuccucccucaagugcuucgccgagacccccaacaagaagaacaagaucaccaugaucgccgagccccucgagaagggccucgccgaggacaucgagaacgaggucguccagaucaccuggaaccgcaagaagcucggcgaguucuuccagaccaaguacgacugggaccuccucgccgcccgcuccaucugggccuucggccccgacgccaccggccccaacauccucgucgacgacacccuccccuccgaggucgacaaggcccuccucggcuccgucaaggacuccaucguccagggcuuccaguggggcacccgcgagggcccccucugcgacgagcucauccgcaacgucaaguucaagauccucgacgccgucgucgcccaggagccccuccaccgcggcggcggccagaucauccccaccgcccgccgcgucgucuacuccgccuuccucauggccaccccccgccucauggagcccuacuacuucgucgagguccaggcccccgccgacugcgucuccgccgucuacaccguccucgcccgccgccgcggccacgucacccaggacgcccccauccccggcuccccccucuacaccaucaaggccuucauccccgccaucgacuccuucggcuucgagaccgaccuccgcacccacacccagggccaggccuucucccucuccgucuuccaccacuggcagaucguccccggcgacccccucgacaaguccaucgucauccgcccccucgagccccagcccgccccccaccucgcccgcgaguucaugaucaagacccgccgccgcaagggccucuccgaggacgucuccaucuccaaguucuucgacgaccccaugcuccucgagcucgccaagcaggacgucguccucaacuaccccauguga

SEQ ID NO: 1653 - RNA, 1971 nt, Artificial Sequence
  EAW50963 variant
augcgccccuccggcaccgccggcgccgcccuccucgcccuccucgccgcccucugccccgccucccgcgcccucgaggagaagaaggucugccagggcaccuccaacaagcucacccagcucggcaccuucgaggaccacuuccucucccuccagcgcauguucaacaacugcgaggucguccucggcaaccucgagaucaccuacguccagcgcaacuacgaccucuccuuccucaagaccauccaggaggucgccggcuacguccucaucgcccucaacaccgucgagcgcaucccccucgagaaccuccagaucauccgcggcaacauguacuacgagaacuccuacgcccucgccguccucuccaacuacgacgccaacaagaccggccucaaggagcuccccaugcgcaaccuccaggagauccuccacggcgccguccgcuucuccaacaaccccgcccucugcaacgucgaguccauccaguggcgcgacaucgucuccuccgacuuccucuccaacauguccauggacuuccagaaccaccucggcuccugccagaagugcgaccccuccugccccaacggcuccugcuggggcgccggcgaggagaacugccagaagcucaccaagaucaucugcgcccagcagugcuccggccgcugccgcggcaagucccccuccgacugcugccacaaccagugcgccgccggcugcaccggcccccgcgaguccgacugccucgucugccgcaaguuccgcgacgaggccaccugcaaggacaccugccccccccucaugcucuacaaccccaccaccuaccagauggacgucaaccccgagggcaaguacuccuucggcgccaccugcgucaagaagugcccccgcaacuacgucgucaccgaccacggcuccugcguccgcgccugcggcgccgacuccuacgagauggaggaggacggcguccgcaagugcaagaagugcgagggccccugccgcaaggucugcaacggcaucggcaucggcgaguucaaggacucccucuccaucaacgccaccaacaucaagcacuucaagaacugcaccuccaucuccggcgaccuccacauccuccccgucgccuuccgcggcgacuccuucacccacacccccccccucgacccccaggagcucgacauccucaagaccgucaaggagaucaccggcuuccuccucauccaggccuggcccgagaaccgcaccgaccuccacgccuucgagaaccucgagaucauccgcggccgcaccaagcagcacggccaguucucccucgccgucgucucccucaacaucaccucccucggccuccgcucccucaaggagaucuccgacggcgacgucaucaucuccggcaacaagaaccucugcuacgccaacaccaucaacuggaagaagcucuucggcaccuccggccagaagaccaagaucaucuccaaccgcggcgagaacuccugcaaggccaccggccaggucugccacgcccucugcucccccgagggcugcuggggccccgagccccgcgacugcgucuccugccgcaacgucucccgcggccgcgagugcgucgacaagugcaaccuccucgagggcgagccccgcgaguucgucgagaacuccgagugcauccagugccaccccgagugccucccccaggccaugaacaucaccugcaccggccgcggccccgacaacugcauccagugcgcccacuacaucgacggcccccacugcgucaagaccugccccgccggcgucaugggcgagaacaacacccucgucuggaaguacgccgacgccggccacgucugccaccucugccaccccaacugcaccuacggcugcaccggccccggccucgagggcugccccaccaacggcuccuacaucgucucccacuucccccgcuccuucuacaagauguccguccac

SEQ ID NO: 1654 - RNA, 3411 nt, Artificial Sequence
  ADL28125 variant
augcgccccuccggcaccgccggcgccgcccuccucgcccuccucgccgcccucugccccgccucccgcgcccucgaggagaagaaggucugccagggcaccuccaacaagcucacccagcucggcaccuucgaggaccacuuccucucccuccagcgcauguucaacaacugcgaggucguccucggcaaccucgagaucaccuacguccagcgcaacuacgaccucuccuuccucaagaccauccaggaggucgccggcuacguccucaucgcccucaacaccgucgagcgcaucccccucgagaaccuccagaucauccgcggcaacauguacuacgagaacuccuacgcccucgccguccucuccaacuacgacgccaacaagaccggccucaaggagcuccccaugcgcaaccuccaggagauccuccacggcgccguccgcuucuccaacaaccccgcccucugcaacgucgaguccauccaguggcgcgacaucgucuccuccgacuuccucuccaacauguccauggacuuccagaaccaccucggcuccugccagaagugcgaccccuccugccccaacggcuccugcuggggcgccggcgaggagaacugccagaagcucaccaagaucaucugcgcccagcagugcuccggccgcugccgcggcaagucccccuccgacugcugccacaaccagugcgccgccggcugcaccggcccccgcgaguccgacugccucgucugccgcaaguuccgcgacgaggccaccugcaaggacaccugccccccccucaugcucuacaaccccaccaccuaccagauggacgucaaccccgagggcaaguacuccuucggcgccaccugcgucaagaagugcccccgcaacuacgucgucaccgaccacggcuccugcguccgcgccugcggcgccgacuccuacgagauggaggaggacggcguccgcaagugcaagaagugcgagggccccugccgcaaggucugcaacggcaucggcaucggcgaguucaaggacucccucuccaucaacgccaccaacaucaagcacuucaagaacugcaccuccaucuccggcgaccuccacauccuccccgucgccuuccgcggcgacuccuucacccacacccccccccucgacccccaggagcucgacauccucaagaccgucaaggagaucaccggcuuccuccucauccaggccuggcccgagaaccgcaccgaccuccacgccuucgagaaccucgagaucauccgcggccgcaccaagcagcacggccaguucucccucgccgucgucucccucaacaucaccucccucggccuccgcucccucaaggagaucuccgacggcgacgucaucaucuccggcaacaagaaccucugcuacgccaacaccaucaacuggaagaagcucuucggcaccuccggccagaagaccaagaucaucuccaaccgcggcgagaacuccugcaaggccaccggccaggucugccacgcccucugcucccccgagggcugcuggggccccgagccccgcgacugcgucuccugccgcaacgucucccgcggccgcgagugcgucgacaagugcaaccuccucgagggcgagccccgcgaguucgucgagaacuccgagugcauccagugccaccccgagugccucccccaggccaugaacaucaccugcaccggccgcggccccgacaacugcauccagugcgcccacuacaucgacggcccccacugcgucaagaccugccccgccggcgucaugggcgagaacaacacccucgucuggaaguacgccgacgccggccacgucugccaccucugccaccccaacugcaccuacggcugcaccggccccggccucgagggcugccccaccaacggccccaagauccccuccaucgccaccggcauggucggcgcccuccuccuccuccucgucgucgcccucggcaucggccucuucaugcgccgccgccacaucguccgcaagcgcacccuccgccgccuccuccaggagcgcgagcucgucgagccccucacccccuccggcgaggcccccaaccaggcccuccuccgcauccucaaggagaccgaguucaagaagaucaagguccucggcuccggcgccuucggcaccgucuacaagggccucuggauccccgagggcgagaaggucaagauccccgucgccaucaaggagcuccgcgaggccaccucccccaaggccaacaaggagauccucgacgaggccuacgucauggccuccgucgacaacccccacgucugccgccuccucggcaucugccucaccuccaccguccagcucaucacccagcucaugcccuucggcugccuccucgacuacguccgcgagcacaaggacaacaucggcucccaguaccuccucaacuggugcguccagaucgccaagggcaugaacuaccucgaggaccgccgccucguccaccgcgaccucgccgcccgcaacguccucgucaagaccccccagcacgucaagaucaccgacuucggccucgccaagcuccucggcgccgaggagaaggaguaccacgccgagggcggcaagguccccaucaaguggauggcccucgaguccauccuccaccgcaucuacacccaccaguccgacgucugguccuacggcgucaccgucugggagcucaugaccuucggcuccaagcccuacgacggcauccccgccuccgagaucuccuccauccucgagaagggcgagcgccucccccagccccccaucugcaccaucgacgucuacaugaucauggucaagugcuggaugaucgacgccgacucccgccccaaguuccgcgagcucaucaucgaguucuccaagauggcccgcgacccccagcgcuaccucgucauccagggcgacgagcgcaugcaccuccccucccccaccgacuccaacuucuaccgcgcccucauggacgaggaggacauggacgacgucgucgacgccgacgaguaccucaucccccagcagggcuucuucuccucccccuccaccucccgcaccccccuccucuccucccucuccgccaccuccaacaacuccaccgucgccugcaucgaccgcaacggccuccaguccugccccaucaaggaggacuccuuccuccagcgcuacuccuccgaccccaccggcgcccucaccgaggacuccaucgacgacaccuuccuccccguccccggcgaguggcucgucuggaagcaguccugcuccuccaccuccuccacccacuccgccgccgccucccuccagugccccucccagguccucccccccgccucccccgagggcgagaccgucgccgaccuccagacccaguga

SEQ ID NO: 1655 - RNA, 150 nt, Artificial Sequence
  CCO13722 variant
augugcgccaccugcgccauccagaccgcccccaccggccccaacaaguccucccucuccgacuucucccucccccucaagcuccacuuccucuccaccaucuccaucucccccuucgccuccaacaagguccucacccucuucaucuga

SEQ ID NO: 1656 - RNA, 1218 nt, Artificial Sequence
  CCDS47587.1 variant
augcgccccuccggcaccgccggcgccgcccuccucgcccuccucgccgcccucugccccgccucccgcgcccucgaggagaagaaggucugccagggcaccuccaacaagcucacccagcucggcaccuucgaggaccacuuccucucccuccagcgcauguucaacaacugcgaggucguccucggcaaccucgagaucaccuacguccagcgcaacuacgaccucuccuuccucaagaccauccaggaggucgccggcuacguccucaucgcccucaacaccgucgagcgcaucccccucgagaaccuccagaucauccgcggcaacauguacuacgagaacuccuacgcccucgccguccucuccaacuacgacgccaacaagaccggccucaaggagcuccccaugcgcaaccuccaggagauccuccacggcgccguccgcuucuccaacaaccccgcccucugcaacgucgaguccauccaguggcgcgacaucgucuccuccgacuuccucuccaacauguccauggacuuccagaaccaccucggcuccugccagaagugcgaccccuccugccccaacggcuccugcuggggcgccggcgaggagaacugccagaagcucaccaagaucaucugcgcccagcagugcuccggccgcugccgcggcaagucccccuccgacugcugccacaaccagugcgccgccggcugcaccggcccccgcgaguccgacugccucgucugccgcaaguuccgcgacgaggccaccugcaaggacaccugccccccccucaugcucuacaaccccaccaccuaccagauggacgucaaccccgagggcaaguacuccuucggcgccaccugcgucaagaagugcccccgcaacuacgucgucaccgaccacggcuccugcguccgcgccugcggcgccgacuccuacgagauggaggaggacggcguccgcaagugcaagaagugcgagggccccugccgcaaggucugcaacggcaucggcaucggcgaguucaaggacucccucuccaucaacgccaccaacaucaagcacuucaagaacugcaccuccaucuccggcgaccuccacauccuccccgucgccuuccgcggcgacuccuucacccacacccccccccucgacccccaggagcucgacauccucaagaccgucaaggagaucaccggccucuccuga

SEQ ID NO: 1657 - RNA, 3633 nt, Artificial Sequence
  AAG35789 variant
augcgccccuccggcaccgccggcgccgcccuccucgcccuccucgccgcccucugccccgccucccgcgcccucgaggagaagaaggucugccagggcaccuccaacaagcucacccagcucggcaccuucgaggaccacuuccucucccuccagcgcauguucaacaacugcgaggucguccucggcaaccucgagaucaccuacguccagcgcaacuacgaccucuccuuccucaagaccauccaggaggucgccggcuacguccucaucgcccucaacaccgucgagcgcaucccccucgagaaccuccagaucauccgcggcaacauguacuacgagaacuccuacgcccucgccguccucuccaacuacgacgccaacaagaccggccucaaggagcuccccaugcgcaaccuccaggagauccuccacggcgccguccgcuucuccaacaaccccgcccucugcaacgucgaguccauccaguggcgcgacaucgucuccuccgacuuccucuccaacauguccauggacuuccagaaccaccucggcuccugccagaagugcgaccccuccugccccaacggcuccugcuggggcgccggcgaggagaacugccagaagcucaccaagaucaucugcgcccagcagugcuccggccgcugccgcggcaagucccccuccgacugcugccacaaccagugcgccgccggcugcaccggcccccgcgaguccgacugccucgucugccgcaaguuccgcgacgaggccaccugcaaggacaccugccccccccucaugcucuacaaccccaccaccuaccagauggacgucaaccccgagggcaaguacuccuucggcgccaccugcgucaagaagugcccccgcaacuacgucgucaccgaccacggcuccugcguccgcgccugcggcgccgacuccuacgagauggaggaggacggcguccgcaagugcaagaagugcgagggccccugccgcaaggucugcaacggcaucggcaucggcgaguucaaggacucccucuccaucaacgccaccaacaucaagcacuucaagaacugcaccuccaucuccggcgaccuccacauccuccccgucgccuuccgcggcgacuccuucacccacacccccccccucgacccccaggagcucgacauccucaagaccgucaaggagaucaccggcuuccuccucauccaggccuggcccgagaaccgcaccgaccuccacgccuucgagaaccucgagaucauccgcggccgcaccaagcagcacggccaguucucccucgccgucgucucccucaacaucaccucccucggccuccgcucccucaaggagaucuccgacggcgacgucaucaucuccggcaacaagaaccucugcuacgccaacaccaucaacuggaagaagcucuucggcaccuccggccagaagaccaagaucaucuccaaccgcggcgagaacuccugcaaggccaccggccaggucugccacgcccucugcucccccgagggcugcuggggccccgagccccgcgacugcgucuccugccgcaacgucucccgcggccgcgagugcgucgacaagugcaaccuccucgagggcgagccccgcgaguucgucgagaacuccgagugcauccagugccaccccgagugccucccccaggccaugaacaucaccugcaccggccgcggccccgacaacugcauccagugcgcccacuacaucgacggcccccacugcgucaagaccugccccgccggcgucaugggcgagaacaacacccucgucuggaaguacgccgacgccggccacgucugccaccucugccaccccaacugcaccuacggcugcaccggccccggccucgagggcugccccaccaacggccccaagauccccuccaucgccaccggcauggucggcgcccuccuccuccuccucgucgucgcccucggcaucggccucuucaugcgccgccgccacaucguccgcaagcgcacccuccgccgccuccuccaggagcgcgagcucgucgagccccucacccccuccggcgaggcccccaaccaggcccuccuccgcauccucaaggagaccgaguucaagaagaucaagguccucggcuccggcgccuucggcaccgucuacaagggccucuggauccccgagggcgagaaggucaagauccccgucgccaucaaggagcuccgcgaggccaccucccccaaggccaacaaggagauccucgacgaggccuacgucauggccuccgucgacaacccccacgucugccgccuccucggcaucugccucaccuccaccguccagcucaucacccagcucaugcccuucggcugccuccucgacuacguccgcgagcacaaggacaacaucggcucccaguaccuccucaacuggugcguccagaucgccaagggcaugaacuaccucgaggaccgccgccucguccaccgcgaccucgccgcccgcaacguccucgucaagaccccccagcacgucaagaucaccgacuucggccucgccaagcuccucggcgccgaggagaaggaguaccacgccgagggcggcaagguccccaucaaguggauggcccucgaguccauccuccaccgcaucuacacccaccaguccgacgucugguccuacggcgucaccgucugggagcucaugaccuucggcuccaagcccuacgacggcauccccgccuccgagaucuccuccauccucgagaagggcgagcgccucccccagccccccaucugcaccaucgacgucuacaugaucauggucaagugcuggaugaucgacgccgacucccgccccaaguuccgcgagcucaucaucgaguucuccaagauggcccgcgacccccagcgcuaccucgucauccagggcgacgagcgcaugcaccuccccucccccaccgacuccaacuucuaccgcgcccucauggacgaggaggacauggacgacgucgucgacgccgacgaguaccucaucccccagcagggcuucuucuccucccccuccaccucccgcaccccccuccucuccucccucuccgccaccuccaacaacuccaccgucgccugcaucgaccgcaacggccuccaguccugccccaucaaggaggacuccuuccuccagcgcuacuccuccgaccccaccggcgcccucaccgaggacuccaucgacgacaccuuccuccccguccccgaguacaucaaccaguccguccccaagcgccccgccggcuccguccagaaccccgucuaccacaaccagccccucaaccccgcccccucccgcgacccccacuaccaggacccccacuccaccgccgucggcaaccccgaguaccucaacaccguccagcccaccugcgucaacuccaccuucgacucccccgcccacugggcccagaagggcucccaccagaucucccucgacaaccccgacuaccagcaggacuucuuccccaaggaggccaagcccaacggcaucuucaagggcuccaccgccgagaacgccgaguaccuccgcgucgccccccaguccuccgaguucaucggcgccuga

SEQ ID NO: 1658 - RNA, 1395 nt, Artificial Sequence
  AAI18666 variant
auggccgccgaggacgucaucaucugcgcccagcagugcuccggccgcugccgcggcaagucccccuccgacugcugccacaaccagugcgccgccggcugcaccggcccccgcgaguccgacugccucgucugccgcaaguuccgcgacgaggccaccugcaaggacaccugccccccccucaugcucuacaaccccaccaccuaccagauggacgucaaccccgagggcaaguacuccuucggcgccaccugcgucaagaagugcccccgcaacuacgucgucaccgaccacggcuccugcguccgcgccugcggcgccgacuccuacgagauggaggaggacggcguccgcaagugcaagaagugcgagggccccugccgcaaggucugcaacggcaucggcaucggcgaguucaaggacucccucuccaucaacgccaccaacaucaagcacuucaagaacugcaccuccaucuccggcgaccuccacauccuccccgucgccuuccgcggcgacuccuucacccacacccccccccucgacccccaggagcucgacauccucaagaccgucaaggagaucaccggcuuccuccucauccaggccuggcccgagaaccgcaccgaccuccacgccuucgagaaccucgagaucauccgcggccgcaccaagcagcacggccaguucucccucgccgucgucucccucaacaucaccucccucggccuccgcucccucaaggagaucuccgacggcgacgucaucaucuccggcaacaagaaccucugcuacgccaacaccaucaacuggaagaagcucuucggcaccuccggccagaagaccaagaucaucuccaaccgcggcgagaacuccugcaaggccaccggccaggucugccacgcccucugcucccccgagggcugcuggggccccgagccccgcgacugcgucuccugccgcaacgucucccgcggccgcgagugcgucgacaagugcaaccuccucgagggcgagccccgcgaguucgucgagaacuccgagugcauccagugccaccccgagugccucccccaggccaugaacaucaccugcaccggccgcggccccgacaacugcauccagugcgcccacuacaucgacggcccccacugcgucaagaccugccccgccggcgucaugggcgagaacaacacccucgucuggaaguacgccgacgccggccacgucugccaccucugccaccccaacugcaccuacggcugcaccggccccggccucgagggcugccccaccaacggccccaagauccccuccaucgccaccggcauggucggcgcccuccuccuccuccucgucgucgcccucggcaucggcccccuccacggccgcuga

SEQ ID NO: 1659 - RNA, 3276 nt, Artificial Sequence
  AAH94761 variant
augcgccccuccggcaccgccggcgccgcccuccucgcccuccucgccgcccucugccccgccucccgcgcccucgaggagaagaaggucugccagggcaccuccaacaagcucacccagcucggcaccuucgaggaccacuuccucucccuccagcgcauguucaacaacugcgaggucguccucggcaaccucgagaucaccuacguccagcgcaacuacgaccucuccuuccucaagaccauccaggaggucgccggcuacguccucaucgcccucaacaccgucgagcgcaucccccucgagaaccuccagaucauccgcggcaacauguacuacgagaacuccuacgcccucgccguccucuccaacuacgacgccaacaagaccggccucaaggagcuccccaugcgcaaccuccagggccagaagugcgaccccuccugccccaacggcuccugcuggggcgccggcgaggagaacugccagaagcucaccaagaucaucugcgcccagcagugcuccggccgcugccgcggcaagucccccuccgacugcugccacaaccagugcgccgccggcugcaccggcccccgcgaguccgacugccucgucugccgcaaguuccgcgacgaggccaccugcaaggacaccugccccccccucaugcucuacaaccccaccaccuaccagauggacgucaaccccgagggcaaguacuccuucggcgccaccugcgucaagaagugcccccgcaacuacgucgucaccgaccacggcuccugcguccgcgccugcggcgccgacuccuacgagauggaggaggacggcguccgcaagugcaagaagugcgagggccccugccgcaaggucugcaacggcaucggcaucggcgaguucaaggacucccucuccaucaacgccaccaacaucaagcacuucaagaacugcaccuccaucuccggcgaccuccacauccuccccgucgccuuccgcggcgacuccuucacccacacccccccccucgacccccaggagcucgacauccucaagaccgucaaggagaucaccggcuuccuccucauccaggccuggcccgagaaccgcaccgaccuccacgccuucgagaaccucgagaucauccgcggccgcaccaagcagcacggccaguucucccucgccgucgucucccucaacaucaccucccucggccuccgcucccucaaggagaucuccgacggcgacgucaucaucuccggcaacaagaaccucugcuacgccaacaccaucaacuggaagaagcucuucggcaccuccggccagaagaccaagaucaucuccaaccgcggcgagaacuccugcaaggccaccggccaggucugccacgcccucugcucccccgagggcugcuggggccccgagccccgcgacugcgucuccugccgcaacgucucccgcggccgcgagugcgucgacaagugcaaccuccucgagggcgagccccgcgaguucgucgagaacuccgagugcauccagugccaccccgagugccucccccaggccaugaacaucaccugcaccggccgcggccccgacaacugcauccagugcgcccacuacaucgacggcccccacugcgucaagaccugccccgccggcgucaugggcgagaacaacacccucgucuggaaguacgccgacgccggccacgucugccaccucugccaccccaacugcaccuacggcugcaccggccccggccucgagggcugccccaccaacggccccaagauccccuccaucgccaccggcauggucggcgcccuccuccuccuccucgucgucgcccucggcaucggccucuucaugcgccgccgccacaucguccgcaagcgcacccuccgccgccuccuccaggagcgcgagcucgucgagccccucacccccuccggcgaggcccccaaccaggcccuccuccgcauccucaaggagaccgaguucaagaagaucaagguccucggcuccggcgccuucggcaccgucuacaagggccucuggauccccgagggcgagaaggucaagauccccgucgccaucaaggagcuccgcgaggccaccucccccaaggccaacaaggagauccucgacgaggccuacgucauggccuccgucgacaacccccacgucugccgccuccucggcaucugccucaccuccaccguccagcucaucacccagcucaugcccuucggcugccuccucgacuacguccgcgagcacaaggacaacaucggcucccaguaccuccucaacuggugcguccagaucgccaagggcaugaacuaccucgaggaccgccgccucguccaccgcgaccucgccgcccgcaacguccucgucaagaccccccagcacgucaagaucaccgacuucggccucgccaagcuccucggcgccgaggagaaggaguaccacgccgagggcggcaagguccccaucaaguggauggcccucgaguccauccuccaccgcaucuacacccaccaguccgacgucugguccuacggcgucaccgucugggagcucaugaccuucggcuccaagcccuacgacggcauccccgccuccgagaucuccuccauccucgagaagggcgagcgccucccccagccccccaucugcaccaucgacgucuacaugaucauggucaagugcuggaugaucgacgccgacucccgccccaaguuccgcgagcucaucaucgaguucuccaagauggcccgcgacccccagcgcuaccucgucauccagggcgacgagcgcaugcaccuccccucccccaccgacuccaacuucuaccgcgcccucauggacgaggaggacauggacgacgucgucgacgccgacgaguaccucaucccccagcagggcuucuucuccucccccuccaccucccgcaccccccuccucuccucccucuccgccaccuccaacaacuccaccgucgccugcaucgaccgcaacggccuccaguccugccccaucaaggaggacuccuuccuccagcgcuacuccuccgaccccaccggcgcccucaccgaggacuccaucgacgacaccuuccuccccguccccggcgaguggcucgucuggaagcaguccugcuccuccaccuccuccacccacuccgccgccgccucccuccagugccccucccagguccucccccccgccucccccgagggcgagaccgucgccgaccuccagacccaguga

SEQ ID NO: 1660 - RNA, 216 nt, Artificial Sequence
  CAA34902 variant
augcgccccuccggcaccgccggcgccgcccuccucgcccuccucgccgcccucugccccgccucccgcgcccucgaggagaagaagggcaagggcgucucccgccgccucccccgccgcccccgcaucgccccccgcaccccccagcccgcccagccccgcaccggcgcccccgcccgcgcccgcgcccccgcccgccccuuccucuuccccuga

SEQ ID NO: 1661 - RNA, 720 nt, Artificial Sequence
  AAH10992 variant
augccccucggccacaucaugcgccucgaccucgagaagaucgcccucgaguacaucguccccugccuccacgaggucggcuucugcuaccucgacaacuuccucggcgaggucgucggcgacugcguccucgagcgcgucaagcagcuccacugcaccggcgcccuccgcgacggccagcucgccggcccccgcgccggcgucuccaagcgccaccuccgcggcgaccagaucaccuggaucggcggcaacgaggagggcugcgaggccaucuccuuccuccucucccucaucgaccgccucguccucuacugcggcucccgccucggcaaguacuacgucaaggagcgcuccaaggccauggucgccugcuaccccggcaacggcaccggcuacguccgccacgucgacaaccccaacggcgacggccgcugcaucaccugcaucuacuaccucaacaagaacugggacgccaagcuccacggcggcauccuccgcaucuuccccgagggcaaguccuucaucgccgacgucgagcccaucuucgaccgccuccucuucuucugguccgaccgccgcaacccccacgagguccagcccuccuacgccacccgcuacgccaugaccgucugguacuucgacgccgaggagcgcgccgaggccaagaagaaguuccgcaaccucacccgcaagaccgaguccgcccucaccgaggacuga

SEQ ID NO: 1662 - RNA, 1566 nt, Artificial Sequence
  BAH13456 variant
auggccaccucccuccacgagggccccaccaaccagcucgaccuccucauccgcgccgucgaggccuccguccacuccuccaacgcccacugcaccgacaagaccaucgaggccgccgaggcccuccuccacauggagucccccaccugccuccgcgacucccgcucccccgaguucauccacgccgccaugcgccccgacgucaucaccgagaccgucgucgaggucuccaccgaggaguccgagcccauggacaccucccccauccccaccucccccgacucccacgagcccaugaagaagaagaaggucggccgcaagcccaagacccagcagucccccaucuccaacggcucccccgagcucggcaucaagaagaagccccgcgagggcaagggcaacaccaccuaccucugggaguuccuccucgaccuccuccaggacaagaacaccugcccccgcuacaucaaguggacccagcgcgagaagggcaucuucaagcucgucgacuccaaggccgucuccaagcucuggggcaagcacaagaacaagcccgacaugaacuacgagaccaugggccgcgcccuccgcuacuacuaccagcgcggcauccucgccaaggucgagggccagcgccucgucuaccaguucaaggacaugcccaagaacaucgucgucaucgacgacgacaaguccgagaccugcaacgaggaccucgccggcaccaccgacgagaagucccucgagcgcgucucccucuccgccgagucccuccucaaggccgccuccuccguccgcuccggcaagaacuccucccccaucaacugcucccgcgccgagaagggcgucgcccgcgucgucaacaucaccucccccggccacgacgccuccucccgcucccccaccaccaccgccuccgucuccgccaccgccgccccccgcaccguccgcgucgccaugcagguccccgucgucaugaccucccucggccagaagaucuccaccgucgccguccaguccgucaacgccggcgccccccucaucaccuccaccucccccaccaccgccaccucccccaaggucgucauccagaccauccccaccgucaugcccgccuccaccgagaacggcgacaagaucaccaugcagcccgccaagaucaucaccauccccgccacccagcucgcccagugccagcuccagaccaaguccaaccucaccggcuccggcuccaucaacaucgucggcaccccccucgccguccgcgcccucacccccgucuccaucgcccacggcacccccgucaugcgccucuccaugcccacccagcaggccuccggccagacccccccccgcgucaucuccgccgucaucaagggccccgaggucaaguccgaggccgucgccaagaagcaggagcacgacgucaagacccuccagcucgucgaggagaagcccgccgacggcaacaagaccgucacccacgucgucgucgucuccgcccccuccgccaucgcccuccccgucaccaugaagaccgagggccucgucaccugcgagaaguga

SEQ ID NO: 1663 - RNA, 810 nt, Artificial Sequence
  BAC67168 variant
auggccgccgcccucuucguccuccucggcuucgcccuccucggcacccacggcgccuccggcgccgccggcaccgucuucaccaccgucgaggaccucggcuccaagauccuccucaccugcucccucaacgacuccgccaccgaggucaccggccaccgcuggcucaagggcggcgucguccucaaggaggacgcccuccccggccagaagaccgaguucaaggucgacuccgacgaccaguggggcgaguacuccugcgucuuccuccccgagcccaugggcaccgccaacauccagcuccacggccccccccgcgucaaggccgucaaguccuccgagcacaucaacgagggcgagaccgccaugcucgucugcaaguccgaguccgucccccccgucaccgacugggccugguacaagaucaccgacuccgaggacaaggcccucaugaacggcuccgagucccgcuucuucgucuccuccucccagggccgcuccgagcuccacaucgagaaccucaacauggaggccgaccccggccaguaccgcugcaacggcaccuccuccaagggcuccgaccaggccaucaucacccuccgcguccgcucccaccucgccgcccucuggcccuuccucggcaucgucgccgagguccucguccucgucaccaucaucuucaucuacgagaagcgccgcaagcccgaggacguccucgacgacgacgacgccggcuccgccccccucaaguccuccggccagcaccagaacgacaagggcaagaacguccgccagcgcaacuccuccuga

SEQ ID NO: 1664 - RNA, 945 nt, Artificial Sequence
  AAA35723 variant
auggcccccccccagguccucgccuucggccuccuccucgccgccgccaccgccaccuucgccgccgcccaggaggagugcgucugcgagaacuacaagcucgccgucaacugcuucgucaacaacaaccgccagugccagugcaccuccgucggcgcccagaacaccgucaucugcuccaagcucgccgccaagugccucgucaugaaggccgagaugaacggcuccaagcucggccgccgcgccaagcccgagggcgcccuccagaacaacgacggccucuacgaccccgacugcgacgaguccggccucuucaaggccaagcagugcaacggcaccuccaugugcuggugcgucaacaccgccggcguccgccgcaccgacaaggacaccgagaucaccugcuccgagcgcguccgcaccuacuggaucaucaucgagcucaagcacaaggcccgcgagaagcccuacgacuccaagucccuccgcaccgcccuccagaaggagaucaccacccgcuaccagcucgaccccaaguucaucaccuccauccucuacgagaacaacgucaucaccaucgaccucguccagaacuccucccagaagacccagaacgacgucgacaucgccgacgucgccuacuacuucgagaaggacgucaagggcgagucccucuuccacuccaagaagauggaccucaccgucaacggcgagcagcucgaccucgaccccggccagacccucaucuacuacgucgacgagaaggcccccgaguucuccaugcagggccucaaggccggcgucaucgccgucaucgucgucgucgucaucgccgucgucgccggcaucgucguccucgucaucucccgcaagaagcgcauggccaaguacgagaaggccgagaucaaggagaugggcgagaugcaccgcgagcucaacgccuga

SEQ ID NO: 1665 - RNA, 2931 nt, Artificial Sequence
  CCDS169.1 variant
auggagcuccaggccgcccgcgccugcuucgcccuccucuggggcugcgcccucgccgccgccgccgccgcccagggcaaggaggucguccuccucgacuucgccgccgccggcggcgagcucggcuggcucacccaccccuacggcaagggcugggaccucaugcagaacaucaugaacgacaugcccaucuacauguacuccgucugcaacgucauguccggcgaccaggacaacuggcuccgcaccaacugggucuaccgcggcgaggccgagcgcaucuucaucgagcucaaguucaccguccgcgacugcaacuccuuccccggcggcgccuccuccugcaaggagaccuucaaccucuacuacgccgaguccgaccucgacuacggcaccaacuuccagaagcgccucuucaccaagaucgacaccaucgcccccgacgagaucaccgucuccuccgacuucgaggcccgccacgucaagcucaacgucgaggagcgcuccgucggcccccucacccgcaagggcuucuaccucgccuuccaggacaucggcgccugcgucgcccuccucuccguccgcgucuacuacaagaagugccccgagcuccuccagggccucgcccacuuccccgagaccaucgccggcuccgacgcccccucccucgccaccgucgccggcaccugcgucgaccacgccgucgucccccccggcggcgaggagccccgcaugcacugcgccgucgacggcgaguggcucguccccaucggccagugccucugccaggccggcuacgagaaggucgaggacgccugccaggccugcucccccggcuucuucaaguucgaggccuccgagucccccugccucgagugccccgagcacacccuccccucccccgagggcgccaccuccugcgagugcgaggagggcuucuuccgcgccccccaggaccccgccuccaugcccugcacccgcccccccuccgccccccacuaccucaccgccgucggcaugggcgccaaggucgagcuccgcuggacccccccccaggacuccggcggccgcgaggacaucgucuacuccgucaccugcgagcagugcuggcccgaguccggcgagugcggccccugcgaggccuccguccgcuacuccgagcccccccacggccucacccgcaccuccgucaccgucuccgaccucgagccccacaugaacuacaccuucaccgucgaggcccgcaacggcgucuccggccucgucaccucccgcuccuuccgcaccgccuccgucuccaucaaccagaccgagccccccaagguccgccucgagggccgcuccaccaccucccucuccgucuccugguccaucccccccccccagcagucccgcgucuggaaguacgaggucaccuaccgcaagaagggcgacuccaacuccuacaacguccgccgcaccgagggcuucuccgucacccucgacgaccucgcccccgacaccaccuaccucguccagguccaggcccucacccaggagggccagggcgccggcuccaagguccacgaguuccagacccucucccccgagggcuccggcaaccucgccgucaucggcggcgucgccgucggcgucguccuccuccucguccucgccggcgucggcuucuucauccaccgccgccgcaagaaccagcgcgcccgccagucccccgaggacgucuacuucuccaaguccgagcagcucaagccccucaagaccuacgucgacccccacaccuacgaggaccccaaccaggccguccucaaguucaccaccgagauccaccccuccugcgucacccgccagaaggucaucggcgccggcgaguucggcgaggucuacaagggcaugcucaagaccuccuccggcaagaaggagguccccgucgccaucaagacccucaaggccggcuacaccgagaagcagcgcgucgacuuccucggcgaggccggcaucaugggccaguucucccaccacaacaucauccgccucgagggcgucaucuccaaguacaagcccaugaugaucaucaccgaguacauggagaacggcgcccucgacaaguuccuccgcgagaaggacggcgaguucuccguccuccagcucgucggcaugcuccgcggcaucgccgccggcaugaaguaccucgccaacaugaacuacguccaccgcgaccucgccgcccgcaacauccucgucaacuccaaccucgucugcaaggucuccgacuucggccucucccgcguccucgaggacgaccccgaggccaccuacaccaccuccggcggcaagauccccauccgcuggaccgcccccgaggccaucuccuaccgcaaguucaccuccgccuccgacgucugguccuucggcaucgucaugugggaggucaugaccuacggcgagcgccccuacugggagcucuccaaccacgaggucaugaaggccaucaacgacggcuuccgccuccccacccccauggacugccccuccgccaucuaccagcucaugaugcagugcuggcagcaggagcgcgcccgccgccccaaguucgccgacaucgucuccauccucgacaagcucauccgcgcccccgacucccucaagacccucgccgacuucgacccccgcgucuccauccgccuccccuccaccuccggcuccgagggcguccccuuccgcaccgucuccgaguggcucgaguccaucaagaugcagcaguacaccgagcacuucauggccgccggcuacaccgccaucgagaaggucguccagaugaccaacgacgacaucaagcgcaucggcguccgccuccccggccaccagaagcgcaucgccuacucccuccucggccucaaggaccaggucaacaccgucggcauccccaucuga

SEQ ID NO: 1666 - RNA, 2952 nt, Artificial Sequence
  AAG43576 variant
auggacugccagcucuccauccuccuccuccucuccugcuccguccucgacuccuucggcgagcucaucccccagcccuccaacgaggucaaccuccucgacuccaagaccauccagggcgagcucggcuggaucuccuaccccucccacggcugggaggagaucuccggcgucgacgagcacuacacccccauccgcaccuaccaggucugcaacgucauggaccacucccagaacaacuggcuccgcaccaacugggucccccgcaacuccgcccagaagaucuacgucgagcucaaguucacccuccgcgacugcaacuccaucccccucguccucggcaccugcaaggagaccuucaaccucuacuacauggaguccgacgacgaccacggcgucaaguuccgcgagcaccaguucaccaagaucgacaccaucgccgccgacgaguccuucacccagauggaccucggcgaccgcauccucaagcucaacaccgagauccgcgaggucggccccgucaacaagaagggcuucuaccucgccuuccaggacgucggcgccugcgucgcccucgucuccguccgcgucuacuucaagaagugccccuucaccgucaagaaccucgccauguuccccgacaccguccccauggacucccagucccucgucgagguccgcggcuccugcgucaacaacuccaaggaggaggaccccccccgcauguacugcuccaccgagggcgaguggcucguccccaucggcaagugcuccugcaacgccggcuacgaggagcgcggcuucaugugccaggccugccgccccggcuucuacaaggcccucgacggcaacaugaagugcgccaagugccccccccacuccuccacccaggaggacggcuccaugaacugccgcugcgagaacaacuacuuccgcgccgacaaggacccccccuccauggccugcacccgcccccccuccuccccccgcaacgucaucuccaacaucaacgagaccuccgucauccucgacugguccuggccccucgacaccggcggccgcaaggacgucaccuucaacaucaucugcaagaagugcggcuggaacaucaagcagugcgagcccugcucccccaacguccgcuuccucccccgccaguucggccucaccaacaccaccgucaccgucaccgaccuccucgcccacaccaacuacaccuucgagaucgacgccgucaacggcgucuccgagcucuccucccccccccgccaguucgccgccgucuccaucaccaccaaccaggccgcccccucccccguccucaccaucaagaaggaccgcaccucccgcaacuccaucucccucuccuggcaggagcccgagcaccccaacggcaucauccucgacuacgaggucaaguacuacgagaagcaggagcaggagaccuccuacaccauccuccgcgcccgcggcaccaacgucaccaucuccucccucaagcccgacaccaucuacgucuuccagauccgcgcccgcaccgccgccggcuacggcaccaacucccgcaaguucgaguucgagaccucccccgacuccuucuccaucuccggcgaguccucccaggucgucaugaucgccaucuccgccgccgucgccaucauccuccucaccgucgucaucuacguccucaucggccgcuucugcggcuacaaguccaagcacggcgccgacgagaagcgccuccacuucggcaacggccaccucaagcuccccggccuccgcaccuacgucgacccccacaccuacgaggaccccacccaggccguccacgaguucgccaaggagcucgacgccaccaacaucuccaucgacaaggucgucggcgccggcgaguucggcgaggucugcuccggccgccucaagcuccccuccaagaaggagaucuccgucgccaucaagacccucaaggucggcuacaccgagaagcagcgccgcgacuuccucggcgaggccuccaucaugggccaguucgaccaccccaacaucauccgccucgagggcgucgucaccaaguccaagcccgucaugaucgucaccgaguacauggagaacggcucccucgacuccuuccuccgcaagcacgacgcccaguucaccgucauccagcucgucggcaugcuccgcggcaucgccuccggcaugaaguaccucuccgacaugggcuacguccaccgcgaccucgccgcccgcaacauccucaucaacuccaaccucgucugcaaggucuccgacuucggccucucccgcguccucgaggacgaccccgaggccgccuacaccacccgcggcggcaagauccccauccgcuggaccucccccgaggccaucgccuaccgcaaguucaccuccgccuccgacgucugguccuacggcaucguccucugggaggucauguccuacggcgagcgccccuacugggagauguccaaccaggacgucaucaaggccgucgacgagggcuaccgccuccccccccccauggacugccccgccgcccucuaccagcucaugcucgacugcuggcagaaggaccgcaacaaccgccccaaguucgagcagaucgucuccauccucgacaagcucauccgcaaccccggcucccucaagaucaucaccuccgccgccgcccgccccuccaaccuccuccucgaccaguccaacgucgacaucaccaccuuccgcaccaccggcgacuggcucaacggcgucuggaccgcccacugcaaggagaucuucaccggcgucgaguacuccuccugcgacaccaucgccaagaucuccaccgacgacaugaagaaggucggcgucaccgucgucggcccccagaagaagaucaucuccuccaucaaggcccucgagacccaguccaagaacggccccguccccgucuga

SEQ ID NO: 1667 - RNA, 2952 nt, Artificial Sequence
  AAH63282 variant
auggacugccagcucuccauccuccuccuccucuccugcuccguccucgacuccuucggcgagcucaucccccagcccuccaacgaggucaaccuccucgacuccaagaccauccagggcgagcucggcuggaucuccuaccccucccacggcugggaggagaucuccggcgucgacgagcacuacacccccauccgcaccuaccaggucugcaacgucauggaccacucccagaacaacuggcuccgcaccaacugggucccccgcaacuccgcccagaagaucuacgucgagcucaaguucacccuccgcgacugcaacuccaucccccucguccucggcaccugcaaggagaccuucaaccucuacuacauggaguccgacgacgaccacggcgucaaguuccgcgagcaccaguucaccaagaucgacaccaucgccgccgacgaguccuucacccagauggaccucggcgaccgcauccucaagcucaacaccgagauccgcgaggucggccccgucaacaagaagggcuucuaccucgccuuccaggacgucggcgccugcgucgcccucgucuccguccgcgucuacuucaagaagugccccuucaccgucaagaaccucgccauguuccccgacaccguccccauggacucccagucccucgucgagguccgcggcuccugcgucaacaacuccaaggaggaggaccccccccgcauguacugcuccaccgagggcgaguggcucguccccaucggcaagugcuccugcaacgccggcuacgaggagcgcggcuucaugugccaggccugccgccccggcuucuacaaggcccucgacggcaacaugaagugcgccaagugccccccccacuccuccacccaggaggacggcuccaugaacugccgcugcgagaacaacuacuuccgcgccgacaaggacccccccuccauggccugcacccgcccccccuccuccccccgcaacgucaucuccaacaucaacgagaccuccgucauccucgacugguccuggccccucgacaccggcggccgcaaggacgucaccuucaacaucaucugcaagaagugcggcuggaacaucaagcagugcgagcccugcucccccaacguccgcuuccucccccgccaguucggccucaccaacaccaccgucaccgucaccgaccuccucgcccacaccaacuacaccuucgagaucgacgccgucaacggcgucuccgagcucuccucccccccccgccaguucgccgccgucuccaucaccaccaaccaggccgcccccucccccguccucaccaucaagaaggaccgcaccucccgcaacuccaucucccucuccuggcaggagcccgagcaccccaacggcaucauccucgacuacgaggucaaguacuacgagaagcaggagcaggagaccuccuacaccauccuccgcgcccgcggcaccaacgucaccaucuccucccucaagcccgacaccaucuacgucuuccagauccgcgcccgcaccgccgccggcuacggcaccaacucccgcaaguucgaguucgagaccucccccgacuccuucuccaucuccggcgaguccucccaggucgucaugaucgccaucuccgccgccgucgccaucauccuccucaccgucgucaucuacguccucaucggccgcuucugcggcuacaaguccaagcacggcgccgacgagaagcgccuccacuucggcaacggccaccucaagcuccccggccuccgcaccuacgucgacccccacaccuacgaggaccccacccagaccguccacgaguucgccaaggagcucgacgccaccaacaucuccaucgacaaggucgucggcgccggcgaguucggcgaggucugcuccggccgccucaagcuccccuccaagaaggagaucuccgucgccaucaagacccucaaggucggcuacaccgagaagcagcgccgcgacuuccucggcgaggccuccaucaugggccaguucgaccaccccaacaucauccgccucgagggcgucgucaccaaguccaagcccgucaugaucgucaccgaguacauggagaacggcucccucgacuccuuccuccgcaagcacgacgcccaguucaccgucauccagcucgucggcaugcuccgcggcaucgccuccggcaugaaguaccucuccgacaugggcuacguccaccgcgaccucgccgcccgcaacauccucaucaacuccaaccucgucugcaaggucuccgacuucggccucucccgcguccucgaggacgaccccgaggccgccuacaccacccgcggcggcaagauccccauccgcuggaccucccccgaggccaucgccuaccgcaaguucaccuccgccuccgacgucugguccuacggcaucguccucugggaggucauguccuacggcgagcgccccuacugggagauguccaaccaggacgucaucaaggccgucgacgagggcuaccgccuccccccccccauggacugccccgccgcccucuaccagcucaugcucgacugcuggcagaaggaccgcaacaaccgccccaaguucgagcagaucgucuccauccucgacaagcucauccgcaaccccggcucccucaagaucaucaccuccgccgccgcccgccccuccaaccuccuccucgaccaguccaacgucgacaucaccaccuuccgcaccaccggcgacuggcucaacggcgucuggaccgcccacugcaaggagaucuucaccggcgucgaguacuccuccugcgacaccaucgccaagaucuccaccgacgacaugaagaaggucggcgucaccgucgucggcccccagaagaagaucaucuccuccaucaaggcccucgagacccaguccaagaacggccccguccccgucuga

SEQ ID NO: 1668 - RNA, 1389 nt, Artificial Sequence
  BAG54127 variant
augcccauguccaccauccuccccgucaccucccccugccuccccgccaccggcgucaccgucugggagcucaugaccuucggcgccgagcccuacgccggccuccgccucgccgagguccccgaccuccucgagaagggcgagcgccucgcccagccccagaucugcaccaucgacgucuacauggucauggucaagugcuggaugaucgacgagaacauccgccccaccuucaaggagcucgccaacgaguucacccgcauggcccgcgaccccccccgcuaccucgucaucaagcgcgaguccggccccggcaucgcccccggccccgagccccacggccucaccaacaagaagcucgaggaggucgagcucgagcccgagcucgaccucgaccucgaccucgaggccgaggaggacaaccucgccaccaccacccucggcuccgcccucucccuccccgucggcacccucaaccgcccccgcggcucccagucccuccucucccccuccuccggcuacaugcccaugaaccagggcaaccucggcgaguccugccaggaguccgccgucuccggcuccuccgagcgcugcccccgccccgucucccuccaccccaugccccgcggcugccucgccuccgaguccuccgagggccacgucaccggcuccgaggccgagcuccaggagaaggucuccaugugccgcucccgcucccgcucccgcuccccccgcccccgcggcgacuccgccuaccacucccagcgccacucccuccucacccccgucaccccccucuccccccccggccucgaggaggaggacgucaacggcuacgucaugcccgacacccaccucaagggcacccccuccucccgcgagggcacccucuccuccgucggccucuccuccguccucggcaccgaggaggaggacgaggacgaggaguacgaguacaugaaccgccgccgccgccacucccccccccaccccccccgccccuccucccucgaggagcucggcuacgaguacauggacgucggcuccgaccucuccgccucccucggcuccacccaguccugcccccuccaccccguccccaucaugcccaccgccggcaccacccccgacgaggacuacgaguacaugaaccgccagcgcgacggcggcggccccggcggcgacuacgccgccaugggcgccugccccgccuccgagcagggcuacgaggagaugcgcgccuuccagggccccggccaccaggccccccacguccacuacgcccgccucaagacccuccgcucccucgaggccaccgacuccgccuucgacaaccccgacuacuggcacucccgccucuuccccaaggccaacgcccagcgcaccuga

SEQ ID NO: 1669 - RNA, 2766 nt, Artificial Sequence
  BAG57868 variant
augcgcgccaacgacgcccuccagguccucggccuccucuucucccucgcccgcggcuccgaggucggcaacucccaggccgucugccccggcacccucaacggccucuccgucaccggcgacgccgagaaccaguaccagacccucuacaagcucuacgagcgcugcgaggucgucaugggcaaccucgagaucguccucaccggccacaacgccgaccucuccuuccuccaguggauccgcgaggucaccggcuacguccucgucgccaugaacgaguucuccacccucccccuccccaaccuccgcgucguccgcggcacccaggucuacgacggcaaguucgccaucuucgucaugcucaacuacaacaccaacuccucccacgcccuccgccagcuccgccucacccagcucaccgagauccucuccggcggcgucuacaucgagaagaacgacaagcucugccacauggacaccaucgacuggcgcgacaucguccgcgaccgcgacgccgagaucgucgucaaggacaacggccgcuccugcccccccugccacgaggucugcaagggccgcugcuggggccccggcuccgaggacugccagacccucaccaagaccaucugcgccccccagugcaacggccacugcuucggccccaaccccaaccagugcugccacgacgagugcgccggcggcugcuccggcccccaggacaccgacugcuucgccugccgccacuucaacgacuccggcgccugcgucccccgcugcccccagccccucgucuacaacaagcucaccuuccagcucgagcccaacccccacaccaaguaccaguacggcggcgucugcgucgccuccugcccccacaacuucgucgucgaccagaccuccugcguccgcgccugcccccccgacaagauggaggucgacaagaacggccucaagaugugcgagcccugcggcggccucugccccaaggccugcgagggcaccggcuccggcucccgcuuccagaccgucgacuccuccaacaucgacggcuucgucaacugcaccaagauccucggcaaccucgacuuccucaucaccggccucaacggcgaccccuggcacaagauccccgcccucgaccccgagaagcucaacgucuuccgcaccguccgcgagaucaccggcuaccucaacauccaguccuggcccccccacaugcacaacuucuccgucuucuccaaccucaccaccaucggcggccgcucccucuacaaccgcggcuucucccuccucaucaugaagaaccucaacgucaccucccucggcuuccgcucccucaaggagaucuccgccggccgcaucuacaucuccgccaaccgccagcucugcuaccaccacucccucaacuggaccaagguccuccgcggccccaccgaggagcgccucgacaucaagcacaaccgcccccgccgcgacugcgucgccgagggcaaggucugcgacccccucugcuccuccggcggcugcuggggccccggccccggccagugccucuccugccgcaacuacucccgcggcggcgucugcgucacccacugcaacuuccucaacggcgagccccgcgaguucgcccacgaggccgagugcuucuccugccaccccgagugccagcccauggagggcaccgccaccugcaacggcuccggcuccgacaccugcgcccagugcgcccacuuccgcgacggcccccacugcgucuccuccugcccccacggcguccucggcgccaagggccccaucuacaaguaccccgacguccagaacgagugccgccccugccacgagaacugcacccagggcugcaagggccccgagcuccaggacugccucggccagacccucguccucaucggcaagacccaccucaccauggcccucaccgucaucgccggccucgucgucaucuucaugaugcucggcggcaccuuccucuacuggcgcggccgccgcauccagaacaagcgcgccaugcgccgcuaccucgagcgcggcgaguccaucgagccccucgaccccuccgagaaggccaacaagguccucgcccgcaucuucaaggagaccgagcuccgcaagcucaagguccucggcuccggcgucuucggcaccguccacaagggcgucuggauccccgagggcgaguccaucaagauccccgucugcaucaaggucaucgaggacaaguccggccgccaguccuuccaggccgucaccgaccacaugcucgccaucggcucccucgaccacgcccacaucguccgccuccucggccucugccccggcuccucccuccagcucgucacccaguaccucccccucggcucccuccucgaccacguccgccagcaccgcggcgcccucggcccccagcuccuccucaacuggggcguccagaucgccaagggcauguacuaccucgaggagcacggcaugguccaccgcaaccucgccgcccgcaacguccuccucaagucccccucccagguccaggucgccgacuucggcgucgccgaccuccucccccccgacgacaagcagcuccucuacuccgaggccaagacccccaucaaguggauggcccucgaguccauccacuucggcaaguacacccaccaguccgacgucugguccuacggccagugcaucuggaugcccucccuccccucccucgcccccgucuccaaccuccccuucgagacccccuccuga

SEQ ID NO: 1670 - RNA, 3927 nt, Artificial Sequence
  AAB59446 variant
augaagcccgccaccggccucugggucugggucucccuccucgucgccgccggcaccguccagcccuccgacucccaguccgucugcgccggcaccgagaacaagcucuccucccucuccgaccucgagcagcaguaccgcgcccuccgcaaguacuacgagaacugcgaggucgucaugggcaaccucgagaucaccuccaucgagcacaaccgcgaccucuccuuccuccgcuccguccgcgaggucaccggcuacguccucgucgcccucaaccaguuccgcuaccucccccucgagaaccuccgcaucauccgcggcaccaagcucuacgaggaccgcuacgcccucgccaucuuccucaacuaccgcaaggacggcaacuucggccuccaggagcucggccucaagaaccucaccgagauccucaacggcggcgucuacgucgaccagaacaaguuccucugcuacgccgacaccauccacuggcaggacaucguccgcaaccccuggcccuccaaccucacccucgucuccaccaacggcuccuccggcugcggccgcugccacaaguccugcaccggccgcugcuggggccccaccgagaaccacugccagacccucacccgcaccgucugcgccgagcagugcgacggccgcugcuacggccccuacgucuccgacugcugccaccgcgagugcgccggcggcugcuccggccccaaggacaccgacugcuucgccugcaugaacuucaacgacuccggcgccugcgucacccagugcccccagaccuucgucuacaaccccaccaccuuccagcucgagcacaacuucaacgccaaguacaccuacggcgccuucugcgucaagaagugcccccacaacuucgucgucgacuccuccuccugcguccgcgccugccccuccuccaagauggaggucgaggagaacggcaucaagaugugcaagcccugcaccgacaucugccccaaggccugcgacggcaucggcaccggcucccucauguccgcccagaccgucgacuccuccaacaucgacaaguucaucaacugcaccaagaucaacggcaaccucaucuuccucgucaccggcauccacggcgaccccuacaacgccaucgaggccaucgaccccgagaagcucaacgucuuccgcaccguccgcgagaucaccggcuuccucaacauccaguccuggccccccaacaugaccgacuucuccgucuucuccaaccucgucaccaucggcggccgcguccucuacuccggccucucccuccucauccucaagcagcagggcaucaccucccuccaguuccagucccucaaggagaucuccgccggcaacaucuacaucaccgacaacuccaaccucugcuacuaccacaccaucaacuggaccacccucuucuccaccaucaaccagcgcaucgucauccgcgacaaccgcaaggccgagaacugcaccgccgagggcauggucugcaaccaccucugcuccuccgacggcugcuggggccccggccccgaccagugccucuccugccgccgcuucucccgcggccgcaucugcaucgaguccugcaaccucuacgacggcgaguuccgcgaguucgagaacggcuccaucugcgucgagugcgacccccagugcgagaagauggaggacggccuccucaccugccacggccccggccccgacaacugcaccaagugcucccacuucaaggacggccccaacugcgucgagaagugccccgacggccuccagggcgccaacuccuucaucuucaaguacgccgaccccgaccgcgagugccaccccugccaccccaacugcacccagggcugcaacggccccaccucccacgacugcaucuacuaccccuggaccggccacuccacccucccccagcacgcccgcaccccccucaucgccgccggcgucaucggcggccucuucauccucgucaucgucggccucaccuucgccgucuacguccgccgcaaguccaucaagaagaagcgcgcccuccgccgcuuccucgagaccgagcucgucgagccccucacccccuccggcaccgcccccaaccaggcccagcuccgcauccucaaggagaccgagcucaagcgcgucaagguccucggcuccggcgccuucggcaccgucuacaagggcaucuggguccccgagggcgagaccgucaagauccccgucgccaucaagauccucaacgagaccaccggccccaaggccaacgucgaguucauggacgaggcccucaucauggccuccauggaccacccccaccucguccgccuccucggcgucugccucucccccaccauccagcucgucacccagcucaugccccacggcugccuccucgaguacguccacgagcacaaggacaacaucggcucccagcuccuccucaacuggugcguccagaucgccaagggcaugauguaccucgaggagcgccgccucguccaccgcgaccucgccgcccgcaacguccucgucaagucccccaaccacgucaagaucaccgacuucggccucgcccgccuccucgagggcgacgagaaggaguacaacgccgacggcggcaagaugcccaucaaguggauggcccucgagugcauccacuaccgcaaguucacccaccaguccgacgucugguccuacggcgucaccaucugggagcucaugaccuucggcggcaagcccuacgacggcauccccacccgcgagauccccgaccuccucgagaagggcgagcgccucccccagccccccaucugcaccaucgacgucuacauggucauggucaagugcuggaugaucgacgccgacucccgccccaaguucaaggagcucgccgccgaguucucccgcauggcccgcgacccccagcgcuaccucgucauccagggcgacgaccgcaugaagcuccccucccccaacgacuccaaguucuuccagaaccuccucgacgaggaggaccucgaggacaugauggacgccgaggaguaccucgucccccaggccuucaacauccccccccccaucuacaccucccgcgcccgcaucgacuccaaccgcuccgagaucggccacucccccccccccgccuacacccccauguccggcaaccaguucgucuaccgcgacggcggcuucgccgccgagcagggcgucuccguccccuaccgcgcccccaccuccaccauccccgaggcccccgucgcccagggcgccaccgccgagaucuucgacgacuccugcugcaacggcacccuccgcaagcccgucgccccccacguccaggaggacuccuccacccagcgcuacuccgccgaccccaccgucuucgcccccgagcgcuccccccgcggcgagcucgacgaggagggcuacaugacccccaugcgcgacaagcccaagcaggaguaccucaaccccgucgaggagaaccccuucgucucccgccgcaagaacggcgaccuccaggcccucgacaaccccgaguaccacaacgccuccaacggcccccccaaggccgaggacgaguacgucaacgagccccucuaccucaacaccuucgccaacacccucggcaaggccgaguaccucaagaacaacauccucuccaugcccgagaaggccaagaaggccuucgacaaccccgacuacuggaaccacucccuccccccccgcuccacccuccagcaccccgacuaccuccaggaguacuccaccaaguacuucuacaagcagaacggccgcauccgccccaucgucgccgagaaccccgaguaccucuccgaguucucccucaagcccggcaccguccucccccccccccccuaccgccaccgcaacaccgucgucuga

SEQ ID NO: 1671 - RNA, 1461 nt, Artificial Sequence
  CCDS46648.1 variant
augauccagaccguccccgaccccgccgcccacaucaaggaggcccucuccgucgucuccgaggaccagucccucuucgagugcgccuacggcaccccccaccucgccaagaccgagaugaccgccuccuccuccuccgacuacggccagaccuccaagauguccccccgcgucccccagcaggacuggcucucccagccccccgcccgcgucaccaucaagauggagugcaaccccucccaggucaacggcucccgcaacucccccgacgagugcuccgucgccaagggcggcaagauggucggcucccccgacaccgucggcaugaacuacggcuccuacauggaggagaagcacaugcccccccccaacaugaccaccaacgagcgccgcgucaucguccccgccgaccccacccucugguccaccgaccacguccgccaguggcucgagugggccgucaaggaguacggccuccccgacgucaacauccuccucuuccagaacaucgacggcaaggagcucugcaagaugaccaaggacgacuuccagcgccucacccccuccuacaacgccgacauccuccucucccaccuccacuaccuccgcgagaccccccucccccaccucaccuccgacgacgucgacaaggcccuccagaacuccccccgccucaugcacgcccgcaacaccggcggcgccgccuucaucuuccccaacaccuccgucuaccccgaggccacccagcgcaucaccacccgccccgaccuccccuacgagcccccccgccgcuccgccuggaccggccacggccaccccaccccccaguccaaggccgcccagcccucccccuccaccguccccaagaccgaggaccagcgcccccagcucgaccccuaccagauccucggccccaccuccucccgccucgccaaccccggcuccggccagauccagcucuggcaguuccuccucgagcuccucuccgacuccuccaacuccuccugcaucaccugggagggcaccaacggcgaguucaagaugaccgaccccgacgaggucgcccgccgcuggggcgagcgcaaguccaagcccaacaugaacuacgacaagcucucccgcgcccuccgcuacuacuacgacaagaacaucaugaccaagguccacggcaagcgcuacgccuacaaguucgacuuccacggcaucgcccaggcccuccagccccacccccccgaguccucccucuacaaguaccccuccgaccuccccuacaugggcuccuaccacgcccacccccagaagaugaacuucgucgccccccacccccccgcccuccccgucaccuccuccuccuucuucgccgcccccaaccccuacuggaacucccccaccggcggcaucuaccccaacacccgccuccccaccucccacaugcccucccaccucggcaccuacuacuga

SEQ ID NO: 1672 - RNA, 1359 nt, Artificial Sequence
  AAA19786 variant
auguccgagacccccgcccagugcuccaucaagcaggagcgcaucuccuacaccccccccgagucccccguccccuccuacgccuccuccaccccccuccacguccccgucccccgcgcccuccgcauggaggaggacuccauccgccuccccgcccaccuccgccuccagcccaucuacuggucccgcgacgacgucgcccaguggcucaagugggccgagaacgaguucucccuccgccccaucgacuccaacaccuucgagaugaacggcaaggcccuccuccuccucaccaaggaggacuuccgcuaccgcuccccccacuccggcgacguccucuacgagcuccuccagcacauccucaagcagcgcaagccccgcauccucuucucccccuucuuccaccccggcaacuccauccacacccagcccgaggucauccuccaccagaaccacgaggaggacaacugcguccagcgcaccccccgccccuccgucgacaacguccaccacaacccccccaccaucgagcuccuccaccgcucccgcucccccaucaccaccaaccaccgccccucccccgaccccgagcagcgcccccuccgcuccccccucgacaacaugauccgccgccucucccccgccgagcgcgcccagggcccccgcccccaccaggagaacaaccaccaggaguccuacccccucuccgucucccccauggagaacaaccacugccccgccuccuccgagucccaccccaagcccuccuccccccgccaggaguccacccgcgucauccagcucaugcccucccccaucaugcacccccucauccucaacccccgccacuccgucgacuucaagcagucccgccucuccgaggacggccuccaccgcgagggcaagcccaucaaccucucccaccgcgaggaccucgccuacaugaaccacaucauggucuccgucuccccccccgaggagcacgccaugcccaucggccgcaucgccgacugccgccuccucugggacuacgucuaccagcuccucuccgacucccgcuacgagaacuucauccgcugggaggacaaggaguccaagaucuuccgcaucgucgaccccaacggccucgcccgccucuggggcaaccacaagaaccgcaccaacaugaccuacgagaagaugucccgcgcccuccgccacuacuacaagcucaacaucauccgcaaggagcccggccagcgccuccucuuccgcuucaugaagacccccgacgagaucauguccggccgcaccgaccgccucgagcaccucgagucccaggagcucgacgagcagaucuaccaggaggacgagugcuga

SEQ ID NO: 1673 - RNA, 1971 nt, Artificial Sequence
  AAH04817 variant
auggccuccaccgacuacuccaccuacucccaggccgccgcccagcagggcuacuccgccuacaccgcccagcccacccagggcuacgcccagaccacccaggccuacggccagcaguccuacggcaccuacggccagcccaccgacgucuccuacacccaggcccagaccaccgccaccuacggccagaccgccuacgccaccuccuacggccagccccccaccggcuacaccacccccaccgccccccaggccuacucccagcccguccagggcuacggcaccggcgccuacgacaccaccaccgccaccgucaccaccacccaggccuccuacgccgcccaguccgccuacggcacccagcccgccuaccccgccuacggccagcagcccgccgccaccgcccccacccgcccccaggacggcaacaagcccaccgagaccucccagccccaguccuccaccggcggcuacaaccagcccucccucggcuacggccaguccaacuacuccuacccccagguccccggcuccuaccccaugcagcccgucaccgccccccccuccuacccccccaccuccuacuccuccacccagcccaccuccuacgaccaguccuccuacucccagcagaacaccuacggccagcccuccuccuacggccagcaguccuccuacggccagcaguccuccuacggccagcagccccccaccuccuaccccccccagaccggcuccuacucccaggcccccucccaguacucccagcaguccuccuccuacggccagcaguccuccuuccgccaggaccaccccuccuccaugggcgucuacggccaggaguccggcggcuucuccggccccggcgagaaccgcuccauguccggccccgacaaccgcggccgcggccgcggcggcuucgaccgcggcggcaugucccgcggcggccgcggcggcggccgcggcggcaugggcuccgccggcgagcgcggcggcuucaacaagcccggcggccccauggacgagggccccgaccucgaccucggcccccccgucgaccccgacgaggacuccgacaacuccgccaucuacguccagggccucaacgacuccgucacccucgacgaccucgccgacuucuucaagcagugcggcgucgucaagaugaacaagcgcaccggccagcccaugauccacaucuaccucgacaaggagaccggcaagcccaagggcgacgccaccgucuccuacgaggacccccccaccgccaaggccgccgucgagugguucgacggcaaggacuuccagggcuccaagcucaaggucucccucgcccgcaagaagccccccaugaacuccaugcgcggcggccuccccccccgcgagggccgcggcaugccccccccccuccgcggcggccccggcggccccggcggccccggcggccccaugggccgcaugggcggccgcggcggcgaccgcggcggcuuccccccccgcggcccccgcggcucccgcggcaaccccuccggcggcggcaacguccagcaccgcgccggcgacuggcagugccccaaccccggcugcggcaaccagaacuucgccuggcgcaccgagugcaaccagugcaaggcccccaagcccgagggcuuccuccccccccccuuccccccccccggcggcgaccgcggccgcggcggccccggcggcaugcgcggcggccgcggcggccucauggaccgcggcggccccggcggcauguuccgcggcggccgcggcggcgaccgcggcggcuuccgcggcggccgcggcauggaccgcggcggcuucggcggcggccgccgcggcggccccggcggcccccccggcccccucauggagcagaugggcggccgccgcggcggccgcggcggccccggcaagauggacaagggcgagcaccgccaggagcgccgcgaccgccccuacuga

SEQ ID NO: 1674 - RNA, 1998 nt, Artificial Sequence
  AEA07595 variant
augggccagaccggcaagaaguccgagaagggccccgucugcuggcgcaagcgcgucaaguccgaguacaugcgccuccgccagcucaagcgcuuccgccgcgccgacgaggucaaguccauguucuccuccaaccgccagaagauccucgagcgcaccgagauccucaaccaggaguggaagcagcgccgcauccagcccguccacauccucaccuccgucuccucccuccgcggcacccgcgaggucgaggacgagaccguccuccacaacauccccuacaugggcgacgagguccucgaccaggacggcaccuucaucgaggagcucaucaagaacuacgacggcaagguccacggcgaccgcgagugcggcuucaucaacgacgagaucuucgucgagcucgucaacgcccucggccaguacaacgacgacgacgacgacgacgacggcgacgaccccgaggagcgcgaggagaagcagaaggaccucgaggaccaccgcgacgacaaggagucccgccccccccgcaaguuccccuccgacaagaucuucgaggccaucuccuccauguuccccgacaagggcaccgccgaggagcucaaggagaaguacaaggagcucaccgagcagcagcuccccggcgcccucccccccgagugcacccccaacaucgacggccccaacgccaaguccguccagcgcgagcagucccuccacuccuuccacacccucuucugccgccgcugcuucaaguacgacugcuuccuccaccccuuccacgccacccccaacaccuacaagcgcaagaacaccgagaccgcccucgacaacaagcccugcggcccccagugcuaccagcaccucgagggcgccaaggaguucgccgccgcccucaccgccgagcgcaucaagaccccccccaagcgccccggcggccgccgccgcggccgccuccccaacaacuccucccgccccuccacccccaccaucaacguccucgaguccaaggacaccgacuccgaccgcgaggccggcaccgagaccggcggcgagaacaacgacaaggaggaggaggagaagaaggacgagaccuccuccuccuccgaggccaacucccgcugccagacccccaucaagaugaagcccaacaucgagccccccgagaacgucgagugguccggcgccgaggccuccauguuccgcguccucaucggcaccuacuacgacaacuucugcgccaucgcccgccucaucggcaccaagaccugccgccaggucuacgaguuccgcgucaaggaguccuccaucaucgcccccgcccccgccgaggacgucgacacccccccccgcaagaagaagcgcaagcaccgccucugggccgcccacugccgcaagauccagcucaagaagggccagaaccgcuuccccggcugccgcugcaaggcccagugcaacaccaagcagugccccugcuaccucgccguccgcgagugcgaccccgaccucugccucaccugcggcgccgccgaccacugggacuccaagaacgucuccugcaagaacugcuccauccagcgcggcuccaagaagcaccuccuccucgcccccuccgacgucgccggcuggggcaucuucaucaaggaccccguccagaagaacgaguucaucuccgaguacugcggcgagaucaucucccaggacgaggccgaccgccgcggcaaggucuacgacaaguacaugugcuccuuccucuucaaccucaacaacgacuucgucgucgacgccacccgcaagggcaacaagauccgcuucgccaaccacuccgucaaccccaacugcuacgccaaggucaugauggucaacggcgaccaccgcaucggcaucuucgccaagcgcgccauccagaccggcgaggagcucuucuucgacuaccgcuacucccaggccgacgcccucaaguacgucggcaucgagcgcgagauggagauccccuga

SEQ ID NO: 1675 - RNA, 1005 nt, Artificial Sequence
  EAW80068 variant
augggccagaccggcaagaaguccgagaagggccccgucugcuggcgcaagcgcgucaaguccgaguacaugcgccuccgccagcucaagcgcuuccgccgcgccgacgaggucaaguccauguucuccuccaaccgccagaagauccucgagcgcaccgagauccucaaccaggaguggaagcagcgccgcauccagcccguccacauccucaccuccgucuccucccuccgcggcacccgcgagugcuccgucaccuccgaccucgacuuccccacccaggucaucccccucaagacccucaacgccgucgccuccguccccaucauguacuccugguccccccuccagcagaacuucauggucgaggacgagaccguccuccacaacauccccuacaugggcgacgagguccucgaccaggacggcaccuucaucgaggagcucaucaagaacuacgacggcaagguccacggcgaccgcgagugcggcuucaucaacgacgagaucuucgucgagcucgucaacgcccucggccaguacaacgacgacgacgacgacgacgacggcgacgaccccgaggagcgcgaggagaagcagaaggaccucgaggaccaccgcgacgacaaggagucccgccccccccgcaaguuccccuccgacaagaucuucgaggccaucuccuccauguuccccgacaagggcaccgccgaggagcucaaggagaaguacaaggagcucaccgagcagcagcuccccggcgcccucccccccgagugcacccccaacaucgacggccccaacgccaaguccguccagcgcgagcagucccuccacuccuuccacacccucuucugccgccgcugcuucaaguacgacugcuuccuccaccccuuccacgccacccccaacaccuacaagcgcaagaacaccgagaccgcccucgacaacaagcccugcggcccccagugcuaccagcaccucccccuccucccccgcaacuga

SEQ ID NO: 1676 - RNA, 195 nt, Artificial Sequence
  CCO13726 variant
augccccucgucaacaucaugaugaugaccaugaugaugauggagaccauccucaagaaggagaagaagucccgcaagaucuggcgcaucaccgagaugaucaagaaggccgcccaccucggcaacuuccuccucaucaaguuccucaagcccuucccccagugcuuccagauccgcgcccagcagaagaacuga

SEQ ID NO: 1677 - RNA, 2241 nt, Artificial Sequence
  AAC51520 variant
augggccagaccggcaagaaguccgagaagggccccgucugcuggcgcaagcgcgucaaguccgaguacaugcgccuccgccagcucaagcgcuuccgccgcgccgacgaggucaaguccauguucuccuccaaccgccagaagauccucgagcgcaccgagauccucaaccaggaguggaagcagcgccgcauccagcccguccacauccucaccuccgucuccucccuccgcggcacccgcgagugcuccgucaccuccgaccucgacuuccccacccaggucaucccccucaagacccucaacgccgucgccuccguccccaucauguacuccugguccccccuccagcagaacuucauggucgaggacgagaccguccuccacaacauccccuacaugggcgacgagguccucgaccaggacggcaccuucaucgaggagcucaucaagaacuacgacggcaagguccacggcgaccgcgagugcggcuucaucaacgacgagaucuucgucgagcucgucaacgcccucggccaguacaacgacgacgacgacgacgacgacggcgacgaccccgaggagcgcgaggagaagcagaaggaccucgaggaccaccgcgacgacaaggagucccgccccccccgcaaguuccccuccgacaagaucuucgaggccaucuccuccauguuccccgacaagggcaccgccgaggagcucaaggagaaguacaaggagcucaccgagcagcagcuccccggcgcccucccccccgagugcacccccaacaucgacggccccaacgccaaguccguccagcgcgagcagucccuccacuccuuccacacccucuucugccgccgcugcuucaaguacgacugcuuccuccaccccuuccacgccacccccaacaccuacaagcgcaagaacaccgagaccgcccucgacaacaagcccugcggcccccagugcuaccagcaccucgagggcgccaaggaguucgccgccgcccucaccgccgagcgcaucaagaccccccccaagcgccccggcggccgccgccgcggccgccuccccaacaacuccucccgccccuccacccccaccaucaacguccucgaguccaaggacaccgacuccgaccgcgaggccggcaccgagaccggcggcgagaacaacgacaaggaggaggaggagaagaaggacgagaccuccuccuccuccgaggccaacucccgcugccagacccccaucaagaugaagcccaacaucgagccccccgagaacgucgagugguccggcgccgaggccuccauguuccgcguccucaucggcaccuacuacgacaacuucugcgccaucgcccgccucaucggcaccaagaccugccgccaggucuacgaguuccgcgucaaggaguccuccaucaucgcccccgcccccgccgaggacgucgacacccccccccgcaagaagaagcgcaagcaccgccucugggccgcccacugccgcaagauccagcucaagaaggacggcuccuccaaccacgucuacaacuaccagcccugcgaccacccccgccagcccugcgacuccuccugccccugcgucaucgcccagaacuucugcgagaaguucugccagugcuccuccgagugccagaaccgcuuccccggcugccgcugcaaggcccagugcaacaccaagcagugccccugcuaccucgccguccgcgagugcgaccccgaccucugccucaccugcggcgccgccgaccacugggacuccaagaacgucuccugcaagaacugcuccauccagcgcggcuccaagaagcaccuccuccucgcccccuccgacgucgccggcuggggcaucuucaucaaggaccccguccagaagaacgaguucaucuccgaguacugcggcgagaucaucucccaggacgaggccgaccgccgcggcaaggucuacgacaaguacaugugcuccuuccucuucaaccucaacaacgacuucgucgucgacgccacccgcaagggcaacaagauccgcuucgccaaccacuccgucaaccccaacugcuacgccaaggucaugauggucaacggcgaccaccgcaucggcaucuucgccaagcgcgccauccagaccggcgaggagcucuucuucgacuaccgcuacucccaggccgacgcccucaaguacgucggcaucgagcgcgagauggagauccccuga

SEQ ID NO: 1678 - RNA, 2124 nt, Artificial Sequence
  AEN79481 variant
augggccagaccggcaagaaguccgagaagggccccgucugcuggcgcaagcgcgucaaguccgaguacaugcgccuccgccagcucaagcgcuuccgccgcgccgacgaggucaaguccauguucuccuccaaccgccagaagauccucgagcgcaccgagauccucaaccaggaguggaagcagcgccgcauccagcccguccacauccucaccuccgucuccucccuccgcggcacccgcgaggucgaggacgagaccguccuccacaacauccccuacaugggcgacgagguccucgaccaggacggcaccuucaucgaggagcucaucaagaacuacgacggcaagguccacggcgaccgcgagugcggcuucaucaacgacgagaucuucgucgagcucgucaacgcccucggccaguacaacgacgacgacgacgacgacgacggcgacgaccccgaggagcgcgaggagaagcagaaggaccucgaggaccaccgcgacgacaaggagucccgccccccccgcaaguuccccuccgacaagaucuucgaggccaucuccuccauguuccccgacaagggcaccgccgaggagcucaaggagaaguacaaggagcucaccgagcagcagcuccccggcgcccucccccccgagugcacccccaacaucgacggccccaacgccaaguccguccagcgcgagcagucccuccacuccuuccacacccucuucugccgccgcugcuucaaguacgacugcuuccuccaccccuuccacgccacccccaacaccuacaagcgcaagaacaccgagaccgcccucgacaacaagcccugcggcccccagugcuaccagcaccucgagggcgccaaggaguucgccgccgcccucaccgccgagcgcaucaagaccccccccaagcgccccggcggccgccgccgcggccgccuccccaacaacuccucccgccccuccacccccaccaucaacguccucgaguccaaggacaccgacuccgaccgcgaggccggcaccgagaccggcggcgagaacaacgacaaggaggaggaggagaagaaggacgagaccuccuccuccuccgaggccaacucccgcugccagacccccaucaagaugaagcccaacaucgagccccccgagaacgucgagugguccggcgccgaggccuccauguuccgcguccucaucggcaccuacuacgacaacuucugcgccaucgcccgccucaucggcaccaagaccugccgccaggucuacgaguuccgcgucaaggaguccuccaucaucgcccccgcccccgccgaggacgucgacacccccccccgcaagaagaagcgcaagcaccgccucugggccgcccacugccgcaagauccagcucaagaaggacggcuccuccaaccacgucuacaacuaccagcccugcgaccacccccgccagcccugcgacuccuccugccccugcgucaucgcccagaacuucugcgagaaguucugccagugcuccuccgagugccagaaccgcuuccccggcugccgcugcaaggcccagugcaacaccaagcagugccccugcuaccucgccguccgcgagugcgaccccgaccucugccucaccugcggcgccgccgaccacugggacuccaagaacgucuccugcaagaacugcuccauccagcgcggcuccaagaagcaccuccuccucgcccccuccgacgucgccggcuggggcaucuucaucaaggaccccguccagaagaacgaguucaucuccgaguacugcggcgagaucaucucccaggacgaggccgaccgccgcggcaaggucuacgacaaguacaugugcuccuuccucuucaaccucaacaacgacuucgucgucgacgccacccgcaagggcaacaagauccgcuucgccaaccacuccgucaaccccaacugcuacgccaaggucaugauggucaacggcgaccaccgcaucggcaucuucgccaagcgcgccauccagaccggcgaggagcucuucuucgacuaccgcuacucccaggccgacgcccucaaguacgucggcaucgagcgcgagauggagauccccuga

SEQ ID NO: 1679 - RNA, 399 nt, Artificial Sequence
  AAB87141 variant
auggucgaggccuucugcgccaccuggaagcucaccaacucccagaacuucgacgaguacaugaaggcccucggcgucggcuucgccacccgccaggucggcaacgucaccaagcccaccgucaucaucucccaggagggcgacaaggucgucauccgcacccucuccaccuucaagaacaccgagaucuccuuccagcucggcgaggaguucgacgagaccaccgccgacgaccgcaacugcaaguccgucgucucccucgacggcgacaagcucguccacauccagaagugggacggcaaggagaccaacuucguccgcgagaucaaggacggcaagauggucaugacccucaccuucggcgacgucgucgccguccgccacuacgagaaggccuga

SEQ ID NO: 1680 - RNA, 765 nt, Artificial Sequence
  CAA36870 variant
auguggcagcuccuccuccccaccgcccuccuccuccucgucuccgccggcaugcgcaccgaggaccuccccaaggccgucgucuuccucgagccccagugguaccgcguccucgagaaggacuccgucacccucaagugccagggcgccuacucccccgaggacaacuccacccagugguuccacaacgagucccucaucuccucccaggccuccuccuacuucaucgacgccgccaccgucgacgacuccggcgaguaccgcugccagaccaaccucuccacccucuccgaccccguccagcucgagguccacaucggcuggcuccuccuccaggccccccgcugggucuucaaggaggaggaccccauccaccuccgcugccacuccuggaagaacaccgcccuccacaaggucaccuaccuccagaacggcaagggccgcaaguacuuccaccacaacuccgacuucuacauccccaaggccacccucaaggacuccggcuccuacuucugccgcggccucuucggcuccaagaacgucuccuccgagaccgucaacaucaccaucacccagggccucgccgucuccaccaucuccuccuucuucccccccggcuaccaggucuccuucugccucgucaugguccuccucuucgccgucgacaccggccucuacuucuccgucaagaccaacauccgcuccuccacccgcgacuggaaggaccacaaguucaaguggcgcaaggacccccaggacaaguga

SEQ ID NO: 1681 - RNA, 873 nt, Artificial Sequence
  CCDS1232.1 variant
augggcggcggcgccggcgagcgccucuucaccuccuccugccucgucggccucgucccccucggccuccgcaucucccucgucaccugcccccuccagugcggcaucauguggcagcuccuccuccccaccgcccuccuccuccucgucuccgccggcaugcgcaccgaggaccuccccaaggccgucgucuuccucgagccccagugguaccgcguccucgagaaggacuccgucacccucaagugccagggcgccuacucccccgaggacaacuccacccagugguuccacaacgagucccucaucuccucccaggccuccuccuacuucaucgacgccgccaccgucgacgacuccggcgaguaccgcugccagaccaaccucuccacccucuccgaccccguccagcucgagguccacaucggcuggcuccuccuccaggccccccgcugggucuucaaggaggaggaccccauccaccuccgcugccacuccuggaagaacaccgcccuccacaaggucaccuaccuccagaacggcaagggccgcaaguacuuccaccacaacuccgacuucuacauccccaaggccacccucaaggacuccggcuccuacuucugccgcggccucuucggcuccaagaacgucuccuccgagaccgucaacaucaccaucacccagggccucgccgucuccaccaucuccuccuucuucccccccggcuaccaggucuccuucugccucgucaugguccuccucuucgccgucgacaccggccucuacuucuccgucaagaccaacauccgcuccuccacccgcgacuggaaggaccacaaguucaaguggcgcaaggacccccaggacaaguga

SEQ ID NO: 1682 - RNA, 807 nt, Artificial Sequence
  AAH74858 variant
augucccucuccuuccuccuccuccucuucuucucccaccucauccucuccgccugggcccacggcgagaagcgccucgcccccaagggccagcccggccccgccgccaccgaccgcaacccccgcggcuccuccucccgccaguccuccuccuccgccauguccuccuccuccgccuccuccucccccgccgccucccucggcucccagggcuccggccucgagcaguccuccuuccaguggucccccuccggccgccgcaccggcucccucuacugccgcgucggcaucggcuuccaccuccagaucuaccccgacggcaaggucaacggcucccacgaggccaacaugcucuccguccucgagaucuucgccgucucccagggcaucgucggcauccgcggcgucuucuccaacaaguuccucgccauguccaagaagggcaagcuccacgccuccgccaaguucaccgacgacugcaaguuccgcgagcgcuuccaggagaacuccuacaacaccuacgccuccgccauccaccgcaccgagaagaccggccgcgagugguacgucgcccucaacaagcgcggcaaggccaagcgcggcugcuccccccgcgucaagccccagcacaucuccacccacuuccucccccgcuucaagcaguccgagcagcccgagcucuccuucaccgucaccguccccgagaagaagaagccccccucccccaucaagcccaagaucccccucuccgccccccgcaagaacaccaacuccgucaaguaccgccucaaguuccgcuucggcuga

SEQ ID NO: 1683 - RNA, 117 nt, Artificial Sequence
  AAB06462 variant
auguccacccgcugcggcgaggccggccgcgcccgcggcacccagccccaccgcggcuaccgcgcccagaaccagcccuacaagaugcaccucggccccccccgccucgaggaguga

SEQ ID NO: 1684 - RNA, 2466 nt, Artificial Sequence
  AAA59470 variant
auggucuccuggggccgcuucaucugccucgucgucgucaccauggccacccucucccucgcccgccccuccuucucccucgucgaggacaccacccucgagcccgaggagccccccaccaaguaccagaucucccagcccgaggucuacgucgccgcccccggcgagucccucgagguccgcugccuccucaaggacgccgccgucaucuccuggaccaaggacggcguccaccucggccccaacaaccgcaccguccucaucggcgaguaccuccagaucaagggcgccaccccccgcgacuccggccucuacgccugcaccgccucccgcaccgucgacuccgagaccugguacuucauggucaacgucaccgacgccaucuccuccggcgacgacgaggacgacaccgacggcgccgaggacuucgucuccgagaacuccaacaacaagcgcgcccccuacuggaccaacaccgagaagauggagaagcgccuccacgccguccccgccgccaacaccgucaaguuccgcugccccgccggcggcaaccccaugcccaccaugcgcuggcucaagaacggcaaggaguucaagcaggagcaccgcaucggcggcuacaagguccgcaaccagcacuggucccucaucauggaguccgucguccccuccgacaagggcaacuacaccugcgucgucgagaacgaguacggcuccaucaaccacaccuaccaccucgacgucgucgagcgcuccccccaccgccccauccuccaggccggccuccccgccaacgccuccaccgucgucggcggcgacgucgaguucgucugcaaggucuacuccgacgcccagccccacauccaguggaucaagcacgucgagaagaacggcuccaaguacggccccgacggccuccccuaccucaagguccucaaggccgccggcgucaacaccaccgacaaggagaucgagguccucuacauccgcaacgucaccuucgaggacgccggcgaguacaccugccucgccggcaacuccaucggcaucuccuuccacuccgccuggcucaccguccuccccgcccccggccgcgagaaggagaucaccgccucccccgacuaccucgagaucgccaucuacugcaucggcgucuuccucaucgccugcauggucgucaccgucauccucugccgcaugaagaacaccaccaagaagcccgacuucuccucccagcccgccguccacaagcucaccaagcgcaucccccuccgccgccaggucaccgucuccgccgaguccuccuccuccaugaacuccaacaccccccucguccgcaucaccacccgccucuccuccaccgccgacacccccaugcucgccggcgucuccgaguacgagcuccccgaggaccccaagugggaguucccccgcgacaagcucacccucggcaagccccucggcgagggcugcuucggccaggucgucauggccgaggccgucggcaucgacaaggacaagcccaaggaggccgucaccgucgccgucaagaugcucaaggacgacgccaccgagaaggaccucuccgaccucgucuccgagauggagaugaugaagaugaucggcaagcacaagaacaucaucaaccuccucggcgccugcacccaggacggcccccucuacgucaucgucgaguacgccuccaagggcaaccuccgcgaguaccuccgcgcccgccgcccccccggcauggaguacuccuacgacaucaaccgcguccccgaggagcagaugaccuucaaggaccucgucuccugcaccuaccagcucgcccgcggcauggaguaccucgccucccagaagugcauccaccgcgaccucgccgcccgcaacguccucgucaccgagaacaacgucaugaagaucgccgacuucggccucgcccgcgacaucaacaacaucgacuacuacaagaagaccaccaacggccgccuccccgucaaguggauggcccccgaggcccucuucgaccgcgucuacacccaccaguccgacgucugguccuucggcguccucaugugggagaucuucacccucggcggcucccccuaccccggcauccccgucgaggagcucuucaagcuccucaaggagggccaccgcauggacaagcccgccaacugcaccaacgagcucuacaugaugaugcgcgacugcuggcacgccguccccucccagcgccccaccuucaagcagcucgucgaggaccucgaccgcauccucacccucaccaccaacgaggaguaccucgaccucucccagccccucgagcaguacucccccuccuaccccgacacccgcuccuccugcuccuccggcgacgacuccgucuucucccccgaccccaugcccuacgagcccugccucccccaguacccccacaucaacggcuccgucaagaccuga

SEQ ID NO: 1685 - RNA, 1908 nt, Artificial Sequence
  EAW74574 variant
auggcccccccccuccuccuccuccuccucgccuccggcgccgccgccugcccccuccccugcgucugccagaaccucuccgagucccucuccacccucugcgcccaccgcggccuccucuucgucccccccaacgucgaccgccgcaccgucgagcuccgccucgccgacaacuucauccaggcccucggcccccccgacuuccgcaacaugaccggccucgucgaccucacccucucccgcaacgccaucacccgcaucggcgcccgcgccuucggcgaccucgagucccuccgcucccuccaccucgacggcaaccgccucgucgagcucggcaccggcucccuccgcggccccgucaaccuccagcaccucauccucuccggcaaccagcucggccgcaucgcccccggcgccuucgacgacuuccucgagucccucgaggaccucgaccucuccuacaacaaccuccgccagguccccugggccggcaucggcgccaugcccgcccuccacacccucaaccucgaccacaaccucaucgacgcccucccccccggcgccuucgcccagcucggccagcucucccgccucgaccucaccuccaaccgccucgccacccucgcccccgacccccucuucucccgcggccgcgacgccgaggccucccccgccccccucguccucuccuucuccggcaacccccuccacugcaacugcgagcuccucuggcuccgccgccucgcccgccccgacgaccucgagaccugcgccuccccccccggccucgccggccgcuacuucugggccguccccgagggcgaguucuccugcgagcccccccucaucgcccgccacacccagcgccucuggguccucgagggccagcgcgccacccuccgcugccgcgcccucggcgaccccgcccccaccaugcacugggucggccccgacgaccgccucgucggcaacuccucccgcgcccgcgccuuccccaacggcacccucgagaucggcgucaccggcgccggcgacgccggcggcuacaccugcaucgccaccaaccccgccggcgaggccaccgcccgcgucgagcuccgcguccucgcccucccccacggcggcaacuccuccgccgagggcggccgccccggccccuccgacaucgccgccuccgcccgcaccgccgccgagggcgagggcacccucgaguccgagcccgccguccaggucaccgaggucaccgccaccuccggccucgucuccuggggccccggccgccccgccgaccccgucuggauguuccagauccaguacaacuccuccgaggacgagacccucaucuaccgcaucguccccgccuccucccaccacuuccuccucaagcaccucguccccggcgccgacuacgaccucugccuccucgcccucucccccgccgccggccccuccgaccucaccgccacccgccuccucggcugcgcccacuucuccacccuccccgccuccccccucugccacgcccuccaggcccacguccucggcggcacccucaccgucgccgucggcggcguccucgucgccgcccuccucgucuucaccgucgcccuccucguccgcggccgcggcgccggcaacggccgccucccccucaagcucucccacguccagucccagaccaacggcggccccucccccacccccaaggcccaccccccccgcuccccccccccccgcccccagcgcuccugcucccucgaccucggcgacgccggcugcuacggcuacgcccgccgccucggcggcgccugggcccgccgcucccacuccguccacggcggccuccucggcgccggcugccgcggcgucggcggcuccgccgagcgccucgaggaguccgucgucuga

SEQ ID NO: 1686 - RNA, 3297 nt, Artificial Sequence
  EAW96782 variant
augcccccccgccagcccccccgccaggccggcggcggccucucccgcgaguucggcaagcuccuccccgcccucucccacuccccccucggcggccucggcuccggcuccggcuccgucgcccccggccagggccgcgccggcgccaugggcucccgcacccccgaguccccccuccacgccguccagcuccgcuggggcccccgccgccgccccccccuccucccccuccuccuccuccuccuccccccccccccccgcgucggcggcuucaaccucgacgccgaggcccccgccguccucuccggcccccccggcuccuucuucggcuucuccgucgaguucuaccgccccggcaccgacggcgucuccguccucgucggcgcccccaaggccaacaccucccagcccggcguccuccagggcggcgccgucuaccucugccccuggggcgccucccccacccagugcacccccaucgaguucgacuccaagggcucccgccuccucgaguccucccucuccuccuccgagggcgaggagcccgucgaguacaagucccuccagugguucggcgccaccguccgcgcccacggcuccuccauccucgccugcgccccccucuacuccuggcgcaccgagaaggagccccucuccgaccccgucggcaccugcuaccucuccaccgacaacuucacccgcauccucgaguacgcccccugccgcuccgacuucuccugggccgccggccagggcuacugccagggcggcuucuccgccgaguucaccaagaccggccgcgucguccucggcggccccggcuccuacuucuggcagggccagauccucuccgccacccaggagcagaucgccgaguccuacuaccccgaguaccucaucaaccucguccagggccagcuccagacccgccaggccuccuccaucuacgacgacuccuaccucggcuacuccgucgccgucggcgaguucuccggcgacgacaccgaggacuucgucgccggcguccccaagggcaaccucaccuacggcuacgucaccauccucaacggcuccgacauccgcucccucuacaacuucuccggcgagcagauggccuccuacuucggcuacgccgucgccgccaccgacgucaacggcgacggccucgacgaccuccucgucggcgccccccuccucauggaccgcacccccgacggccgcccccaggaggucggccgcgucuacgucuaccuccagcaccccgccggcaucgagcccacccccacccucacccucaccggccacgacgaguucggccgcuucggcuccucccucaccccccucggcgaccucgaccaggacggcuacaacgacgucgccaucggcgcccccuucggcggcgagacccagcagggcgucgucuucgucuuccccggcggccccggcggccucggcuccaagcccucccagguccuccagccccucugggccgccucccacacccccgacuucuucggcuccgcccuccgcggcggccgcgaccucgacggcaacggcuaccccgaccucaucgucggcuccuucggcgucgacaaggccgucgucuaccgcggccgccccaucgucuccgccuccgccucccucaccaucuuccccgccauguucaaccccgaggagcgcuccugcucccucgagggcaaccccgucgccugcaucaaccucuccuucugccucaacgccuccggcaagcacgucgccgacuccaucggcuucaccgucgagcuccagcucgacuggcagaagcagaagggcggcguccgccgcgcccucuuccucgccucccgccaggccacccucacccagacccuccucauccagaacggcgcccgcgaggacugccgcgagaugaagaucuaccuccgcaacgaguccgaguuccgcgacaagcucucccccauccacaucgcccucaacuucucccucgacccccaggcccccgucgacucccacggccuccgccccgcccuccacuaccaguccaagucccgcaucgaggacaaggcccagauccuccucgacugcggcgaggacaacaucugcguccccgaccuccagcucgaggucuucggcgagcagaaccacgucuaccucggcgacaagaacgcccucaaccucaccuuccacgcccagaacgucggcgagggcggcgccuacgaggccgagcuccgcgucaccgccccccccgaggccgaguacuccggccucguccgccaccccggcaacuucuccucccucuccugcgacuacuucgccgucaaccagucccgccuccucgucugcgaccucggcaaccccaugaaggccggcgccucccucuggggcggccuccgcuucaccgucccccaccuccgcgacaccaagaagaccauccaguucgacuuccagauccucuccaagaaccucaacaacucccaguccgacgucgucuccuuccgccucuccgucgaggcccaggcccaggucacccucaacggcgucuccaagcccgaggccguccucuuccccgucuccgacuggcacccccgcgaccagccccagaaggaggaggaccucggccccgccguccaccacgucuacgagcucaucaaccagggccccuccuccaucucccagggcguccucgagcucuccugcccccaggcccucgagggccagcagcuccucuacgucacccgcgucaccggccucaacugcaccaccaaccaccccaucaaccccaagggccucgagcucgaccccgagggcucccuccaccaccagcagaagcgcgaggcccccucccgcuccuccgccuccuccggcccccagauccucaagugccccgaggccgagugcuuccgccuccgcugcgagcucggcccccuccaccagcaggagucccagucccuccagcuccacuuccgcgucugggccaagaccuuccuccagcgcgagcaccagcccuucucccuccagugcgaggccgucuacaaggcccucaagaugcccuaccgcauccucccccgccagcucccccagaaggagcgccaggucgccaccgccguccaguggaccaaggccgagggcuccuacggcgucccccucuggaucaucauccucgccauccucuucggccuccuccuccucggccuccucaucuacauccucuacaagcucggcuucuucaagcgcucccuccccuacggcaccgccauggagaaggcccagcucaagccccccgccaccuccgacgccuga

SEQ ID NO: 1687 - RNA, 3597 nt, Artificial Sequence
  EAX08808 variant
auggccgagcaccccccccuccucgacaccacccagauccucuccuccgacaucucccuccucuccgcccccaucgucuccgccgacggcacccagcaggucauccucguccaggucaaccccggcgaggccuucaccauccgccgcgaggacggccaguuccagugcaucaccggccccgcccagguccccaugaugucccccaacggcuccgucccccccaucuacgucccccccggcuacgccccccaggucaucgaggacaacggcguccgccgcgucgucgucgucccccaggcccccgaguuccaccccggcucccacaccguccuccaccgcuccccccaccccccccuccccggcuucauccccguccccaccaugaugcccccccccccccgccacauguacucccccgucaccggcgccggcgacaugaccacccaguacaugccccaguaccaguccucccaggucuacggcgacgucgacgcccacuccacccacggccgcuccaacuuccgcgacgagcgcuccuccaagaccuacgagcgccuccagaagaagcucaaggaccgccagggcacccagaaggacaagauguccuccccccccuccuccccccagaagugccccucccccaucaacgagcacaacggccucaucaagggccagaucgccggcggcaucaacaccggcuccgccaagaucaaguccggcaagggcaagggcggcacccaggucgacaccgagaucgaggagaaggacgaggagaccaaggccuucgaggcccuccucuccaacaucgucaagcccgucgccuccgacauccaggcccgcaccgucguccucaccugguccccccccuccucccucaucaacggcgagaccgacgaguccuccguccccgagcucuacggcuacgagguccucaucuccuccaccggcaaggacggcaaguacaaguccgucuacgucggcgaggagaccaacaucacccucaacgaccucaagcccgccauggacuaccacgccaagguccaggccgaguacaacuccaucaagggcacccccuccgaggccgagaucuucaccacccucuccugcgagcccgacauccccaaccccccccgcaucgccaaccgcaccaagaacucccucacccuccaguggaaggcccccuccgacaacggcuccaagauccagaacuucguccucgagugggacgagggcaagggcaacggcgaguucugccagugcuacaugggcucccagaagcaguucaagaucaccaagcucucccccgccaugggcugcaaguuccgccucuccgcccgcaacgacuacggcaccuccggcuucuccgaggagguccucuacuacaccuccggcugcgcccccuccaugcccgccucccccguccucaccaaggccggcaucaccuggcucucccuccagugguccaagcccuccggcacccccuccgacgagggcaucuccuacauccucgagauggaggaggagaccuccggcuacggcuucaagcccaaguacgacggcgaggaccucgccuacaccgucaagaaccuccgccgcuccaccaaguacaaguucaaggucaucgccuacaacuccgagggcaaguccaaccccuccgaggucgucgaguucaccaccugccccgacaagcccggcauccccgucaagcccuccgucaagggcaagauccacucccacuccuucaagaucaccugggacccccccaaggacaacggcggcgccaccaucaacaaguacgucgucgagauggccgagggcuccaacggcaacaagugggagaugaucuacuccggcgccacccgcgagcaccucugcgaccgccucaaccccggcugcuucuaccgccuccgcgucuacugcaucuccgacggcggccaguccgccgucuccgagucccuccucguccagacccccgccgucccccccggccccugccuccccccccgccuccagggccgccccaaggccaaggagauccagcuccgcuggggccccccccucgucgacggcggcucccccaucuccugcuacuccgucgagaugucccccaucgagaaggacgagccccgcgaggucuaccagggcuccgaggucgagugcaccgucuccucccuccuccccggcaagaccuacuccuuccgccuccgcgccgccaacaagaugggcuucggccccuucuccgagaagugcgacaucaccaccgcccccggcccccccgaccagugcaagcccccccaggucaccugccgcuccgccaccugcgcccaggucaacugggaggucccccucuccaacggcaccgacgucaccgaguaccgccucgaguggggcggcgucgagggcuccaugcagaucugcuacugcggccccggccucuccuacgagaucaagggccucucccccgccaccaccuacuacugccgcguccaggcccucuccgucgucggcgccggccccuucuccgaggucgucgccugcgucaccccccccuccguccccggcaucgucaccugccuccaggagaucuccgacgacgagaucgagaacccccacuacucccccuccaccugccucgccaucuccugggagaagcccugcgaccacggcuccgagauccucgccuacuccaucgacuucggcgacaagcagucccucaccgucggcaaggucaccuccuacaucaucaacaaccuccagcccgacaccaccuaccgcauccgcauccaggcccucaacucccucggcgccggccccuucucccacaugaucaagcucaagaccaagccccucccccccgaccccccccgccucgagugcgucgccuucucccaccagaaccucaagcucaaguggggcgagggcacccccaagacccucuccaccgacuccauccaguaccaccuccagauggaggacaagaacggccgcuucgucucccucuaccgcggccccugccacaccuacaagguccagcgccucaacgaguccaccuccuacaaguucugcauccaggccugcaacgaggccggcgagggcccccucucccaggaguacaucuucaccacccccaaguccguccccgccgcccucaaggcccccaagaucgagaaggucaacgaccacaucugcgagaucaccugggagugccuccagcccaugaagggcgaccccgucaucuacucccuccaggucaugcucggcaaggacuccgaguucaagcagaucuacaagggccccgacuccuccuuccgcuacuccucccuccagcucaacugcgaguaccgcuuccgcgucugcgccauccgccagugccaggacucccucggccaccaggaccucgucggccccuacuccaccaccguccucuucaucucccagcgcaccgagccccccgccuccaccaaccgcgacaccgucgaguccacccgcacccgccgcgcccucuccgacgagcagugcgccgccgucauccucguccucuucgccuucuucuccauccucaucgccuucaucauccaguacuucgucaucaaguga

SEQ ID NO: 1688 - RNA, 3429 nt, Artificial Sequence
  EAX08809 variant
auguccggccccgcccagguccccaugaugucccccaacggcuccgucccccccaucuacgucccccccggcuacgccccccaggucaucgaggacaacggcguccgccgcgucgucgucgucccccaggcccccgaguuccaccccggcucccacaccguccuccaccgcuccccccaccccccccuccccggcuucauccccguccccaccaugaugcccccccccccccgccacauguacucccccgucaccggcgccggcgacaugaccacccaguacaugccccaguaccaguccucccaggucuacggcgacgucgacgcccacuccacccacggccgcuccaacuuccgcgacgagcgcuccuccaagaccuacgagcgccuccagaagaagcucaaggaccgccagggcacccagaaggacaagauguccuccccccccuccuccccccagaagugccccucccccaucaacgagcacaacggccucaucaagggccagaucgccggcggcaucaacaccggcuccgccaagaucaaguccggcaagggcaagggcggcacccaggucgacaccgagaucgaggagaaggacgaggagaccaaggccuucgaggcccuccucuccaacaucgucaagcccgucgccuccgacauccaggcccgcaccgucguccucaccugguccccccccuccucccucaucaacggcgagaccgacgaguccuccguccccgagcucuacggcuacgagguccucaucuccuccaccggcaaggacggcaaguacaaguccgucuacgucggcgaggagaccaacaucacccucaacgaccucaagcccgccauggacuaccacgccaagguccaggccgaguacaacuccaucaagggcacccccuccgaggccgagaucuucaccacccucuccugcgagcccgacauccccaaccccccccgcaucgccaaccgcaccaagaacucccucacccuccaguggaaggcccccuccgacaacggcuccaagauccagaacuucguccucgagugggacgagggcaagggcaacggcgaguucugccagugcuacaugggcucccagaagcaguucaagaucaccaagcucucccccgccaugggcugcaaguuccgccucuccgcccgcaacgacuacggcaccuccggcuucuccgaggagguccucuacuacaccuccggcugcgcccccuccaugcccgccucccccguccucaccaaggccggcaucaccuggcucucccuccagugguccaagcccuccggcacccccuccgacgagggcaucuccuacauccucgagauggaggaggagaccuccggcuacggcuucaagcccaaguacgacggcgaggaccucgccuacaccgucaagaaccuccgccgcuccaccaaguacaaguucaaggucaucgccuacaacuccgagggcaaguccaaccccuccgaggucgucgaguucaccaccugccccgacaagcccggcauccccgucaagcccuccgucaagggcaagauccacucccacuccuucaagaucaccugggacccccccaaggacaacggcggcgccaccaucaacaaguacgucgucgagauggccgagggcuccaacggcaacaagugggagaugaucuacuccggcgccacccgcgagcaccucugcgaccgccucaaccccggcugcuucuaccgccuccgcgucuacugcaucuccgacggcggccaguccgccgucuccgagucccuccucguccagacccccgccgucccccccggccccugccuccccccccgccuccagggccgccccaaggccaaggagauccagcuccgcuggggccccccccucgucgacggcggcucccccaucuccugcuacuccgucgagaugucccccaucgagaaggacgagccccgcgaggucuaccagggcuccgaggucgagugcaccgucuccucccuccuccccggcaagaccuacuccuuccgccuccgcgccgccaacaagaugggcuucggccccuucuccgagaagugcgacaucaccaccgcccccggcccccccgaccagugcaagcccccccaggucaccugccgcuccgccaccugcgcccaggucaacugggaggucccccucuccaacggcaccgacgucaccgaguaccgccucgaguggggcggcgucgagggcuccaugcagaucugcuacugcggccccggccucuccuacgagaucaagggccucucccccgccaccaccuacuacugccgcguccaggcccucuccgucgucggcgccggccccuucuccgaggucgucgccugcgucaccccccccuccguccccggcaucgucaccugccuccaggagaucuccgacgacgagaucgagaacccccacuacucccccuccaccugccucgccaucuccugggagaagcccugcgaccacggcuccgagauccucgccuacuccaucgacuucggcgacaagcagucccucaccgucggcaaggucaccuccuacaucaucaacaaccuccagcccgacaccaccuaccgcauccgcauccaggcccucaacucccucggcgccggccccuucucccacaugaucaagcucaagaccaagccccucccccccgaccccccccgccucgagugcgucgccuucucccaccagaaccucaagcucaaguggggcgagggcacccccaagacccucuccaccgacuccauccaguaccaccuccagauggaggacaagaacggccgcuucgucucccucuaccgcggccccugccacaccuacaagguccagcgccucaacgaguccaccuccuacaaguucugcauccaggccugcaacgaggccggcgagggcccccucucccaggaguacaucuucaccacccccaaguccguccccgccgcccucaaggcccccaagaucgagaaggucaacgaccacaucugcgagaucaccugggagugccuccagcccaugaagggcgaccccgucaucuacucccuccaggucaugcucggcaaggacuccgaguucaagcagaucuacaagggccccgacuccuccuuccgcuacuccucccuccagcucaacugcgaguaccgcuuccgcgucugcgccauccgccagugccaggacucccucggccaccaggaccucgucggccccuacuccaccaccguccucuucaucucccagcgcaccgagccccccgccuccaccaaccgcgacaccgucgaguccacccgcacccgccgcgcccucuccgacgagcagugcgccgccgucauccucguccucuucgccuucuucuccauccucaucgccuucaucauccaguacuucgucaucaaguga

SEQ ID NO: 1689 - RNA, 1020 nt, Artificial Sequence
  EAW49214 variant
augccccccuccaagccccacccccccgucgucggcaaggucacccaccacuccaucgagcucuacugggaccucgagaagaaggccaagcgccagggcccccaggagcagugguuccgcuucuccaucgaggaggaggaccccaagaugcacaccuacggcaucaucuacaccggcuacgccaccaagcacgucgucgagggccucgagccccgcacccucuaccgcuuccgccucaaggucaccucccccuccggcgagugcgaguacuccccccucgucuccgucuccaccacccgcgagcccaucuccuccgagcaccuccaccgcgccgucuccgucaacgacgaggaccuccucguccgcauccuccagggcggccgcgucaaggucgacguccccaacaaguucggcuucaccgcccucauggucgccgcccagaagggcuacacccgccucgucaagauccucgucuccaacggcaccgacgucaaccucaagaacggcuccggcaaggacucccucaugcucgccugcuacgccggccaccucgacgucgucaaguaccuccgccgccacggcgccuccuggcaggcccgcgaccucggcggcugcaccgcccuccacugggccgccgacggcggccacugcuccgucaucgaguggaugaucaaggacggcugcgaggucgacgucgucgacaccggcuccggcuggaccccccucaugcgcgucuccgccgucuccggcaaccagcgcgucgccucccuccucaucgacgccggcgccaacgucaacgucaaggaccgcaacggcaagaccccccucauggucgccguccucaacaaccacgaggagcucguccagcuccuccucgacaagggcgccgacgccuccgucaagaacgaguucggcaagggcguccucgagauggcccgcgucuucgaccgccaguccgucgucucccuccucgaggagcgcaagaagaagcagcgccccaagaaguccugcgucugcuga

SEQ ID NO: 1690 - RNA, 3150 nt, Artificial Sequence
  BAF84259 variant
augggcucccgcacccccgaguccccccuccacgccguccagcuccgcuggggcccccgccgccgccccccccuccucccccuccuccuccuccuccuccccccccccccccgcgucggcggcuucaaccucgacgccgaggcccccgccguccucuccggcccccccggcuccuucuucggcuucuccgucgaguucuaccgccccggcaccgacggcgucuccguccucgucggcgcccccaaggccaacaccucccagcccggcguccuccagggcggcgccgucuaccucugccccuggggcgccucccccacccagugcacccccaucgaguucgacuccaagggcucccgccuccucgaguccucccucuccuccuccgagggcgaggagcccgucgaguacaagucccuccagugguucggcgccaccguccgcgcccacggcuccuccauccucgccugcgccccccucuacuccuggcgcaccgagaaggagccccucuccgaccccgucggcaccugcuaccucuccaccgacaacuucacccgcauccucgaguacgcccccugccgcuccgacuucuccugggccgccggccagggcuacugccagggcggcuucuccgccgaguucaccaagaccggccgcgucguccucggcggccccggcuccuacuucuggcagggccagauccucuccgccacccaggagcagaucgccgaguccuacuaccccgaguaccucaucaaccucguccagggccagcuccagacccgccaggccuccuccaucuacgacgacuccuaccucggcuacuccgucgccgucggcgaguucuccggcgacgacaccgaggacuucgucgccggcguccccaagggcaaccucaccuacggcuacgucaccauccucaacggcuccgacauccgcucccucuacaacuucuccggcgagcagauggccuccuacuucgccuacgccgucgccgccaccgacgucaacggcgacggccucgacgaccuccucgucggcgccccccuccucauggaccgcacccccgacggccgcccccaggaggucggccgcgucuacgucuaccuccagcaccccgccggcaucgaguccacccccacccucacccucaccggccacgacgaguucggccgcuucggcuccucccucaccccccucggcgaccucgaccaggacggcuacaacgacgucgccaucggcgcccccuucggcggcgagacccagcagggcgucgucuucgucuuccccggcggccccggcggccucggcuccaagcccucccagguccuccagccccucugggccgccucccacacccccgacuucuucggcuccgcccuccgcggcggccgcgaccucgacggcaacggcuaccccgaccucaucgucggcuccuucggcgucgacaaggccgucgucuaccgcggccgccccaucgucuccgccuccgccucccucaccaucuuccccgccauguucaaccccgaggagcgcuccugcucccucgagggcaaccccgucgccugcaucaaccucuccuucugccucaacgccuccggcaagcacgucgccgacuccaucggcuucaccgucgagcuccagcucgacuggcagaagcagaagggcggcguccgccgcgcccucuuccucgccucccgccaggccacccucacccagacccuccucauccagaacggcgcccgcgaggacugccgcgagaugaagaucuaccuccgcaacgaguccgaguuccgcgacaagcucucccccauccacaucgcccucaacuucucccucgacccccaggcccccgucgacucccacggccuccgccccgcccuccacuaccaguccaagucccgcaucgaggacaaggcccagauccuccucggcugcggcgaggacaacaucugcguccccgaccuccagcucgaggucuucggcgagcagaaccacgucuaccucggcgacaagaacgcccucaaccucaccuuccacgcccagaacgucggcgagggcggcgccuacgaggccgagcuccgcgucaccgccccccccgaggccgaguacuccggccucguccgccaccccggcaacuucuccucccucuccugcgacuacuucgccgucaaccagucccgccuccucgucugcgaccucggcaaccccaugaaggccggcgccucccucuggggcggccuccgcuucaccgucccccaccuccgcgacaccaagaagaccauccaguucgacuuccagauccucuccaagaaccucaacaacucccaguccgacgucgucuccuuccgccucuccgucgaggcccaggcccaggucacccucaacggcgucuccaagcccgaggccguccucuuccccgucuccgacuggcacccccgcgaccagccccaggaggaggaggaccucggccccgccguccaccacgucuacgagcucaucaaccagggccccuccuccaucucccagggcguccucgagcucuccugcccccaggcccucgagggccagcagcuccucuacgucacccgcgucaccggccucaacugcaccaccaaccaccccaucaaccccaagggccucgagcucgaccccgagggcucccuccaccaccagcagaagcgcgaggcccccucccgcuccuccgccuccuccggcccccagauccucaagugccccgaggccgagugcuuccgccuccgcugcgagcucggcccccuccaccagcaggagucccagucccuccagcuccacuuccgcgucugggccaagaccuuccuccagcgcgagcaccagcccuucucccuccagugcgaggccgucuacaaggcccucaagaugcccuaccgcauccucccccgccagcucccccagaaggagcgccaggucgccaccgccguccaguggaccaaggccgagggcuccuacggcgucccccucuggaucaucauccucgccauccucuucggccuccuccuccucggccuccucaucuacauccucuacaagcucggcuucuucaagcgcucccuccccuacggcaccgccauggagaaggcccagcucaagccccccgccaccuccgacgccuga

SEQ ID NO: 1691 - RNA, 3150 nt, Artificial Sequence
  BAG35324 variant
augggcucccgcacccccgaguccccccuccacgccguccagcuccgcuggggcccccgccgccgccccccccuccucccccuccuccuccuccuccuccccccccccccccgcgucggcggcuucaaccucgacgccgaggcccccgccguccucuccggcccccccggcuccuucuucggcuucuccgucgaguucuaccgccccggcaccgacggcgucuccguccucgucggcgcccccaaggccaacaccucccagcccggcguccuccagggcggcgccgucuaccucugccccuggggcgccucccccacccagugcacccccaucgaguucgacuccaagggcucccgccuccucgaguccucccucuccuccuccgagggcgaggagcccgucgaguacaagucccuccagugguucggcgccaccguccgcgcccacggcuccuccauccucgccugcgccccccucuacuccuggcgcaccgagaaggagccccucuccgaccccgucggcaccugcuaccucuccaccgacaacuucacccgcauccucgaguacgcccccugccgcuccgacuucuccugggccgccggccagggcuacugccagggcggcuucuccgccgaguucaccaagaccggccgcgucguccucggcggccccggcuccuacuucuggcagggccagauccucuccgccacccaggagcagaucgccgaguccuacuaccccgaguaccucaucaaccucguccagggccagcuccagacccgccaggccuccuccaucuacgacgacuccuaccucggcuacuccgucgccgucggcgaguucuccggcgacgacaccgaggacuucgucgccggcguccccaagggcaaccucaccuacggcuacgucaccauccucaacggcuccgacauccgcucccucuacaacuucuccggcgagcagauggccuccuacuucggcuacgccgucgccgccaccgacgucaacggcgacggccucgacgaccuccucgucggcgccccccuccucauggaccgcacccccgacggccgcccccagggcgucggccgcgucuacgucuaccuccagcaccccgccggcaucgagcccacccccacccucacccucaccggccacgacgaguucggccgcuucggcuccucccucaccccccucggcgaccucgaccaggacggcuacaacgacgucgccaucggcgcccccuucggcggcgagacccagcagggcgucgucuucgucuuccccggcggccccggcggccucggcuccaagcucucccagguccuccagccccucugggccgccucccacacccccgacuucuucggcuccgcccuccgcggcggccgcgaccucgacggcaacggcuaccccgaccucaucgucggcuccuucggcgucgacaaggccgucgucuaccgcggccgccccaucgucuccgccuccgccucccucaccaucuuccccgccauguucaaccccgaggagcgcuccugcucccucgagggcaaccccgucgccugcaucaaccucuccuucugccucaacgccuccggcaagcacgucgccgacuccaucggcuucaccgucgagcuccagcucgacuggcagaagcagaagggcggcguccgccgcgcccucuuccucgccucccgccaggccacccucacccagacccuccucauccagaacggcgcccgcgaggacugccgcgagaugaagaucuaccuccgcaacgaguccgaguuccgcgacaagcucucccccauccacaucgcccucaacuucucccucgacccccaggcccccgucgacucccacggccuccgccccgcccuccacuaccaguccaagucccgcaucgaggacaaggcccagauccuccucgacugcggcgaggacaacaucugcguccccgaccuccagcucgaggucuucggcgagcagaaccacgucuaccucggcgacaagaacgcccucaaccucaccuuccacgcccagaacgucggcgagggcggcgccuacgaggccgagcuccgcgucaccgccccccccgaggccgaguacuccggccucguccgccaccccggcaacuucuccucccucuccugcgacuacuucgccgucaaccagucccgccuccucgucugcgaccucggcaaccccaugaaggccggcgccucccucuggggcggccuccgcuucaccgucccccaccuccgcgacaccaagaagaccauccaguucgacuuccagauccucuccaagaaccucaacaacucccaguccgacgucgucuccuuccgccucuccgucgaggcccaggcccaggucacccucaacggcgucuccaagcccgaggccguccucuuccccgucuccgacuggcacccccgcgaccagccccagaaggaggaggaccucggccccgccguccaccacgucuacgagcucaucaaccagggccccuccuccaucucccagggcguccucgagcucuccugcccccaggcccucgagggccagcagcuccucuacgucacccgcgucaccggccucaacugcaccaccaaccaccccaucaaccccaagggccucgagcucgaccccgagggcucccuccaccaccagcagaagcgcgaggcccccucccgcuccuccgccuccuccggcccccagauccucaagugccccgaggccgagugcuuccgccuccgcugcgagcucggcccccuccaccagcaggagucccagucccuccagcuccacuuccgcgucugggccaagaccuuccuccagcgcgagcaccagcccuucucccuccagugcgaggccgucuacaaggcccucaagaugcccuaccgcauccucccccgccagcucccccagaaggagcgccaggucgccaccgccguccaguggaccaaggccgagggcuccuacggcgucccccucuggaucaucauccucgccauccucuucggccuccuccuccucggccuccucaucuacauccucuacaagcucggcuucuucaagcgcucccuccccuacggcaccgccauggagaaggcccagcucaagccccccgccaccuccgacgccuga

SEQ ID NO: 1692 - RNA, 1401 nt, Artificial Sequence
  BAG54537 variant
augcucucccuccgccagcgcaugaugcacgcccgcuuccgcaacccccucucccgccagcccgcccgccccuccuaccgccagggcuacaacggccgccccaacgucgagggcaagguccuccccggcuccaacggcaagcccaacggccagcgcaucaucaacggcccccagggcaccaagugggucgucgaccucgaccgcggccucguccucaacgccgagggccgcuaccuccaggacucccacggcaacccccuccgcaucaagcucggcggcgacggccgcaccaucgucgaccucgagggcacccccgucgucucccccgacggccucccccucuucggccagggccgccacggcaccccccucgccaacgcccaggacaagcccauccucucccucggcggcaagccccucgucggccucgaggucaucaagaagaccacccacccccccaccaccaccaugcagcccaccaccaccaccaccccccuccccaccaccaccaccccccgccccaccaccgccaccacccgccgcaccaccacccgccgccccaccaccaccguccgcaccaccacccgcaccaccaccaccaccacccccaagcccaccacccccauccccaccugcccccccggcacccucgagcgccacgacgacgacggcaaccucaucauguccuccaacggcauccccgagugcuacgccgaggaggacgaguucuccggccucgagaccgacaccgccguccccaccgaggaggccuacgucaucuacgacgaggacuacgaguucgagaccucccgcccccccaccaccaccgagcccuccaccaccgccaccaccccccgcgucauccccgaggagggcgccaucuccuccuuccccgaggaggaguucgaccucgccggccgcaagcgcuucgucgcccccuacgucaccuaccucaacaaggaccccuccgcccccugcucccucaccgacgcccucgaccacuuccaggucgacucccucgacgagaucauccccaacgaccucaagaaguccgaccuccccccccagcacgccccccgcaacaucaccgucgucgccgucgagggcugccacuccuucgucaucgucgacugggacaaggccacccccggcgacgucgucaccggcuaccucgucuacuccgccuccuacgaggacuucauccgcaacaagugguccacccaggccuccuccgucacccaccuccccaucgagaaccucaagcccaacacccgcuacuacuucaagguccaggcccagaacccccacggcuacggccccaucucccccuccgucuccuucgucaccgaguccgacaacccccuccucgucguccgcccccccggcggcgagcccaucuga

SEQ ID NO: 1693 - RNA, 471 nt, Artificial Sequence
  BAG58437 variant
auggaggagcagcgcaacgaggagauccaguccuucaucuacucccucaagcagaugcuccucaacgucgaggccaacuccgccaagguccaggaggaccucgaggccgaguuccagucccucuucucccuccucgaggagcucaaggagggcaugcucaugaagaucaagcaggaccgcgccucccgcaccuacgagcuccagaaccagcucgccgccugcacccgcgcccucgaguccuccgaggagcuccucgagaccgccaaccagacccuccaggccauggacuccgaggacuucccccaggccgccaagcagaucaaggacggcgucaccauggcccccgccuuccgccucucccucaaggccaaggucuccgacaacaugucccaccucauggucgacuucgcccaggagcgccagaugcuccaggcccucaaguuccuccccggcgagcgcggcacccacuga

SEQ ID NO: 1694 - RNA, 921 nt, Artificial Sequence
  BAH14721 variant
augaucuucgaggagcacggcuuccgccgcaccaccccccccaccaccgccacccccauccgccaccgcccccgccccuacccccccaacgucggccaggaggcccucucccagaccaccaucuccugggcccccuuccaggacaccuccgaguacaucaucuccugccaccccgucggcaccgacgaggagccccuccaguuccgcguccccggcaccuccaccuccgccacccucaccggccucacccgcggcgccaccuacaacaucaucgucgaggcccucaaggaccagcagcgccacaagguccgcgaggaggucgucaccgucggcaacuccgucaacgagggccucaaccagcccaccgacgacuccugcuucgaccccuacaccgucucccacuacgccgucggcgacgagugggagcgcauguccgaguccggcuucaagcuccucugccagugccucggcuucggcuccggccacuuccgcugcgacuccucccgcuggugccacgacaacggcgucaacuacaagaucggcgagaagugggaccgccagggcgagaacggccagaugauguccugcaccugccucggcaacggcaagggcgaguucaagugcgacccccacgaggccaccugcuacgacgacggcaagaccuaccacgucggcgagcaguggcagaaggaguaccucggcgccaucugcuccugcaccugcuucggcggccagcgcggcuggcgcugcgacaacugccgccgccccggcggcgagcccucccccgagggcaccaccggccaguccuacaaccaguacucccagcgcuaccaccagcgcaccaacaccaacgucaacugccccaucgagugcuucaugccccucgacguccaggccgaccgcgaggacucccgcgaguga

SEQ ID NO: 1695 - RNA, 1920 nt, Artificial Sequence
  BAG61560 variant
auggagaagauccucuucuaccucuuccucaucggcaucgccgucaaggcccagaucugccccaagcgcugcgucugccagauccucucccccaaccucgccacccucugcgccaagaagggccuccucuucgucccccccaacaucgaccgccgcaccgucgagcuccgccucgccgacaacuucgucaccaacaucaagcgcaaggacuucgccaacaugaccucccucgucgaccucacccucucccgcaacaccaucuccuucaucaccccccacgccuucgccgaccuccgcaaccuccgcucccuccaccucaacuccaaccgccucaccaagaucaccaacgacauguucuccggccucuccaaccuccaccaccucauccucaacaacaaccagcucacccucaucuccuccaccgccuucgacgacgucuucgcccucgaggagcucgaccucuccuacaacaaccucgagaccauccccugggacgccgucgagaagauggucucccuccacacccucucccucgaccacaacaugaucgacaacauccccaagggcaccuucucccaccuccacaagaugacccgccucgacgucaccuccaacaagcuccagaagcucccccccgacccccucuuccagcgcgcccagguccucgccaccuccggcaucaucucccccuccaccuucgcccucuccuucggcggcaacccccuccacugcaacugcgagcuccucuggcuccgccgccucucccgcgaguacgaccucgagaccugcgccucccccccccuccucaccggccgcuacuucugguccauccccgaggaggaguuccucugcgagcccccccucaucacccgccacacccacgagaugcgcguccucgagggccagcgcgccacccuccgcugcaaggcccgcggcgaccccgagcccgccauccacuggaucucccccgagggcaagcucaucuccaacgccacccgcucccucgucuacgacaacggcacccucgacauccucaucaccaccgucaaggacaccggcgccuucaccugcaucgccuccaaccccgccggcgaggccacccagaucgucgaccuccacaucaucaagcucccccaccuccucaacuccaccaaccacauccacgagcccgaccccggcuccuccgacaucuccaccuccaccaaguccggcuccaacaccuccuccuccaacgacggcaucaccucccucaccgccacccgcgucgucggcugcauccaguucaccaccgagcaggacuacguccgcugccacuucaugcagucccaguuccucggcggcaccaugaucaucaucaucggcggcaucaucgucgccuccguccucgucuucaucaucauccucaugauccgcuacaaggucugcaacaacaacggccagcacaaggucaccaaggucuccaacgucuacucccagaccaacggcgcccagauccagggcugcuccgucacccucccccaguccgucuccaagcaggccgucggccacgaggagaacgcccagugcugcaaggccaccuccgacaacgucauccaguccuccgagaccugcuccucccaggacuccgccaccaccaccuccgcccucccccccuccuggaccuccuccaccuccgucucccagaagcagaagcgcaagaccggcaccaagcccuccaccgagccccagaacgaggccgucaccaacgucgagucccagaacaccaaccgcaacaacuccaccgcccuccagcucgccucccgcccccccgacuccgucaccgagggccccaccuccaagcgcgcccacaucaagcccaacgcccuccucaccaacgucgaccagaucguccaggagacccagcgccucgagcucaucuga

SEQ ID NO: 1696 - RNA, 1014 nt, Artificial Sequence
  BAG61984 variant
augaucuucgaggagcacggcuuccgccgcaccaccccccccaccaccgccacccccauccgccaccgcccccgccccuacccccccaacgucggcgaggagauccagaucggccacaucccccgcgaggacgucgacuaccaccucuacccccacggccccggccucaaccccaacgccuccaccggccaggaggcccucucccagaccaccaucuccugggcccccuuccaggacaccuccgaguacaucaucuccugccaccccgucggcaccgacgaggagccccuccaguuccgcguccccggcaccuccaccuccgccacccucaccggccucacccgcggcgccaccuacaacaucaucgucgaggcccucaaggaccagcagcgccacaagguccgcgaggaggucgucaccgucggcaacuccgucaacgagggccucaaccagcccaccgacgacuccugcuucgaccccuacaccgucucccacuacgccgucggcgacgagugggagcgcauguccgaguccggcuucaagcuccucugccagugccucggcuucggcuccggccacuuccgcugcgacuccucccgcuggugccacgacaacggcgucaacuacaagaucggcgagaagugggaccgccagggcgagaacggccagaugauguccugcaccugccucggcaacggcaagggcgaguucaagugcgacccccacgaggccaccugcuacgacgacggcaagaccuaccacgucggcgagcaguggcagaaggaguaccucggcgccaucugcuccugcaccugcuucggcggccagcgcggcuggcgcugcgacaacugccgccgccccggcggcgagcccucccccgagggcaccaccggccaguccuacaaccaguacucccagcgcuaccaccagcgcaccaacaccaacgucaacugccccaucgagugcuucaugccccucgacguccaggccgaccgcgaggacucccgcgaguga

SEQ ID NO: 1697 - RNA, 3045 nt, Artificial Sequence
  BAG62013 variant
augcgcgucaccugggcccccccccccuccaucgaccucaccaacuuccucguccgcuacucccccgucaagaacgaggaggacgucgccgagcucuccaucucccccuccgacaacgccgucguccucaccaaccuccuccccggcaccgaguacgucgucuccgucuccuccgucuacgagcagcacgaguccaccccccuccgcggccgccagaagaccggccucgacucccccaccggcaucgacuucuccgacaucaccggcaacuccuucaccguccacuggaucgccccccgcgccaccaucaccggcuaccgcauccgccaccaccccgagcacuucuccggccgcccccgcgaggaccgcgucccccacucccgcaacuccaucacccucaccaaccucacccccggcaccgaguacgucgucuccaucgucgcccucaacggccgcgaggaguccccccuccucaucggccagcaguccaccgucuccgacgucccccgcgaccucgaggucgucgccgccacccccaccucccuccucaucuccugggacgcccccgccgucaccguccgcuacuaccgcaucaccuacggcgagaccggcggcaacucccccguccaggaguucaccguccccggcuccaaguccaccgccaccaucuccggccucaagcccggcgucgacuacaccaucaccgucuacgccgucaccggccgcggcgacucccccgccuccuccaagcccaucuccaucaacuaccgcaccgagaucgacaagcccucccagaugcaggucaccgacguccaggacaacuccaucuccgucaaguggcuccccuccuccucccccgucaccggcuaccgcgucaccaccacccccaagaacggccccggccccaccaagaccaagaccgccggccccgaccagaccgagaugaccaucgagggccuccagcccaccgucgaguacgucgucuccgucuacgcccagaaccccuccggcgagucccagccccucguccagaccgccgucaccaccauccccgcccccaccgaccucaaguucacccaggucacccccaccucccucuccgcccaguggaccccccccaacguccagcucaccggcuaccgcguccgcgucacccccaaggagaagaccggccccaugaaggagaucaaccucgcccccgacuccuccuccgucgucgucuccggccucauggucgccaccaaguacgaggucuccgucuacgcccucaaggacacccucaccucccgccccgcccagggcgucgucaccacccucgagaacgucucccccccccgccgcgcccgcgucaccgacgccaccgagaccaccaucaccaucuccuggcgcaccaagaccgagaccaucaccggcuuccaggucgacgccguccccgccaacggccagacccccauccagcgcaccaucaagcccgacguccgcuccuacaccaucaccggccuccagcccggcaccgacuacaagaucuaccucuacacccucaacgacaacgcccgcuccucccccgucgucaucgacgccuccaccgccaucgacgcccccuccaaccuccgcuuccucgccaccacccccaacucccuccucgucuccuggcagcccccccgcgcccgcaucaccggcuacaucaucaaguacgagaagcccggcucccccccccgcgaggucgucccccgcccccgccccggcgucaccgaggccaccaucaccggccucgagcccggcaccgaguacaccaucuacgucaucgcccucaagaacaaccagaaguccgagccccucaucggccgcaagaagaccgacgagcucccccagcucgucacccucccccaccccaaccuccacggccccgagauccucgacguccccuccaccguccagaagacccccuucgucacccaccccggcuacgacaccggcaacggcauccagcuccccggcaccuccggccagcagcccuccgucggccagcagaugaucuucgaggagcacggcuuccgccgcaccaccccccccaccaccgccacccccauccgccaccgcccccgccccuacccccccaacgucggcgaggagauccagaucggccacaucccccgcgaggacgucgacuaccaccucuacccccacggccccggccucaaccccaacgccuccaccggccaggaggcccucucccagaccaccaucuccugggcccccuuccaggacaccuccgaguacaucaucuccugccaccccgucggcaccgacgaggagccccuccaguuccgcguccccggcaccuccaccuccgccacccucaccggccucacccgcggcgccaccuacaacaucaucgucgaggcccucaaggaccagcagcgccacaagguccgcgaggaggucgucaccgucggcaacuccgucaacgagggccucaaccagcccaccgacgacuccugcuucgaccccuacaccgucucccacuacgccgucggcgacgagugggagcgcauguccgaguccggcuucaagcuccucugccagugccucggcuucggcuccggccacuuccgcugcgacuccucccgcuggugccacgacaacggcgucaacuacaagaucggcgagaagugggaccgccagggcgagaacggccagaugauguccugcaccugccucggcaacggcaagggcgaguucaagugcgacccccacgaggccaccugcuacgacgacggcaagaccuaccacgucggcgagcaguggcagaaggaguaccucggcgccaucugcuccugcaccugcuucggcggccagcgcggcuggcgcugcgacaacugccgccgccccggcggcgagcccucccccgagggcaccaccggccaguccuacaaccaguacucccagcgcuaccaccagcgcaccaacaccaacgucaacugccccaucgagugcuucaugccccucgacguccaggccgaccgcgaggacucccgcgaguga

SEQ ID NO: 1698 - RNA, 2685 nt, Artificial Sequence
  BAG62178 variant
augcgcgucaccugggcccccccccccuccaucgaccucaccaacuuccucguccgcuacucccccgucaagaacgaggaggacgucgccgagcucuccaucucccccuccgacaacgccgucguccucaccaaccuccuccccggcaccgaguacgucgucuccgucuccuccgucuacgagcagcacgaguccaccccccuccgcggccgccagaagaccggccucgacucccccaccggcaucgacuucuccgacaucaccgccaacuccuucaccguccacuggaucgccccccgcgccaccaucaccggcuaccgcauccgccaccaccccgagcacuucuccggccgcccccgcgaggaccgcgucccccacucccgcaacuccaucacccucaccaaccucacccccggcaccgaguacgucgucuccaucgucgcccucaacggccgcgaggaguccccccuccucaucggccagcaguccaccgucuccgacgucccccgcgaccucgaggucgucgccgccacccccaccucccuccucaucuccugggacgcccccgccgucaccguccgcuacuaccgcaucaccuacggcgagaccggcggcaacucccccguccaggaguucaccguccccggcuccaaguccaccgccaccaucuccggccucaagcccggcgucgacuacaccaucaccgucuacgccgucaccggccgcggcgacucccccgccuccuccaagcccaucuccaucaacuaccgcaccgagaucgacaagcccucccagaugcaggucaccgacguccaggacaacuccaucuccgucaaguggcuccccuccuccucccccgucaccggcuaccgcgucaccaccacccccaagaacggccccggccccaccaagaccaagaccgccggccccgaccagaccgagaugaccaucgagggccuccaccccaccgucgaguacgucgucuccgucuacgcccagaaccccuccggcgagucccagccccucguccagaccgccgucaccaccauccccgcccccaccgaccucaaguucacccaggucacccccaccucccucuccgcccaguggaccccccccaacguccagcucaccggcuaccgcguccgcgucacccccaaggagaagaccggccccaugaaggagaucaaccucgcccccgacuccuccuccgucgucgucuccggccucauggucgccaccaaguacgaggucuccgucuacgcccucaaggacacccucaccucccgccccgcccagggcgucgucaccacccucgagaacgucucccccccccgccgcgcccgcgucaccgacgccaccgagaccaccaucaccaucuccuggcgcaccaagaccgagaccaucaccggcuuccaggucgacgccguccccgccaacggccagacccccauccagcgcaccaucaagcccgacguccgcuccuacaccaucaccggccuccagcccggcaccgacuacaagaucuaccucuacacccucaacgacaacgcccgcuccucccccgucgucaucgacgccuccaccgccaucgacgcccccuccaaccuccgcuuccucgccaccacccccaacucccuccucgucuccuggcagcccccccgcgcccgcaucaccggcuacaucaucaaguacgagaagcccggcucccccccccgcgaggucgucccccgcccccgccccggcgucaccgaggccaccaucaccggccucgagcccggcaccgaguacaccaucuacgucaucgcccucaagaacaaccagaaguccgagccccucaucggccgcaagaagaccggccaggaggcccucucccagaccaccaucuccugggcccccuuccaggacaccuccgaguacaucaucuccugccaccccgucggcaccgacgaggagccccuccaguuccgcguccccggcaccuccaccuccgccacccucaccggccucacccgcggcgccaccuacaacaucaucgucgaggcccucaaggaccagcagcgccacaagguccgcgaggaggucaucaccgucggcaacuccgucaacgagggccucaaccagcccaccgacgacuccugcuucgaccccuacaccgucucccacuacgccgucggcgacgagugggagcgcauguccgaguccggcuucaagcuccucugccagugccucggcuucggcuccggccacuuccgcugcgacuccucccgcuggugccacgacaacggcgucaacuacaagaucggcgagaagugggaccgccagggcgagaacggccagaugauguccugcaccugccucggcaacggcaagggcgaguucaagugcgacccccacgaggccaccugcuacgacgacggcaagaccuaccacgucggcgagcaguggcagaaggaguaccucggcgccaucugcuccugcaccugcuucggcggccagcgcggcuggcgcugcgacaacugccgccgccccggcggcgagcccucccccgagggcaccaccggccaguccuacaaccaguacucccagcgcuaccaccagcgcaccaacaccaacgucaacugccccaucgagugcuucaugccccucgacguccaggccgaccgcgaggacucccgcgaguga

SEQ ID NO: 1699 - RNA, 1152 nt, Artificial Sequence
  BAH12351 variant
auggccuccgccuuccgccucucccucaagcccaaggucuccgacaacaugacccaccucauggucgacuucucccaggagcgccagaugcuccagacccucaaguuccuccccguccccaaggcccccgagaucgaccccgucgagugccucgucgccgacaacuccgucaccgucgccuggcgcaugcccgaggaggacaacaagaucgaccacuucauccucgagcaccgcaagaccaacuucgacggccucccccgcgucaaggacgagcgcugcugggagaucaucgacaacaucaagggcaccgaguacacccucuccggccucaaguucgacuccaaguacaugaacuuccgcguccgcgccugcaacaaggccgucgccggcgaguacuccgaccccgucacccucgagaccaaggcccucaacuucaaccucgacaacuccuccucccaccucaaccucaaggucgaggacaccugcgucgagugggaccccaccggcggcaagggccaggaguccaagaucaagggcaaggagaacaagggcuccguccacgucaccucccucaagaagcacaccuccggcacccccucccccaagcgcaccuccgucggcucccgcccccccgccguccgcggcucccgcgaccgcuucaccggcgaguccuacaccguccucggcgacaccgccaucgaguccggccagcacuacugggaggucaaggcccagaaggacugcaaguccuacuccgucggcgucgccuacaagacccucggcaaguucgaccagcucggcaagaccaacaccuccuggugcauccacgucaacaacuggcuccagaacaccuucgccgccaagcacaacaacaaggucaaggcccucgacgucaccguccccgagaagaucggcgucuucugcgacuucgacggcggccagcucuccuucuacgacgccaacuccaagcagcuccucuacuccuucaagaccaaguucacccagcccguccuccccggcuucauggucuggugcggcggccucucccucuccaccggcaugcagguccccuccgccguccgcacccuccagaaguccgagaacggcaugaccggcuccgccuccucccucaacaacgucgucacccaguga

SEQ ID NO: 1700 - RNA, 441 nt, Artificial Sequence
  BAH14175 variant
augccccccuccaagccccacccccccgucgucggcaaggucacccaccacuccaucgagcucuacugggaccucgagaagaaggccaagcgccagggcccccaggagcagugguuccgcuucuccaucgaggaggaggaccccaagaugcacaccuacggcaucaucuacaccggcuacgccaccaagcacgucgucgagggccucgagccccgcacccucuaccgcuuccgccucaaggucaccucccccuccggcgagugcgaguacuccccccucgucuccgucuccaccaccuccgaguacuccgaccgcccccacuccccccucucccgcuccauggagaugaccuccaaccucgagaagaucuucugccucuccuucggccucacccgcucccgcaacgacaccaucuucaagcacugcaacaacaucugcuga

SEQ ID NO: 1701 - RNA, 2055 nt, Artificial Sequence
  EAX08810 variant
auggccgagcaccccccccuccucgacaccacccagauccucuccuccgacaucucccuccucuccgcccccaucgucuccgccgacggcacccagcaggucauccucguccaggucaaccccggcgaggccuucaccauccgccgcgaggacggccaguuccagugcaucaccggccccgcccagguccccaugaugucccccaacggcuccgucccccccaucuacgucccccccggcuacgccccccaggucaucgaggacaacggcguccgccgcgucgucgucgucccccaggcccccgaguuccaccccggcucccacaccguccuccaccgcuccccccaccccccccuccccggcuucauccccguccccaccaugaugcccccccccccccgccacauguacucccccgucaccggcgccggcgacaugaccacccaguacaugccccaguaccaguccucccaggucuacggcgacgucgacgcccacuccacccacggccgcuccaacuuccgcgacgagcgcuccuccaagaccuacgagcgccuccagaagaagcucaaggaccgccagggcacccagaaggacaagauguccuccccccccuccuccccccagaagugccccucccccaucaacgagcacaacggccucaucaagggccagaucgccggcggcaucaacaccggcuccgccaagaucaaguccggcaagggcaagggcggcacccaggucgacaccgagaucgaggagaaggacgaggagaccaaggccuucgaggcccuccucuccaacaucgucaagcccgucgccuccgacauccaggcccgcaccgucguccucaccugguccccccccuccucccucaucaacggcgagaccgacgaguccuccguccccgagcucuacggcuacgagguccucaucuccuccaccggcaaggacggcaaguacaaguccgucuacgucggcgaggagaccaacaucacccucaacgaccucaagcccgccauggacuaccacgccaagguccaggccgaguacaacuccaucaagggcacccccuccgaggccgagaucuucaccacccucuccugcgagcccgacauccccaaccccccccgcaucgccaaccgcaccaagaacucccucacccuccaguggaaggcccccuccgacaacggcuccaagauccagaacuucguccucgagugggacgagggcaagggcaacggcgaguucugccagugcuacaugggcucccagaagcaguucaagaucaccaagcucucccccgccaugggcugcaaguuccgccucuccgcccgcaacgacuacggcaccuccggcuucuccgaggagguccucuacuacaccuccggcugcgcccccuccaugcccgccucccccguccucaccaaggccggcaucaccuggcucucccuccagugguccaagcccuccggcacccccuccgacgagggcaucuccuacauccucgagauggaggaggagaccuccggcuacggcuucaagcccaaguacgacggcgaggaccucgccuacaccgucaagaaccuccgccgcuccaccaaguacaaguucaaggucaucgccuacaacuccgagggcaaguccaaccccuccgaggucgucgaguucaccaccugccccgacaagcccggcauccccgucaagcccuccgucaagggcaagauccacucccacuccuucaagaucaccugggacccccccaaggacaacggcggcgccaccaucaacaaguacgucgucgagauggccgagggcuccaacggcaacaagugggagaugaucuacuccggcgccacccgcgagcaccucugcgaccgccucaaccccggcugcuucuaccgccuccgcgucuacugcaucuccgacggcggccaguccgccgucuccgagucccuccucguccagacccccgccgucccccccggccccugccuccccccccgccuccagggccgccccaaggccaaggagauccagacccccuccggcuga

SEQ ID NO: 1702 - RNA, 492 nt, Artificial Sequence
  AAG35520 variant
auguccgaguccggcuucaagcuccucugccagugccucggcuucggcuccggccacuuccgcugcgacuccucccgcuggugccacgacaacggcgucaacuacaagaucggcgagaagugggaccgccagggcgagaacggccagaugauguccugcaccugccucggcaacggcaagggcgaguucaagugcgacccccacgaggccaccugcuacgacgacggcaagaccuaccacgucggcgagcaguggcagaaggaguaccucggcgccaucugcuccugcaccugcuucggcggccagcgcggcuggcgcugcgacaacugccgccgccccggcggcgagcccucccccgagggcaccaccggccaguccuacaaccaguacucccagcgcuaccaccagcgcaccaacaccaacgucaacugccccaucgagugcuucaugccccucgacguccaggccgaccgcgaggacucccgcgaguga

SEQ ID NO: 1703 - RNA, 1143 nt, Artificial Sequence
  AAA52471 variant
augauguucuccggcuucaacgccgacuacgaggccuccuccucccgcugcuccuccgccucccccgccggcgacucccucuccuacuaccacucccccgccgacuccuucuccuccaugggcucccccgucaacgcccaggacuucugcaccgaccucgccgucuccuccgccaacuucauccccaccgucaccgccaucuccaccucccccgaccuccaguggcucguccagcccgcccucgucuccuccgucgcccccucccagacccgcgccccccaccccuucggcguccccgcccccuccgccggcgccuacucccgcgccggcgucgucaagaccaugaccggcggccgcgcccaguccaucggccgccgcggcaaggucgagcagcucucccccgaggaggaggagaagcgccgcauccgccgcgagcgcaacaagauggccgccgccaagugccgcaaccgccgccgcgagcucaccgacacccuccaggccgagaccgaccagcucgaggacgagaaguccgcccuccagaccgagaucgccaaccuccucaaggagaaggagaagcucgaguucauccucgccgcccaccgccccgccugcaagauccccgacgaccucggcuuccccgaggagauguccgucgccucccucgaccucaccggcggccuccccgaggucgccacccccgaguccgaggaggccuucacccucccccuccucaacgaccccgagcccaagcccuccgucgagcccgucaaguccaucuccuccauggagcucaagaccgagcccuucgacgacuuccucuuccccgccuccucccgccccuccggcuccgagaccgcccgcuccguccccgacauggaccucuccggcuccuucuacgccgccgacugggagccccuccacuccggcucccucggcaugggccccauggccaccgagcucgagccccucugcacccccgucgucaccugcacccccuccugcaccgccuacaccuccuccuucgucuucaccuaccccgaggccgacuccuuccccuccugcgccgccgcccaccgcaagggcuccuccuccaacgagcccuccuccgacucccucuccucccccacccuccucgcccucuga

SEQ ID NO: 1704 - RNA, 1296 nt, Artificial Sequence
  AAG53607 variant
augcccaacccccgccccggcaagcccuccgcccccucccucgcccucggccccucccccggcgccucccccuccuggcgcgccgcccccaaggccuccgaccuccucggcgcccgcggccccggcggcaccuuccagggccgcgaccuccgcggcggcgcccacgccuccuccuccucccucaaccccaugccccccucccagcuccagcuccccacccucccccucgucauggucgcccccuccggcgcccgccucggcccccucccccaccuccaggcccuccuccaggaccgcccccacuucaugcaccagcucuccaccgucgacgcccacgcccgcacccccguccuccagguccacccccucgagucccccgccaugaucucccucaccccccccaccaccgccaccggcgucuucucccucaaggcccgccccggccucccccccggcaucaacgucgccucccucgagugggucucccgcgagcccgcccuccucugcaccuuccccaaccccuccgccccccgcaaggacuccacccucuccgccgucccccaguccuccuacccccuccucgccaacggcgucugcaaguggcccggcugcgagaaggucuucgaggagcccgaggacuuccucaagcacugccaggccgaccaccuccucgacgagaagggccgcgcccagugccuccuccagcgcgagaugguccagucccucgagcagcagcucguccucgagaaggagaagcucuccgccaugcaggcccaccucgccggcaagauggcccucaccaaggccuccuccgucgccuccuccgacaagggcuccugcugcaucgucgccgccggcucccagggccccgucguccccgccugguccggcccccgcgaggcccccgacucccucuucgccguccgccgccaccucuggggcucccacggcaacuccaccuuccccgaguuccuccacaacauggacuacuucaaguuccacaacaugcgcccccccuucaccuacgccacccucauccgcugggccauccucgaggcccccgagaagcagcgcacccucaacgagaucuaccacugguucacccgcauguucgccuucuuccgcaaccaccccgccaccuggaagaacgccauccgccacaaccucucccuccacaagugcuucguccgcgucgaguccgagaagggcgccgucuggaccgucgacgagcucgaguuccgcaagaagcgcucccagcgccccucccgcugcuccaaccccacccccggccccuga

SEQ ID NO: 1705 - RNA, 1098 nt, Artificial Sequence
  AAA52639 variant
auguggcuccgcucccaccgccagcucugccucgccuuccuccucgucugcguccucuccgucaucuucuuccuccacauccaccaggacuccuucccccacggccucggccucuccauccucugccccgaccgccgccucgucaccccccccgucgccaucuucugccuccccggcaccgccaugggccccaacgccuccuccuccugcccccagcaccccgccucccucuccggcaccuggaccgucuaccccaacggccgcuucggcaaccagaugggccaguacgccacccuccucgcccucgcccagcucaacggccgccgcgccuucauccuccccgccaugcacgccgcccucgcccccgucuuccgcaucacccuccccguccucgcccccgaggucgacucccgcacccccuggcgcgagcuccagcuccacgacuggauguccgaggaguacgccgaccuccgcgaccccuuccucaagcucuccggcuuccccugcuccuggaccuucuuccaccaccuccgcgagcagauccgccgcgaguucacccuccacgaccaccuccgcgaggaggcccaguccguccucggccagcuccgccucggccgcaccggcgaccgcccccgcaccuucgucggcguccacguccgccgcggcgacuaccuccaggucaugccccagcgcuggaagggcgucgucggcgacuccgccuaccuccgccaggccauggacugguuccgcgcccgccacgaggcccccgucuucgucgucaccuccaacggcauggaguggugcaaggagaacaucgacaccucccagggcgacgucaccuucgccggcgacggccaggaggccacccccuggaaggacuucgcccuccucacccagugcaaccacaccaucaugaccaucggcaccuucggcuucugggccgccuaccucgccggcggcgacaccgucuaccucgccaacuucacccuccccgacuccgaguuccucaagaucuucaagcccgaggccgccuuccuccccgagugggucggcaucaacgccgaccucuccccccucuggacccucgccaagcccuga

SEQ ID NO: 1706 - RNA, 1380 nt, Artificial Sequence
  EAW58359 variant
auggccccccucugccccucccccuggcucccccuccucauccccgcccccgcccccggccucaccguccagcuccuccucucccuccuccuccucguccccguccacccccagcgccucccccgcaugcaggaggacuccccccucggcggcggcuccuccggcgaggacgacccccucggcgaggaggaccuccccuccgaggaggacuccccccgcgaggaggacccccccggcgaggaggaccuccccggcgaggaggaccuccccggcgaggaggaccuccccgaggucaagcccaaguccgaggaggagggcucccucaagcucgaggaccuccccaccgucgaggcccccggcgacccccaggagccccagaacaacgcccaccgcgacaaggagggcgacgaccagucccacuggcgcuacggcggcgacccccccuggccccgcgucucccccgccugcgccggccgcuuccagucccccgucgacauccgcccccagcucgccgccuucugccccgcccuccgcccccucgagcuccucggcuuccagcuccccccccuccccgagcuccgccuccgcaacaacggccacuccguccagcucacccucccccccggccucgagauggcccucggccccggccgcgaguaccgcgcccuccagcuccaccuccacuggggcgccgccggccgccccggcuccgagcacaccgucgagggccaccgcuuccccgccgagauccacgucguccaccucuccaccgccuucgcccgcgucgacgaggcccucggccgccccggcggccucgccguccucgccgccuuccucgaggagggccccgaggagaacuccgccuacgagcagcuccucucccgccucgaggagaucgccgaggagggcuccgagacccagguccccggccucgacaucuccgcccuccuccccuccgacuucucccgcuacuuccaguacgagggcucccucaccaccccccccugcgcccagggcgucaucuggaccgucuucaaccagaccgucaugcucuccgccaagcagcuccacacccucuccgacacccucuggggccccggcgacucccgccuccagcucaacuuccgcgccacccagccccucaacggccgcgucaucgaggccuccuuccccgccggcgucgacuccuccccccgcgccgccgagcccguccagcucaacuccugccucgccgccggcgacauccucgcccucgucuucggccuccucuucgccgucaccuccgucgccuuccucguccagaugcgccgccagcaccgccgcggcaccaagggcggcgucuccuaccgccccgccgaggucgccgagaccggcgccuga

SEQ ID NO: 1707 - RNA, 417 nt, Artificial Sequence
  U19142.1 variant
auguccuggcgcggccgcuccaccuaccgcccccgcccccgccgcuacgucgagccccccgagaugaucggccccaugcgccccgagcaguucuccgacgaggucgagcccgccacccccgaggagggcgagcccgccacccagcgccaggaccccgccgccgcccaggagggcgaggacgagggcgccuccgccggccagggccccaagcccgaggccgacucccaggagcagggccacccccagaccggcugcgagugcgaggacggccccgacggccaggagauggacccccccaaccccgaggaggucaagacccccgaggaggagaugcgcucccacuacgucgcccagaccggcauccucuggcuccucaugaacaacugcuuccucaaccucuccccccgcaagcccuga

SEQ ID NO: 1708 - RNA, 351 nt, Artificial Sequence
  AAH69397 variant
auguccuggcgcggccgcuccaccuaccgcccccgcccccgccgcuacgucgagccccccgagaugaucggccccaugcgccccgagcaguucuccgacgaggucgagcccgccacccccgaggagggcgagcccgccacccagcgccaggaccccgccgccgcccaggagggccaggacgagggcgccuccgccggccagggccccaagcccgaggcccacucccaggagcagggccacccccagaccggcugcgagugcgaggacggccccgacggccaggagauggacccccccaaccccgaggaggucaagacccccgaggagggcgagaagcagucccagugcuga

SEQ ID NO: 1709 - RNA, 357 nt, Artificial Sequence
  AAA82746 variant
augaaccucucccgcggcaaguccaccuacuacuggccccgcccccgccgcuacguccagccccccgaggucaucggccccaugcgccccgagcaguucuccgacgaggucgagcccgccacccccgaggagggcgagcccgccacccagcgccaggaccccgccgccgcccaggagggcgaggacgagggcgccuccgccggccagggccccaagcccgaggccgacucccaggagcagggccacccccagaccggcugcgagugcgaggacggccccgacggccaggagauggacccccccaaccccgaggaggucaagacccccgaggagggcgagaagcagucccagugcuga

SEQ ID NO: 1710 - RNA, 354 nt, Artificial Sequence
  AAH69470 variant
auguccuggcgcggccgcuccaccuacuacuggccccgcccccgccgcuacguccagccccccgagaugaucggccccaugcgccccgagcaguucuccgacgaggucgagcccgccacccccgaggagggcgagcccgccacccagcgccaggaccccgccgccgcccaggagggcgaggacgagggcgccuccgccggccagggccccaagcccgaggccgacucccaggagcagggccacccccagaccggcugcgagugcgaggacggccccgacggccaggagauggacccccccaaccccgaggaggucaagacccccgaggagggcgagggccagucccagugcuga

SEQ ID NO: 1711 - RNA, 354 nt, Artificial Sequence
  AAA82748 variant
auguccuggcgcggccgcuccaccuacuacuggccccgcccccgccgcuacguccagccccccgaggucaucggccccaugcgccccgagcaguucuccgacgaggucgagcccgccacccccgaggagggcgagcccgccacccagcgccaggaccccgccgccgcccaggagggcgaggacgagggcgccuccgccggccagggccccaagcccgaggccgacucccaggagcagggccacccccagaccggcugcgagugcgaggacggccccgacggccaggagauggacccccccaaccccgaggaggucaagacccccgaggagggcgagaagcagucccagugcuga

SEQ ID NO: 1712 - RNA, 354 nt, Artificial Sequence
  AAA82749 variant
auguccuggcgcggccgcuccaccuacuacuggccccgcccccgccgcuacguccagccccccgaggucaucggccccaugcgccccgagcaguucuccgacgaggucgagcccgccacccccgaggagggcgagcccgccacccagcgccaggaccccgccgccgcccaggagggcgaggacgagggcgccuccgccggccagggccccaagcccgaggccgacucccaggagcagggccacccccagaccggcugcgagugcgaggacggccccgacggccaggaggucgacccccccaaccccgaggaggucaagacccccgaggagggcgagaagcagucccagugcuga

SEQ ID NO: 1713 - RNA, 354 nt, Artificial Sequence
  AAC25989 variant
auguccuggcgcggccgcuccaccuacuacuggccccgcccccgccgcuacguccagccccccgagaugaucggccccaugcgccccgagcaguucuccgacgaggucgagcccgccacccccgaggagggcgagcccgccacccagcgccaggaccccgccgccgcccaggagggcgaggacgagggcgccuccgccggccagggccccaagcccgaggcccacucccaggagcagggccacccccagaccggcugcgagugcgaggacggccccgacggccaggagauggacccccccaaccccgaggaggucaagacccccgaggagggcgagaagcagucccagugcuga

SEQ ID NO: 1714 - RNA, 351 nt, Artificial Sequence
  AAC33676 variant
auguccuggcgcggccgcuccaccuaccgcccccgcccccgccgcuacgucgagccccccgagaugaucggccccaugcgccccgagcaguucuccgacgaggucgagcccgccacccccgaggagggcgagcccgccacccagcgccaggaccccgccgccgcccaggagggcgaggacgagggcgccuccgccggccagggccccaagcccgaggccgacucccaggagcagggccacccccagaccggcugcgagugcgaggacggccccgacggccaggagauggacccccccaaccccgaggaggucaagacccccgaggagggcgagaagcagucccagugcuga

SEQ ID NO: 1715 - RNA, 1344 nt, Artificial Sequence
  AAA35657 variant
auggagcuccucaagcucaaccgcuccguccagggcaccggccccggccccggcgccucccucugccgccccggcgccccccuccucaacuccuccuccgucggcaaccucuccugcgagcccccccgcauccgcggcgccggcacccgcgagcucgagcucgccauccgcaucacccucuacgccgucaucuuccucauguccgucggcggcaacaugcucaucaucgucguccucggccucucccgccgccuccgcaccgucaccaacgccuuccuccucucccucgccgucuccgaccuccuccucgccgucgccugcaugcccuucacccuccuccccaaccucaugggcaccuucaucuucggcaccgucaucugcaaggccgucuccuaccucaugggcgucuccgucuccgucuccacccucucccucgucgccaucgcccucgagcgcuacuccgccaucugccgcccccuccaggcccgcgucuggcagacccgcucccacgccgcccgcgucaucgucgccaccuggcuccucuccggccuccucaugguccccuaccccgucuacaccgucguccagcccgucggcccccgcguccuccagugcguccaccgcuggcccuccgcccgcguccgccagaccugguccguccuccuccuccuccuccucuucuucauccccggcgucgucauggccgucgccuacggccucaucucccgcgagcucuaccucggccuccgcuucgacggcgacuccgacuccgacucccagucccgcguccgcaaccagggcggccuccccggcgccguccaccagaacggccgcugccgccccgagaccggcgccgucggcgaggacuccgacggcugcuacguccagcucccccgcucccgccccgcccucgagcucaccgcccucaccgcccccggccccggcuccggcucccgccccacccaggccaagcuccucgccaagaagcgcgucguccgcaugcuccucgucaucgucguccucuucuuccucugcuggcuccccgucuacuccgccaacaccuggcgcgccuucgacggccccggcgcccaccgcgcccucuccggcgcccccaucuccuucauccaccuccucuccuacgccuccgccugcgucaacccccucgucuacugcuucaugcaccgccgcuuccgccaggccugccucgagaccugcgcccgcugcugcccccgccccccccgcgcccgcccccgcgcccuccccgacgaggacccccccacccccuccaucgccucccucucccgccucuccuacaccaccaucuccacccucggccccggcuga

SEQ ID NO: 1716 - RNA, 2226 nt, Artificial Sequence
  AAD22449 variant
auggcccucuucacccccuggaagcucuccucccagaagcucggcuucuuccucgucaccuucggcuucaucuggggcaugaugcuccuccacuucaccauccagcagcgcacccagcccgaguccuccuccaugcuccgcgagcagauccucgaccucuccaagcgcuacaucaaggcccucgccgaggagaaccgcaacgucgucgacggccccuacgccggcgucaugaccgccuacgaccucaagaagacccucgccguccuccucgacaacauccuccagcgcaucggcaagcucgaguccaaggucgacaaccucgucgucaacggcaccggcaccaacuccaccaacuccaccaccgccguccccucccucgucgcccucgagaagaucaacgucgccgacaucaucaacggcgcccaggagaagugcguccucccccccauggacggcuacccccacugcgagggcaagaucaaguggaugaaggacauguggcgcuccgaccccugcuacgccgacuacggcgucgacggcuccaccugcuccuucuucaucuaccucuccgaggucgagaacuggugcccccaccuccccuggcgcgccaagaaccccuacgaggaggccgaccacaacucccucgccgagauccgcaccgacuucaacauccucuacuccaugaugaagaagcacgaggaguuccgcuggaugcgccuccgcauccgccgcauggccgacgccuggauccaggccaucaagucccucgccgagaagcagaaccucgagaagcgcaagcgcaagaagguccucguccaccucggccuccucaccaaggaguccggcuucaagaucgccgagaccgccuucuccggcggcccccucggcgagcucguccagugguccgaccucaucaccucccucuaccuccucggccacgacauccgcaucuccgccucccucgccgagcucaaggagaucaugaagaaggucgucggcaaccgcuccggcugccccaccgucggcgaccgcaucgucgagcucaucuacaucgacaucgucggccucgcccaguucaagaagacccucggccccuccuggguccacuaccagugcaugcuccgcguccucgacuccuucggcaccgagcccgaguucaaccacgccaacuacgcccaguccaagggccacaagacccccuggggcaaguggaaccucaacccccagcaguucuacaccauguucccccacacccccgacaacuccuuccucggcuucgucgucgagcagcaccucaacuccuccgacauccaccacaucaacgagaucaagcgccagaaccagucccucgucuacggcaaggucgacuccuucuggaagaacaagaagaucuaccucgacaucauccacaccuacauggagguccacgccaccgucuacggcuccuccaccaagaacauccccuccuacgucaagaaccacggcauccucuccggccgcgaccuccaguuccuccuccgcgagaccaagcucuucgucggccucggcuuccccuacgagggccccgccccccucgaggccaucgccaacggcugcgccuuccucaaccccaaguucaacccccccaaguccuccaagaacaccgacuucuucaucggcaagcccacccuccgcgagcucaccucccagcaccccuacgccgaggucuucaucggccgcccccacgucuggaccgucgaccucaacaaccaggaggaggucgaggacgccgucaaggccauccucaaccagaagaucgagcccuacaugcccuacgaguucaccugcgagggcaugcuccagcgcaucaacgccuucaucgagaagcaggacuucugccacggccaggucauguggcccccccucuccgcccuccaggucaagcucgccgagcccggccaguccugcaagcaggucugccaggagucccagcucaucugcgagcccuccuucuuccagcaccucaacaaggacaaggacaugcucaaguacaaggucaccugccaguccuccgagcucgccaaggacauccucguccccuccuucgaccccaagaacaagcacugcgucuuccagggcgaccuccuccucuucuccugcgccggcgcccacccccgccaccagcgcgucugccccugccgcgacuucaucaagggccaggucgcccucugcaaggacugccucuga

SEQ ID NO: 1717 - RNA, 1743 nt, Artificial Sequence
  EAX11770 variant
auggccggcaccguccgcaccgccugccucgucgucgccaugcuccucucccucgacuuccccggccaggcccagccccccccccccccccccgacgccaccugccaccagguccgcuccuucuuccagcgccuccagcccggccucaaguggguccccgagacccccguccccggcuccgaccuccaggucugccuccccaagggccccaccugcugcucccgcaagauggaggagaaguaccagcucaccgcccgccucaacauggagcagcuccuccaguccgccuccauggagcucaaguuccucaucauccagaacgccgccgucuuccaggaggccuucgagaucgucguccgccacgccaagaacuacaccaacgccauguucaagaacaacuaccccucccucaccccccaggccuucgaguucgucggcgaguucuucaccgacgucucccucuacauccucggcuccgacaucaacgucgacgacauggucaacgagcucuucgacucccucuuccccgucaucuacacccagcucaugaaccccggccuccccgacuccgcccucgacaucaacgagugccuccgcggcgcccgccgcgaccucaaggucuucggcaacuuccccaagcucaucaugacccaggucuccaagucccuccaggucacccgcaucuuccuccaggcccucaaccucggcaucgaggucaucaacaccaccgaccaccucaaguucuccaaggacugcggccgcaugcucacccgcaugugguacugcuccuacugccagggccucaugauggucaagcccugcggcggcuacugcaacgucgucaugcagggcugcauggccggcgucgucgagaucgacaaguacuggcgcgaguacauccucucccucgaggagcucgucaacggcauguaccgcaucuacgacauggagaacguccuccucggccucuucuccaccauccacgacuccauccaguacguccagaagaacgccggcaagcucaccaccaccaucggcaagcucugcgcccacucccagcagcgccaguaccgcuccgccuacuaccccgaggaccucuucaucgacaagaagguccucaaggucgcccacgucgagcacgaggagacccucuccucccgccgccgcgagcucauccagaagcucaaguccuucaucuccuucuacuccgcccuccccggcuacaucugcucccacucccccgucgccgagaacgacacccucugcuggaacggccaggagcucgucgagcgcuacucccagaaggccgcccgcaacggcaugaagaaccaguucaaccuccacgagcucaagaugaagggccccgagcccgucgucucccagaucaucgacaagcucaagcacaucaaccagcuccuccgcaccauguccaugcccaagggccgcguccucgacaagaaccucgacgaggagggcuucgaguccggcgacugcggcgacgacgaggacgagugcaucggcggcuccggcgacggcaugaucaaggucaagaaccagcuccgcuuccucgccgagcucgccuacgaccucgacgucgacgacgcccccggcaacucccagcaggccacccccaaggacaacgagaucuccaccuuccacaaccucggcaacguccacuccccccucaagcuccucaccuccauggccaucuccgucgucugcuucuucuuccucguccacuga

SEQ ID NO: 1718 - RNA, 1743 nt, Artificial Sequence; identical to SEQ ID NO: 1717
  AAA93471 variant

SEQ ID NO: 1719 - RNA, 1743 nt, Artificial Sequence
  AAH35972 variant
auggccggcaccguccgcaccgccugccucgucgucgccaugcuccucucccucgacuuccccggccaggcccagccccccccccccccccccgacgccaccugccaccagguccgcuccuucuuccagcgccuccagcccggccucaaguggguccccgagacccccguccccggcuccgaccuccaggucugccuccccaagggccccaccugcugcucccgcaagauggaggagaaguaccagcucaccgcccgccucaacauggagcagcuccuccaguccgccuccauggagcucaaguuccucaucauccagaacgccgccgucuuccaggaggccuucgagaucgucguccgccacgccaagaacuacaccaacgccauguucaagaacaacuaccccucccucaccccccaggccuucgaguucgucggcgaguucuucaccgacgucucccucuacauccucggcuccgacaucaacgucgacgacauggucaacgagcucuucgacucccucuuccccgucaucuacacccagcucaugaaccccggccuccccgacuccgcccucgacaucaacgagugccuccgcggcgcccgccgcgaccucaaggucuucggcaacuuccccaagcucaucaugacccaggucuccaagucccuccaggucacccgcaucuuccuccaggcccucaaccucggcaucgaggucaucaacaccaccgaccaccucaaguucuccaaggacugcggccgcaugcucacccgcaugugguacugcuccuacugccagggccucaugauggucaagcccugcggcggcuacugcaacgucgucaugcagggcugcauggccggcgucgucgagaucgacaaguacuggcgcgaguacauccucucccucgaggagcucgucaacggcauguaccgcaucuacgacauggagaacguccuccucggccucuucuccaccauccacgacuccauccaguacguccagaagaacgccggcaagcucaccaccaccaucggcaagcucugcgcccacucccagcagcgccaguaccgcuucgccuacuaccccgaggaccucuucaucgacaagaagguccucaaggucgcccacgucgagcacgaggagacccucuccucccgccgccgcgagcucauccagaagcucaaguccuucaucuccuucuacuccgcccuccccggcuacaucugcucccacucccccgucgccgagaacgacacccucugcuggaacggccaggagcucgucgagcgcuacucccagaaggccgcccgcaacggcaugaagaaccaguucaaccuccacgagcucaagaugaagggccccgagcccgucgucucccagaucaucgacaagcucaagcacaucaaccagcuccuccgcaccauguccaugcccaagggccgcguccucgacaagaaccucgacgaggagggcuucgaguccggcgacugcggcgacgacgaggacgagugcaucggcggcuccggcgacggcaugaucaaggucaagaaccagcuccgcuuccucgccgagcucgccuacgaccucgacgucgacgacgcccccggcaacucccagcaggccacccccaaggacaacgagaucuccaccuuccacaaccucggcaacguccacuccccccucaagcuccucaccuccauggccaucuccgucgucugcuucuucuuccucguccacuga

SEQ ID NO: 1720 - RNA, 1683 nt, Artificial Sequence
  EAW93784 variant
auggagugccucuacuacuuccucggcuuccuccuccucgccgcccgccucccccucgacgccgccaagcgcuuccacgacguccucggcaacgagcgccccuccgccuacaugcgcgagcacaaccagcucaacggcugguccuccgacgagaacgacuggaacgagaagcucuaccccgucuggaagcgcggcgacaugcgcuggaagaacuccuggaagggcggccgcguccaggccguccucaccuccgacucccccgcccucgucggcuccaacaucaccuucgccgucaaccucaucuucccccgcugccagaaggaggacgccaacggcaacaucgucuacgagaagaacugccgcaacgaggccggccucuccgccgaccccuacgucuacaacuggaccgccugguccgaggacuccgacggcgagaacggcaccggccagucccaccacaacgucuuccccgacggcaagcccuucccccaccaccccggcuggcgccgcuggaacuucaucuacgucuuccacacccucggccaguacuuccagaagcucggccgcugcuccguccgcgucuccgucaacaccgccaacgucacccucggcccccagcucauggaggucaccgucuaccgccgccacggccgcgccuacguccccaucgcccaggucaaggacgucuacgucgucaccgaccagauccccgucuucgucaccauguuccagaagaacgaccgcaacuccuccgacgagaccuuccucaaggaccuccccaucauguucgacguccucauccacgaccccucccacuuccucaacuacuccaccaucaacuacaagugguccuucggcgacaacaccggccucuucgucuccaccaaccacaccgucaaccacaccuacguccucaacggcaccuucucccucaaccucaccgucaaggccgccgcccccggccccugcccccccccccccccccccccccgccccuccaagcccacccccucccucggccccgccggcgacaacccccucgagcucucccgcauccccgacgagaacugccagaucaaccgcuacggccacuuccaggccaccaucaccaucgucgagggcauccucgaggucaacaucauccagaugaccgacguccucaugcccguccccuggcccgaguccucccucaucgacuucgucgucaccugccagggcuccauccccaccgaggucugcaccaucaucuccgaccccaccugcgagaucacccagaacaccgucugcucccccgucgacgucgacgagaugugccuccucaccguccgccgcaccuucaacggcuccggcaccuacugcgucaaccucacccucggcgacgacaccucccucgcccucaccuccacccucaucuccguccccgaccgcgaccccgccuccccccuccgcauggccaacuccgcccucaucuccgucggcugccucgccaucuucgucaccgucaucucccuccucgucuacaagaagcacaaggaguacaaccccaucgagaacucccccggcaacgucguccgcuccaagggccucuccgucuuccucaaccgcgccaaggccgucuucuuccccggcaaccaggagaaggacccccuccucaagaaccaggaguucaagggcgucuccuga

SEQ ID NO: 1721 - RNA, 1719 nt, Artificial Sequence
  AAH32783 variant
auggagugccucuacuacuuccucggcuuccuccuccucgccgcccgccucccccucgacgccgccaagcgcuuccacgacguccucggcaacgagcgccccuccgccuacaugcgcgagcacaaccagcucaacggcugguccuccgacgagaacgacuggaacgagaagcucuaccccgucuggaagcgcggcgacaugcgcuggaagaacuccuggaagggcggccgcguccaggccguccucaccuccgacucccccgcccucgucggcuccaacaucaccuucgccgucaaccucaucuucccccgcugccagaaggaggacgccaacggcaacaucgucuacgagaagaacugccgcaacgaggccggccucuccgccgaccccuacgucuacaacuggaccgccugguccgaggacuccgacggcgagaacggcaccggccagucccaccacaacgucuuccccgacggcaagcccuucccccaccaccccggcuggcgccgcuggaacuucaucuacgucuuccacacccucggccaguacuuccagaagcucggccgcugcuccguccgcgucuccgucaacaccgccaacgucacccucggcccccagcucauggaggucaccgucuaccgccgccacggccgcgccuacguccccaucgcccaggucaaggacgucuacgucgucaccgaccagauccccgucuucgucaccauguuccagaagaacgaccgcaacuccuccgacgagaccuuccucaaggaccuccccaucauguucgacguccucauccacgaccccucccacuuccucaacuacuccaccaucaacuacaagugguccuucggcgacaacaccggccucuucgucuccaccaaccacaccgucaaccacaccuacguccucaacggcaccuucucccucaaccucaccgucaaggccgccgcccccggccccugcccccccccccccccccccccccgccccuccaagcccacccccucccucgccaccacccucaaguccuacgacuccaacacccccggccccgccggcgacaacccccucgagcucucccgcauccccgacgagaacugccagaucaaccgcuacggccacuuccaggccaccaucaccaucgucgagggcauccucgaggucaacaucauccagaugaccgacguccucaugcccguccccuggcccgaguccucccucaucgacuucgucgucaccugccagggcuccauccccaccgaggucugcaccaucaucuccgaccccaccugcgagaucacccagaacaccgucugcucccccgucgacgucgacgagaugugccuccucaccguccgccgcaccuucaacggcuccggcaccuacugcgucaaccucacccucggcgacgacaccucccucgcccucaccuccacccucaucuccguccccgaccgcgaccccgccuccccccuccgcauggccaacuccgcccucaucuccgucggcugccucgccaucuucgucaccgucaucucccuccucgucuacaagaagcacaaggaguacaaccccaucgagaacucccccggcaacgucguccgcuccaagggccucuccgucuuccucaaccgcgccaaggccgucuucuuccccggcaaccaggagaaggacccccuccucaagaaccaggaguucaagggcgucuccuga

SEQ ID NO: 1722 - RNA, 621 nt, Artificial Sequence
  CAD43718 variant
auggagugccucuacuacuuccucggcuuccuccuccucgccgcccgccucccccucgacgccgccaagcgcuuccacgacguccucggcaacgagcgccccuccgccuacaugcgcgagcacaaccagcucaacggcugguccuccgacgagaacgacuggaacgagaagcucuaccccgucuggaagcgcggcgacaugcgcuggaagaacuccuggaagggcggccgcguccaggccguccucaccuccgacucccccgcccucgucggcuccaacaucaccuucgccgucaaccucaucuucccccgcugccagaaggaggacgccaacggcaacaucgucuacgagaagaacugccgcaacgaggccggccucuccgccgaccccuacgucuacaacuggaccgccugguccgaggacuccgacggcgagaacggcaccggccagucccaccacaacgucuuccccgacggcaagcccuucccccaccaccccggcuggcgccgcuggaacuucaucuacgucuuccacacccucgacuggcuccuccagacccccaagcuccuccucuaccucucccucaaguuccagcccucccucuuccuccucuacaacuga

SEQ ID NO: 1723 - RNA, 621 nt, Artificial Sequence
  AAH11595 variant
auggagugccucuacuacuuccucggcuuccuccuccucgccgcccgccucccccucgacgccgccaagcgcuuccacgacguccucggcaacgagcgccccuccgccuacaugcgcgagcacaaccagcucaacggcugguccuccgacgagaacgacuggaacgagaagcucuaccccgucuggaagcgcggcgacaugcgcuggaagaacuccuggaagggcggccgcguccaggccguccucaccuccgacucccccgcccucgucggcuccaacaucaccuucgccgucaaccucaucuucccccgcugccagaaggaggacgccaacggcaacaucgucuacgagaagaacugccgcaacgaggccggccucuccgccgaccccuacgucuacaacuggaccgccugguccgaggacuccgacggcgagaacggcaccggccagucccaccacaacgucuuccccgacggcaagcccuucccccaccaccccggcuggcgccgcuggaacuucaucuacgucuuccacacccucggcuggcuccuccagacccccaagcuccuccucuaccucucccucaaguuccagcccucccucuuccuccucuacaacuga

SEQ ID NO: 1724 - RNA, 2640 nt, Artificial Sequence
  CCDS5600.1 variant
augaagaugcucacccgccuccagguccucacccucgcccucuucuccaagggcuuccuccucucccucggcgaccacaacuuccuccgccgcgagaucaagaucgagggcgaccucguccucggcggccucuuccccaucaacgagaagggcaccggcaccgaggagugcggccgcaucaacgaggaccgcggcauccagcgccucgaggccaugcucuucgccaucgacgagaucaacaaggacgacuaccuccuccccggcgucaagcucggcguccacauccucgacaccugcucccgcgacaccuacgcccucgagcagucccucgaguucguccgcgccucccucaccaaggucgacgaggccgaguacaugugccccgacggcuccuacgccauccaggagaacaucccccuccucaucgccggcgucaucggcggcuccuacuccuccgucuccauccaggucgccaaccuccuccgccucuuccagaucccccagaucuccuacgccuccaccuccgccaagcucuccgacaagucccgcuacgacuacuucgcccgcaccgucccccccgacuucuaccaggccaaggccauggccgagauccuccgcuucuucaacuggaccuacgucuccaccgucgccuccgagggcgacuacggcgagaccggcaucgaggccuucgagcaggaggcccgccuccgcaacaucugcaucgccaccgccgagaaggucggccgcuccaacauccgcaaguccuacgacuccgucauccgcgagcuccuccagaagcccaacgcccgcgucgucguccucuucaugcgcuccgacgacucccgcgagcucaucgccgccgccucccgcgccaacgccuccuucaccugggucgccuccgacggcuggggcgcccaggaguccaucaucaagggcuccgagcacgucgccuacggcgccaucacccucgagcucgccucccagcccguccgccaguucgaccgcuacuuccagucccucaaccccuacaacaaccaccgcaaccccugguuccgcgacuucugggagcagaaguuccagugcucccuccagaacaagcgcaaccaccgccgcgucugcgacaagcaccucgccaucgacuccuccaacuacgagcaggaguccaagaucauguucgucgucaacgccgucuacgccauggcccacgcccuccacaagaugcagcgcacccucugccccaacaccaccaagcucugcgacgccaugaagauccucgacggcaagaagcucuacaaggacuaccuccucaagaucaacuucaccgcccccuucaaccccaacaaggacgccgacuccaucgucaaguucgacaccuucggcgacggcaugggccgcuacaacgucuucaacuuccagaacgucggcggcaaguacuccuaccucaaggucggccacugggccgagacccucucccucgacgucaacuccauccacuggucccgcaacuccguccccaccucccagugcuccgaccccugcgcccccaacgagaugaagaacaugcagcccggcgacgucugcugcuggaucugcauccccugcgagcccuacgaguaccucgccgacgaguucaccugcauggacugcggcuccggccaguggcccaccgccgaccucaccggcugcuacgaccuccccgaggacuacauccgcugggaggacgccugggccaucggccccgucaccaucgccugccucggcuucaugugcaccugcauggucgucaccgucuucaucaagcacaacaacaccccccucgucaaggccuccggccgcgagcucugcuacauccuccucuucggcgucggccucuccuacugcaugaccuucuucuucaucgccaagcccucccccgucaucugcgcccuccgccgccucggccucggcuccuccuucgccaucugcuacuccgcccuccucaccaagaccaacugcaucgcccgcaucuucgacggcgucaagaacggcgcccagcgccccaaguucaucucccccuccucccaggucuucaucugccucggccucauccucguccagaucgucauggucuccgucuggcucauccucgaggcccccggcacccgccgcuacacccucgccgagaagcgcgagaccgucauccucaagugcaacgucaaggacuccuccaugcucaucucccucaccuacgacgucauccucgucauccucugcaccgucuacgccuucaagacccgcaagugccccgagaacuucaacgaggccaaguucaucggcuucaccauguacaccaccugcaucaucuggcucgccuuccuccccaucuucuacgucaccuccuccgacuaccgcguccagaccaccaccaugugcaucuccgucucccucuccggcuucgucguccucggcugccucuucgcccccaagguccacaucauccucuuccagccccagaagaacgucgucacccaccgccuccaccucaaccgcuucuccgucuccggcaccggcaccaccuacucccaguccuccgccuccaccuacguccccaccgucugcaacggccgcgagguccucgacuccaccaccuccucccucuga

SEQ ID NO: 1725 - RNA, 1947 nt, Artificial Sequence
  CCDS4977.1 variant
augucccaccacggcggcgcccccaaggccuccaccugggucgucgccucccgccgcuccuccaccgucucccgcgcccccgagcgccgccccgccgaggagcucaaccgcaccggccccgagggcuacuccgucggccgcggcggccgcuggcgcggcaccucccgcccccccgaggccgucgccgccggccacgaggagcucccccucugcuucgcccucaagucccacuucgucggcgccgucaucggccgcggcggcuccaagaucaagaacauccaguccaccaccaacaccaccauccagaucauccaggagcagcccgagucccucgucaagaucuucggcuccaaggccaugcagaccaaggccaaggccgucaucgacaacuucgucaagaagcucgaggagaacuacaacuccgagugcggcaucgacaccgccuuccagcccuccgucggcaaggacggcuccaccgacaacaacgucgucgccggcgaccgcccccucaucgacugggaccagauccgcgaggagggccucaaguggcagaagaccaagugggccgaccucccccccaucaagaagaacuucuacaaggaguccaccgccaccuccgccauguccaaggucgaggccgacuccuggcgcaaggagaacuucaacaucaccugggacgaccucaaggacggcgagaagcgccccauccccaaccccaccugcaccuucgacgacgccuuccagugcuaccccgaggucauggagaacaucaagaaggccggcuuccagaagcccacccccauccagucccaggccuggcccaucguccuccagggcaucgaccucaucggcgucgcccagaccggcaccggcaagacccucugcuaccucaugcccggcuucauccaccucguccuccagcccucccucaagggccagcgcaaccgccccggcaugcucguccucacccccacccgcgagcucgcccuccaggucgagggcgagugcugcaaguacuccuacaagggccuccgcuccgucugcgucuacggcggcggcaaccgcgacgagcagaucgaggagcucaagaagggcgucgacaucaucaucgccacccccggccgccucaacgaccuccagauguccaacuucgucaaccucaagaacaucaccuaccucguccucgacgaggccgacaagaugcucgacaugggcuucgagccccagaucaugaagauccuccucgacguccgccccgaccgccagaccgucaugaccuccgccaccuggccccacuccguccaccgccucgcccaguccuaccucaaggagcccaugaucgucuacgucggcacccucgaccucgucgccgucuccuccgucaagcagaacaucaucgucaccaccgaggaggagaaguggucccacaugcagaccuuccuccaguccauguccuccaccgacaaggucaucgucuucgucucccgcaaggccgucgccgaccaccucuccuccgaccucauccucggcaacaucuccgucgagucccuccacggcgaccgcgagcagcgcgaccgcgagaaggcccucgagaacuucaagaccggcaagguccgcauccucaucgccaccgaccucgccucccgcggccucgacguccacgacgucacccacgucuacaacuucgacuucccccgcaacaucgaggaguacguccaccgcaucggccgcaccggccgcgccggccgcaccggcgucuccaucaccacccucacccgcaacgacuggcgcgucgccuccgagcucaucaacauccucgagcgcgccaaccaguccauccccgaggagcucgucuccauggccgagcgcuucaaggcccaccagcagaagcgcgagauggagcgcaagauggagcgcccccagggccgccccaagaaguuccacuga

SEQ ID NO: 1726 - RNA, 1209 nt, Artificial Sequence
  ACD02430 variant
auggcccagaaggagggcggccgcaccguccccugcugcucccgccccaaggucgccgcccucaccgccggcacccuccuccuccucaccgccaucggcgccgccuccugggccaucgucgccguccuccuccgcuccgaccaggagccccucuaccccguccaggucuccuccgccgacgcccgccucauggucuucgacaagaccgagggcaccuggcgccuccucugcuccucccgcuccaacgcccgcgucgccggccucuccugcgaggagaugggcuuccuccgcgcccucacccacuccgagcucgacguccgcaccgccggcgccaacggcaccuccggcuucuucugcgucgacgagggccgccucccccacacccagcgccuccucgaggucaucuccgucugcgacugcccccgcggccgcuuccucgccgccaucugccaggacugcggccgccgcaagcuccccgucgaccgcaucgucggcggccgcgacaccucccucggccgcuggcccuggcaggucucccuccgcuacgacggcgcccaccucugcggcggcucccuccucuccggcgacuggguccucaccgccgcccacugcuuccccgagcgcaaccgcguccucucccgcuggcgcgucuucgccggcgccgucgcccaggccuccccccacggccuccagcucggcguccaggccgucgucuaccacggcggcuaccuccccuuccgcgaccccaacuccgaggagaacuccaacgacaucgcccucguccaccucuccuccccccucccccucaccgaguacauccagcccgucugccuccccgccgccggccaggcccucgucgacggcaagaucugcaccgucaccggcuggggcaacacccaguacuacggccagcaggccggcguccuccaggaggcccgcguccccaucaucuccaacgacgucugcaacggcgccgacuucuacggcaaccagaucaagcccaagauguucugcgccggcuaccccgagggcggcaucgacgccugccagggcgacuccggcggccccuucgucugcgaggacuccaucucccgcaccccccgcuggcgccucugcggcaucgucuccuggggcaccggcugcgcccucgcccagaagcccggcgucuacaccaaggucuccgacuuccgcgaguggaucuuccaguga

SEQ ID NO: 1727 - RNA, 1254 nt, Artificial Sequence
  AAA36013 variant
auggcccagaaggagggcggccgcaccguccccugcugcucccgccccaaggucgccgcccucaccgccggcacccuccuccuccucaccgccaucggcgccgccuccugggccaucgucgccguccuccuccgcuccgaccaggagccccucuaccccguccaggucuccuccgccgacgcccgccucauggucuucgacaagaccgagggcaccuggcgccuccucugcuccucccgcuccaacgcccgcgucgccggccucuccugcgaggagaugggcuuccuccgcgcccucacccacuccgagcucgacguccgcaccgccggcgccaacggcaccuccggcuucuucugcgucgacgagggccgccucccccacacccagcgccuccucgaggucaucuccgucugcgacugcccccgcggccgcuuccucgccgccaucugccaggacugcggccgccgcaagcuccccgucgaccgcaucgucggcggccgcgacaccucccucggccgcuggcccuggcaggucucccuccgcuacgacggcgcccaccucugcggcggcucccuccucuccggcgacuggguccucaccgccgcccacugcuuccccgagcgcaaccgcguccucucccgcuggcgcgucuucgccggcgccgucgcccaggccuccccccacggccuccagcucggcguccaggccgucgucuaccacggcggcuaccuccccuuccgcgaccccaacuccgaggagaacuccaacgacaucgcccucguccaccucuccuccccccucccccucaccgaguacauccagcccgucugccuccccgccgccggccaggcccucgucgacggcaagaucugcaccgucaccggcuggggcaacacccaguacuacggccagcaggccggcguccuccaggaggcccgcguccccaucaucuccaacgacgucugcaacggcgccgacuucuacggcaaccagaucaagcccaagauguucugcgccggcuaccccgagggcggcaucgacgccugccagggcgacuccggcggccccuucgucugcgaggacuccaucucccgcaccccccgcuggcgccucugcggcaucgucuccuggggcaccggcugcgcccucgcccagaagcccggcgucuacaccaaggucuccgacuuccgcgaguggaucuuccaggccaucaagacccacuccgaggccuccggcauggucacccagcucuga

SEQ ID NO: 1728 - RNA, 2940 nt, Artificial Sequence
  BAG62073 variant
auggagcucgccgcccucugccgcuggggccuccuccucgcccuccucccccccggcgccgccuccacccaggacaacuaccucuccaccgacgucggcuccugcacccucgucugcccccuccacaaccaggaggucaccgccgaggacggcacccagcgcugcgagaagugcuccaagcccugcgcccgcgucugcuacggccucggcauggagcaccuccgcgagguccgcgccgucaccuccgccaacauccaggaguucgccggcugcaagaagaucuucggcucccucgccuuccuccccgaguccuucgacggcgaccccgccuccaacaccgccccccuccagcccgagcagcuccaggucuucgagacccucgaggagaucaccggcuaccucuacaucuccgccuggcccgacucccuccccgaccucuccgucuuccagaaccuccaggucauccgcggccgcauccuccacaacggcgccuacucccucacccuccagggccucggcaucuccuggcucggccuccgcucccuccgcgagcucggcuccggccucgcccucauccaccacaacacccaccucugcuucguccacaccguccccugggaccagcucuuccgcaacccccaccaggcccuccuccacaccgccaaccgccccgaggacgagugcgucggcgagggccucgccugccaccagcucugcgcccgcggccacugcuggggccccggccccacccagugcgucaacugcucccaguuccuccgcggccaggagugcgucgaggagugccgcguccuccagggccucccccgcgaguacgucaacgcccgccacugccuccccugccaccccgagugccagccccagaacggcuccgucaccugcuucggccccgaggccgaccagugcgucgccugcgcccacuacaaggacccccccuucugcgucgcccgcugccccuccggcgucaagcccgaccucuccuacaugcccaucuggaaguuccccgacgaggagggcgccugccagcccugccccaucaacugcacccacuccugcgucgaccucgacgacaagggcugccccgccgagcagcgcgccuccccccucaccuccaucaucuccgccgucgucggcauccuccucgucgucguccucggcgucgucuucggcauccucaucaagcgccgccagcagaagauccgcaaguacaccaugcgccgccuccuccaggagaccgagcucgucgagccccucacccccuccggcgccaugcccaaccaggcccagaugcgcauccucaaggagaccgagcuccgcaaggucaagguccucggcuccggcgccuucggcaccgucuacaagggcaucuggauccccgacggcgagaacgucaagauccccgucgccaucaagguccuccgcgagaacaccucccccaaggccaacaaggagauccucgacgaggccuacgucauggccggcgucggcucccccuacgucucccgccuccucggcaucugccucaccuccaccguccagcucgucacccagcucaugcccuacggcugccuccucgaccacguccgcgagaaccgcggccgccucggcucccaggaccuccucaacuggugcaugcagaucgccaagggcauguccuaccucgaggacguccgccucguccaccgcgaccucgccgcccgcaacguccucgucaagucccccaaccacgucaagaucaccgacuucggccucgcccgccuccucgacaucgacgagaccgaguaccacgccgacggcggcaagguccccaucaaguggauggcccucgaguccauccuccgccgccgcuucacccaccaguccgacgucugguccuacggcgucaccgucugggagcucaugaccuucggcgccaagcccuacgacggcauccccgcccgcgagauccccgaccuccucgagaagggcgagcgccucccccagccccccaucugcaccaucgacgucuacaugaucauggucaagugcuggaugaucgacuccgagugccgcccccgcuuccgcgagcucgucuccgaguucucccgcauggcccgcgacccccagcgcuucgucgucauccagaacgaggaccucggccccgccuccccccucgacuccaccuucuaccgcucccuccucgaggacgacgacaugggcgaccucgucgacgccgaggaguaccucgucccccagcagggcuucuucugccccgaccccgcccccggcgccggcggcaugguccaccaccgccaccgcuccuccuccacccgcuccggcggcggcgaccucacccucggccucgagcccuccgaggaggaggccccccgcuccccccucgcccccuccgagggcgccggcuccgacgucuucgacggcgaccucggcaugggcgccgccaagggccuccagucccuccccacccacgaccccuccccccuccagcgcuacuccgaggaccccaccgucccccuccccuccgagaccgacggcuacgucgccccccucaccugcuccccccagcccgaguacgucaaccagcccgacguccgcccccagccccccuccccccgcgagggcccccuccccgccgcccgccccgccggcgccacccucgagcgccccaagacccucucccccggcaagaacggcgucgucaaggacgucuucgccuucggcggcgccgucgagaaccccgaguaccucaccccccagggcggcgccgccccccagccccaccccccccccgccuucucccccgccuucgacaaccucuacuacugggaccaggacccccccgagcgcggcgccccccccuccaccuucaagggcacccccaccgccgagaaccccgaguaccucggccucgacguccccgucuga

SEQ ID NO: 1729 - RNA, 264 nt, Artificial Sequence
  CCQ43016 variant
augaugcgcaugaagaccuucgucaugauccacuuccaccucaugaacggcggcaaggccaagcucuacucccgcccccacgccaagcuccuccccgagcagcgcgucaccgacaagaccggcgcccccgucgaguggcccggccagacccagugcuccaccgagacccagacccucgccgccaugcccgcccaggccgucaugcgcgucaccugcaccgucgucgacaugcacaaguccgagugcgcccccgcccagaccuga

SEQ ID NO: 1730 - RNA, 3768 nt, Artificial Sequence
  AAI67147 variant
auggagcucgccgcccucugccgcuggggccuccuccucgcccuccucccccccggcgccgccuccacccaggucugcaccggcaccgacaugaagcuccgccuccccgccucccccgagacccaccucgacaugcuccgccaccucuaccagggcugccaggucguccagggcaaccucgagcucaccuaccuccccaccaacgccucccucuccuuccuccaggacauccaggagguccagggcuacguccucaucgcccacaaccagguccgccaggucccccuccagcgccuccgcaucguccgcggcacccagcucuucgaggacaacuacgcccucgccguccucgacaacggcgacccccucaacaacaccacccccgucaccggcgccucccccggcggccuccgcgagcuccagcuccgcucccucaccgagauccucaagggcggcguccucauccagcgcaacccccagcucugcuaccaggacaccauccucuggaaggacaucuuccacaagaacaaccagcucgcccucacccucaucgacaccaaccgcucccgcgccugccaccccugcucccccaugugcaagggcucccgcugcuggggcgaguccuccgaggacugccagucccucacccgcaccgucugcgccggcggcugcgcccgcugcaagggcccccuccccaccgacugcugccacgagcagugcgccgccggcugcaccggccccaagcacuccgacugccucgccugccuccacuucaaccacuccggcaucugcgagcuccacugccccgcccucgucaccuacaacaccgacaccuucgaguccaugcccaaccccgagggccgcuacaccuucggcgccuccugcgucaccgccugccccuacaacuaccucuccaccgacgucggcuccugcacccucgucugcccccuccacaaccaggaggucaccgccgaggacggcacccagcgcugcgagaagugcuccaagcccugcgcccgcgucugcuacggccucggcauggagcaccuccgcgagguccgcgccgucaccuccgccaacauccaggaguucgccggcugcaagaagaucuucggcucccucgccuuccuccccgaguccuucgacggcgaccccgccuccaacaccgccccccuccagcccgagcagcuccaggucuucgagacccucgaggagaucaccggcuaccucuacaucuccgccuggcccgacucccuccccgaccucuccgucuuccagaaccuccaggucauccgcggccgcauccuccacaacggcgccuacucccucacccuccagggccucggcaucuccuggcucggccuccgcucccuccgcgagcucggcuccggccucgcccucauccaccacaacacccaccucugcuucguccacaccguccccugggaccagcucuuccgcaacccccaccaggcccuccuccacaccgccaaccgccccgaggacgagugcgucggcgagggccucgccugccaccagcucugcgcccgcggccacugcuggggccccggccccacccagugcgucaacugcucccaguuccuccgcggccaggagugcgucgaggagugccgcguccuccagggccucccccgcgaguacgucaacgcccgccacugccuccccugccaccccgagugccagccccagaacggcuccgucaccugcuucggccccgaggccgaccagugcgucgccugcgcccacuacaaggacccccccuucugcgucgcccgcugccccuccggcgucaagcccgaccucuccuacaugcccaucuggaaguuccccgacgaggagggcgccugccagcccugccccaucaacugcacccacuccugcgucgaccucgacgacaagggcugccccgccgagcagcgcgccuccccccucaccuccaucaucuccgccgucgucggcauccuccucgucgucguccucggcgucgucuucggcauccucaucaagcgccgccagcagaagauccgcaaguacaccaugcgccgccuccuccaggagaccgagcucgucgagccccucacccccuccggcgccaugcccaaccaggcccagaugcgcauccucaaggagaccgagcuccgcaaggucaagguccucggcuccggcgccuucggcaccgucuacaagggcaucuggauccccgacggcgagaacgucaagauccccgucgccaucaagguccuccgcgagaacaccucccccaaggccaacaaggagauccucgacgaggccuacgucauggccggcgucggcucccccuacgucucccgccuccucggcaucugccucaccuccaccguccagcucgucacccagcucaugcccuacggcugccuccucgaccacguccgcgagaaccgcggccgccucggcucccaggaccuccucaacuggugcaugcagaucgccaagggcauguccuaccucgaggacguccgccucguccaccgcgaccucgccgcccgcaacguccucgucaagucccccaaccacgucaagaucaccgacuucggccucgcccgccuccucgacaucgacgagaccgaguaccacgccgacggcggcaagguccccaucaaguggauggcccucgaguccauccuccgccgccgcuucacccaccaguccgacgucugguccuacggcgucaccgucugggagcucaugaccuucggcgccaagcccuacgacggcauccccgcccgcgagauccccgaccuccucgagaagggcgagcgccucccccagccccccaucugcaccaucgacgucuacaugaucauggucaagugcuggaugaucgacuccgagugccgcccccgcuuccgcgagcucgucuccgaguucucccgcauggcccgcgacccccagcgcuucgucgucauccagaacgaggaccucggccccgccuccccccucgacuccaccuucuaccgcucccuccucgaggacgacgacaugggcgaccucgucgacgccgaggaguaccucgucccccagcagggcuucuucugccccgaccccgcccccggcgccggcggcaugguccaccaccgccaccgcuccuccuccacccgcuccggcggcggcgaccucacccucggccucgagcccuccgaggaggaggccccccgcuccccccucgcccccuccgagggcgccggcuccgacgucuucgacggcgaccucggcaugggcgccgccaagggccuccagucccuccccacccacgaccccuccccccuccagcgcuacuccgaggaccccaccgucccccuccccuccgagaccgacggcuacgucgccccccucaccugcuccccccagcccgaguacgucaaccagcccgacguccgcccccagccccccuccccccgcgagggcccccuccccgccgcccgccccgccggcgccacccucgagcgccccaagacccucucccccggcaagaacggcgucgucaaggacgucuucgccuucggcggcgccgucgagaaccccgaguaccucaccccccagggcggcgccgccccccagccccaccccccccccgccuucucccccgccuucgacaaccucuacuacugggaccaggacccccccgagcgcggcgccccccccuccaccuucaagggcacccccaccgccgagaaccccgaguaccucggccucgacguccccgucuga

SEQ ID NO: 1731 - RNA, 1260 nt, Artificial Sequence
  AAD56009 variant
auggagcucgccgcccucugccgcuggggccuccuccucgcccuccucccccccggcgccgccuccacccaggucugcaccggcaccgacaugaagcuccgccuccccgccucccccgagacccaccucgacaugcuccgccaccucuaccagggcugccaggucguccagggcaaccucgagcucaccuaccuccccaccaacgccucccucuccuuccuccaggacauccaggagguccagggcuacguccucaucgcccacaaccagguccgccaggucccccuccagcgccuccgcaucguccgcggcacccagcucuucgaggacaacuacgcccucgccguccucgacaacggcgacccccucaacaacaccacccccgucaccggcgccucccccggcggccuccgcgagcuccagcuccgcucccucaccgagauccucaagggcggcguccucauccagcgcaacccccagcucugcuaccaggacaccauccucuggaaggacaucuuccacaagaacaaccagcucgcccucacccucaucgacaccaaccgcucccgcgccugccaccccugcucccccaugugcaagggcucccgcugcuggggcgaguccuccgaggacugccagucccucacccgcaccgucugcgccggcggcugcgcccgcugcaagggcccccuccccaccgacugcugccacgagcagugcgccgccggcugcaccggccccaagcacuccgacugccucgccugccuccacuucaaccacuccggcaucugcgagcuccacugccccgcccucgucaccuacaacaccgacaccuucgaguccaugcccaaccccgagggccgcuacaccuucggcgccuccugcgucaccgccugccccuacaacuaccucuccaccgacgucggcuccugcacccucgucugcccccuccacaaccaggaggucaccgccgaggacggcacccagcgcugcgagaagugcuccaagcccugcgcccgcggcacccacucccuccccccccgccccgccgccguccccgucccccuccgcaugcagcccggccccgcccaccccguccucuccuuccuccgccccuccugggaccucgucuccgccuucuacucccucccccucgccccccucucccccaccuccguccccaucucccccgucuccgucggccgcggccccgaccccgacgcccacgucgccgucgaccucucccgcuacgagggcuga

SEQ ID NO: 1732 - RNA, 546 nt, Artificial Sequence
  U70863.1 variant
ggcucccacuccaugcgcuacuucuucaccuccgucucccgccccggccgcggcgagccccgcuucaucgccgucggcuacgucgacgacacccaguucguccgcuucgacuccgacgccgccucccagcgcauggagccccgcgcccccuggaucgagcaggagggccccgaguacugggacggcgagacccgcaaggucaaggcccacucccagacccaccgcgucgaccucggcacccuccgcggcuacuacaaccaguccgaggccggcucccacaccguccagcgcauguacggcugcgacgucggcuccgacuggcgcuuccuccgcggcuaccaccaguacgccuacgacggcaaggacuacaucgcccucaaggaggaccuccgcuccuggaccgccgccgacauggccgcccagaccaccaagcacaagugggagaccgcccacgucgccgagcagcuccgcgccuaccucgagggcaccugcgucgaguggcuccgccgcuaccucgagaacggcaaggagacccuccagcgcacc

SEQ ID NO: 1733 - RNA, 543 nt, Artificial Sequence
  AH009136.2 variant
ucccacuccaugcgcuacuucuucaccuccgucucccgccccggccgcggcgagccccgcuucaucgccgucggcuacgucgacgacacccaguucguccgcuucgacuccgacgccgccucccagcgcauggagccccgcgcccccuggaucgagcaggagggccccgaguacugggacggcgagacccgcaaggucaaggcccacucccagacccaccgcgucgaccucggcacccuccgcggcuacuacaaccaguccgaggccggcucccacaccguccagcgcauguacggcugcgacgucggcuccgacuggcgcuuccuccgcggcuaccaccaguacgccuacgacggcaaggacuacaucgcccucaaggaggaccuccgcuccuggaccgccgccgacauggccgcccagaccaccaagcacaagugggaggccgcccacgucgccgagcagcuccgcgccuaccucgagggcaccugcgucgaguggcuccgccgcuaccucgagaacggcaaggagacccuccagcgcacc

SEQ ID NO: 1734 - RNA, 705 nt, Artificial Sequence
  AAG09781 variant
augcuccgcguccccgagccccgccccggcgaggccaaggccgagggcgccgccccccccacccccuccaagccccucaccuccuuccucauccaggacauccuccgcgacggcgcccagcgccagggcggccgcaccuccucccagcgccagcgcgaccccgagcccgagcccgagcccgagcccgagggcggccgcucccgcgccggcgcccagaacgaccagcucuccaccggcccccgcgccgcccccgaggaggccgagacccucgccgagaccgagcccgagcgccaccucggcuccuaccuccucgacuccgagaacaccuccggcgcccucccccgccucccccagacccccaagcagccccagaagcgcucccgcgccgccuucucccacacccaggucaucgagcucgagcgcaaguucucccaccagaaguaccucuccgcccccgagcgcgcccaccucgccaagaaccucaagcucaccgagacccaggucaagaucugguuccagaaccgccgcuacaagaccaagcgcaagcagcucuccuccgagcucggcgaccucgagaagcacuccucccuccccgcccucaaggaggaggccuucucccgcgccucccucgucuccgucuacaacuccuaccccuacuaccccuaccucuacugcgucggcuccuggucccccgccuucugguga

SEQ ID NO: 1735 - RNA, 942 nt, Artificial Sequence
  BAG37303 variant
auggccuccuuccgcaagcucacccucuccgagaaggucccccccaaccaccccucccgcaagaaggucaacuuccucgacaugucccucgacgacaucaucaucuacaaggagcucgagggcaccaacgccgaggaggagaagaacaagcgccagaaccacuccaagaaggagucccccucccgccagcaguccaaggcccaccgccaccgccaccgccgcgacuacucccgcugccgcuccaacuccgaggagggcaaccacgacaagaagcccucccagaagcccuccggcuucaaguccggccagcacccccucaacggccagccccucaucgagcaggagaagugcuccgacaacuacgaggcccaggccgagaagaaccagggccaguccgagggcaaccagcaccaguccgagggcaaccccgacaaguccgaggagucccagggccagcccgaggagaaccaccacuccgagcgcucccgcaaccaccucgagcgcucccucucccaguccgaccgcucccagggccagcucaagcgccaccacccccaguacgagcgcucccacggccaguacaagcgcucccacggccaguccgagcgcucccacggccacuccgagcgcucccacggccacuccgagcgcucccacggccacuccgagcgcucccacggccacuccaagcgcucccgcucccagggcgaccucgucgacacccaguccgaccucaucgccacccagcgcgaccucaucgccacccagaaggaccucaucgccacccagcgcgaccucaucgccacccagcgcgaccucaucgucacccagcgcgaccucgucgccaccgagcgcgaccucaucaaccaguccggccgcucccacggccaguccgagcgccaccagcgcuacuccaccggcaagaacaccaucaccaccuga

SEQ ID NO: 1736 - RNA, 942 nt, Artificial Sequence
  AAI28135 variant
auggccuccuuccgcaagcucacccucuccgagaaggucccccccaaccaccccucccgcaagaaggucaacuuccucgacaugucccucgacgacaucaucaucuacaaggagcucgagggcaccaacgccgaggaggagaagaacaagcgccagaaccacuccaagaaggagucccccucccgccagcaguccaaggcccaccgccaccgccaccgccgcggcuacucccgcugccgcuccaacuccgaggagggcaaccacgacaagaagcccucccagaagcccuccggcuucaaguccggccagcacccccucaacggccagccccucaucgagcaggagaagugcuccgacaacuacgaggcccaggccgagaagaaccagggccaguccgagggcaaccagcaccaguccgagggcaaccccgacaaguccgaggagucccagggccagcccgaggagaaccaccacuccgagcgcucccgcaaccaccucgagcgcucccucucccaguccgaccgcucccagggccagcucaagcgccaccacccccaguacgagcgcucccacggccaguacaagcgcucccacggccaguccgagcgcucccacggccacuccgagcgcucccacggccacuccgagcgcucccacggccacuccgagcgcucccacggccacuccaagcgcucccgcucccagggcgaccucgucgacacccaguccgaccucaucgccacccagcgcgaccucaucgccacccagaaggaccucaucgccacccagcgcgaccucaucgccacccagcgcgaccucaucgucacccagcgcgaccucgucgccaccgagcgcgaccucaucaaccaguccggccgcucccacggccaguccgagcgccaccagcgcuacuccaccggcaagaacaccaucaccaccuga

SEQ ID NO: 1737 - RNA, 384 nt, Artificial Sequence
  12543784 variant
augaucaagaagaaccucaagaagcucggcaucgaggagaccuaccucaacaucaucaaggccaucuacgaccgccccaccgccuccauccagaagaccgagaaccucuccaccaagaccggcaccucccaggaguaccaccucuccccccucugguucuacaucguccucgagauccucgccuccaccauccgccaggagaagaaccucaaggacauccacaccgagaaggaggaggucaagcucucccucuucgccgacgccaugauccucuaccucaagaagcccaacgacuccacccgcaagcuccucgagcucaucaagaagauccacuccuccugccgcaucaagaucaacauccacuucgccuucugcucccaguga

SEQ ID NO: 1738 - RNA, 1926 nt, Artificial Sequence
  AAA63226 variant
auggccaaggccgccgccaucggcaucgaccucggcaccaccuacuccugcgucggcgucuuccagcacggcaaggucgagaucaucgccaacgaccagggcaaccgcaccacccccuccuacgucgccuucaccgacaccgagcgccucaucggcgacgccgccaagaaccaggucgcccucaacccccagaacaccgucuucgacgccaagcgccucaucggccgcaaguucggcgaccccgucguccaguccgacaugaagcacuggcccuuccaggucaucaacgacggcgacaagcccaagguccaggucuccuacaagggcgagaccaaggccuucuaccccgaggagaucuccuccaugguccucaccaagaugaaggagaucgccgaggccuaccucggcuaccccgucaccaacgccgucaucaccguccccgccuacuucaacgacucccagcgccaggccaccaaggacgccggcgucaucgccggccucaacguccuccgcaucaucaacgagcccaccgccgccgccaucgccuacggccucgaccgcaccggcaagggcgagcgcaacguccucaucuucgaccucggcggcggcaccuucgacgucuccauccucaccaucgacgacggcaucuucgaggucaaggccaccgccggcgacacccaccucggcggcgaggacuucgacaaccgccucgucaaccacuucgucgaggaguucaagcgcaagcacaagaaggacaucucccagaacaagcgcgccguccgccgccuccgcaccgccugcgagcgcgccaagcgcacccucuccuccuccacccaggccucccucgagaucgacucccucuucgagggcaucgacuucuacaccuccaucacccgcgcccgcuucgaggagcucugcuccgaccucuuccgcuccacccucgagcccgucgagaaggcccuccgcgacgccaagcucgacaaggcccagauccacgaccucguccucgucggcggcuccacccgcauccccaagguccagaagcuccuccaggacuucuucaacggccgcgaccucaacaaguccaucaaccccgacgaggccgucgccuacggcgccgccguccaggccgccauccucaugggcgacaaguccgagaacguccaggaccuccuccuccucgacgucgccccccucucccucggccucgagaccgccggcggcgucaugaccgcccucaucaagcgcaacuccaccauccccaccaagcagacccagaucuucaccaccuacuccgacaaccagcccggcguccucauccaggucuacgagggcgagcgcgccaugaccaaggacaacaaccuccucggccgcuucgagcucuccggcaucccccccgccccccgcggcgucccccagaucgaggucaccuucgacaucgacgccaacggcauccucaacgucaccgccaccgacaaguccaccggcaaggccaacaagaucaccaucaccaacgacaagggccgccucuccaaggaggagaucgagcgcaugguccaggaggccgagaaguacaaggccgaggacgagguccagcgcgagcgcgucuccgccaagaacgcccucgaguccuacgccuucaacaugaaguccgccgucgaggacgagggccucaagggcaagaucuccgaggccgacaagaagaagguccucgacaagugccaggaggucaucuccuggcucgacgccaacacccucgccgagaaggacgaguucgagcacaagcgcaaggagcucgagcaggucugcaaccccaucaucuccggccucuaccagggcgccggcggccccggccccggcggcuucggcgcccagggccccaagggcggcuccggcuccggccccaccaucgaggaggucgacuga

SEQ ID NO: 1739 - RNA, 1926 nt, Artificial Sequence; identical to SEQ ID NO: 1738
  AAA63227 variant

SEQ ID NO: 1740 - RNA, 627 nt, Artificial Sequence
  AAI21098 variant
auggcccucggccagaagcucuucaucaccaugucccgcggcgccggccgccuccagggcacccucugggcccucgucuuccucggcauccucgucggcauggucguccccucccccgccggcacccgcgccaacaacacccuccucgacucccgcggcuggggcacccuccucucccgcucccgcgccggccucgccggcgagaucgccggcgucaacugggaguccggcuaccucgucggcaucaagcgccagcgccgccucuacugcaacgucggcaucggcuuccaccuccagguccuccccgacggccgcaucuccggcacccacgaggagaaccccuacucccuccucgagaucuccaccgucgagcgcggcgucgucucccucuucggcguccgcuccgcccucuucgucgccaugaacuccaagggccgccucuacgccacccccuccuuccaggaggagugcaaguuccgcgagacccuccuccccaacaacuacaacgccuacgaguccgaccucuaccagggcaccuacaucgcccucuccaaguacggccgcgucaagcgcggcuccaaggucucccccaucaugaccgucacccacuuccucccccgcaucuga

SEQ ID NO: 1741 - RNA, 1569 nt, Artificial Sequence
  BAA74724 variant
augccccgcgccccccgcugccgcgccguccgcucccuccuccgcucccacuaccgcgagguccucccccucgccaccuucguccgccgccucggcccccagggcuggcgccucguccagcgcggcgaccccgccgccuuccgcgcccucgucgcccagugccucgucugcguccccugggacgcccgccccccccccgccgcccccuccuuccgccaggucuccugccucaaggagcucgucgcccgcguccuccagcgccucugcgagcgcggcgccaagaacguccucgccuucggcuucgcccuccucgacggcgcccgcggcggcccccccgaggccuucaccaccuccguccgcuccuaccuccccaacaccgucaccgacgcccuccgcggcuccggcgccuggggccuccuccuccgccgcgucggcgacgacguccucguccaccuccucgcccgcugcgcccucuucguccucgucgcccccuccugcgccuaccaggucugcggccccccccucuaccagcucggcgccgccacccaggcccgcccccccccccacgccuccggcccccgccgccgccucggcugcgagcgcgccuggaaccacuccguccgcgaggccggcgucccccucggccuccccgcccccggcgcccgccgccgcggcggcuccgccucccgcucccucccccuccccaagcgcccccgccgcggcgccgcccccgagcccgagcgcacccccgucggccagggcuccugggcccaccccggccgcacccgcggccccuccgaccgcggcuucugcgucgucucccccgcccgccccgccgaggaggccaccucccucgagggcgcccucuccggcacccgccacucccaccccuccgucggccgccagcaccacgccggcccccccuccaccucccgccccccccgccccugggacacccccugcccccccgucuacgccgagaccaagcacuuccucuacuccuccggcgacaaggagcagcuccgccccuccuuccuccucuccucccuccgccccauccucaccggcgcccgccgccucgucgagaccaucuuccucggcuccucccccggcugccagggccuccccgccggcugccccgccugccccuccgccaccggcaagugcggccccugcuucugguccugccucggcaccacccgcuccgcccccaccggcugcuccucccgccgcaccgcccgcugcgagcuccgcuccccccagcagcccgucuccguccccggccgcuccccccgcgcccucuggcgccccccccgccgccgcacccagacccccgucgccuggugcuccugcuccgccuccaccgccccccucgccggcguccgccuccgcgccggccuccccgcccccgccggcgccccccgcccccucggccuccaggcccagcgccgccgcuuccuccgcaacaccaagaaguucaucucccucggcaagcacgccaagcucucccuccaggagcucaccuggaagauguccguccgcgacugcgccuggcuccgccgcuccccc

SEQ ID NO: 1742 - RNA, 1680 nt, Artificial Sequence
  BAA23606 variant
augcgccuccaccgccuccgcgcccgccucuccgccgucgccugcggccuccuccuccuccucguccgcggccagggccaggacuccgccucccccauccgcaccacccacaccggccagguccucggcucccucguccacgucaagggcgccaacgccggcguccagaccuuccucggcauccccuucgccaagcccccccucggcccccuccgcuucgccccccccgagccccccgaguccugguccggcguccgcgacggcaccacccaccccgccaugugccuccaggaccucaccgccgucgaguccgaguuccucucccaguucaacaugaccuuccccuccgacuccauguccgaggacugccucuaccucuccaucuacacccccgcccacucccacgagggcuccaaccuccccgucauggucuggauccacggcggcgcccucgucuucggcauggccucccucuacgacggcuccaugcucgccgcccucgagaacgucgucgucgucaucauccaguaccgccucggcguccucggcuucuucuccaccggcgacaagcacgccaccggcaacuggggcuaccucgaccaggucgccgcccuccgcuggguccagcagaacaucgcccacuucggcggcaaccccgaccgcgucaccaucuucggcgaguccgccggcggcaccuccgucuccucccucgucgucucccccaucucccagggccucuuccacggcgccaucauggaguccggcgucgcccuccuccccggccucaucgccuccuccgccgacgucaucuccaccgucgucgccaaccucuccgccugcgaccaggucgacuccgaggcccucgucggcugccuccgcggcaaguccaaggaggagauccucgccaucaacaagcccuucaagaugauccccggcgucgucgacggcgucuuccucccccgccacccccaggagcuccucgccuccgccgacuuccagcccguccccuccaucgucggcgucaacaacaacgaguucggcuggcucauccccaaggucaugcgcaucuacgacacccagaaggagauggaccgcgaggccucccaggccgcccuccagaagaugcucacccuccucaugcucccccccaccuucggcgaccuccuccgcgaggaguacaucggcgacaacggcgacccccagacccuccaggcccaguuccaggagaugauggccgacuccauguucgucauccccgcccuccaggucgcccacuuccagugcucccgcgcccccgucuacuucuacgaguuccagcaccagcccuccuggcucaagaacauccgccccccccacaugaaggccgaccacggcgacgagcuccccuucgucuuccgcuccuucuucggcggcaacuacaucaaguucaccgaggaggaggagcagcucucccgcaagaugaugaaguacugggccaacuucgcccgcaacggcaaccccaacggcgagggccucccccacuggccccucuucgaccaggaggagcaguaccuccagcucaaccuccagcccgccgucggccgcgcccucaaggcccaccgccuccaguucuggaagaaggcccucccccagaagauccaggagcucgaggagcccgaggagcgccacaccgagcucuga

SEQ ID NO: 1743 - RNA, 1740 nt, Artificial Sequence
  AAH65269 variant
augaacaagcucuacaucggcaaccucuccgagaacgccgcccccuccgaccucgaguccaucuucaaggacgccaagauccccgucuccggccccuuccucgucaagaccggcuacgccuucgucgacugccccgacgaguccugggcccucaaggccaucgaggcccucuccggcaagaucgagcuccacggcaagcccaucgaggucgagcacuccguccccaagcgccagcgcauccgcaagcuccagauccgcaacauccccccccaccuccagugggagguccucgacucccuccucguccaguacggcgucgucgaguccugcgagcaggucaacaccgacuccgagaccgccgucgucaacgucaccuacuccuccaaggaccaggcccgccaggcccucgacaagcucaacggcuuccagcucgagaacuucacccucaaggucgccuacauccccgacgagauggccgcccagcagaacccccuccagcagccccgcggccgccgcggccucggccagcgcggcuccucccgccagggcucccccggcuccgucuccaagcagaagcccugcgaccucccccuccgccuccucguccccacccaguucgucggcgccaucaucggcaaggagggcgccaccauccgcaacaucaccaagcagacccaguccaagaucgacguccaccgcaaggagaacgccggcgccgccgagaaguccaucaccauccucuccacccccgagggcaccuccgccgccugcaaguccauccucgagaucaugcacaaggaggcccaggacaucaaguucaccgaggagaucccccucaagauccucgcccacaacaacuucgucggccgccucaucggcaaggagggccgcaaccucaagaagaucgagcaggacaccgacaccaagaucaccaucuccccccuccaggagcucacccucuacaaccccgagcgcaccaucaccgucaagggcaacgucgagaccugcgccaaggccgaggaggagaucaugaagaagauccgcgaguccuacgagaacgacaucgccuccaugaaccuccaggcccaccucauccccggccucaaccucaacgcccucggccucuucccccccaccuccggcaugcccccccccaccuccggcccccccuccgccaugaccccccccuacccccaguucgagcaguccgagaccgagaccguccaccucuucauccccgcccucuccgucggcgccaucaucggcaagcagggccagcacaucaagcagcucucccgcuucgccggcgccuccaucaagaucgcccccgccgaggcccccgacgccaagguccgcauggucaucaucaccggcccccccgaggcccaguucaaggcccagggccgcaucuacggcaagaucaaggaggagaacuucgucucccccaaggaggaggucaagcucgaggcccacauccgcguccccuccuucgccgccggccgcgucaucggcaagggcggcaagaccgucaacgagcuccagaaccucuccuccgccgaggucgucgucccccgcgaccagacccccgacgagaacgaccaggucgucgucaagaucaccggccacuucuacgccugccaggucgcccagcgcaagauccaggagauccucacccaggucaagcagcaccagcagcagaaggcccuccaguccggccccccccagucccgccgcaaguga

SEQ ID NO: 1744 - RNA, 537 nt, Artificial Sequence
  AAA63207 variant
augcacuccuccgcccuccucugcugccucguccuccucaccggcguccgcgccucccccggccagggcacccaguccgagaacuccugcacccacuuccccggcaaccuccccaacaugcuccgcgaccuccgcgacgccuucucccgcgucaagaccuucuuccagaugaaggaccagcucgacaaccuccuccucaaggagucccuccucgaggacuucaagggcuaccucggcugccaggcccucuccgagaugauccaguucuaccucgaggaggucaugccccaggccgagaaccaggaccccgacaucaaggcccacgucaacucccucggcgagaaccucaagacccuccgccuccgccuccgccgcugccaccgcuuccuccccugcgagaacaaguccaaggccgucgagcaggucaagaacgccuucaacaagcuccaggagaagggcaucuacaaggccauguccgaguucgacaucuucaucaacuacaucgaggccuacaugaccaugaagauccgcaacuga

SEQ ID NO: 1745 - RNA, 1143 nt, Artificial Sequence
  AAB17170 variant
auggccuucgucugccucgccaucggcugccucuacaccuuccucaucuccaccaccuucggcugcaccuccuccuccgacaccgagaucaaggucaaccccccccaggacuucgagaucgucgaccccggcuaccucggcuaccucuaccuccaguggcagcccccccucucccucgaccacuucaaggagugcaccgucgaguacgagcucaaguaccgcaacaucggcuccgagaccuggaagaccaucaucaccaagaaccuccacuacaaggacggcuucgaccucaacaagggcaucgaggccaagauccacacccuccuccccuggcagugcaccaacggcuccgagguccaguccuccugggccgagaccaccuacuggaucuccccccagggcauccccgagaccaagguccaggacauggacugcgucuacuacaacuggcaguaccuccucugcuccuggaagcccggcaucggcguccuccucgacaccaacuacaaccucuucuacugguacgagggccucgaccacgcccuccagugcgucgacuacaucaaggccgacggccagaacaucggcugccgcuuccccuaccucgaggccuccgacuacaaggacuucuacaucugcgucaacggcuccuccgagaacaagcccauccgcuccuccuacuucaccuuccagcuccagaacaucgucaagccccucccccccgucuaccucaccuucacccgcgaguccuccugcgagaucaagcucaagugguccaucccccucggccccauccccgcccgcugcuucgacuacgagaucgagauccgcgaggacgacaccacccucgucaccgccaccgucgagaacgagaccuacacccucaagaccaccaacgagacccgccagcucugcuucgucguccgcuccaaggucaacaucuacugcuccgacgacggcaucugguccgagugguccgacaagcagugcugggagggcgaggaccucuccaagaagacccuccuccgcuucuggcuccccuucggcuucauccucauccucgucaucuucgucaccggccuccuccuccgcaagcccaacaccuaccccaagaugauccccgaguucuucugcgacaccuga

SEQ ID NO: 1746 - RNA, 819 nt, Artificial Sequence
  AAA67527 variant
auggacuccuaccuccucauguggggccuccucaccuucaucaugguccccggcugccaggccgagcucugcgacgacgacccccccgagaucccccacgccaccuucaaggccauggccuacaaggagggcaccaugcucaacugcgagugcaagcgcggcuuccgccgcaucaaguccggcucccucuacaugcucugcaccggcaacuccucccacuccuccugggacaaccagugccagugcaccuccuccgccacccgcaacaccaccaagcaggucaccccccagcccgaggagcagaaggagcgcaagaccaccgagaugcagucccccaugcagcccgucgaccaggccucccuccccggccacugccgcgagcccccccccugggagaacgaggccaccgagcgcaucuaccacuucgucgucggccagauggucuacuaccagugcguccagggcuaccgcgcccuccaccgcggccccgccgaguccgucugcaagaugacccacggcaagacccgcuggacccagccccagcucaucugcaccggcgagauggagaccucccaguuccccggcgaggagaagccccaggccucccccgagggccgccccgaguccgagaccuccugccucgucaccaccaccgacuuccagauccagaccgagauggccgccaccauggagaccuccaucuucaccaccgaguaccaggucgccgucgccggcugcgucuuccuccucaucuccguccuccuccucuccggccucaccuggcagcgccgccagcgcaagucccgccgcaccaucuga

SEQ ID NO: 1747 - RNA, 1656 nt, Artificial Sequence
  AAA59143 variant
auggccgcccccgcccucuccuggcgccucccccuccucauccuccuccucccccucgccaccuccugggccuccgccgccgucaacggcaccucccaguucaccugcuucuacaacucccgcgccaacaucuccugcgucuggucccaggacggcgcccuccaggacaccuccugccagguccacgccuggcccgaccgccgccgcuggaaccagaccugcgagcuccuccccgucucccaggccuccugggccugcaaccucauccucggcgcccccgacucccagaagcucaccaccgucgacaucgucacccuccgcguccucugccgcgagggcguccgcuggcgcgucauggccauccaggacuucaagcccuucgagaaccuccgccucauggcccccaucucccuccaggucguccacgucgagacccaccgcugcaacaucuccugggagaucucccaggccucccacuacuucgagcgccaccucgaguucgaggcccgcacccucucccccggccacaccugggaggaggccccccuccucacccucaagcagaagcaggaguggaucugccucgagacccucacccccgacacccaguacgaguuccagguccgcgucaagccccuccagggcgaguucaccaccuggucccccuggucccagccccucgccuuccgcaccaagcccgccgcccucggcaaggacaccauccccuggcucggccaccuccucgucggccucuccggcgccuucggcuucaucauccucgucuaccuccucaucaacugccgcaacaccggccccuggcucaagaagguccucaagugcaacacccccgaccccuccaaguucuucucccagcucuccuccgagcacggcggcgacguccagaaguggcucuccucccccuuccccuccuccuccuucucccccggcggccucgcccccgagaucuccccccucgagguccucgagcgcgacaaggucacccagcuccuccuccagcaggacaagguccccgagcccgccucccucuccuccaaccacucccucaccuccugcuucaccaaccagggcuacuucuucuuccaccuccccgacgcccucgagaucgaggccugccaggucuacuucaccuacgaccccuacuccgaggaggaccccgacgagggcgucgccggcgcccccaccggcuccuccccccagccccuccagccccucuccggcgaggacgacgccuacugcaccuuccccucccgcgacgaccuccuccucuucucccccucccuccucggcggccccuccccccccuccaccgcccccggcggcuccggcgccggcgaggagcgcaugccccccucccuccaggagcgcgucccccgcgacugggacccccagccccucggcccccccacccccggcguccccgaccucgucgacuuccagcccccccccgagcucguccuccgcgaggccggcgaggagguccccgacgccggcccccgcgagggcgucuccuuccccuggucccgcccccccggccagggcgaguuccgcgcccucaacgcccgccucccccucaacaccgacgccuaccucucccuccaggagcuccagggccaggaccccacccaccucgucuga

SEQ ID NO: 1748 - RNA, 1110 nt, Artificial Sequence
  AAA59145 variant
augcucaagcccucccuccccuucaccucccuccucuuccuccagcucccccuccucggcgucggccucaacaccaccauccucacccccaacggcaacgaggacaccaccgccgacuucuuccucaccaccaugcccaccgacucccucuccgucuccacccucccccuccccgagguccagugcuucgucuucaacgucgaguacaugaacugcaccuggaacuccuccuccgagccccagcccaccaaccucacccuccacuacugguacaagaacuccgacaacgacaagguccagaagugcucccacuaccucuucuccgaggagaucaccuccggcugccagcuccagaagaaggagauccaccucuaccagaccuucgucguccagcuccaggacccccgcgagccccgccgccaggccacccagaugcucaagcuccagaaccucgucauccccugggcccccgagaaccucacccuccacaagcucuccgagucccagcucgagcucaacuggaacaaccgcuuccucaaccacugccucgagcaccucguccaguaccgcaccgacugggaccacuccuggaccgagcaguccgucgacuaccgccacaaguucucccuccccuccgucgacggccagaagcgcuacaccuuccgcguccgcucccgcuucaacccccucugcggcuccgcccagcacugguccgaguggucccaccccauccacuggggcuccaacaccuccaaggagaaccccuuccucuucgcccucgaggccgucgucaucuccgucggcuccaugggccucaucaucucccuccucugcgucuacuucuggcucgagcgcaccaugccccgcauccccacccucaagaaccucgaggaccucgucaccgaguaccacggcaacuucuccgccugguccggcgucuccaagggccucgccgagucccuccagcccgacuacuccgagcgccucugccucgucuccgagaucccccccaagggcggcgcccucggcgagggccccggcgccucccccugcaaccagcacucccccuacugggccccccccugcuacacccucaagcccgagaccuga

SEQ ID NO: 1749 - RNA, 405 nt, Artificial Sequence
  AAA74469 variant
augcgcaugcuccuccaccucucccuccucgcccucggcgccgccuacgucuacgccauccccaccgagauccccaccuccgcccucgucaaggagacccucgcccuccucuccacccaccgcacccuccucaucgccaacgagacccuccgcauccccguccccguccacaagaaccaccagcucugcaccgaggagaucuuccagggcaucggcacccucgagucccagaccguccagggcggcaccgucgagcgccucuucaagaaccucucccucaucaagaaguacaucgacggccagaagaagaagugcggcgaggagcgccgccgcgucaaccaguuccucgacuaccuccaggaguuccucggcgucaugaacaccgaguggaucaucgaguccuga

SEQ ID NO: 1750 - RNA, 555 nt, Artificial Sequence
  AAH06487 variant
augguccgcaagcucaaguuccacgagcagaagcuccucaagcaggucgacuuccucaacugggaggucaccgaccacaaccuccacgagcuccgcguccuccgccgcuaccgccuccagcgccgcgaggacuacacccgcuacaaccagcucucccgcgccguccgcgagcucgcccgccgccuccgcgaccuccccgagcgcgaccaguuccgcguccgcgccuccgccgcccuccucgacaagcucuacgcccucggccucguccccacccgcggcucccucgagcucugcgacuucgucaccgccuccuccuucugccgccgccgccuccccaccguccuccucaagcuccgcauggcccagcaccuccaggccgccgucgccuucgucgagcagggccacguccgcgucggccccgacgucgucaccgaccccgccuuccucgucacccgcuccauggaggacuucgucaccugggucgacuccuccaagaucaagcgccacguccucgaguacaacgaggagcgcgacgacuucgaccucgaggccuga

SEQ ID NO: 1751 - RNA, 3150 nt, Artificial Sequence
  AAH08786 variant
augggcucccgcacccccgaguccccccuccacgccguccagcuccgcuggggcccccgccgccgccccccccuccucccccuccuccuccuccuccuccccccccccccccgcgucggcggcuucaaccucgacgccgaggcccccgccguccucuccggcccccccggcuccuucuucggcuucuccgucgaguucuaccgccccggcaccgacggcgucuccguccucgucggcgcccccaaggccaacaccucccagcccggcguccuccagggcggcgccgucuaccucugccccuggggcgccucccccacccagugcacccccaucgaguucgacuccaagggcucccgccuccucgaguccucccucuccuccuccgagggcgaggagcccgucgaguacaagucccuccagugguucggcgccaccguccgcgcccacggcuccuccauccucgccugcgccccccucuacuccuggcgcaccgagaaggagccccucuccgaccccgucggcaccugcuaccucuccaccgacaacuucacccgcauccucgaguacgcccccugccgcuccgacuucuccugggccgccggccagggcuacugccagggcggcuucuccgccgaguucaccaagaccggccgcgucguccucggcggccccggcuccuacuucuggcagggccagauccucuccgccacccaggagcagaucgccgaguccuacuaccccgaguaccucaucaaccucguccagggccagcuccagacccgccaggccuccuccaucuacgacgacuccuaccucggcuacuccgucgccgucggcgaguucuccggcgacgacaccgaggacuucgucgccggcguccccaagggcaaccucaccuacggcuacgucaccauccucaacggcuccgacauccgcucccucuacaacuucuccggcgagcagauggccuccuacuucggcuacgccgucgccgccaccgacgucaacggcgacggccucgacgaccuccucgucggcgccccccuccucauggaccgcacccccgacggccgcccccaggaggucggccgcgucuacgucuaccuccagcaccccgccggcaucgagcccacccccacccucacccucaccggccacgacgaguucggccgcuucggcuccucccucaccccccucggcgaccucgaccaggacggcuacaacgacgucgccaucggcgcccccuucggcggcgagacccagcagggcgucgucuucgucuuccccggcggccccggcggccucggcuccaagcccucccagguccuccagccccucugggccgccucccacacccccgacuucuucggcuccgcccuccgcggcggccgcgaccucgacggcaacggcuaccccgaccucaucgucggcuccuucggcgucgacaaggccgucgucuaccgcggccgccccaucgucuccgccuccgccucccucaccaucuuccccgccauguucaaccccgaggagcgcuccugcucccucgagggcaaccccgucgccugcaucaaccucuccuucugccucaacgccuccggcaagcacgucgccgacuccaucggcuucaccgucgagcuccagcucgacuggcagaagcagaagggcggcguccgccgcgcccucuuccucgccucccgccaggccacccucacccagacccuccucauccagaacggcgcccgcgaggacugccgcgagaugaagaucuaccuccgcaacgaguccgaguuccgcgacaagcucucccccauccacaucgcccucaacuucucccucgacccccaggcccccgucgacucccacggccuccgccccgcccuccacuaccaguccaagucccgcaucgaggacaaggcccagauccuccucgacugcggcgaggacaacaucugcguccccgaccuccagcucgaggucuucggcgagcagaaccacgucuaccucggcgacaagaacgcccucaaccucaccuuccacgcccagaacgucggcgagggcggcgccuacgaggccgagcuccgcgucaccgccccccccgaggccgaguacuccggccucguccgccaccccggcaacuucuccucccucuccugcgacuacuucgccgucaaccagucccgccuccucgucugcgaccucggcaaccccaugaaggccggcgccucccucuggggcggccuccgcuucaccgucccccaccuccgcgacaccaagaagaccauccaguucgacuuccagauccucuccaagaaccucaacaacucccaguccgacgucgucuccuuccgccucuccgucgaggcccaggcccaggucacccucaacggcgucuccaagcccgaggccguccucuuccccgucuccgacuggcacccccgcgaccagccccagaaggaggaggaccucggccccgccguccaccacgucuacgagcucaucaaccagggccccuccuccaucucccagggcguccucgagcucuccugcccccaggcccucgagggccagcagcuccucuacgucacccgcgucaccggccucaacugcaccaccaaccaccccaucaaccccaagggccucgagcucgaccccgagggcucccuccaccaccagcagaagcgcgaggcccccucccgcuccuccgccuccuccggcccccagauccucaagugccccgaggccgagugcuuccgccuccgcugcgagcucggcccccuccaccagcaggagucccagucccuccagcuccacuuccgcgucugggccaagaccuuccuccagcgcgagcaccagcccuucucccuccagugcgaggccgucuacaaggcccucaagaugcccuaccgcauccucccccgccagcucccccagaaggagcgccaggucgccaccgccguccaguggaccaaggccgagggcuccuacggcgucccccucuggaucaucauccucgccauccucuucggccuccuccuccucggccuccucaucuacauccucuacaagcucggcuucuucaagcgcucccuccccuacggcaccgccauggagaaggcccagcucaagccccccgccaccuccgacgccuga

SEQ ID NO: 1752 - RNA, 2397 nt, Artificial Sequence
  AAH20057 variant
augaaccuccagcccaucuucuggaucggccucaucuccuccgucugcugcgucuucgcccagaccgacgagaaccgcugccucaaggccaacgccaaguccugcggcgagugcauccaggccggccccaacugcggcuggugcaccaacuccaccuuccuccaggagggcaugcccaccuccgcccgcugcgacgaccucgaggcccucaagaagaagggcugcccccccgacgacaucgagaacccccgcggcuccaaggacaucaagaagaacaagaacgucaccaaccgcuccaagggcaccgccgagaagcucaagcccgaggacaucacccagauccagccccagcagcucguccuccgccuccgcuccggcgagccccagaccuucacccucaaguucaagcgcgccgaggacuaccccaucgaccucuacuaccucauggaccucuccuacuccaugaaggacgaccucgagaacgucaagucccucggcaccgaccucaugaacgagaugcgccgcaucaccuccgacuuccgcaucggcuucggcuccuucgucgagaagaccgucaugcccuacaucuccaccacccccgccaagcuccgcaaccccugcaccuccgagcagaacugcaccucccccuucuccuacaagaacguccucucccucaccaacaagggcgaggucuucaacgagcucgucggcaagcagcgcaucuccggcaaccucgacucccccgagggcggcuucgacgccaucaugcaggucgccgucugcggcucccucaucggcuggcgcaacgucacccgccuccucgucuucuccaccgacgccggcuuccacuucgccggcgacggcaagcucggcggcaucguccuccccaacgacggccagugccaccucgagaacaacauguacaccaugucccacuacuacgacuaccccuccaucgcccaccucguccagaagcucuccgagaacaacauccagaccaucuucgccgucaccgaggaguuccagcccgucuacaaggagcucaagaaccucauccccaaguccgccgucggcacccucuccgccaacuccuccaacgucauccagcucaucaucgacgccuacaacucccucuccuccgaggucauccucgagaacggcaagcucuccgagggcgucaccaucuccuacaaguccuacugcaagaacggcgucaacggcaccggcgagaacggccgcaagugcuccaacaucuccaucggcgacgagguccaguucgagaucuccaucaccuccaacaagugccccaagaaggacuccgacuccuucaagauccgcccccucggcuucaccgaggaggucgaggucauccuccaguacaucugcgagugcgagugccaguccgagggcauccccgagucccccaagugccacgagggcaacggcaccuucgagugcggcgccugccgcugcaacgagggccgcgucggccgccacugcgagugcuccaccgacgaggucaacuccgaggacauggacgccuacugccgcaaggagaacuccuccgagaucugcuccaacaacggcgagugcgucugcggccagugcgucugccgcaagcgcgacaacaccaacgagaucuacuccggcaaguucugcgagugcgacaacuucaacugcgaccgcuccaacggccucaucugcggcggcaacggcgucugcaagugccgcgucugcgagugcaaccccaacuacaccggcuccgccugcgacugcucccucgacaccuccaccugcgaggccuccaacggccagaucugcaacggccgcggcaucugcgagugcggcgucugcaagugcaccgaccccaaguuccagggccagaccugcgagaugugccagaccugccucggcgucugcgccgagcacaaggagugcguccagugccgcgccuucaacaagggcgagaagaaggacaccugcacccaggagugcuccuacuucaacaucaccaaggucgagucccgcgacaagcucccccagcccguccagcccgaccccgucucccacugcaaggagaaggacgucgacgacugcugguucuacuucaccuacuccgucaacggcaacaacgaggucaugguccacgucgucgagaaccccgagugccccaccggccccgacaucauccccaucgucgccggcgucgucgccggcaucguccucaucggccucgcccuccuccucaucuggaagcuccucaugaucauccacgaccgccgcgaguucgccaaguucgagaaggagaagaugaacgccaagugggacaccggcgagaaccccaucuacaaguccgccgucaccaccgucgucaaccccaaguacgagggcaaguga

SEQ ID NO: 1753 - RNA, 2367 nt, Artificial Sequence
  AAA36122 variant
augggcaucgagcuccucugccucuucuuccucuuccucggccgcaacgaccacguccagggcggcugcgcccucggcggcgccgagaccugcgaggacugccuccucaucggcccccagugcgccuggugcgcccaggagaacuucacccaccccuccggcgucggcgagcgcugcgacacccccgccaaccuccucgccaagggcugccagcucaacuucaucgagaaccccgucucccaggucgagauccucaagaacaagccccucuccgucggccgccagaagaacuccuccgacaucguccagaucgccccccagucccucauccucaagcuccgccccggcggcgcccagacccuccagguccacguccgccagaccgaggacuaccccgucgaccucuacuaccucauggaccucuccgccuccauggacgacgaccucaacaccaucaaggagcucggcucccgccucuccaaggagauguccaagcucaccuccaacuuccgccucggcuucggcuccuucgucgagaagcccgucucccccuucgucaagaccacccccgaggagaucgccaaccccugcuccuccauccccuacuucugccuccccaccuucggcuucaagcacauccucccccucaccaacgacgccgagcgcuucaacgagaucgucaagaaccagaagaucuccgccaacaucgacacccccgagggcggcuucgacgccaucaugcaggccgccgucugcaaggagaagaucggcuggcgcaacgacucccuccaccuccucgucuucgucuccgacgccgacucccacuucggcauggacuccaagcucgccggcaucgucauccccaacgacggccucugccaccucgacuccaagaacgaguacuccauguccaccguccucgaguaccccaccaucggccagcucaucgacaagcucguccagaacaacguccuccucaucuucgccgucacccaggagcagguccaccucuacgagaacuacgccaagcucauccccggcgccaccgucggccuccuccagaaggacuccggcaacauccuccagcucaucaucuccgccuacgaggagcuccgcuccgaggucgagcucgagguccucggcgacaccgagggccucaaccucuccuucaccgccaucugcaacaacggcacccucuuccagcaccagaagaagugcucccacaugaaggucggcgacaccgccuccuucuccgucaccgucaacaucccccacugcgagcgccgcucccgccacaucaucaucaagcccgucggccucggcgacgcccucgagcuccucgucucccccgagugcaacugcgacugccagaaggaggucgaggucaacuccuccaagugccaccacggcaacggcuccuuccagugcggcgucugcgccugccaccccggccacaugggcccccgcugcgagugcggcgaggacaugcucuccaccgacuccugcaaggaggcccccgaccaccccuccugcuccggccgcggcgacugcuacugcggccagugcaucugccaccucucccccuacggcaacaucuacggccccuacugccagugcgacaacuucuccugcguccgccacaagggccuccucugcggcggcaacggcgacugcgacugcggcgagugcgucugccgcuccggcuggaccggcgaguacugcaacugcaccaccuccaccgacuccugcgucuccgaggacggcguccucugcuccggccgcggcgacugcgucugcggcaagugcgucugcaccaaccccggcgccuccggccccaccugcgagcgcugccccaccugcggcgaccccugcaacuccaagcgcuccugcaucgagugccaccucuccgccgccggccaggcccgcgaggagugcgucgacaagugcaagcucgccggcgccaccaucuccgaggaggaggacuucuccaaggacggcuccgucuccugcucccuccagggcgagaacgagugccucaucaccuuccucaucaccaccgacaacgagggcaagaccaucauccacuccaucaacgagaaggacugccccaagccccccaacauccccaugaucaugcucggcgucucccucgccauccuccucaucggcgucguccuccucugcaucuggaagcuccucgucuccuuccacgaccgcaaggaggucgccaaguucgaggccgagcgcuccaaggccaaguggcagaccggcaccaacccccucuaccgcggcuccaccuccaccuucaagaacgucaccuacaagcaccgcgagaagcagaaggucgaccucuccaccgacugcuga

SEQ ID NO: 1754 - RNA, 786 nt, Artificial Sequence
  EAW71937 variant
augugggaccucguccucuccaucgcccucuccgucggcugcaccggcgccgucccccucauccagucccgcaucgucggcggcugggagugcgagaagcacucccagcccuggcaggucgccgucuacucccacggcugggcccacugcggcggcguccucguccacccccaguggguccucaccgccgcccacugccucaagaagaacucccaggucuggcucggccgccacaaccucuucgagcccgaggacaccggccagcgcguccccgucucccacuccuucccccacccccucuacaacaugucccuccucaagcaccagucccuccgccccgacgaggacuccucccacgaccucaugcuccuccgccucuccgagcccgccaagaucaccgacgucgucaagguccucggccuccccacccaggagcccgcccucggcaccaccugcuacgccuccggcuggggcuccaucgagcccgaggaguuccuccgcccccgcucccuccagugcgucucccuccaccuccucuccaacgacaugugcgcccgcgccuacuccgagaaggucaccgaguucaugcucugcgccggccucuggaccggcggcaaggacaccugcggcggcgacuccggcggcccccucgucugcaacggcguccuccagggcaucaccuccuggggccccgagcccugcgcccuccccgagaagcccgccgucuacaccaaggucguccacuaccgcaaguggaucaaggacaccaucgccgccaaccccuga

SEQ ID NO: 1755 - RNA, 672 nt, Artificial Sequence
  EAW71938 variant
augugggaccucguccucuccaucgcccucuccgucggcugcaccggcgccgucccccucauccagucccgcaucgucggcggcugggagugcgagaagcacucccagcccuggcaggucgccgucuacucccacggcugggcccacugcggcggcguccucguccacccccaguggguccucaccgccgcccacugccucaagaagaacucccaggucuggcucggccgccacaaccucuucgagcccgaggacaccggccagcgcguccccgucucccacuccuucccccacccccucuacaacaugucccuccucaagcaccagucccuccgccccgacgaggacuccucccacgaccucaugcuccuccgccucuccgagcccgccaagaucaccgacgucgucaagguccucggccuccccacccaggagcccgcccucggcaccaccugcuacgccuccggcuggggcuccaucgagcccgaggaguuccuccgcccccgcucccuccagugcgucucccuccaccuccucuccaacgacaugugcgcccgcgccuacuccgagaaggucaccgaguucaugcucugcgccggccucuggaccggcggcaaggacaccugcggcgucucccaccccuacucccagcaccucgagggcaagggcuga

SEQ ID NO: 1756 - RNA, 189 nt, Artificial Sequence
  BAF98781 variant
augucccuccucaagcaccagucccuccgccccgacgaggacuccucccacgaccucaugcuccuccgccucuccgagcccgccaagaucaccgacgucgucaagguccucggccuccccacccaggagcccgcccucggcaccaccugcuacgccuccggcuggggcuccaucgagcccgaggaguga

SEQ ID NO: 1757 - RNA, 735 nt, Artificial Sequence
  BAG62239 variant
augggcacccucuggggcugccccggcgccccccccgucggcgcccacuccugcccccuccccaaggaggucucccgcacccucggcuccggcgagggcauggccgucucccaccgcaacaacuccggcaugcucccccccggcucccuccuccgcaacucccaggucuggcucggccgccacaaccucuucgagcccgaggacaccggccgccgcguccccgucucccacuccuucccccacccccucuacaacaugucccuccucaagcaccagucccuccgccccgacgaggacuccucccacgaccucaugcuccuccgccucuccgagcccgccaagaucaccgacgucgucaagguccucggccuccccacccaggagcccgcccucggcaccaccugcuacgccuccggcuggggcuccaucgagcccgaggaguuccuccgcccccgcucccuccagugcgucucccuccaccuccucuccaacgacaugugcgcccgcgccuacuccgagaaggucaccgaguucaugcucugcgccggccucuggaccggcggcaaggacaccugcggcggcgacuccggcggcccccucgucugcaacggcguccuccagggcaucaccuccuggggccccgagcccugcgcccuccccgagaagcccgccgucuacaccaaggucguccacuaccgcaaguggaucaaggacaccaucgccgccaaccccuga

SEQ ID NO: 1758 - RNA, 786 nt, Artificial Sequence; identical to SEQ ID NO: 1754
  AAA74454 variant

SEQ ID NO: 1759 - RNA, 150 nt, Artificial Sequence
  AAR10469 variant
augugggaccucguccucuccaucgcccucuccgucggcugcaccggcaucgcccgcuccggcugggucggcaccaccugccucucccucaagacccaggcccgcggcucccucuccgccaccgccucccacacccgcuccaccaucuga

SEQ ID NO: 1760 - RNA, 543 nt, Artificial Sequence
  AAR10468 variant
augugggaccucguccucuccaucgcccucuccgucggcugcaccggcgccgucccccucauccagucccgcaucgucggcggcugggagugcgagaagcacucccagcccuggcaggucgccgucuacucccacggcugggcccacugcggcggcguccucguccacccccaguggguccucaccgccgcccacugccucaagaagaacucccaggucuggcucggccgccacaaccucuucgagcccgaggacaccggccagcgcguccccgucucccacuccuucccccacccccucuacaacaugucccuccucaagcaccagucccuccgccccgacgaggacuccucccacgaccucaugcuccuccgccucuccgagcccgccaagaucaccgacgucgucaagguccucggccuccccacccaggagcccgcccucggcaccaccugcuacgccuccggcuggggcuccaucgagcccgaggagugcacccccggccccgacggcgucgccggcucccccgacgccugggucuga

SEQ ID NO: 1761 - RNA, 765 nt, Artificial Sequence
  EAW71943 variant
auggccaccgccggcaaccccuggggcugguuccucggcuaccucauccucggcgucgccggcucccucgucuccggcuccugcucccagaucaucaacggcgaggacugcuccccccacucccagcccuggcaggccgcccucgucauggagaacgagcucuucugcuccggcguccucguccacccccaguggguccucuccgccgcccacugcuuccagaacuccuacaccaucggccucggccuccacucccucgaggccgaccaggagcccggcucccagauggucgaggccucccucuccguccgccaccccgaguacaaccgcccccuccucgccaacgaccucaugcucaucaagcucgacgaguccgucuccgaguccgacaccauccgcuccaucuccaucgccucccagugccccaccgccggcaacuccugccucgucuccggcuggggccuccucgccaacggccgcaugcccaccguccuccagugcgucaacgucuccgucgucuccgaggaggucugcuccaagcucuacgacccccucuaccaccccuccauguucugcgccggcggcggccaggaccagaaggacuccugcaacggcgacuccggcggcccccucaucugcaacggcuaccuccagggccucgucuccuucggcaaggcccccugcggccaggucggcguccccggcgucuacaccaaccucugcaaguucaccgaguggaucgagaagaccguccaggccuccuga

SEQ ID NO: 1762 - RNA, 228 nt, Artificial Sequence
  AAX30051 variant
auggccaccgccggcaaccccuggggcugguuccucggcuaccucauccucggcgucgccggcucccucgucuccggcuccugcucccagaucaucaacggcgaggacugcuccccccacucccagcccuggcaggccgcccucgucauggagaacgagcucuucugcuccggcguccucguccacccccaguggguccucuccgccgcccacugcuuccagaaguga

SEQ ID NO: 1763 - RNA, 588 nt, Artificial Sequence
  AAL14782 variant
auggccaccgccggcaaccccuggggcugguuccucggcuaccucauccucggcgucgccggcucccucgucuccggcuccugcucccagaucaucaacggcgaggacugcuccccccacucccagcccuggcaggccgcccucgucauggagaacgagcucuucugcuccggcguccucguccacccccaguggguccucuccgccgcccacugcuuccagaacuccuacaccaucggccucggccuccacucccucgaggccgaccaggagcccggcucccagauggucgaggccucccucuccguccgccaccccgaguacaaccgcccccuccucgccaacgaccucaugcucaucaagcucgacgaguccgucuccgaguccgacaccauccgcuccaucuccaucgccucccagugccccaccgccggcaacuccugccucgucuccggcuggggccuccucgccaacggcgagcucaccggcgucugccuccccuccucccgccgcuccuccgcccagucccgcggccucacccaguccuccgccucccaggccgagugccuccccugcugcuccgccuga

SEQ ID NO: 1764 - RNA, 480 nt, Artificial Sequence
  AAL14781 variant
auggccaccgccggcaaccccuggggcugguuccucggcuaccucauccucggcgucgccggcucccucgucuccggcuccugcucccagaucaucaacggcgaggacugcuccccccacucccagcccuggcaggccgcccucgucauggagaacgagcucuucugcuccggcguccucguccacccccaguggguccucuccgccgcccacugcuuccagaacuccuacaccaucggccucggccuccacucccucgaggccgaccaggagcccggcucccagauggucgaggccucccucuccguccgccaccccgaguacaaccgcccccuccucgccaacgaccucaugcucaucaagcucgacgaguccgucuccgaguccgacaccauccgcuccaucuccaucgccucccagugccccaccgccggcaacuccugccucgucuccggcuggggccuccucgccaacggcuga

SEQ ID NO: 1765 - RNA, 765 nt, Artificial Sequence
  AAD21580 variant
auggccaccgccggcaaccccuggggcugguuccucggcuaccucauccucggcgucgccggcucccucgucuccggcuccugcucccagaucaucaacggcgaggacugcuccccccacucccagcccuggcaggccgcccucgucauggagaacgagcucuucugcuccggcguccucguccacccccaguggguccucuccgccgcccacugcuuccagaacuccuacaccaucggccucggccuccacucccucgaggccgaccaggagcccggcucccagauggucgaggccucccucuccguccgccaccccgaguacaaccgcccccuccucgccaacgaccucaugcucaucaagcucgacgaguccgucuccgaguccgacaccauccgcuccaucuccaucgccucccagugccccaccgccggcaacuccugccucgucuccggcuggggccuccucgccaacggccgcaugcccaccguccuccagugcgucaacgucuccgucgucuccgaggaggucugcuccaagcucuacgacccccucuaccaccccuccauguucugcgccggcggcggccacgaccagaaggacuccugcaacggcgacuccggcggcccccucaucugcaacggcuaccuccagggccucgucuccuucggcaaggcccccugcggccaggucggcguccccggcgucuacaccaaccucugcaaguucaccgaguggaucgagaagaccguccaggccuccuga

SEQ ID NO: 1766 - RNA, 2673 nt, Artificial Sequence
  AAC83230 variant
augucccagggcauccucuccccccccgccggccuccucuccgacgacgacgucgucgucucccccauguucgaguccaccgccgccgaccucggcuccgucguccgcaagaaccuccucuccgacugcuccgucgucuccaccucccucgaggacaagcagcagguccccuccgaggacuccauggagaaggucaaggucuaccuccgcguccgcccccuccuccccuccgagcucgagcgccaggaggaccagggcugcguccgcaucgagaacgucgagacccucguccuccaggcccccaaggacuccuucgcccucaaguccaacgagcgcggcaucggccaggccacccaccgcuucaccuucucccagaucuucggccccgaggucggccaggccuccuucuucaaccucaccgucaaggagauggucaaggacguccucaagggccagaacuggcucaucuacaccuacggcgucaccaacuccggcaagacccacaccauccagggcaccaucaaggacggcggcauccucccccgcucccucgcccucaucuucaacucccuccagggccagcuccaccccacccccgaccucaagccccuccucuccaacgaggucaucuggcucgacuccaagcagauccgccaggaggagaugaagaagcucucccuccucaacggcggccuccaggaggaggagcucuccaccucccucaagcgcuccgucuacaucgagucccgcaucggcaccuccaccuccuucgacuccggcaucgccggccucuccuccaucucccagugcaccuccuccucccagcucgacgagaccucccaccgcugggcccagcccgacaccgccccccuccccguccccgccaacauccgcuucuccaucuggaucuccuucuucgagaucuacaacgagcuccucuacgaccuccucgagccccccucccagcagcgcaagcgccagacccuccgccucugcgaggaccagaacggcaaccccuacgucaaggaccucaacuggauccacguccaggacgccgaggaggccuggaagcuccucaaggucggccgcaagaaccaguccuucgccuccacccaccucaaccagaacuccucccgcucccacuccaucuucuccauccgcauccuccaccuccagggcgagggcgacaucguccccaagaucuccgagcucucccucugcgaccucgccggcuccgagcgcugcaaggaccagaaguccggcgagcgccucaaggaggccggcaacaucaacaccucccuccacacccucggccgcugcaucgccgcccuccgccagaaccagcagaaccgcuccaagcagaaccucguccccuuccgcgacuccaagcucacccgcgucuuccagggcuucuucaccggccgcggccgcuccugcaugaucgucaacgucaaccccugcgccuccaccuacgacgagacccuccacgucgccaaguucuccgccaucgccucccagcucguccacgccccccccaugcagcucggcuuccccucccuccacuccuucaucaaggagcacucccuccaggucucccccucccucgagaagggcgccaaggccgacaccggccucgacgacgacaucgagaacgaggccgacaucuccauguacggcaaggaggagcuccuccaggucgucgaggccaugaagacccuccuccucaaggagcgccaggagaagcuccagcucgagaugcaccuccgcgacgagaucugcaacgagauggucgagcagaugcagcagcgcgagcaguggugcuccgagcaccucgacacccagaaggagcuccucgaggagauguacgaggagaagcucaacauccucaaggagucccucaccuccuucuaccaggaggagauccaggagcgcgacgagaagaucgaggagcucgaggcccuccuccaggaggcccgccagcaguccgucgcccaccagcaguccggcuccgagcucgcccuccgccgcucccagcgccucgccgccuccgccuccacccagcagcuccaggaggucaaggccaagcuccagcagugcaaggccgagcucaacuccaccaccgaggagcuccacaaguaccagaagaugcucgagcccccccccuccgccaagcccuucaccaucgacgucgacaagaagcucgaggagggccagaagaacauccgccuccuccgcaccgagcuccagaagcucggcgagucccuccaguccgccgagcgcgccugcugccacuccaccggcgccggcaagcuccgccaggcccucaccaccugcgacgacauccucaucaagcaggaccagacccucgccgagcuccagaacaacaugguccucgucaagcucgaccuccgcaagaaggccgccugcaucgccgagcaguaccacaccguccucaagcuccagggccaggucuccgccaagaagcgccucggcaccaaccaggagaaccagcagcccaaccagcagccccccggcaagaagcccuuccuccgcaaccuccucccccgcacccccaccugccaguccuccaccgacugcucccccuacgcccgcauccuccgcucccgccgcuccccccuccucaaguccggccccuucggcaagaaguacuga

SEQ ID NO: 1767 - RNA, 1113 nt, Artificial Sequence
  AAH34621 variant
auggccaucacccucgaggaggcccccuggcucggcuggcuccucgucaaggcccucaugcgcuucgccuucauggucgucaacaaccucgucgccauccccuccuacaucugcuacgucaucauccuccagccccuccgcguccucgacuccaagcgcuucugguacaucgagggcaucauguacaaguggcuccucggcauggucgccuccuggggcugguacgccggcuacaccgucauggaguggggcgaggacaucaaggccgucuccaaggacgaggccgucaugcucgucaaccaccaggccaccggcgacgucugcacccucaugaugugccuccaggacaagggccucgucgucgcccagaugauguggcucauggaccacaucuucaaguacaccaacuucggcaucgucucccucguccacggcgacuucuucauccgccagggccgcuccuaccgcgaccagcagcuccuccuccucaagaagcaccucgagaacaacuaccgcucccgcgaccgcaaguggaucguccucuuccccgagggcggcuuccuccgcaagcgccgcgagaccucccaggccuucgccaagaagaacaaccuccccuuccucaccaacgucacccucccccgcuccggcgccaccaagaucauccucaacgcccucgucgcccagcagaagaacggcucccccgccggcggcgacgccaaggagcucgacuccaaguccaagggccuccaguggaucaucgacaccaccaucgccuaccccaaggccgagcccaucgacauccagaccuggauccucggcuaccgcaagcccaccgucacccacguccacuaccgcaucuuccccaucaaggacgucccccucgagaccgacgaccucaccaccuggcucuaccagcgcuucgucgagaaggaggaccuccucucccacuucuacgagaccggcgccuucccccccuccaagggccacaaggaggccgucucccgcgagaugacccucuccaaccucuggaucuuccucauccaguccuucgccuuccucuccggcuacaugugguacaacaucauccaguacuucuaccacugccucuucuga

SEQ ID NO: 1768 - RNA, 2178 nt, Artificial Sequence
  AAH14924 variant
auggccauggacuccucccuccaggcccgccucuuccccggccucgccaucaagauccagcgcuccaacggccucauccacuccgccaacguccgcaccgucaaccucgagaaguccugcgucuccgucgagugggccgagggcggcgccaccaagggcaaggagaucgacuucgacgacgucgccgccaucaaccccgagcuccuccagcuccucccccuccaccccaaggacaaccucccccuccaggagaacgucaccauccagaagcagaagcgccgcuccgucaacuccaagauccccgcccccaaggagucccuccgcucccgcuccacccgcauguccaccgucuccgagcuccgcaucaccgcccaggagaacgacauggaggucgagcuccccgccgccgccaacucccgcaagcaguucuccgucccccccgcccccacccgccccuccugccccgccgucgccgagaucccccuccgcauggucuccgaggagauggaggagcagguccacuccauccgcggcuccuccuccgccaaccccgucaacuccguccgccgcaaguccugccucgucaaggaggucgagaagaugaagaacaagcgcgaggagaagaaggcccagaacuccgagaugcgcaugaagcgcgcccaggaguacgacuccuccuuccccaacugggaguucgcccgcaugaucaaggaguuccgcgccacccucgagugccacccccucaccaugaccgaccccaucgaggagcaccgcaucugcgucugcguccgcaagcgcccccucaacaagcaggagcucgccaagaaggagaucgacgucaucuccauccccuccaagugccuccuccucguccacgagcccaagcucaaggucgaccucaccaaguaccucgagaaccaggccuucugcuucgacuucgccuucgacgagaccgccuccaacgaggucgucuaccgcuucaccgcccgcccccucguccagaccaucuucgagggcggcaaggccaccugcuucgccuacggccagaccggcuccggcaagacccacaccaugggcggcgaccucuccggcaaggcccagaacgccuccaagggcaucuacgccauggccucccgcgacgucuuccuccucaagaaccagcccugcuaccgcaagcucggccucgaggucuacgucaccuucuucgagaucuacaacggcaagcucuucgaccuccucaacaagaaggccaagcuccgcguccucgaggacggcaagcagcagguccaggucgucggccuccaggagcaccucgucaacuccgccgacgacgucaucaagaugaucgacaugggcuccgccugccgcaccuccggccagaccuucgccaacuccaacuccucccgcucccacgccugcuuccagaucauccuccgcgccaagggccgcaugcacggcaaguucucccucgucgaccucgccggcaacgagcgcggcgccgacaccuccuccgccgaccgccagacccgcauggagggcgccgagaucaacaagucccuccucgcccucaaggagugcauccgcgcccucggccagaacaaggcccacacccccuuccgcgaguccaagcucacccagguccuccgcgacuccuucaucggcgagaacucccgcaccugcaugaucgccaccaucucccccggcaucuccuccugcgaguacacccucaacacccuccgcuacgccgaccgcgucaaggagcucuccccccacuccggccccuccggcgagcagcucauccagauggagaccgaggagauggaggccugcuccaacggcgcccucauccccggcaaccucuccaaggaggaggaggagcucuccucccagauguccuccuucaacgaggccaugacccagauccgcgagcucgaggagaaggccauggaggagcucaaggagaucauccagcagggccccgacuggcucgagcucuccgagaugaccgagcagcccgacuacgaccucgagaccuucgucaacaaggccgaguccgcccucgcccagcaggccaagcacuucuccgcccuccgcgacgucaucaaggcccuccgccucgccaugcagcucgaggagcaggccucccgccagaucuccuccaagaagcgcccccaguga

SEQ ID NO: 1769 - RNA, 342 nt, Artificial Sequence
  AAH62223 variant
augaacuucuaccuccuccucgccuccuccauccucugcgcccucaucgucuucuggaaguaccgccgcuuccagcgcaacaccggcgagauguccuccaacuccaccgcccucgcccucguccgccccuccuccuccggccucaucaacuccaacaccgacaacaaccucgccgucuacgaccucucccgcgacauccucaacaacuucccccacuccaucgcccgccagaagcgcauccucgucaaccucuccauggucgagaacaagcucgucgagcucgagcacacccuccucuccaagggcuuccgcggcgccuccccccaccgcaaguccaccuga

SEQ ID NO: 1770 - RNA, 2583 nt, Artificial Sequence
  AAA56833 variant
augggccccuggggcuggaagcuccgcuggaccgucgcccuccuccucgccgccgccggcaccgccgucggcgaccgcugcgagcgcaacgaguuccagugccaggacggcaagugcaucuccuacaagugggucugcgacggcuccgccgagugccaggacggcuccgacgagucccaggagaccugccucuccgucaccugcaaguccggcgacuucuccugcggcggccgcgucaaccgcugcaucccccaguucuggcgcugcgacggccaggucgacugcgacaacggcuccgacgagcagggcugcccccccaagaccugcucccaggacgaguuccgcugccacgacggcaagugcaucucccgccaguucgucugcgacuccgaccgcgacugccucgacggcuccgacgaggccuccugccccguccucaccugcggccccgccuccuuccagugcaacuccuccaccugcaucccccagcucugggccugcgacaacgaccccgacugcgaggacggcuccgacgaguggccccagcgcugccgcggccucuacgucuuccagggcgacuccucccccugcuccgccuucgaguuccacugccucuccggcgagugcauccacuccuccuggcgcugcgacggcggccccgacugcaaggacaaguccgacgaggagaacugcgccgucgccaccugccgccccgacgaguuccagugcuccgacggcaacugcauccacggcucccgccagugcgaccgcgaguacgacugcaaggacauguccgacgaggucggcugcgucaacgucacccucugcgagggccccaacaaguucaagugccacuccggcgagugcaucacccucgacaaggucugcaacauggcccgcgacugccgcgacugguccgacgagcccaucaaggagugcggcaccaacgagugccucgacaacaacggcggcugcucccacgucugcaacgaccucaagaucggcuacgagugccucugccccgacggcuuccagcucgucgcccagcgccgcugcgaggacaucgacgagugccaggaccccgacaccugcucccagcucugcgucaaccucgagggcggcuacaagugccagugcgaggagggcuuccagcucgacccccacaccaaggccugcaaggccgucggcuccaucgccuaccucuucuucaccaaccgccacgagguccgcaagaugacccucgaccgcuccgaguacaccucccucauccccaaccuccgcaacgucgucgcccucgacaccgaggucgccuccaaccgcaucuacugguccgaccucucccagcgcaugaucugcuccacccagcucgaccgcgcccacggcgucuccuccuacgacaccgucaucucccgcgacauccaggcccccgacggccucgccgucgacuggauccacuccaacaucuacuggaccgacuccguccucggcaccgucuccgucgccgacaccaagggcgucaagcgcaagacccucuuccgcgagaacggcuccaagccccgcgccaucgucgucgaccccguccacggcuucauguacuggaccgacuggggcacccccgccaagaucaagaagggcggccucaacggcgucgacaucuacucccucgucaccgagaacauccaguggcccaacggcaucacccucgaccuccucuccggccgccucuacugggucgacuccaagcuccacuccaucuccuccaucgacgucaacggcggcaaccgcaagaccauccucgaggacgagaagcgccucgcccaccccuucucccucgccgucuucgaggacaaggucuucuggaccgacaucaucaacgaggccaucuucuccgccaaccgccucaccggcuccgacgucaaccuccucgccgagaaccuccucucccccgaggacaugguccucuuccacaaccucacccagccccgcggcgucaacuggugcgagcgcaccacccucuccaacggcggcugccaguaccucugccuccccgccccccagaucaacccccacucccccaaguucaccugcgccugccccgacggcaugcuccucgcccgcgacaugcgcuccugccucaccgaggccgaggccgccgucgccacccaggagaccuccaccguccgccucaaggucuccuccaccgccguccgcacccagcacaccaccacccgccccguccccgacaccucccgccuccccggcgccacccccggccucaccaccgucgagaucgucaccaugucccaccaggcccucggcgacgucgccggccgcggcaacgagaagaagcccuccuccguccgcgcccucuccaucguccuccccaucguccuccucgucuuccucugccucggcgucuuccuccucuggaagaacuggcgccucaagaacaucaacuccaucaacuucgacaaccccgucuaccagaagaccaccgaggacgagguccacaucugccacaaccaggacggcuacuccuaccccucccgccagauggucucccucgaggacgacgucgccuga

SEQ ID NO: 1771 - RNA, 1302 nt, Artificial Sequence
  CAA70989 variant
auggucuggaaggucgccgucuuccucuccgucgcccucggcaucggcgccguccccaucgacgaccccgaggacggcggcaagcacugggucgucaucgucgccggcuccaacggcugguacaacuaccgccaccaggccgacgccugccacgccuaccagaucauccaccgcaacggcauccccgacgagcagaucgucgucaugauguacgacgacaucgccuacuccgaggacaaccccacccccggcaucgucaucaaccgccccaacggcaccgacgucuaccagggcguccccaaggacuacaccggcgaggacgucaccccccagaacuuccucgccguccuccgcggcgacgccgaggccgucaagggcaucggcuccggcaagguccucaaguccggcccccaggaccacgucuucaucuacuucaccgaccacggcuccaccggcauccucgucuuccccaacgaggaccuccacgucaaggaccucaacgagaccauccacuacauguacaagcacaagauguaccgcaagauggucuucuacaucgaggccugcgaguccggcuccaugaugaaccaccuccccgacaacaucaacgucuacgccaccaccgccgccaacccccgcgaguccuccuacgccugcuacuacgacgagaagcgcuccaccuaccucggcgacugguacuccgucaacuggauggaggacuccgacgucgaggaccucaccaaggagacccuccacaagcaguaccaccucgucaagucccacaccaacaccucccacgucaugcaguacggcaacaagaccaucuccaccaugaaggucaugcaguuccagggcaugaagcgcaaggccuccucccccgucccccucccccccgucacccaccucgaccucacccccucccccgacgucccccucaccaucaugaagcgcaagcucaugaacaccaacgaccucgaggagucccgccagcucaccgaggagauccagcgccaccucgacgcccgccaccucaucgagaaguccguccgcaagaucgucucccuccucgccgccuccgaggccgaggucgagcagcuccucuccgagcgcgccccccucaccggccacuccugcuaccccgaggcccuccuccacuuccgcacccacugcuucaacuggcacucccccaccuacgaguacgcccuccgccaccucuacguccucgucaaccucugcgagaagcccuacccccuccaccgcaucaagcucuccauggaccacgucugccucggccacuacuga

SEQ ID NO: 1772 - RNA, 1797 nt, Artificial Sequence
  AAL36991 variant
augacccccaucgucaccguccucaucugccucggccucucccucggcccccgcacccacguccagaccggcaccauccccaagcccacccucugggccgagcccgacuccgucaucacccagggcucccccgucacccucuccugccagggcucccucgaggcccaggaguaccgccucuaccgcgagaagaaguccgccuccuggaucacccgcauccgccccgagcucgucaagaacggccaguuccacauccccuccaucaccugggagcacaccggccgcuacggcugccaguacuacucccgcgcccgcugguccgagcucuccgacccccucguccucgucaugaccggcgccuaccccaagcccacccucuccgcccagcccucccccgucgucaccuccggcggccgcgucacccuccagugcgagucccaggucgccuucggcggcuucauccucugcaaggagggcgaggaggagcacccccagugccucaacucccagccccacgcccgcggcuccucccgcgccaucuucuccgucggccccgucucccccaaccgccgcuggucccaccgcugcuacggcuacgaccucaacucccccuacgucugguccucccccuccgaccuccucgagcuccucguccccggcgucuccaagaagcccucccucuccguccagcccggccccgucgucgcccccggcgagucccucacccuccagugcgucuccgacgucggcuacgaccgcuucguccucuacaaggagggcgagcgcgaccuccgccagcuccccggccgccagccccaggccggccucucccaggccaacuucacccucggccccgucucccgcuccuacggcggccaguaccgcugcuacggcgcccacaaccucuccuccgagugcuccgcccccuccgacccccucgacauccucaucaccggccagauccgcggcacccccuucaucuccguccagcccggccccaccgucgccuccggcgagaacgucacccuccucugccaguccuggcgccaguuccacaccuuccuccucaccaaggccggcgccgccgacgccccccuccgccuccgcuccauccacgaguaccccaaguaccaggccgaguuccccaugucccccgucaccuccgcccacgccggcaccuaccgcugcuacggcucccucaacuccgaccccuaccuccucucccaccccuccgagccccucgagcucgucgucuccggccccuccaugggcuccucccccccccccaccggccccaucuccacccccgccggccccgaggaccagccccucacccccaccggcuccgacccccaguccggccucggccgccaccucggcgucgucaucggcauccucgucgccgucguccuccuccuccuccuccuccuccuccucuuccucauccuccgccaccgccgccagggcaagcacuggaccuccacccagcgcaaggccgacuuccagcaccccgccggcgccgucggccccgagcccaccgaccgcggccuccaguggcgcuccucccccgccgccgacgcccaggaggagaaccucuacgccgccgucaaggacacccagcccgaggacggcgucgagauggacacccgcgccgccgccuccgaggccccccaggacgucaccuacgcccagcuccacucccucacccuccgccgcaaggccaccgagcccccccccucccaggagcgcgagccccccgccgagcccuccaucuacgccacccucgccauccacuga

SEQ ID NO: 1773 - RNA, 498 nt, Artificial Sequence
  CCDS6385.2 variant
auggcccuccucgcccuccuccucgucgucgcccucccccgcgucuggaccgacgccaaccucaccgcccgccagcgcgaccccgaggacucccagcgcaccgacgagggcgacaaccgcgucuggugccacgucugcgagcgcgagaacaccuucgagugccagaacccccgccgcugcaaguggaccgagcccuacugcgucaucgccgccgucaagaucuucccccgcuucuucauggucgccaagcagugcuccgccggcugcgccgccauggagcgccccaagcccgaggagaagcgcuuccuccucgaggagcccaugcccuucuucuaccucaagugcugcaagauccgcuacugcaaccucgagggcccccccaucaacuccuccgucuucaaggaguacgccggcuccaugggcgaguccugcggcggccucuggcucgccauccuccuccuccucgccuccaucgccgccggccucucccucuccuga

SEQ ID NO: 1774 - RNA, 375 nt, Artificial Sequence
  AAA68873 variant
augucccucgagcagaagucccagcacugcaagcccgaggagggccucgacacccaggaggaggcccucggccucgucggcguccaggccgccaccaccgaggagcaggaggccgucuccuccuccuccccccucguccccggcacccucggcgagguccccgccgccggcucccccggcccccucaaguccccccagggcgccuccgccauccccaccgccaucgacuucacccucuggcgccaguccaucaagggcuccuccaaccaggaggaggagggccccuccaccucccccgaccccgaguccgucuuccgcgccgcccucuccaagaaggucgccgaccucauccacuuccuccuccucaaguacuga

SEQ ID NO: 1775 - RNA, 957 nt, Artificial Sequence
  AAH02455 variant
augcuccucggccagaagucccagcgcuacaaggccgaggagggccuccaggcccagggcgaggcccccggccucauggacguccagauccccaccgccgaggagcagaaggccgccuccuccuccuccacccucaucaugggcacccucgaggaggucaccgacuccggcucccccucccccccccagucccccgagggcgccuccuccucccucaccgucaccgacuccacccucuggucccaguccgacgagggcuccuccuccaacgaggaggagggccccuccaccucccccgaccccgcccaccucgagucccucuuccgcgaggcccucgacgagaaggucgccgagcucguccgcuuccuccuccgcaaguaccagaucaaggagcccgucaccaaggccgagaugcucgaguccgucaucaagaacuacaagaaccacuuccccgacaucuucuccaaggccuccgagugcaugcaggucaucuucggcaucgacgucaaggaggucgaccccgccggccacuccuacauccucgucaccugccucggccucuccuacgacggccuccucggcgacgaccaguccacccccaagaccggccuccucaucaucguccucggcaugauccucauggagggcucccgcgcccccgaggaggccaucugggaggcccucuccgucaugggccucuacgacggccgcgagcacuccgucuacuggaagcuccgcaagcuccucacccaggaguggguccaggagaacuaccucgaguaccgccaggcccccggcuccgaccccguccgcuacgaguuccucuggggcccccgcgcccucgccgagaccuccuacgucaagguccucgagcacgucguccgcgucaacgcccgcguccgcaucuccuaccccucccuccacgaggaggcccucggcgaggagaagggcgucuga

SEQ ID NO: 1776 - RNA, 1290 nt, Artificial Sequence
  AAH04479 variant
auggagacccaguuccgccgcggcggccucggcugcucccccgccuccaucaagcgcaagaagaagcgcgaggacuccggcgacuucggccuccaggucuccaccauguucuccgaggacgacuuccaguccaccgagcgcgcccccuacggcccccagcuccaguggucccaggaccucccccgcguccaggucuuccgcgagcaggccaaccucgaggaccgcuccccccgccgcacccagcgcaucaccggcggcgagcagguccucuggggccccaucacccagaucuuccccaccguccgccccgccgaccucacccgcgucaucaugccccucgagcagcgcucccagcacugcaagcccgaggagggccuccaggcccaggaggaggaccucggccucgucggcgcccaggcccuccaggccgaggagcaggaggccgccuucuucuccuccacccucaacgucggcacccucgaggagcuccccgccgccgagucccccucccccccccaguccccccaggaggaguccuucucccccaccgccauggacgccaucuucggcucccucuccgacgagggcuccggcucccaggagaaggagggccccuccaccucccccgaccucaucgaccccgaguccuucucccaggacauccuccacgacaagaucaucgaccucguccaccuccuccuccgcaaguaccgcgucaagggccucaucaccaaggccgagaugcucggcuccgucaucaagaacuacgaggacuacuuccccgagaucuuccgcgaggccuccgucugcaugcagcuccucuucggcaucgacgucaaggaggucgaccccaccucccacuccuacguccucgucaccucccucaaccucuccuacgacggcauccagugcaacgagcaguccaugcccaaguccggccuccucaucaucguccucggcgucaucuucauggagggcaacugcauccccgaggaggucaugugggagguccucuccaucaugggcgucuacgccggccgcgagcacuuccucuucggcgagcccaagcgccuccucacccagaacuggguccaggagaaguaccucgucuaccgccagguccccggcaccgaccccgccugcuacgaguuccucuggggcccccgcgcccacgccgagaccuccaagaugaagguccucgaguacaucgccaacgccaacggccgcgaccccaccuccuaccccucccucuacgaggacgcccuccgcgaggagggcgagggcgucuga

SEQ ID NO: 1777 - RNA, 1110 nt, Artificial Sequence
  EAW99421 variant
augccccgcgcccccaagcgccagcgcugcaugcccgaggaggaccuccagucccaguccgagacccagggccucgagggcgcccaggccccccucgccgucgaggaggacgccuccuccuccaccuccaccuccuccuccuuccccuccuccuuccccuccuccuccuccuccuccuccuccuccugcuacccccucauccccuccacccccgaggaggucuccgccgacgacgagacccccaaccccccccaguccgcccagaucgccugcuccucccccuccgucgucgccucccucccccucgaccaguccgacgagggcuccuccucccagaaggaggagucccccuccacccuccagguccuccccgacuccgagucccucccccgcuccgagaucgacgagaaggucaccgaccucguccaguuccuccucuucaaguaccagaugaaggagcccaucaccaaggccgagauccucgaguccgucaucaagaacuacgaggaccacuucccccuccucuucuccgaggccuccgagugcaugcuccucgucuucggcaucgacgucaaggaggucgaccccaccggccacuccuucguccucgucaccucccucggccucaccuacgacggcaugcucuccgacguccaguccaugcccaagaccggcauccucauccucauccucuccaucaucuucaucgagggcuacugcacccccgaggaggucaucugggaggcccucaacaugaugggccucuacgacggcauggagcaccucaucuacggcgagccccgcaagcuccucacccaggacuggguccaggagaacuaccucgaguaccgccagguccccggcuccgaccccgcccgcuacgaguuccucuggggcccccgcgcccacgccgagauccgcaagaugucccuccucaaguuccucgccaaggucaacggcuccgacccccgcuccuucccccucugguacgaggaggcccucaaggacgaggaggagcgcgcccaggaccgcaucgccaccaccgacgacaccaccgccauggccuccgccuccuccuccgccaccggcuccuucuccuaccccgaguga

SEQ ID NO: 1778 - RNA, 945 nt, Artificial Sequence
  AAH03408 variant
augccccucgagcagcgcucccagcacugcaagcccgaggagggccucgaggcccagggcgaggcccucggccucgucggcgcccaggcccccgccaccgaggagcaggagaccgccuccuccuccuccacccucgucgaggucacccuccgcgagguccccgccgccgagucccccucccccccccacuccccccagggcgccuccacccuccccaccaccaucaacuacacccucuggucccaguccgacgagggcuccuccaacgaggagcaggagggccccuccaccuuccccgaccucgagaccuccuuccaggucgcccucucccgcaagauggccgagcucguccacuuccuccuccucaaguaccgcgcccgcgagcccuucaccaaggccgagaugcucggcuccgucauccgcaacuuccaggacuucuuccccgucaucuucuccaaggccuccgaguaccuccagcucgucuucggcaucgaggucgucgaggucguccgcaucggccaccucuacauccucgucaccugccucggccucuccuacgacggccuccucggcgacaaccagaucguccccaagaccggccuccucaucaucguccucgccaucaucgccaaggagggcgacugcgcccccgaggagaagaucugggaggagcucuccguccucgaggccuccgacggccgcgaggacuccgucuucgcccacccccgcaagcuccucacccaggaccucguccaggagaacuaccucgaguaccgccagguccccggcuccgaccccgccugcuacgaguuccucuggggcccccgcgcccucgucgagaccuccuacgucaagguccuccaccaccuccucaagaucuccggcggcccccacaucuccuaccccccccuccacgagugggccuuccgcgagggcgaggaguga

SEQ ID NO: 1779 - RNA, 930 nt, Artificial Sequence
  AAA03229 variant
augucccucgagcagcgcucccuccacugcaagcccgaggaggcccucgaggcccagcaggaggcccucggccucgucugcguccaggccgccaccuccuccuccuccccccucguccucggcacccucgaggagguccccaccgccggcuccaccgaccccccccaguccccccagggcgccuccgccuuccccaccaccaucaacuucacccgccagcgccagcccuccgagggcuccuccucccgcgaggaggagggccccuccaccuccugcauccucgagucccucuuccgcgccgucaucaccaagaaggucgccgaccucgucggcuuccuccuccucaaguaccgcgcccgcgagcccgucaccaaggccgagaugcucgaguccgucaucaagaacuacaagcacugcuuccccgagaucuucggcaaggccuccgagucccuccagcucgucuucggcaucgacgucaaggaggccgaccccaccggccacuccuacguccucgucaccugccucggccucuccuacgacggccuccucggcgacaaccagaucaugcccaagaccggcuuccucaucaucguccucgucaugaucgccauggagggcggccacgcccccgaggaggagaucugggaggagcucuccgucauggaggucuacgacggccgcgagcacuccgccuacggcgagccccgcaagcuccucacccaggaccucguccaggagaaguaccucgaguaccgccagguccccgacuccgaccccgcccgcuacgaguuccucuggggcccccgcgcccucgccgagaccuccuacgucaagguccucgaguacgucaucaaggucuccgcccgcguccgcuucuucuuccccucccuccgcgaggccgcccuccgcgaggaggaggagggcgucuga

SEQ ID NO: 1780 - RNA, 945 nt, Artificial Sequence
  AAA17729 variant
augccccucgagcagcgcucccagcacugcaagcccgaggagggccucgaggcccgcggcgaggcccucggccucgucggcgcccaggcccccgccaccgaggagcagcagaccgccuccuccuccuccacccucgucgaggucacccucggcgagguccccgccgccgacucccccucccccccccacuccccccagggcgccuccuccuucuccaccaccaucaacuacacccucuggcgccaguccgacgagggcuccuccaaccaggaggaggagggcccccgcauguuccccgaccucgaguccgaguuccaggccgccaucucccgcaagauggucgagcucguccacuuccuccuccucaaguaccgcgcccgcgagcccgucaccaaggccgagaugcucgaguccguccuccgcaacugccaggacuucuuccccgucaucuucuccaaggccuccgaguaccuccagcucgucuucggcaucgaggucgucgaggucguccccaucucccaccucuacauccucgucaccugccucggccucuccuacgacggccuccucggcgacaaccaggucaugcccaagaccggccuccucaucaucguccucgccaucaucgccaucgagggcgacugcgcccccgaggagaagaucugggaggagcucuccaugcucgaggucuucgagggccgcgaggacuccgucuucgcccacccccgcaagcuccucaugcaggaccucguccaggagaacuaccucgaguaccgccagguccccggcuccgaccccgccugcuacgaguuccucuggggcccccgcgcccucaucgagaccuccuacgucaagguccuccaccacacccucaagaucggcggcgagccccacaucuccuaccccccccuccacgagcgcgcccuccgcgagggcgaggaguga

SEQ ID NO: 1781 - RNA, 945 nt, Artificial Sequence
  AAA17446 variant
augccccucgagcagcgcucccagcacugcaagcccgaggagggccucgaggcccgcggcgaggcccucggccucgucggcgcccaggcccccgccaccgaggagcaggaggccgccuccuccuccuccacccucgucgaggucacccucggcgagguccccgccgccgagucccccgaccccccccaguccccccagggcgccuccucccuccccaccaccaugaacuacccccucuggucccaguccuacgaggacuccuccaaccaggaggaggagggccccuccaccuuccccgaccucgaguccgaguuccaggccgcccucucccgcaaggucgccgagcucguccacuuccuccuccucaaguaccgcgcccgcgagcccgucaccaaggccgagaugcucggcuccgucgucggcaacuggcaguacuucuuccccgucaucuucuccaaggccuccuccucccuccagcucgucuucggcaucgagcucauggaggucgaccccaucggccaccucuacaucuucgccaccugccucggccucuccuacgacggccuccucggcgacaaccagaucaugcccaaggccggccuccucaucaucguccucgccaucaucgcccgcgagggcgacugcgcccccgaggagaagaucugggaggagcucuccguccucgaggucuucgagggccgcgaggacuccauccucggcgaccccaagaagcuccucacccagcacuucguccaggagaacuaccucgaguaccgccagguccccggcuccgaccccgccugcuacgaguuccucuggggcccccgcgcccucgucgagaccuccuacgucaagguccuccaccacauggucaagaucuccggcggcccccacaucuccuaccccccccuccacgaguggguccuccgcgagggcgaggaguga

SEQ ID NO: 1782 - RNA, 954 nt, Artificial Sequence
  EAW99410 variant
auguccuccgagcagaagucccagcacugcaagcccgaggagggcgucgaggcccaggaggaggcccucggccucgucggcgcccaggcccccaccaccgaggagcaggaggccgccgucuccuccuccuccccccucguccccggcacccucgaggagguccccgccgccgaguccgccggccccccccaguccccccagggcgccuccgcccuccccaccaccaucuccuucaccugcuggcgccagcccaacgagggcuccuccucccaggaggaggagggccccuccaccucccccgacgccgagucccucuuccgcgaggcccucuccaacaaggucgacgagcucgcccacuuccuccuccgcaaguaccgcgccaaggagcucgucaccaaggccgagaugcucgagcgcgucaucaagaacuacaagcgcugcuuccccgucaucuucggcaaggccuccgagucccucaagaugaucuucggcaucgacgucaaggaggucgaccccgccuccaacaccuacacccucgucaccugccucggccucuccuacgacggccuccucggcaacaaccagaucuuccccaagaccggccuccucaucaucguccucggcaccaucgccauggagggcgacuccgccuccgaggaggagaucugggaggagcucggcgucaugggcgucuacgacggccgcgagcacaccgucuacggcgagccccgcaagcuccucacccaggacuggguccaggagaacuaccucgaguaccgccagguccccggcuccaaccccgcccgcuacgaguuccucuggggcccccgcgcccucgccgagaccuccuacgucaagguccucgagcacgucguccgcgucaacgcccgcguccgcaucgccuaccccucccuccgcgaggccgcccuccucgaggaggaggagggcgucuga

SEQ ID NO: 1783 - RNA, 954 nt, Artificial Sequence; identical to SEQ ID NO: 1782
  AAA68871 variant

SEQ ID NO: 1784 - RNA, 954 nt, Artificial Sequence
  AAY27261 variant
auguccuccgagcagaagucccagcacugcaagcccgaggagggcgucgaggcccaggaggaggcccucggccucgucggcgcccaggcccccaccaccgaggagcaggaggccgccgucuccuccuccuccccccucguccccggcacccucgaggagguccccgccgccgaguccgccggccccccccaguccccccagggcgccuccgcccuccccaccaccaucuccuucaccugcuggcgccagcccaacgagggcuccuccucccaggaggaggagggccccuccaccucccccgacgccgagucccucuuccgcgaggcccucuccaacaaggucgacgagcucgcccacuuccuccuccgcaaguaccgcgccaaggagcucgucaccaaggccgagaugcucgagcgcgucaucaagaacuacaagcgcugcuuccccgucaucuucggcaaggccuccgagucccucaagaugaucuucggcaucgacgucaaggaggucgaccccaccuccaacaccuacacccucgucaccugccucggccucuccuacgacggccuccucggcaacaaccagaucuuccccaagaccggccuccucaucaucguccucggcaccaucgccauggagggcgacuccgccuccgaggaggagaucugggaggagcucggcgucaugggcgucuacgacggccgcgagcacaccgucuacggcgagccccgcaagcuccucacccaggacuggguccaggagaacuaccucgaguaccgccagguccccggcuccaaccccgcccgcuacgaguuccucuggggcccccgcgcccucgccgagaccuccuacgucaagguccucgagcacgucguccgcgucaacgcccgcguccgcaucgccuaccccucccuccgcgaggccgcccuccucgaggaggaggagggcgucuga

SEQ ID NO: 1785 - RNA, 945 nt, Artificial Sequence
  BAF82126 variant
augccccucgagcagcgcucccagcacugcaagcccgaggagggccucgaggcccgcggcgaggcccucggccucgucggcgcccaggcccccgccaccgaggagcaggaggccgccuccuccuccuccacccucgucgaggucacccucggcgagguccccgccgccgagucccccgaccccccccaguccccccagggcgccuccucccuccccaccaccaugaacuacccccucuggucccaguccuacgaggacuccuccaaccaggaggaggagggccccuccaccuuccccgaccucgaguccgaguuccaggccgcccucucccgcaagcucgccaagcucguccacuuccuccuccucaaguaccgcgcccgcgagcccgucaccaaggccgagaugcucggcuccgucgucggcaacuggcaguacuucuuccccgucaucuucuccaaggccuccgacucccuccagcucgucuucggcaucgagcucauggaggucgaccccaucggccacgucuacaucuucgccaccugccucggccucuccuacgacggccuccucggcgacaaccagaucaugcccaagaccggcuuccucaucaucauccucgccaucaucgccaaggagggcgacugcgcccccgaggagaagaucugggaggagcucuccguccucgaggucuucgagggccgcgaggacaucaucuucggcgaccccaagaagcuccucacccaguacuucguccaggagaacuaccucgaguaccgccagguccccggcuccgaccccgccugcuacgaguuccucuggggcccccgcgcccucaucgagaccuccuacgucaagguccuccaccacauggucaagaucuccggcggcccccgcaucuccuacccccuccuccacgagugggcccuccgcgagggcgaggaguga

SEQ ID NO: 1786 - RNA, 945 nt, Artificial Sequence
  AAA19006 variant
augccccucgagcagcgcucccagcacugcaagcccgaggagggccucgaggcccgcggcgaggcccucggccucgucggcgcccaggcccccgccaccgaggagcaggaggccgccuccuccuccuccacccucgucgaggucacccucggcgagguccccgccgccgagucccccgaccccccccaguccccccagggcgccuccucccuccccaccaccaugaacuacccccucuggucccaguccuacgaggacuccuccaaccaggaggaggagggccccuccaccuuccccgaccucgaguccgaguuccaggccgcccucucccgcaaggucgccaagcucguccacuuccuccuccucaaguaccgcgcccgcgagcccgucaccaaggccgagaugcucggcuccgucgucggcaacuggcaguacuucuuccccgucaucuucuccaaggccuccgacucccuccagcucgucuucggcaucgagcucauggaggucgaccccaucggccacgucuacaucuucgccaccugccucggccucuccuacgacggccuccucggcgacaaccagaucaugcccaagaccggcuuccucaucaucauccucgccaucaucgccaaggagggcgacugcgcccccgaggagaagaucugggaggagcucuccguccucgaggucuucgagggccgcgaggacuccaucuucggcgaccccaagaagcuccucacccaguacuucguccaggagaacuaccucgaguaccgccagguccccggcuccgaccccgccugcuacgaguuccucuggggcccccgcgcccucaucgagaccuccuacgucaagguccuccaccacauggucaagaucuccggcggcccccgcaucuccuacccccuccuccacgagugggcccuccgcgagggcgaggaguga

SEQ ID NO: 1787 - RNA, 945 nt, Artificial Sequence
  CAG46567 variant
augccccucgagcagcgcucccagcacugcaagcccgaggagggccucgaggcccgcggcgaggcccucggccucgucggcgcccaggcccccgccaccgaggagcaggaggccgccuccuccuccuccacccucgucgaggucacccucggcgagguccccgccgccgagucccccgaccccccccaguccccccagggcgccuccucccuccccaccaccaugaacuacccccucuggucccaguccuacgaggacuccuccaaccaggaggaggagggccccuccaccuuccccgaccucgaguccgaguuccaggccgcccucucccgcaaggucgccaagcucguccacuuccuccuccucaaguaccgcgcccgcgagcccgucaccaaggccgagaugcucggcuccgucgucggcaacuggcaguacuucuuccccgucaucuucuccaaggccuccgacucccuccagcucgucuucggcaucgagcucauggaggucgaccccaucggccacgucuacaucuucgccaccugccucggccucuccuacgacggccuccucggcgacaaccagaucaugcccaagaccggcuuccucaucaucauccucgccaucaucgccaaggagggcgacugcgcccccgaggagaagaucugggaggagcucuccguccucgaggucuucgagggccgcgaggacuccaucuucggcgaccccaagaagcuccucacccaguacuucguccaggagaacuaccucgaguaccgccagguccccggcuccgaccccgccugcuacgaguuccucuggggcccccgcgcccucaucgagaccuccuacgucaagguccuccaccacauggucaagaucuccggcggcccccgcaucuccuacccccuccuccacgagugggccuuccgcgagggcgaggaguga

SEQ ID NO: 1788 - RNA, 948 nt, Artificial Sequence
  AAA68877 variant
augucccucgagcagcgcuccccccacugcaagcccgacgaggaccucgaggcccagggcgaggaccucggccucaugggcgcccaggagcccaccggcgaggaggaggagaccaccuccuccuccgacuccaaggaggaggaggucuccgccgccggcuccuccucccccccccaguccccccagggcggcgccuccuccuccaucuccgucuacuacacccucuggucccaguucgacgagggcuccuccucccaggaggaggaggagcccuccuccuccgucgaccccgcccagcucgaguucauguuccaggaggcccucaagcucaaggucgccgagcucguccacuuccuccuccacaaguaccgcgucaaggagcccgucaccaaggccgagaugcucgaguccgucaucaagaacuacaagcgcuacuuccccgucaucuucggcaaggccuccgaguucaugcaggucaucuucggcaccgacgucaaggaggucgaccccgccggccacuccuacauccucgucaccgcccucggccucuccugcgacuccaugcucggcgacggccacuccaugcccaaggccgcccuccucaucaucguccucggcgucauccucaccaaggacaacugcgcccccgaggaggucaucugggaggcccucuccgucaugggcgucuacgucggcaaggagcacauguucuacggcgagccccgcaagcuccucacccaggacuggguccaggagaacuaccucgaguaccgccagguccccggcuccgaccccgcccacuacgaguuccucuggggcuccaaggcccacgccgagaccuccuacgagaaggucaucaacuaccucgucaugcucaacgcccgcgagcccaucugcuaccccucccucuacgaggagguccucggcgaggagcaggagggcgucuga

SEQ ID NO: 1789 - RNA, 1044 nt, Artificial Sequence
  AAI01309 variant
augccccgcggccagaaguccaagcuccgcgcccgcgagaagcgccgccaggcccgcggcggccucgaggaccucaucgacgcccucgacauccucgaggaggaggaggaguccccccccuccgccuccgccugccucaaggacgucuuccaguccucccucgacggcgccuccaacaacccccacggccuccgcgaggcccaguccaccuccaccuccgccaccgccgccucccacacccgccaccccgagggcgucaacgaccagauggaggagcgccccaucugcacccaggaccucgaggccaccgacuccuucccccgcggccccgucgacgagaaggucaucauccucguccacuaccuccucuacaaguaccagaugaaggagcccaucaccaaggccgacaugcuccgcaacgucacccagauguccaagucccaguuccccgucauccucucccgcgccuccgagcaccucgagcucaucuucggccucgaccucaaggaggucgagcccaacaagcacaucuacguccucgucaacaagcucgaccucggcugcgacgccaagcucuccgacgagaccggcguccccaagaccggccuccucaugaccguccucggcaucaucuucaccaacggcaacugcgucgccgaggaggaggucuggaaggucuucaacaccaugggccucuacgacggcaucgagcacuucauguucggcgagccccgcaagcuccucaccaaggaccucgucaaggagaacuaccucgaguaccagcagguccccaacuccgaccccccccgcuaccaguuccucuggggcccccgcgcccacgccgagaccuccaagaugaagguccucgaguuccucgccaaggucaacgacaccgcccccuccgaguucuccaacugguacaccgaggcccuccaggacgaggaggagcgcgcccgcgcccgcgucgccgccaaggcccgcgucuccgccaccgccggcgcccgcuccaaggucaaguccuccaaguccucccagcuccaguga

SEQ ID NO: 1790 - RNA, 975 nt, Artificial Sequence
  CCDS43927.1 variant
augucccaggaccaggaguccccccgcugcacccacgaccagcaccuccagaccuucuccgagacccagucccucgaggucgcccaggucuccaaggcccucgagaagacccuccucuccuccucccacccccucguccccggcaagcucaaggaggcccccgccgccaaggccgaguccccccucgaggucccccaguccuucugcuccuccuccaucgccgucaccaccaccuccuccuccgaguccgacgaggccuccuccaaccaggaggaggaggacucccccuccuccuccgaggacaccuccgacccccgcaacguccccgccgacgcccucgaccagaaggucgccuuccucgucaacuucaugcuccacaagugccagaugaagaagcccaucaccaaggccgacaugcucaagaucaucaucaaggacgacgagucccacuucuccgagauccuccuccgcgccuccgagcaccucgagaugaucuucggccucgacgucgucgaggucgaccccaccacccacugcuacggccucuucaucaagcucggccucaccuacgacggcaugcucuccggcgagaagggcguccccaagaccggccuccucaucaucguccucggcgucaucuucaugaagggcaaccgcgccaccgaggaggaggucugggagguccucaaccucaccggcgucuacuccggcaagaagcacuucaucuucggcgagccccgcaugcucaucaccaaggacuucgucaaggagaaguaccucgaguaccagcaggucgccaacuccgaccccgcccgcuacgaguuccucuggggcccccgcgccaaggccgagaccuccaagaugaagguccucgaguucgucgccaagguccacggcuccuacccccacuccuuccccucccaguacgccgaggcccucaaggaggaggaggagcgcgcccgcgcccgcaucuga

SEQ ID NO: 1791 - RNA, 1011 nt, Artificial Sequence
  CCDS59524.1 variant
augccccgcggccaggccuccaagcgccgcgcccgcgagaagcgccgccaggcccgcggcgaggaccagugccucggcggcgcccaggccaccgccgccgagaaggagaagcuccccuccuccuccucccccgccugccagucccccccccaguccuuccccaacgccggcaucccccaggagucccagcgcgccuccuaccccuccucccccgccuccgccgucucccucaccuccuccgacgagggcgccaagggccagaagggcgagucccccaacuccuuccacggccccuccuccuccgaguccaccggccgcgaccuccucaacaccaagaccggcgagcucguccaguuccuccucaacaaguacauccgcaaggagcccaucacccgcgaggccaugcucaaggucaucaaccgcaaguacaagcagcacuuccccgagauccuccgccgcuccaccgagaacgucgaggucgucuucggccucuaccucaaggagauggaccccucccgccaguccuacguccucgucggcaagcucgacuuccccaaccagggcucccucuccgacggcggcggcuucccccucuccggccuccucaugguccuccucuccaccaucuucaugcacggcaaccgcgccaccgaggaggagaugugggagugccucaacgcccucggcauguacaagggccgcaagcacuucaucuacggcgagccccaggagcucgucaccaaggaccucguccgcgagggcuaccucgaguaccagcagguccccuccuccgaccccccccgcuacgaguuccucuggggcccccgcgcccgcgccgagaccuccaagaugaagguccucgaguucgucgccaagcucaacgacaccgucgccuccaccuacaagucccgcuacgaggaggcccuccgcgaggaggaggagcaggcccgcgcccgcgccgucgcccgcgacuccgcccgcgcccgcgccucccgcuccuuccagcccuga

SEQ ID NO: 1792 - RNA, 1044 nt, Artificial Sequence
  AAC23616 variant
augccccgcggccagaaguccaagcuccgcgcccgcgagaagcgccgcaaggcccgcgaggagacccagggccucaagguccgccacgccaccgccgccgagaaggaggagugccccuccuccucccccguccucggcgacacccccaccuccucccccgccgccggcaucccccagaagccccagggcgccccccccaccaccaccgccgccgccgccgucuccugcaccgaguccgacgagggcgccaagugccagggcgaggagaacgccuccuucucccaggccaccaccuccaccgaguccuccgucaaggaccccgucgccugggaggccggcaugcucaugcacuucauccuccgcaaguacaagaugcgcgagcccaucaugaaggccgacaugcucaaggucgucgacgagaaguacaaggaccacuucaccgagauccucaacggcgccucccgccgccucgagcucgucuucggccucgaccucaaggaggacaaccccuccucccacaccuacacccucgucuccaagcucaaccucaccaacgacggcaaccucuccaacgacugggacuucccccgcaacggccuccucaugccccuccucggcgucaucuuccucaagggcaacuccgccaccgaggaggagaucuggaaguucaugaacguccucggcgccuacgacggcgaggagcaccucaucuacggcgagccccgcaaguucaucacccaggaccucguccaggagaaguaccucaaguacgagcagguccccaacuccgaccccccccgcuaccaguuccucuggggcccccgcgccuacgccgagaccaccaagaugaagguccucgaguuccucgccaagaugaacggcgccaccccccgcgacuuccccucccacuacgaggaggcccuccgcgacgaggaggagcgcgcccagguccgcuccuccguccgcgcccgccgccgcaccaccgccaccaccuuccgcgcccgcucccgcgcccccuucucccgcuccucccaccccauguga

SEQ ID NO: 1793 - RNA, 960 nt, Artificial Sequence
  AAD10635 variant
augccccgcggccagaaguccaagcuccgcgcccgcgagaagcgccgcaaggcccgcgacgagacccgcggccucaacgucccccaggucaccgaggccgaggaggaggaggcccccugcugcuccuccuccgucuccggcggcgccgccuccuccucccccgccgccggcaucccccaggagccccagcgcgcccccaccaccgccgccgccgccgccgccggcgucuccuccaccaaguccaagaagggcgccaagucccaccagggcgagaagaacgccuccuccucccaggccuccaccuccaccaagucccccuccgaggacccccucacccgcaaguccggcucccucguccaguuccuccucuacaaguacaagaucaagaaguccgucaccaagggcgagaugcucaagaucgucggcaagcgcuuccgcgagcacuuccccgagauccucaagaaggccuccgagggccucuccgucgucuucggccucgagcucaacaaggucaaccccaacggccacaccuacaccuucaucgacaaggucgaccucaccgacgaggagucccuccucuccuccugggacuucccccgccgcaagcuccucaugccccuccucggcgucaucuuccucaacggcaacuccgccaccgaggaggagaucugggaguuccucaacaugcucggcgucuacgacggcgaggagcacuccgucuucggcgagcccuggaagcucaucaccaaggaccucguccaggagaaguaccucgaguacaagcagguccccuccuccgaccccccccgcuuccaguuccucuggggcccccgcgccuacgccgagaccuccaagaugaagguccucgaguuccucgccaaggucaacggcaccacccccugcgccuuccccacccacuacgaggaggcccucaaggacgaggagaaggccggcgucuga

SEQ ID NO: 1794 - RNA, 1041 nt, Artificial Sequence
  AAD10636 variant
augccccgcggccagaaguccacccuccacgcccgcgagaagcgccagcagacccgcggccagacccaggaccaccagggcgcccagaucaccgccaccaacaagaagaaggucuccuucuccuccccccucauccucggcgccaccauccagaagaaguccgccggccgcucccgcuccgcccucaagaagccccagcgcgcccucuccaccaccaccuccgucgacgucuccuacaagaaguccuacaagggcgccaacuccaagaucgagaagaagcaguccuucucccagggccucuccuccaccguccagucccgcaccgacccccucaucaugaagaccaacaugcucguccaguuccucauggagauguacaagaugaagaagcccaucaugaaggccgacaugcucaagaucguccagaagucccacaagaacugcuuccccgagauccucaagaaggccuccuucaacauggaggucgucuucggcgucgaccucaagaaggucgacuccaccaaggacuccuacguccucgucuccaagauggaccuccccaacaacggcaccgucacccgcggccgcggcuuccccaagaccggccuccuccucaaccuccucggcgucaucuucaugaagggcaacugcgccaccgaggagaagaucugggaguuccucaacaagaugcgcaucuacgacggcaagaagcacuucaucuucggcgagccccgcaagcucaucacccaggaccucgucaagcucaaguaccucgaguaccgccagguccccaacuccaaccccgcccgcuacgaguuccucuggggcccccgcgcccacgccgagaccuccaagaugaagguccucgaguucugggccaaggucaacaagaccguccccuccgccuuccaguucugguacgaggaggcccuccgcgacgaggaggagcgcguccaggccgccgccaugcucaacgacggcuccuccgccaugggccgcaagugcuccaaggccaaggccuccuccuccucccacgccuga

SEQ ID NO: 1795 - RNA, 1041 nt, Artificial Sequence
  AAC23619 variant
augccccgcggccagaaguccaagcuccgcgcccgcgagaagcgccagcgcacccgcggccagacccaggaccucaaggucggccagcccaccgccgccgagaaggaggagucccccuccuccuccuccuccguccuccgcgacaccgccuccuccucccucgccuucggcaucccccaggagccccagcgcgagccccccaccaccuccgccgccgccgccauguccugcaccggcuccgacaagggcgacgagucccaggacgaggagaacgccuccuccucccaggccuccaccuccaccgagcgcucccucaaggacucccucacccgcaagaccaagaugcucguccaguuccuccucuacaaguacaagaugaaggagcccaccaccaaggccgagaugcucaagaucaucuccaagaaguacaaggagcacuuccccgagaucuuccgcaaggucucccagcgcaccgagcucgucuucggccucgcccucaaggaggucaaccccaccacccacuccuacauccucgucuccaugcucggccccaacgacggcaaccaguccuccgccuggacccucccccgcaacggccuccucaugccccuccucuccgucaucuuccucaacggcaacugcgcccgcgaggaggagaucugggaguuccucaacaugcucggcaucuacgacggcaagcgccaccucaucuucggcgagccccgcaagcucaucacccaggaccucguccaggagaaguaccucgaguaccagcagguccccaacuccgaccccccccgcuaccaguuccucuggggcccccgcgcccacgccgagaccuccaagaugaagguccucgaguuccucgccaaggucaacgacaccacccccaacaacuucccccuccucuacgaggaggcccuccgcgacgaggaggagcgcgccggcgcccgcccccgcgucgccgcccgccgcggcaccaccgccaugaccuccgccuacucccgcgccaccuccuccuccuccucccagcccauguga

SEQ ID NO: 1796 - RNA, 828 nt, Artificial Sequence
  CCDS65233.1 variant
augaccuccgccggcgucuucaacgccggcuccgacgagcgcgccaacucccgcgacgaggaguaccccugcuccuccgaggucucccccuccaccgaguccuccugcuccaacuucaucaacaucaaggucggccuccucgagcaguuccuccucuacaaguucaagaugaagcagcgcauccucaaggaggacaugcucaagaucgucaacccccgcuaccagaaccaguucgccgagauccaccgccgcgccuccgagcacaucgaggucgucuucgccgucgaccucaaggaggucaaccccaccugccaccucuacgaccucgucuccaagcucaagcuccccaacaacggccgcauccacgucggcaagguccuccccaagaccggccuccucaugaccuuccucgucgucaucuuccucaagggcaacugcgccaacaaggaggacaccuggaaguuccucgacaugaugcagaucuacgacggcaagaaguacuacaucuacggcgagccccgcaagcucaucacccaggacuucguccgccucaccuaccucgaguaccaccagguccccugcuccuaccccgcccacuaccaguuccucuggggcccccgcgccuacaccgagaccuccaagaugaagguccucgaguaccucgccaaggucaacgacaucgcccccggcgccuucuccucccaguacgaggaggcccuccaggacgaggaggagucccccucccagcgcugcucccgcaacuggcacuacugcuccggccaggacugccuccgcgccaaguucuccuccuucucccagcccuacuga

SEQ ID NO: 1797 - RNA, 1224 nt, Artificial Sequence
  AAH67286 variant
augccccgcggccacaaguccaagcuccgcaccugcgagaagcgccaggagaccaacggccagccccagggccucaccggcccccaggccaccgccgagaagcaggaggagucccacuccuccuccuccuccucccgcgccugccucggcgacugccgccgcuccuccgacgccuccaucccccaggagucccagggcgucucccccaccggcucccccgacgccgucgucuccuacuccaaguccgacgucgccgccaacggccaggacgagaagucccccuccaccucccgcgacgccuccgucccccaggagucccagggcgccucccccaccggcucccccgacgccggcgucuccggcuccaaguacgacgucgccgccaacggccaggacgagaagucccccuccaccucccacgacgucuccgucccccaggagucccagggcgccucccccaccggcucccccgacgccggcgucuccggcuccaaguacgacgucgccgccgagggcgaggacgaggaguccgucuccgccucccagaaggccaucaucuucaagcgccucuccaaggacgccgucaagaagaaggccugcacccucgcccaguuccuccagaagaaguucgagaagaaggaguccauccucaaggccgacaugcucaagugcguccgccgcgaguacaagcccuacuucccccagauccucaaccgcaccucccagcaccucgucgucgccuucggcgucgagcucaaggagauggacuccuccggcgaguccuacacccucgucuccaagcucggccuccccuccgagggcauccucuccggcgacaacgcccuccccaaguccggccuccucaugucccuccucgucgucaucuucaugaacggcaacugcgccaccgaggaggaggucugggaguuccucggccuccucggcaucuacgacggcauccuccacuccaucuacggcgacgcccgcaagaucaucaccgaggaccucguccaggacaaguacgucgucuaccgccaggucugcaacuccgacccccccugcuacgaguuccucuggggcccccgcgccuacgccgagaccaccaagaugcgcguccuccgcguccucgccgacuccuccaacaccucccccggccucuacccccaccucuacgaggacgcccucaucgacgaggucgagcgcgcccuccgccuccgcgccuga

SEQ ID NO: 1798 - RNA, 3429 nt, Artificial Sequence
  CCDS35417.1 variant
augggcgacaaggacaugcccaccgccggcaugcccucccuccuccaguccuccuccgaguccccccaguccugccccgagggcgaggacucccaguccccccuccagaucccccaguccucccccgaguccgacgacacccucuacccccuccaguccccccagucccgcuccgagggcgaggacuccuccgacccccuccagcgcccccccgagggcaaggacucccaguccccccuccagaucccccaguccucccccgagggcgacgacacccaguccccccuccagaacucccaguccucccccgagggcaaggacucccucuccccccucgagaucucccaguccccccccgagggcgaggacguccaguccccccuccagaaccccgccuccuccuucuucuccuccgcccuccucuccaucuuccaguccucccccgaguccacccagucccccuucgagggcuucccccaguccguccuccagauccccgucuccgccgccuccuccuccacccucgucuccaucuuccaguccucccccgaguccacccagucccccuucgagggcuucccccaguccccccuccagauccccgucucccgcuccuucuccuccacccuccucuccaucuuccaguccucccccgagcgcacccaguccaccuucgagggcuucgcccaguccccccuccagauccccgucucccccuccuccuccuccacccuccucucccucuuccaguccuucuccgagcgcacccaguccaccuucgagggcuucgcccaguccucccuccagauccccgucucccccuccuucuccuccacccucgucucccucuuccaguccucccccgagcgcacccaguccaccuucgagggcuucccccaguccccccuccagauccccgucuccuccuccuccuccuccacccuccucucccucuuccaguccucccccgagcgcacccacuccaccuucgagggcuucccccagucccuccuccagauccccaugaccuccuccuucuccuccacccuccucuccaucuuccaguccucccccgaguccgcccaguccaccuucgagggcuucccccaguccccccuccagauccccggcucccccuccuucuccuccacccuccucucccucuuccaguccucccccgagcgcacccacuccaccuucgagggcuucccccaguccccccuccagauccccaugaccuccuccuucuccuccacccuccucuccauccuccaguccucccccgaguccgcccaguccgccuucgagggcuucccccaguccccccuccagauccccgucuccuccuccuucuccuacacccuccucucccucuuccaguccucccccgagcgcacccacuccaccuucgagggcuucccccaguccccccuccagauccccgucuccuccuccuccuccuccuccacccuccucucccucuuccaguccucccccgagugcacccaguccaccuucgagggcuucccccaguccccccuccagaucccccaguccccccccgagggcgagaacacccacuccccccuccagaucguccccucccuccccgagugggaggacucccucuccccccacuacuucccccagucccccccccagggcgaggacucccucuccccccacuacuucccccagucccccccccagggcgaggacucccucuccccccacuacuucccccaguccccccagggcgaggacucccucuccccccacuacuucccccagucccccccccagggcgaggacuccauguccccccucuacuucccccaguccccccuccagggcgaggaguuccaguccucccuccagucccccgucuccaucugcuccuccuccacccccuccucccucccccaguccuuccccgaguccucccaguccccccccgagggccccguccaguccccccuccacuccccccaguccccccccgagggcaugcacucccaguccccccuccagucccccgaguccgcccccgagggcgaggacucccucuccccccuccagaucccccaguccccccucgagggcgaggacucccucuccucccuccacuucccccaguccccccccgagugggaggacucccucuccccccuccacuucccccaguuccccccccagggcgaggacuuccaguccucccuccagucccccgucuccaucugcuccuccuccaccucccucucccucccccaguccuuccccgaguccccccaguccccccccgagggccccgcccaguccccccuccagcgccccgucuccuccuucuucuccuacacccucgccucccuccuccaguccucccacgaguccccccaguccccccccgagggccccgcccaguccccccuccagucccccgucuccuccuuccccuccuccaccuccuccucccucucccaguccucccccgucuccuccuuccccuccuccaccuccuccucccucuccaaguccucccccgaguccccccuccagucccccgucaucuccuucuccuccuccaccucccucucccccuucuccgaggaguccuccucccccgucgacgaguacaccuccuccuccgacacccuccucgaguccgacucccucaccgacuccgagucccucaucgaguccgagccccucuucaccuacacccucgacgagaaggucgacgagcucgcccgcuuccuccuccucaaguaccaggucaagcagcccaucaccaaggccgagaugcucaccaacgucaucucccgcuacaccggcuacuuccccgucaucuuccgcaaggcccgcgaguucaucgagauccucuucggcaucucccuccgcgaggucgaccccgacgacuccuacgucuucgucaacacccucgaccucaccuccgagggcugccucuccgacgagcagggcaugucccagaaccgccuccucauccucauccucuccaucaucuucaucaagggcaccuacgccuccgaggaggucaucugggacguccucuccggcaucggcguccgcgccggccgcgagcacuucgccuucggcgagccccgcgagcuccucaccaaggucuggguccaggagcacuaccucgaguaccgcgagguccccaacuccucccccccccgcuacgaguuccucuggggcccccgcgcccacuccgaggucaucaagcgcaaggucgucgaguuccucgccaugcucaagaacaccguccccaucaccuuccccuccuccuacaaggacgcccucaaggacgucgaggagcgcgcccaggccaucaucgacaccaccgacgacuccaccgccaccgaguccgccuccuccuccgucaugucccccuccuucuccuccgaguga

SEQ ID NO: 1799 - RNA, 1122 nt, Artificial Sequence
  AAF07210 variant
augccccccguccccggcguccccuuccgcaacgucgacaacgacucccccaccuccgucgagcucgaggacugggucgacgcccagcaccccaccgacgaggaggaggaggaggccuccuccgccuccuccacccucuaccucgucuucucccccuccuccuucuccaccuccuccucccucauccucggcggccccgaggaggaggagguccccuccggcgucauccccaaccucaccgaguccauccccuccucccccccccagggccccccccagggccccucccaguccccccucuccuccugcugcuccuccuucuccugguccuccuucuccgaggaguccuccucccagaagggcgaggacaccggcaccugccagggccuccccgacuccgaguccuccuucaccuacacccucgacgagaaggucgccgagcucgucgaguuccuccuccucaaguacgaggccgaggagcccgucaccgaggccgagaugcucaugaucgucaucaaguacaaggacuacuuccccgucauccucaagcgcgcccgcgaguucauggagcuccucuucggccucgcccucaucgaggucggccccgaccacuucugcgucuucgccaacaccgucggccucaccgacgagggcuccgacgacgagggcaugcccgagaacucccuccucaucaucauccucuccgucaucuucaucaagggcaacugcgccuccgaggaggucaucugggagguccucaacgccgucggcgucuacgccggccgcgagcacuucgucuacggcgagccccgcgagcuccucaccaaggucuggguccagggccacuaccucgaguaccgcgaggucccccacuccuccccccccuacuacgaguuccucuggggcccccgcgcccacuccgaguccaucaagaagaagguccucgaguuccucgccaagcucaacaacaccguccccuccuccuuccccuccugguacaaggacgcccucaaggacgucgaggagcgcguccaggccaccaucgacaccgccgacgacgccaccgucauggccuccgagucccucuccgucauguccuccaacgucuccuucuccgaguga

SEQ ID NO: 1800 - RNA, 1932 nt, Artificial Sequence
  AAM08355 variant
augcuccuccccugccacuggguccucgacgccaccuucuccgacggcucccucggccagugggucaagaacaccugcgccaccuacgcccucucccccgucguccuccccccccagccccagccccgcaagaaggccaccgacaaggacuacuccgccuuccaccucggccaccuccgcgagguccgccucuuccuccgcggcggcaccuccgaccagcgcauggacucccucguccucugccccaccuacuucaagcucuggcgcacccucuccggcucccccggccuccagcucuccgaccuccacuucggcucccagcccgagggcaaguucucccuccgccgcgccgucuccgucaagcagcgcgaggagccccaggacuggccccucaacgagaagcgcacccucuggaaggacuccgaccuccccaccuggcgccgcggcaccggcuacacccucucccuccccgccgucucccccggcaagcgccucuggggcgagaaggccggcucccuccccgaguccgagccccucuucaccuacacccucgacgagaaggucgacaagcucguccaguuccuccuccucaaguaccaggccaaggagccccucacccgcgccgagaugcagaugaacgucaucaacaccuacaccggcuacuuccccaugaucuuccgcaaggcccgcgaguucaucgagauccucuucggcaucucccucaccgaggucgaccccgaccacuucuacgucuucgucaacacccucgaccucaccugcgagggcucccucuccgacgagcagggcaugccccagaaccgccuccucauccucauccucuccgucaucuucaucaagggcaacugcgccuccgaggaggucaucugggagguccucaacgccaucggccccugguccgcccucgccggcuucgccgacguccucucccgccucgcccucugggaguccgagggccccgaggccuucugcgaggaguccggccuccgcuccgccgagggcuccguccucgaccucgccaacccccagggccucgccggccaccgccaggaggacggccgccgcggccucaccgaggccuccccccagcagaagaagggcggcgaggacgaggacaugcccgccgccggcaugcccccccucccccaguccccccccgagauccccccccagggcccccccaagaucuccccccagggccccccccagucccccccccaguccccccucgacuccugcuccuccccccuccucuggacccgccucgacgaggaguccuccuccgaggaggaggacaccgccaccuggcacgcccuccccgaguccgagucccucccccgcuacgcccucgacgagaaggucgccgagcucguccaguuccuccuccucaaguaccagaccaaggagcccgucaccaaggccgagaugcucaccaccgucaucaagaaguacaaggacuacuuccccaugaucuucggcaaggcccacgaguucaucgagcucaucuucggcaucgcccucaccgacauggaccccgacaaccacuccuacuucuucgaggacacccucgaccucaccuacgagggcucccucaucgacgaccagggcaugcccaagaacugccuccucauccucauccucuccaugaucuucaucaagggcuccugcguccccgaggaggucaucugggagguccucuccgccaucggccccauccagcgccccgcccgcgagguccucgaguuccucuccaagcucuccuccaucauccccuccgccuuccccuccugguacauggacgcccucaaggacauggaggaccgcgcccaggccaucaucgacaccaccgacgacgccaccgccauggccuccgccucccccuccgucauguccaccaacuucugccccgaguga

SEQ ID NO: 1801 - RNA, 2337 nt, Artificial Sequence
  AAG23757 variant
auggcccagaagauggacugcggcgccggccuccucggcuuccaggccgaggccuccgucgaggacuccgcccuccucaugcagacccucauggaggccauccagaucuccgaggccccccccaccaaccaggccaccgccgccgccuccccccaguccucccagccccccaccgccaacgagauggccgacauccaggucuccgccgccgccgcccgccccaaguccgccuucaagguccagaacgccaccaccaagggccccaacggcgucuacgacuucucccaggcccacaacgccaaggacguccccaacacccagcccaaggccgccuucaagucccagaacgccacccccaagggccccaacgccgccuacgacuucucccaggccgccaccaccggcgagcucgccgccaacaaguccgagauggccuucaaggcccagaacgccaccaccaaggucggccccaacgccaccuacaacuucucccagucccucaacgccaacgaccucgccaacucccgccccaagacccccuucaaggccuggaacgacaccaccaaggcccccaccgccgacacccagacccagaacgucaaccaggccaagauggccaccucccaggccgacaucgagaccgaccccggcaucuccgagcccgacggcgccaccgcccagaccuccgccgacggcucccaggcccagaaccucgagucccgcaccaucauccgcggcaagcgcacccgcaagaucaacaaccucaacgucgaggagaacuccuccggcgaccagcgccgcgccccccucgccgccggcaccuggcgcuccgcccccguccccgucaccacccagaacccccccggcgccccccccaacguccucuggcagaccccccucgccuggcagaaccccuccggcuggcagaaccagaccgcccgccagaccccccccgcccgccaguccccccccgcccgccagaccccccccgccuggcagaaccccgucgccuggcagaaccccgucaucuggcccaaccccgucaucuggcagaaccccgucaucuggcccaaccccaucgucuggcccggccccgucgucuggcccaacccccucgccuggcagaacccccccggcuggcagaccccccccggcuggcagaccccccccggcuggcagggcccccccgacuggcagggcccccccgacuggccccucccccccgacuggccccucccccccgacuggccccuccccaccgacuggccccucccccccgacuggauccccgccgacuggcccaucccccccgacuggcagaaccuccgccccucccccaaccuccgccccucccccaacucccgcgccucccagaaccccggcgccgcccagccccgcgacgucgcccuccuccaggagcgcgccaacaagcucgucaaguaccucaugcucaaggacuacaccaagguccccaucaagcgcuccgagaugcuccgcgacaucauccgcgaguacaccgacgucuaccccgagaucaucgagcgcgccugcuucguccucgagaagaaguucggcauccagcucaaggagaucgacaaggaggagcaccucuacauccucaucuccacccccgagucccucgccggcauccucggcaccaccaaggacacccccaagcucggccuccuccucgucauccucggcgucaucuucaugaacggcaaccgcgccuccgaggccguccucugggaggcccuccgcaagaugggccuccgccccggcguccgccacccccuccucggcgaccuccgcaagcuccucaccuacgaguucgucaagcagaaguaccucgacuaccgccgcguccccaacuccaacccccccgaguacgaguuccucuggggccuccgcuccuaccacgagaccuccaagaugaagguccuccgcuucaucgccgagguccagaagcgcgacccccgcgacuggaccgcccaguucauggaggccgccgacgaggcccucgacgcccucgacgccgccgccgccgaggccgaggcccgcgccgaggcccgcacccgcaugggcaucggcgacgaggccgucuccggccccugguccugggacgacaucgaguucgagcuccucaccugggacgaggagggcgacuucggcgaccccuggucccgcauccccuucaccuucugggcccgcuaccaccagaacgcccgcucccgcuucccccagaccuucgccggccccaucaucggccccggcggcaccgccuccgccaacuucgccgccaacuucggcgccaucggcuucuucugggucgaguga

SEQ ID NO: 1802 - RNA, 1821 nt, Artificial Sequence
  AAD28598 variant
auguccgacaccuccgaguccggcgccggccucacccgcuuccaggccgaggccuccgagaaggacuccuccuccaugaugcagacccuccucaccgucacccagaacgucgagguccccgagacccccaaggccuccaaggcccucgaggucuccgaggacgucaaggucuccaaggccuccggcgucuccaaggccaccgaggucuccaagacccccgaggcccgcgaggcccccgccacccaggccuccuccaccacccagcucaccgacacccagguccucgccgccgagaacaagucccucgccgccgacaccaagaagcagaacgccgacccccaggccgucaccaugcccgccaccgagaccaagaaggucucccacgucgccgacaccaaggucaacaccaaggcccaggagaccgaggccgcccccucccaggcccccgccgacgagcccgagcccgaguccgccgccgcccagucccaggagaaccaggacacccgccccaaggucaaggccaagaaggcccgcaaggucaagcaccucgacggcgaggaggacggcuccuccgaccagucccaggccuccggcaccaccggcggccgccgcgucuccaaggcccucauggccuccauggcccgccgcgccucccgcggccccaucgccuucugggcccgccgcgccucccgcacccgccucgccgccugggcccgccgcgcccuccucucccuccgcucccccaaggcccgccgcggcaaggcccgccgccgcgccgccaagcuccaguccucccaggagcccgaggccccccccccccgcgacgucgcccuccuccagggccgcgccaacgaccucgucaaguaccuccucgccaaggaccagaccaagauccccaucaagcgcuccgacaugcucaaggacaucaucaaggaguacaccgacgucuaccccgagaucaucgagcgcgccggcuacucccucgagaaggucuucggcauccagcucaaggagaucgacaagaacgaccaccucuacauccuccucuccacccucgagcccaccgacgccggcauccucggcaccaccaaggacucccccaagcucggccuccucaugguccuccucuccaucaucuucaugaacggcaaccgcuccuccgaggccgucaucugggagguccuccgcaagcucggccuccgccccggcauccaccacucccucuucggcgacgucaagaagcucaucaccgacgaguucgucaagcagaaguaccucgacuacgcccgcguccccaacuccaacccccccgaguacgaguucuucuggggccuccgcuccuacuacgagaccuccaagaugaagguccucaaguucgccugcaagguccagaagaaggaccccaaggagugggccgcccaguaccgcgaggccauggaggccgaccucaaggccgccgccgaggccgccgccgaggccaaggcccgcgccgagauccgcgcccgcaugggcaucggccucggcuccgagaacgccgccggccccugcaacugggacgaggccgacaucggccccugggccaaggcccgcauccaggccggcgccgaggccaaggccaaggcccaggaguccggcuccgccuccaccggcgccuccaccuccaccaacaacuccgccuccgccuccgccuccaccuccggcggcuucuccgccggcgccucccucaccgccacccucaccuucggccucuucgccggccucggcggcgccggcgccuccaccuccggcuccuccggcgccugcggcuucuccuacaaguga

SEQ ID NO: 1803 - RNA, 2226 nt, Artificial Sequence
  AAH63838 variant
auggccgagggcuccuucuccguccaguccgaguccuacuccgucgaggacauggacgagggcuccgacgaggucggcgaggaggagauggucgagggcaacgacuacgaggaguucggcgccuucggcggcuacggcacccucaccuccuucgacauccacauccuccgcgccuucggcucccucggccccggccuccgcauccucuccaacgagcccugggagcucgagaaccccguccucgcccagacccucgucgaggcccuccagcucgaccccgagacccucgccaacgagaccgccgcccgcgccgccaacgucgcccgcgccgccgccuccaaccgcgccgcccgcgccgccgccgccgccgcccgcaccgccuucucccaggucgucgccucccaccgcgucgccaccccccaggucuccggcgaggacacccagcccaccaccuacgccgccgaggcccagggccccacccccgagcccccccucgccuccccccagaccucccagaugcucgucaccuccaagauggccgcccccgaggcccccgccaccuccgcccagucccagaccggcucccccgcccaggaggccgccaccgagggccccuccuccgccugcgccuucucccaggcccccugcgcccgcgaggucgacgccaaccgccccuccaccgccuuccucggccagaacgacgucuucgacuucacccagcccgccggcgucuccggcauggccuucccccgccccaagcgccccgcccccgcccaggaggccgccaccgagggccccuccgccgccuccggcgucccccagaccggccccggccgcgaggucgccgccacccgccccaagaccaccaaguccggcaaggcccucgccaagacccgcugggucgagccccagaacgucgucgccgccgccgccgccaaggccaagauggccaccuccauccccgagcccgagggcgccgccgccgccaccgcccagcacuccgccgagcccugggcccgcaugggcggcaagcgcaccaagaaguccaagcaccucgacgacgaguacgaguccuccgaggaggagcgcgagacccccgccgucccccccaccuggcgcgccucccagcccucccucaccguccgcgcccagcucgccccccgcccccccauggccccccgcucccagauccccucccgccacguccucugccuccccccccgcaacgucacccuccuccaggagcgcgccaacaagcucgucaaguaccucaugaucaaggacuacaagaagauccccaucaagcgcgccgacaugcucaaggacgucauccgcgaguacgacgagcacuuccccgagaucaucgagcgcgccaccuacacccucgagaagaaguucggcauccaccucaaggagaucgacaaggaggagcaccucuacauccucgucugcacccgcgacuccuccgcccgccuccucggcaagaccaaggacaccccccgccucucccuccuccucgucauccucggcgucaucuucaugaacggcaaccgcgccuccgaggccguccucugggaggcccuccgcaagaugggccuccgccccggcguccgccaccccuuccucggcgaccuccgcaagcucaucaccgacgacuucgucaagcagaaguaccucgaguacaagaagauccccaacuccaacccccccgaguacgaguuccucuggggccuccgcgcccgccacgagaccuccaagaugcgcguccuccgcuucaucgcccagaaccagaaccgcgacccccgcgaguggaaggcccacuuccucgaggccgucgacgacgccuucaagaccauggacgucgacauggccgaggagcacgcccgcgcccagaugcgcgcccagaugaacaucggcgacgaggcccucaucggccgcugguccugggacgacauccaggucgagcuccucaccugggacgaggacggcgacuucggcgacgccugggcccgcauccccuucgccuucugggcccgcuaccaccaguacauccucaacuccaaccgcgccaaccgccgcgccaccuggcgcgccggcgucuccuccggcaccaacggcggcgccuccaccuccguccucgacggccccuccaccuccuccaccauccgcacccgcaacgccgcccgcgccggcgccuccuucuucuccuggauccagcaccgcuga

SEQ ID NO: 1804 - RNA, 1122 nt, Artificial Sequence
  CAG33449 variant
augccccccguccccggcguccccuuccgcaacgucgacaacgacucccccaccuccgucgagcucgaggacugggucgacgcccagcaccccaccgacgaggaggaggaggaggccuccuccgccuccuccacccucuaccucgucuucucccccuccuccuucuccaccuccuccucccucauccucggcggccccgaggaggaggagguccccuccggcgucauccccaaccucaccgaguccauccccuccucccccccccagggccccccccagggccccucccaguccccccucuccuccugcugcuccuccuucuccugguccuccuucuccgaggaguccuccucccagaagggcgaggacaccggcaccugccagggccuccccgacuccgaguccuccuucaccuacacccucgacgagaaggucgccgagcucgucgaguuccuccuccucaaguacgaggccgaggagcccgucaccgaggccgagaugcucaugaucgucaucaaguacaaggacuacuuccccgucauccucaagcgcgcccgcgaguucauggagcuccucuucggccucgcccucaucgaggucggccccgaccacuucugcgucuucgccaacaccgucggccucaccgacgagggcuccgacgacgagggcaugcccgagaacucccuccucaucaucauccucuccgucaucuucaucaagggcaacugcgccuccgaggaggucaucugggagguccucaacgccgucggcgucuacgccggccgcgagcacuucgucuacggcgagccccgcgagcuccucaccaaggucuggguccagggccacuaccucgaguaccgcgaggucccccacuccuccccccccuacuacgaguuccucuggggcccccgcgcccacuccgaguccaucaagaagaagguccucgaguuccucgccaagcucaacaacaccguccccuccuccuuccccuccugguacaaggacgcccucaaggacgucgaggagcgcguccaggccaccaucgacaccgccgacgacgccaccgucauggccuccgagucccucuccgucauguccuccaacgucuccuucuccgacuga

SEQ ID NO: 1805 - RNA, 2874 nt, Artificial Sequence
  AAM08354 variant
augucccucgucucccagaacucccgccgccgccgccgccgcgucgccaaggccaccgcccacaacuccuccuggggcgagaugcaggcccccaacgcccccggccuccccgccgacguccccggcuccgacgucccccagggccccuccgacucccagauccuccagggccucugcgccuccgagggccccuccaccuccguccuccccaccuccgccgagggccccuccaccuucgucccccccaccaucuccgaggccuccuccgccuccggccagcccaccaucuccgagggccccggcaccuccguccuccccacccccuccgagggccucuccaccuccggcccccccaccaucuccaagggccucugcaccuccgucacccucgccgccuccgagggccgcaacaccucccgcccccccaccuccuccgaggagcccuccaccuccgucccccccaccgccuccgagguccccuccaccucccucccccccacccccggcgagggcaccuccaccuccgucccccccaccgccuacgagggccccuccaccuccgucguccccacccccgacgagggccccuccaccuccguccuccccacccccggcgagggccccggcaccuccgucccccucgccgccaccgagggccucuccaccuccguccaggccacccccgacgagggccccuccaccuccgucccccccaccgccaccgagggccucuccacccccgucccccccacccgcgacgagggccccuccaccuccguccccgccacccccggcgagggccccuccaccuccguccuccccgccgccuccgacggccaguccaucucccucguccccacccgcggcaagggcuccuccaccuccgucccccccaccgccaccgagggccucuccaccuccguccagcccaccgccggcgagggcuccuccaccuccgucccccccacccccggcggcggccucuccaccuccgucccccccaccgccaccgaggagcucuccaccuccgucccccccacccccggcgagggccccuccaccuccguccuccccauccccggcgagggccucuccaccuccgucccccccaccgccuccgacggcuccgacaccuccgucccccccacccccggcgagggcgccuccacccucguccagcccaccgcccccgacggccccggcuccuccguccuccccaaccccggcgagggccccuccacccucuucuccuccuccgccuccgucgaccgcaaccccuccaagugcucccucguccuccccuccccccgcgucaccaaggccuccgucgacuccgacuccgagggccccaagggcgccgagggccccaucgaguucgagguccuccgcgacugcgagucccccaacuccaucuccaucaugggccucaacaccucccgcgucgccaucacccucaagccccaggaccccauggagcagaacgucgccgagcuccuccaguuccuccucgucaaggaccaguccaaguaccccauccgcgaguccgagaugcgcgaguacaucgucaaggaguaccgcaaccaguuccccgagauccuccgccgcgccgccgcccaccucgagugcaucuuccgcuucgagcuccgcgagcucgaccccgaggcccacaccuacauccuccucaacaagcucggccccguccccuucgagggccucgaggagucccccaacggccccaagaugggccuccucaugaugauccucggccagaucuuccucaacggcaaccaggccaaggaggccgagaucugggagaugcucuggcgcaugggcguccagcgcgagcgccgccucuccaucuucggcaaccccaagcgccuccucuccgucgaguucgucuggcagcgcuaccucgacuaccgccccgucaccgacugcaagcccgucgaguacgaguucuucuggggcccccgcucccaccucgagaccaccaagaugaagauccucaaguucauggccaagaucuacaacaaggaccccauggacuggcccgagaaguacaacgaggcccucgaggaggacgccgcccgcgccuucgccgagggcuggcaggcccucccccacuuccgccgccccuucuucgaggaggccgccgccgagguccccucccccgacuccgaggucuccuccuacuccuccaaguacgccccccacuccuggcccgagucccgccucgaguccaaggcccgcaagcucguccagcucuuccuccucauggacuccaccaagcuccccauccccaagaagggcauccucuacuacaucggccgcgagugcuccaaggucuuccccgaccuccucaaccgcgccgcccgcacccucaaccacgucuacggcaccgagcucgucguccucgacccccgcaaccacuccuacacccucuacaaccgccgcgagauggaggagaccgaggagaucgucgacucccccaaccgccccggcaacaacuuccucaugcagguccucuccuucaucuucaucaugggcaaccacgcccgcgaguccgccgucugggccuuccuccgcggccucggcguccaggccggccgcaagcacgucaucaccugccgcuaccucucccagcgcuacaucgacucccuccgcguccccgacuccgaccccguccaguacgaguucgucuggggcccccgcgcccgccucgagaccuccaagaugaaggcccuccgcuacgucgcccgcauccaccgcaaggagccccaggacuggccccagcaguaccgcgaggccauggaggacgaggccaaccgcgccgacgucggccaccgccagaucuucguccacaacuuccgcuga

SEQ ID NO: 1806 - RNA, 1572 nt, Artificial Sequence
  AAH93964 variant
augucccucgucucccagaacgcccgccacugcuccgccgagaucaccgccgacuacggcgacggccgcggcgagauccaggccaccaacgccuccggcucccccaccuccaugcucgucgucgacgccccccagugcccccaggcccccaucaacucccagugcgucaacaccucccaggccguccaggaccccaacgaccucgagguccucaucgacgagcagucccgccgccucggcgcccuccgcguccacgacccccucgaggaccgcuccaucgcccucgucaacuucaugcgcaugaagucccagaccgagggcuccauccagcaguccgagaugcucgaguuccuccgcgaguacuccgaccaguuccccgagauccuccgccgcgccuccgcccaccucgaccaggucuucggccucaaccuccgcgucaucgacccccaggccgacaccuacaaccucgucuccaagcgcggcuuccagaucaccgaccgcaucgccgagucccucgacaugcccaaggccucccuccucgcccucguccucggccacauccuccucaacggcaaccgcgcccgcgaggccuccaucugggaccuccuccucaaggucgacaugugggacaagccccagcgcaucaacaaccucuucggcaacacccgcaaccuccucaccaccgacuucgucugcaugcgcuuccucgaguacuggcccgucuacggcaccaacccccucgaguucgaguuccucuggggcucccgcgcccaccgcgagaucaccaagauggaggcccucaaguucgucuccgacgcccacgacgaggagcccugguccuggcccgaggaguacaacaaggcccucgagggcgacaagaccaaggagcgcucccucaccgccggccucgaguucugguccgaggacaccaugaacgacaaggccaacgaccucguccagcucgccaucuccgucaccgaggagaugcuccccauccaccaggacgagcuccucgcccacaccggcaaggaguucgaggacgucuuccccaacauccucaaccgcgccacccucauccucgacauguucuacggccucucccucaucgaggucgacaccuccgagcacaucuaccuccucguccagcagcccgaguccgaggaggagcaggucaugcucgagucccucggccgccccacccaggaguacgucaugcccauccucggccucaucuuccucaugggcaaccgcgucaaggaggccaacgucuggaaccuccuccgccgcuucuccgucgacgucggccgcaagcacuccaucacccgcaagcucaugcgccagcgcuaccucgagugccgcccccucuccuacuccaaccccgucgaguacgagcuccucuggggcccccgcgcccaccacgagaccaucaagaugaagguccucgaguacauggcccgccucuaccgcaagcgcccccagaacuggcccgagcaguaccgcgaggccgucgaggacgaggaggcccgcgccaaguccgaggccaccaucauguucuuccucgaccccaccuga

SEQ ID NO: 1807 - RNA, 924 nt, Artificial Sequence
  CCDS3269.1 variant
augcuccagacccccgagucccgcggccuccccgucccccaggccgagggcgagaaggacggcggccacgacggcgagacccgcgcccccaccgccucccaggagcgccccaaggaggagcucggcgccggccgcgaggagggcgccgccgagcccgcccucacccgcaagggcgcccgcgcccucgccgccaaggcccucgcccgccgccgcgccuaccgccgccucaaccgcaccgucgccgagcucguccaguuccuccucgucaaggacaagaagaagucccccaucacccgcuccgagauggucaaguacgucaucggcgaccucaagauccucuuccccgacaucaucgcccgcgccgccgagcaccuccgcuacgucuucggcuucgagcucaagcaguucgaccgcaagcaccacaccuacauccucaucaacaagcucaagccccucgaggaggaggaggaggaggaccucggcggcgacggcccccgccucggccuccucaugaugauccucggccucaucuacaugcgcggcaacuccgcccgcgaggcccaggucugggagaugcuccgccgccucggcguccagcccuccaaguaccacuuccucuucggcuaccccaagcgccucaucauggaggacuucguccagcagcgcuaccucuccuaccgccgcgucccccacaccaacccccccgaguacgaguucuccuggggcccccgcuccaaccucgagaucuccaagauggagguccucggcuucgucgccaagcuccacaagaaggagccccagcacuggcccguccaguaccgcgaggcccucgccgacgaggccgaccgcgcccgcgccaaggcccgcgccgaggccuccaugcgcgcccgcgccuccgcccgcgccggcauccaccucugguga

SEQ ID NO: 1808 - RNA, 660 nt, Artificial Sequence
  AAD31314 variant
augccccgcggccgcaagucccgccgccgccgcaacgcccgcgccgccgaggagaaccgcaacaaccgcaagauccaggccuccgaggccuccgagacccccauggccgccuccgucgucgccuccacccccgaggacgaccucuccggccccgaggaggaccccuccacccccgaggaggccuccaccacccccgaggaggccuccuccaccgcccaggcccagaagcccuccgucccccgcuccaacuuccagggcaccaagaagucccuccucauguccauccucgcccucaucuucaucaugggcaacuccgccaaggaggcccucgucuggaagguccucggcaagcucggcaugcagcccggccgccagcacuccaucuucggcgaccccaagaagaucgucaccgaggaguucguccgccgcggcuaccucaucuacaagcccgucccccgcuccucccccgucgaguacgaguucuucuggggcccccgcgcccacgucgaguccuccaagcucaaggucaugcacuucgucgcccgcguccgcaaccgcugcuccaaggacuggcccugcaacuacgacugggacuccgacgacgacgccgaggucgaggccauccucaacuccggcgcccgcggcuacuccgcccccuga

SEQ ID NO: 1809 - RNA, 3750 nt, Artificial Sequence
  CCDS73700.1 variant
augucccagcucuccaagaaccucggcgacuccuccccccccgccgaggcccccaagccccccgucuacucccgccccaccguccucaugcgcgccccccccgccuccucccgcgccccccccguccccugggaccccccccccaucgaccuccaggccucccucgccgccuggcaggccccccagcccgccugggaggccccccagggccagcuccccgcccccgucguccccaugacccagccccccgcccucggcggccccaucguccccgcccccccccucggcggccccaugggcaagccccccacccccggcguccucaugguccacccccccccccccggcgcccccauggcccagccccccacccccggcguccucaugguccaccccuccgcccccggcgcccccauggcccacccccccccccccggcacccccaugucccacccccccccccccggcacccccauggcccacccccccccccccggcacccccauggcccacccccccccccccggcacccccaugguccacccccccccccccggcacccccauggcccacccccccccccccggcacccccauggcccacccccccccccccggcacccccauggcccacccccccccccccggcacccccauggcccacccccccccccccggcacccccauggcccagccccccgcccccggcguccucauggcccagccccucacccccggcguccucaugguccagcccgccgcccccggcgcccccaugguccagcccccccccgccgccaugaugacccagccccagcccuccggcgcccccauggccaagccccccggccccggcguccucaugauccacccccccggcgcccgcgcccccaugacccagccccccgccuccggcgcccccauggcccagcccgccgccccccccgcccagcccauggccccccccgcccagcccauggccuccugggccccccaggcccagccccucauccuccagauccagucccaggucauccgcgcccccccccaggucccccagggcccccaggccccccccgcccagcucgccaccccccccggcuggcaggccaccucccccggcuggcaggccacccagcagggcuggcaggccaccccccucaccuggcagaccacccaggucaccuggcaggcccccgccgucaccuggcagguccccccccccaugcgccagggccccccccccauccgccccggccccccccccauccgccccggccccccccccguccgccaggcccccccccucauccgccaggccccccccgucauccgccaggccccccccgucauccgccaggccccccccgucauccgccaggcccccgccgucauccgccaggccccccccgucauccgccaggccccccccgucauccgccaggccccccccgucauccgccaggcccccccccucauccgccaggcccccccccccauccgccccgccccccagguccucgccacccagcccccccucuggcaggcccucccccccccccccccccuccgccaggccccccaggcccgccuccccgccccccagguccaggccgccccccagguccccaccgccccccccgccacccagguccccgccgccccccccgccggcccccaggucccccagcccguccuccccgccccccucuccgccccccucuccgccccccaggccguccacugccccuccaucaucuggcaggcccccaagggccagccccccgucccccacgagauccccaccuccauggaguuccaggagguccagcagacccaggcccucgccuggcaggcccagaaggcccccacccacaucuggcagccccuccccgcccaggaggcccagcgccaggcccccccccucguccagcucgagcagcccuuccagggcgccccccccucccagaaggccguccagauccagcuccccccccagcaggcccaggccuccggcccccaggccgagguccccacccucccccuccagcccuccuggcaggccccccccgccguccuccaggcccagcccggcccccccgucgccgccgccaacuucccccucggcuccgccaagucccucaugacccccuccggcgagugccgcgccuccuccaucgaccgccgcggcuccuccaaggagcgccgcaccuccuccaaggagcgccgcgcccccuccaaggaccgcaugaucuucgccgccaccuucugcgcccccaaggccgucuccgccgcccgcgcccaccuccccgccgccuggaagaaccuccccgccacccccgagaccuucgcccccuccuccuccgucuuccccgccaccucccaguuccagcccgccucccucaacgccuucaagggccccuccgccgccuccgagacccccaagucccuccccuacgcccuccaggaccccuucgccugcgucgaggcccuccccgccguccccugggucccccagcccaacaugaacgccuccaaggccucccaggccguccccaccuuccucauggccaccgccgccgccccccaggccaccgccaccacccaggaggccuccaagaccuccgucgagcccccccgccgcuccggcaaggccacccgcaagaagaagcaccucgaggcccaggaggacucccgcggccacacccucgccuuccacgacuggcagggcccccgccccugggagaaccucaaccucuccgacugggagguccagucccccauccaggucuccggcgacugggagcaccccaacaccccccgcggccucuccggcugggagggccccuccaccucccgcauccucuccggcugggagggccccuccgccuccugggcccucuccgccugggagggccccuccaccucccgcgcccucggccucuccgagucccccggcuccucccuccccgucgucgucuccgaggucgccuccgucucccccggcuccuccgccacccaggacaacuccaaggucgaggcccagccccucuccccccucgacgagcgcgccaacgcccucguccaguuccuccucgucaaggaccaggccaagguccccguccagcgcuccgagauggucaaggucauccuccgcgaguacaaggacgagugccucgacaucaucaaccgcgccaacaacaagcucgagugcgccuucggcuaccagcucaaggagaucgacaccaagaaccacgccuacaucaucaucaacaagcucggcuaccacaccggcaaccucgucgccuccuaccucgaccgccccaaguucggccuccucauggucguccucucccucaucuucaugaagggcaacugcguccgcgaggaccucaucuucaacuuccucuucaagcucggccucgacguccgcgagaccaacggccucuucggcaacaccaagaagcucaucaccgaggucuucguccgccagaaguaccucgaguaccgccgcauccccuacaccgagcccgccgaguacgaguuccucuggggcccccgcgccuuccucgagaccuccaagaugcucguccuccgcuuccucgccaagcuccacaagaaggacccccaguccuggcccuuccacuaccucgaggcccucgccgagugcgagugggaggacaccgacgaggacgagcccgacaccggcgacuccgcccacggccccaccucccgcccccccccccgcuga

SEQ ID NO: 1810 - RNA, 282 nt, Artificial Sequence
  AAC39608 variant
augaagcuccucaugguccucaugcucgccgcccucucccagcacugcuacgccggcuccggcugcccccuccucgagaacgucaucuccaagaccaucaacccccaggucuccaagaccgaguacaaggagcuccuccaggaguucaucgacgacaacgccaccaccaacgccaucgacgagcucaaggagugcuuccucaaccagaccgacgagacccucuccaacgucgaggucuucaugcagcucaucuacgacuccucccucugcgaccucuucuga

SEQ ID NO: 1811 - RNA, 363 nt, Artificial Sequence
  AAH67220 variant
augaagcuccucaugguccucaugcucgccgcccucucccagcacugcuacgccggcuccggcugcccccuccucgagaacgucaucuccaagaccaucaacccccaggucuccaagaccgaguacaaggagcuccuccaggaguucaucgacgacaacgccaccaccaacgccaucgacgagcucaaggagugcuuccucaaccagaccgacgagacccucuccaacgucgaggucuucauggucaucuccuucuccuccuacaagcucuucaagucccccgaccagggccaggucggcuccuccuuccucaccgacaacgccaaggccaccuccgagcaggccuucuccuacaucggcuga

SEQ ID NO: 1812 - RNA, 357 nt, Artificial Sequence
  AAA19238 variant
augccccgcgaggacgcccacuucaucuacggcuaccccaagaagggccacggccacuccuacaccaccgccgaggaggccgccggcaucggcauccucaccgucauccucggcguccuccuccucaucggcugcugguacugccgccgccgcaacggcuaccgcgcccucauggacaagucccuccacgucggcacccagugcgcccucacccgccgcugcccccaggagggcuucgaccaccgcgacuccaaggucucccuccaggagaagaacugcgagcccgucguccccaacgccccccccgccuacgagaagcucuccgccgagcagucccccccccccuacucccccuga

SEQ ID NO: 1813 - RNA, 1482 nt, Artificial Sequence
  EAW93427 variant
augcucccccgcugggagcucgcccucuaccuccucgccucccucggcuuccacuucuacuccuucuacgaggucuacaaggucucccgcgagcacgaggaggagcucgaccaggaguucgagcucgagaccgacacccucuucggcggccucaagaaggacgccaccgacuucgagugguccuucuggauggaguggggcaagcaguggcucgucuggcuccuccucggccacauggucgucucccagauggccacccuccucgcccgcaagcaccgccccuggauccucaugcucuacggcaugugggccugcuggugcguccucggcacccccggcgucgccaugguccuccuccacaccaccaucuccuucugcgucgcccaguuccgcucccagcuccucaccuggcucugcucccuccuccuccucuccacccuccgccuccagggcgucgaggaggucaagcgccgcugguacaagaccgagaacgaguacuaccuccuccaguucacccucaccguccgcugccucuacuacaccuccuucucccucgagcucugcuggcagcagcuccccgccgccuccaccuccuacuccuuccccuggaugcucgccuacgucuucuacuaccccguccuccacaacggccccauccucuccuucuccgaguucaucaagcagaugcagcagcaggagcacgacucccucaaggccucccucugcguccucgcccucggccucggccgccuccucugcuggugguggcucgccgagcucauggcccaccucauguacaugcacgccaucuacuccuccaucccccuccucgagaccgucuccugcuggacccucggcggccucgcccucgcccagguccucuucuucuacgucaaguaccucguccucuucggcguccccgcccuccucaugcgccucgacggccucaccccccccgcccucccccgcugcgucuccaccauguucuccuucaccggcauguggcgcuacuucgacgucggccuccacaacuuccucauccgcuacgucuacauccccgucggcggcucccagcacggccuccucggcacccucuucuccaccgccaugaccuucgccuucgucuccuacuggcacggcggcuacgacuaccucuggugcugggccgcccucaacuggcucggcgucaccgucgagaacggcguccgccgccucgucgagacccccugcauccaggacucccucgcccgcuacuucuccccccaggcccgccgccgcuuccacgccgcccucgccuccugcuccaccuccaugcucauccucuccaaccucgucuuccucggcggcaacgaggucggcaagaccuacuggaaccgcaucuucauccagggcuggcccugggucacccucuccguccucggcuuccucuacugcuacucccacgucggcaucgccugggcccagaccuacgccaccgacuga

SEQ ID NO: 1814 - RNA, 954 nt, Artificial Sequence
  AAD41349 variant
auggccguccagggcucccagcgccgccuccucggcucccucaacuccacccccaccgccaucccccagcucggccucgccgccaaccagaccggcgcccgcugccucgaggucuccaucuccgacggccucuuccucucccucggccucgucucccucgucgagaacgcccucgucgucgccaccaucgccaagaaccgcaaccuccacucccccauguacugcuucaucugcugccucgcccucuccgaccuccucgucuccggcuccaacguccucgagaccgccgucauccuccuccucgaggccggcgcccucgucgcccgcgccgccguccuccagcagcucgacaacgucaucgacgucaucaccugcuccuccaugcucuccucccucugcuuccucggcgccaucgccgucgaccgcuacaucuccaucuucuacgcccuccgcuaccacuccaucgucacccucccccgcgcccgccgcgccgucgccgccaucugggucgccuccgucgucuucuccacccucuucaucgccuacuacgaccacgucgccguccuccucugccucgucgucuucuuccucgccaugcucguccucauggccguccucuacguccacaugcucgcccgcgccugccagcacgcccagggcaucgcccgccuccacaagcgccagcgccccguccaccagggcuucggccucaagggcgccgucacccucaccauccuccucggcaucuucuuccucugcuggggccccuucuuccuccaccucacccucaucguccucugccccgagcaccccaccugcggcugcaucuucaagaacuucaaccucuuccucgcccucaucaucugcaacgccaucaucgacccccucaucuacgccuuccacucccaggagcuccgccgcacccucaaggagguccucaccugcuccugguga

SEQ ID NO: 1815 - RNA, 954 nt, Artificial Sequence; identical to SEQ ID NO: 1814
  AHC09522 variant

SEQ ID NO: 1816 - RNA, 954 nt, Artificial Sequence
  AHC09804 variant
auggccguccagggcucccagcgccgccuccucggcucccucaacuccacccccaccgccaucccccagcucggccucgccgccaaccagaccggcgcccgcugccucgaggucuccaucuccgacggccucuuccucucccucggccucgucucccucgucgagaacgcccucgucgucgccaccaucgccaagaaccgcaaccuccacucccccauguacugcuucaucugcugccucgcccucuccgaccuccucgucuccggcuccaacguccucgagaccgccgucauccuccuccucgaggccggcgcccucgucgcccgcgccgccguccuccagcagcucgacaacgucaucgacgucaucaccugcuccuccaugcucuccucccucugcuuccucggcgccaucgccgucgaccgcuacaucuccaucuucuacgcccuccgcuaccacuccaucgucacccucccccgcgcccgccaggccgucgccgccaucugggucgccuccgucgucuucuccacccucuucaucgccuacuacgaccacgucgccguccuccucugccucgucgucuucuuccucgccaugcucguccucauggccguccucuacguccacaugcucgcccgcgccugccagcacgcccagggcaucgcccgccuccacaagcgccagcgccccguccaccagggcuucggccucaagggcgccgucacccucaccauccuccucggcaucuucuuccucugcuggggccccuucuuccuccaccucacccucaucguccucugccccgagcaccccaccugcggcugcaucuucaagaacuucaaccucuuccucgcccucaucaucugcaacgccaucaucgacccccucaucuacgccuuccacucccaggagcuccgccgcacccucaaggagguccucaccugcuccugguga

SEQ ID NO: 1817 - RNA, 954 nt, Artificial Sequence
  BAE94313 variant
auggccguccagggcucccagcgccgccuccucggcucccucaacuccacccccaccgccaucccccagcucggccucgccgccaaccagaccggcgcccgcugccucgaggucuccaucuccgacggccucuuccucucccucggccucgucucccucgucgagaacgcccucgucgucgccaccaucgccaagaaccgcaaccuccacucccccauguacugcuucaucugcugccucgcccucuccgaccuccucgucuccggcuccaacguccucgagaccgccgucauccuccuccucgaggccggcgcccucgucgcccgcgccgccguccuccagcagcucgacaacgucaccgacgucaucaccugcuccuccaugcucuccucccucugcuuccucggcgccaucgccgucgaccgcuacaucuccaucuucuacgcccuccgcuaccacuccaucgucacccucccccgcgcccgccgcgccgucgccgccaucugggucgccuccgucgucuucuccacccucuucaucgccuacuacgaccacgucgccguccuccucugccucgucgucuucuuccucgccaugcucguccucauggccguccucuacguccacaugcucgcccgcgccugccagcacgcccagggcaucgcccgccuccacaagcgccagcgccccguccaccagggcuucggccucaagggcgccgucacccucaccauccuccucggcaucuucuuccucugcuggggccccuucuuccuccaccucacccucaucguccucugccccgagcaccccaccugcggcugcaucuucaagaacuucaaccucuuccucgcccucaucaucugcaacgccaucaucgacccccucaucuacgccuuccacucccaggagcuccgccgcacccucaaggagguccucaccugcuccugguga

SEQ ID NO: 1818 - RNA, 954 nt, Artificial Sequence
  AHC09531 variant
auggccguccagggcucccagcgccgccuccucggcucccucaacuccacccccaccgccaucccccagcucggccucgccgccaaccagaccggcgcccgcugccucgaggucuccaucuccgacggccucuuccucucccucggccucgucucccucgucgagaacgcccucgucgucgccaccaucgccaagaaccgcaaccuccacucccccauguacugcuucaucugcugccucgcccucuccgaccuccucgucuccggcuccaacaugcucgagaccgccgucauccuccuccucgaggccggcgcccucgucgcccgcgccgccguccuccagcagcucgacaacgucaucgacgucaucaccugcuccuccaugcucuccucccucugcuuccucggcgccaucgccgucgaccgcuacaucuccaucuucuacgcccuccgcuaccacuccaucgucacccucccccgcgcccgccgcgccgucgccgccaucugggucgccuccgucgucuucuccacccucuucaucgccuacuacgaccacgucgccguccuccucugccucgucgucuucuuccucgccaugcucguccucauggccguccucuacguccacaugcucgcccgcgccugccagcacgcccagggcaucgcccgccuccacaagcgccagcgccccguccaccagggcuucggccucaagggcgccgucacccucaccauccuccucggcaucuucuuccucugcuggggccccuucuuccuccaccucacccucaucguccucugccccgagcaccccaccugcggcugcaucuucaagaacuucaaccucuuccucgcccucaucaucugcaacgccaucaucgacccccucaucuacgccuuccacucccaggagcuccgccgcacccucaaggagguccucaccugcuccugguga

SEQ ID NO: 1819 - RNA, 954 nt, Artificial Sequence
  BAE94311 variant
auggccguccagggcucccagcgccgccuccucggcucccucaacuccacccccaccgccaucccccagcucggccucgccgccaaccagaccggcgcccgcugccucgaggucuccaucuccgacggccucuuccucucccucggccucgucucccucgucgagaacgcccucgucgucgccaccaucgccaagaaccagaaccuccacucccccauguacugcuucaucugcugccucgcccucuccgaccuccucgucuccggcuccaacguccucgagaccgccgucauccuccuccucgaggccggcgcccucgucgcccgcgccgccguccuccagcagcucgacaacgucaucgacgucaucaccugcuccuccaugcucuccucccucugcuuccucggcgccaucgccgucgaccgcuacaucuccaucuucuacgcccuccgcuaccacuccaucgucacccucccccgcgcccgccaggccgucgccgccaucugggucgccuccgucgucuucuccacccucuucaucgccuacuacgaccacgucgccguccuccucugccucgucgucuucuuccucgccaugcucguccucauggccguccucuacguccacaugcucgcccgcgccugccagcacgcccagggcaucgcccgccuccacaagcgccagcgccccguccaccagggcuucggccucaagggcgccgucacccucaccauccuccucggcaucuucuuccucugcuggggccccuucuuccuccaccucacccucaucguccucugccccgagcaccccaccugcggcugcaucuucaagaacuucaaccucuuccucgcccucaucaucugcaacgccaucaucgacccccucaucuacgccuuccacucccaggagcuccgccgcacccucaaggagguccucaccugcuccugguga

SEQ ID NO: 1820 - RNA, 954 nt, Artificial Sequence
  BAE94309 variant
auggccguccagggcucccagcgccgccuccucggcucccucaacuccacccccaccgccaucccccagcucggccucgccgccaaccagaccggcgcccgcugccucgaggucuccaucuccgacggccucuuccucucccucggccucgucucccucgucgagaacgcccucgucgucgccaccaucgccaagaaccgcaaccuccacucccccauguacugcuucaucugcugccucgcccucuccgaccuccucgucuccggcuccaacguccucgagaccgccgucauccuccuccucgaggccggcgcccucgucgcccgcgccgccguccuccagcagcucgacaacgucaucgacgucaucaccugcuccuccaugcucuccucccucugcuuccucggcgccaucgccgucgaccgcuacaucuccaucuucuacgcccuccgcuaccacuccaucgucacccucccccgcgcccgccaggccgucggcgccaucugggucgccuccgucgucuucuccacccucuucaucgccuacuacgaccacgucgccguccuccucugccucgucgucuucuuccucgccaugcucguccucauggccguccucuacguccacaugcucgcccgcgccugccagcacgcccagggcaucgcccgccuccacaagcgccagcgccccguccaccagggcuucggccucaagggcgccgucacccucaccauccuccucggcaucuucuuccucugcuggggccccuucuuccuccaccucacccucaucguccucugccccgagcaccccaccugcggcugcaucuucaagaacuucaaccucuuccucgcccucaucaucugcaacgccaucaucgacccccucaucuacgccuuccacucccaggagcuccgccgcacccucaaggagguccucaccugcuccugguga

SEQ ID NO: 1821 - RNA, 954 nt, Artificial Sequence
  BAE94308 variant
auggccguccagggcucccagcgccgccuccucggcucccucaacuccacccccaccgccaucccccagcucggccucgccgccaaccagaccggcgcccgcugccucgaggucuccaucuccgacggccucuuccucucccucggccucgucucccucgucgagaacgcccucgucgucgccaccaucgccaagaaccgcaaccuccacucccccauguacugcuucaucugcugccucgcccucuccgaccuccucgucuccggcuccaacguccucgagaccgccgucauccuccuccucgaggccggcgcccucgucgcccgcgccgccguccuccagcagcucgacaacgucaccgacgucaucaccugcuccuccaugcucuccucccucugcuuccucggcgccaucgccgucgaccgcuacaucuccaucuucuacgcccuccgcuaccacuccaucgucacccucacccgcgcccgccgcgccgucgccgccaucugggucgccuccgucgucuucuccacccucuucaucgccuacuacgaccacgucgccguccuccucugccucgucgucuucuuccucgccaugcucguccucauggccguccucuacguccacaugcucgcccgcgccugccagcacgcccagggcaucgcccgccuccacaagcgccagcgccccguccaccagggcuucggccucaagggcgccgucacccucaccauccuccucggcaucuucuuccucugcuggggccccuucuuccuccaccucacccucaucguccucugccccgagcaccccaccugcggcugcaucuucaagaacuucaaccucuuccucgcccucaucaucugcaacgccaucaucgacccccucaucuacgccuuccacucccaggagcuccgccgcacccucaaggagguccucaccugcuccugguga

SEQ ID NO: 1822 - RNA, 954 nt, Artificial Sequence
  BAE94307 variant
auggccguccagggcucccagcgccgccuccucggcucccucaacuccacccccaccgccaucccccagcucggccucgccgccaaccagaccggcgcccgcugccucgaggucuccaucuccgacggccucuuccucucccucggccucgucucccucgucgagaacgcccucgucgucgccaccaucgccaagaaccgcaaccuccacucccccauguacugcuucaucugcugccucgcccucuccgaccuccucgucuccggcuccaacaugcucgagaccgccgucauccuccuccucgaggccggcgcccucgucgcccgcgccgccguccuccagcagcucgacaacgucaucgacgucaucaccugcuccuccaugcucuccucccucugcuuccucggcgccaucgccgucgaccgcuacaucuccaucuucuacgcccuccgcuaccacuccaucgucauccucccccgcgcccgccgcgccgucgccgccaucugggucgccuccgucgucuucuccacccucuucaucgccuacuacgaccacgucgccguccuccucugccucgucgucuucuuccucgccaugcucguccucauggccguccucuacguccacaugcucgcccgcgccugccagcacgcccagggcaucgcccgccuccacaagcgccagcgccccguccaccagggcuucggccucaagggcgccgucacccucaccauccuccucggcaucuucuuccucugcuggggccccuucuuccuccaccucacccucaucguccucugccccgagcaccccaccugcggcugcaucuucaagaacuucaaccucuuccucgcccucaucaucugcaacgccaucaucgacccccucaucuacgccuuccacucccaggagcuccgccgcacccucaaggagguccucaccugcuccugguga

SEQ ID NO: 1823 - RNA, 951 nt, Artificial Sequence
  BAE94306 variant
auggccguccagggcucccagcgccgccuccucggcucccucaacuccacccccaccgccaucccccagcucggccucgccgccaaccagaccggcgcccgcugccucgaggucuccaucuccgacggccucuuccucucccucggccucgucucccucgucgagaacgcccucgucgucgccaccaucgccaagaaccgcaaccuccacucccccauguacugcuucaucugcugccucgcccucuccgaccuccucgucuccggcuccaacguccucgagaccgccgucauccuccuccucgaggccggcgcccucgucgcccgcgccgccguccuccagcagcucgacaacgucaucgacgucaucaccugcuccuccaugcucuccucccucugcuuccucggcgccaucgccgucgaccgcuacaucuccaucuacgcccuccgcuaccacuccaucgucacccucccccgcgcccgccaggccgucgccgccaucugggucgccuccgucgucuucuccacccucuucaucgccuacuacgaccacgucgccguccuccucugccucgucgucuucuuccucgccaugcucguccucauggccguccucuacguccacaugcucgcccgcgccugccagcacgcccagggcaucgcccgccuccacaagcgccagcgccccguccaccagggcuucggccucaagggcgccgucacccucaccauccuccucggcaucuucuuccucugcuggggccccuucuuccuccaccucacccucaucguccucugccccgagcaccccaccugcggcugcaucuucaagaacuucaaccucuuccucgcccucaucaucugcaacgccaucaucgacccccucaucuacgccuuccacucccaggagcuccgccgcacccucaaggagguccucaccugcuccugguga

SEQ ID NO: 1824 - RNA, 954 nt, Artificial Sequence
  AAQ62977 variant
auggccguccagggcucccagcgccgccuccucggcucccucaacuccacccccaccgccaucccccagcucggccucgccgccaaccagaccggcgcccgcugccucgaggucuccaucuccgacggccucuuccucucccucggccucgucucccucgucgagaacgcccucgucgucgccaccaucgccaagaaccgcaaccuccacucccccauguacugcuucaucugcugccucgcccucuccgaccuccucgucuccggcuccaacguccucgagaccgccgucauccuccuccucgaggccggcgcccucgucgcccgcgccgccguccuccagcagcucgacaacgucaucgacgucaucaccugcuccuccaugcucuccucccucugcuuccucggcgccaucgccgucgaccgcuacaucuccaucuucuacgcccuccgcuaccacuccaucgucacccucccccgcgcccgccgcgccgucgccgccaucugggucgccuccgucgucuucuccacccucuucaucgccuacuacgaccacgucgccguccuccucugccucgucgucuucuuccucgccaugcucguccucauggccguccucuacguccacaugcucgcccgcgccugccagcacgcccagggcaucgcccgccuccacaagcgccagcgccccguccaccagggcuucggccucaagggcgccgucacccucaccauccuccucggcaucuucuuccucugcuggggccccuucuuccuccaccucacccucaucauccucugccccgagcaccccaccugcggcugcaucuucaagaacuucaaccucuuccucgcccucaucaucugcaacgccaucaucgacccccucaucuacgccuuccacucccaggagcuccgccgcacccucaaggagguccucaccugcuccugguga

SEQ ID NO: 1825 - RNA, 954 nt, Artificial Sequence
  AAQ62975 variant
auggccguccagggcucccagcgccgccuccucggcucccucaacuccacccccaccgccaucccccagcucggccucgccgccaaccagaccggcgcccgcugccucgaggucuccaucuccgacggccucuuccucucccucggccucgucucccucgucgagaacgcccucgucgucgccaccaucgccaagaaccgcaaccuccacucccccauguacugcuucaucugcugccucgcccucuccgaccuccucgucuccggcuccaacguccucgagaccgccgucauccuccuccucgaggccggcgcccucgucgcccgcgccgucguccuccagcagcucgacaacgucaucgacgucaucaccugcuccuccaugcucuccucccucugcuuccucggcgccaucgccgucgaccgcuacaucuccaucuucuacgcccuccgcuaccacuccaucgucacccucccccgcgcccgccgcgccgucgccgccaucugggucgccuccgucgucuucuccacccucuucaucgccuacuacgaccacgucgccguccuccucugccucgucgucuucuuccucgccaugcucguccucauggccguccucuacguccacaugcucgcccgcgccugccagcacgcccagggcaucgcccgccuccacaagcgccagcgccccguccaccagggcuucggccucaagggcgccgucacccucaccauccuccucggcaucuucuuccucugcuggggccccuucuuccuccaccucacccucaucguccucugccccgagcaccccaccugcggcugcaucuucaagaacuucaaccucuuccucgcccucaucaucugcaacgccaucaucgacccccucaucuacgccuuccacucccaggagcuccgccgcacccucaaggagguccucaccugcuccugguga

SEQ ID NO: 1826 - RNA, 954 nt, Artificial Sequence
  AAQ62974 variant
auggccguccagggcucccagcgccgccuccucggcucccucaacuccacccccaccgccaucccccagcucggccucgccgccaaccagaccggcgcccgcugccucgaggucuccaucuccgacggccucuuccucucccucggccucgucucccucgucgagaacgcccucgucgucgccaccaucgccaagaaccgcaaccuccacucccccauguacugcuucaucugcugccucgcccucuccgaccuccucgucuccggcuccaacguccucgagaccgccgucauccuccuccucgaggccggcgcccucgucgcccgcgccgccguccuccagcagcucgacaacgucaucgacgucaucaccugcuccuccaugcucuccucccucugcuuccucggcgccaucgccgucgaccgcuacaucuccaucuucuacgcccuccgcuaccacuccaucgucacccucccccgcgcccgccgcgccgucgccgccaucugggucgccuccgucgucuucuccacccucuucaucgccuacuacgaccacgucgccguccuccucugccucgucgucuucuuccucgccaugcucguccucauggccguccucuacguccacaugcucgcccgcgccugccagcacgcccagggcaucgcccgccuccacaagcgccagcgccccguccaccagggcuucggccucaagggcgccgucacccucaccauccuccucggcaucuucuuccucugcuggggccccuucuuccuccaccucacccucaucguccucugccccgagcaccccaccugcggcugcaucuucaagaacuucaaccucuuccucgcccucaucaucugcaacgccaucaucgacccccucaucuacgccuuccacucccaggagcuccgccgcacccucaaggagguccucacccgcuccugguga

SEQ ID NO: 1827 - RNA, 954 nt, Artificial Sequence
  AAQ62973 variant
auggccguccagggcucccagcgccgccuccucggcucccucaacuccacccccaccgccaucccccagcucggccucgccgccaaccagaccggcgcccgcugccucgaggucuccaucuccgacggccucuuccucucccucggccucgucucccucgucgagaacgcccucgucgucgccaccaucgccaagaaccgcaaccuccacucccccauguacugcuucaucugcugccucgcccucuccgaccuccucgucuccggcuccaacguccucgagaccgccgucauccuccuccucgaggccggcgcccucgucgcccgcgccgccguccuccagcagcucgacaacgucaucgacgucaucaccugcuccuccaugcucuccucccucugcuuccucggcgccaucgccgucgaccgcuacaucuccaucuucuacgcccuccgcuaccacuccaucgucacccucccccgcgcccgccgcgccgucgccgccaucugggucgccuccgucgucuucuccacccucuucaucgccuacuacgaccacgucgccguccuccucugccucgucgucuucuuccucgccaugcucguccucauggccguccucuacguccacaugcucgcccgcgccugccagcacgcccagggcaucgcccgccuccacaagcgccagcgccccguccaccagggcuucggccucaagggcgccgucacccucaccauccuccucggcaucuucuuccucugcuggggccccuucuuccuccaccucacccucaucguccucugccccgagcaccccaccugcggcugcaucuucaagaacuucaaccucuuccucgcccucaucaucugcaacgccaucaucgacccccucaucuacgccuuccacucccaggagcuccgccgcaugcucaaggagguccucaccugcuccugguga

SEQ ID NO: 1828 - RNA, 954 nt, Artificial Sequence
  AAQ62972 variant
auggccguccagggcucccagcgccgccuccucggcucccucaacuccacccccaccgccaucccccagcucggccucgccgccaaccagaccggcgcccgcugccucgaggucuccaucuccgacggccucuuccucucccucggccucgucucccucgucgagaacgcccucgucgucgccaccaucgccaagaaccgcaaccuccacucccccauguacugcuucaucugcugccucgcccucuccgaccuccucgucuccggcuccaacguccucgagaccgccgucauccuccuccucgaggccggcgcccucgucgcccgcgccgccguccuccagcagcucgacaacgucaucgacgucaucaccugcuccuccaugcucuccucccucugcuuccucggcgccaucgccgucgaccgcuacaucuccaucuucuacgcccuccgcuaccacuccaucgucacccucccccgcgcccgccgcgccgucgccgccaucugggucgccuccgucgucuucuccacccucuucaucgccuacuacgaccacgucgccguccuccucugccucgucgucuucuuccucgccaugcucguccucauggccguccucuacguccacaugcucgccugggccugccagcacgcccagggcaucgcccgccuccacaagcgccagcgccccguccaccagggcuucggccucaagggcgccgucacccucaccauccuccucggcaucuucuuccucugcuggggccccuucuuccuccaccucacccucaucguccucugccccgagcaccccaccugcggcugcaucuucaagaacuucaaccucuuccucgcccucaucaucugcaacgccaucaucgacccccucaucuacgccuuccacucccaggagcuccgccgcacccucaaggagguccucaccugcuccugguga

SEQ ID NO: 1829 - RNA, 954 nt, Artificial Sequence
  AAQ62971 variant
auggccguccagggcucccagcgccgccuccucggcucccucaacuccacccccaccgccaucccccagcucggccucgccgccaaccagaccggcgcccgcugccucgaggucuccaucuccgacggccucuuccucucccucggccucgucucccucgucgagaacgcccucgucgucgccaccaucgccaagaaccgcaaccuccacucccccauguacugcuucaucugcugccucgcccucuccgaccuccucgucuccggcuccaacguccucgagaccgccgucauccuccuccucgaggccggcgcccucgucgcccgcgccgccguccuccagcagcucgacaacgucaucgacgucaucaccugcuccuccaugcucuccucccucugcuuccucggcgccaucgccgucgaccgcuacaucuccaucuucuacgcccuccgcuaccacuccaucgucacccucccccaggcccgccgcgccgucgccgccaucugggucgccuccgucgucuucuccacccucuucaucgccuacuacgaccacgucgccguccuccucugccucgucgucuucuuccucgccaugcucguccucauggccguccucuacguccacaugcucgcccgcgccugccagcacgcccagggcaucgcccgccuccacaagcgccagcgccccguccaccagggcuucggccucaagggcgccgucacccucaccauccuccucggcaucuucuuccucugcuggggccccuucuuccuccaccucacccucaucguccucugccccgagcaccccaccugcggcugcaucuucaagaacuucaaccucuuccucgcccucaucaucugcaacgccaucaucgacccccucaucuacgccuuccacucccaggagcuccgccgcacccucaaggagguccucaccugcuccugguga

SEQ ID NO: 1830 - RNA, 954 nt, Artificial Sequence
  AAQ62970 variant
auggccguccagggcucccagcgccgccuccucggcucccucaacuccacccccaccgccaucccccagcucggccucgccgccaaccagaccggcgcccgcugccucgaggucuccaucuccgacggccucuuccucucccucggccucgucucccucgucgagaacgcccucgucgucgccaccaucgccaagaaccgcaaccuccacucccccauguacugcuucaucugcugccucgcccuccucgaccuccucgucuccggcuccaacguccucgagaccgccgucauccuccuccucgaggccggcgcccucgucgcccgcgccgccguccuccagcagcucgacaacgucaucgacgucaucaccugcuccuccaugcucuccucccucugcuuccucggcgccaucgccgucgaccgcuacaucuccaucuucuacgcccuccgcuaccacuccaucgucacccucccccgcgcccgccgcgccgucgccgccaucugggucgccuccgucgucuucuccacccucuucaucgccuacuacgaccacgucgccguccuccucugccucgucgucuucuuccucgccaugcucguccucauggccguccucuacguccacaugcucgcccgcgccugccagcacgcccagggcaucgcccgccuccacaagcgccagcgccccguccaccagggcuucggccucaagggcgccgucacccucaccauccuccucggcaucuucuuccucugcuggggccccuucuuccuccaccucacccucaucguccucugccccgagcaccccaccugcggcugcaucuucaagaacuucaaccucuuccucgcccucaucaucugcaacgccaucaucgacccccucaucuacgccuuccacucccaggagcuccgccgcacccucaaggagguccucaccugcuccugguga

SEQ ID NO: 1831 - RNA, 954 nt, Artificial Sequence
  AAQ62969 variant
auggccguccagggcucccagcgccgccuccucggcucccucaacuccacccccaccgccaucccccagcucggccucgccgccaaccagaccggcgcccgcugccucgaggucuccaucuccgacggccuccuccucucccucggccucgucucccucgucgagaacgcccucgucgucgccaccaucgccaagaaccgcaaccuccacucccccauguacugcuucaucugcugccucgcccucuccgaccuccucgucuccggcuccaacguccucgagaccgccgucauccuccuccucgaggccggcgcccucgucgcccgcgccgccguccuccagcagcucgacaacgucaucgacgucaucaccugcuccuccaugcucuccucccucugcuuccucggcgccaucgccgucgaccgcuacaucuccaucuucuacgcccuccgcuaccacuccaucgucacccucccccgcgcccgccgcgccgucgccgccaucugggucgccuccgucgucuucuccacccucuucaucgccuacuacgaccacgucgccguccuccucugccucgucgucuucuuccucgccaugcucguccucauggccguccucuacguccacaugcucgcccgcgccugccagcacgcccagggcaucgcccgccuccacaagcgccagcgccccguccaccagggcuucggccucaagggcgccgucacccucaccauccuccucggcaucuucuuccucugcuggggccccuucuuccuccaccucacccucaucguccucugccccgagcaccccaccugcggcugcaucuucaagaacuucaaccucuuccucgcccucaucaucugcaacgccaucaucgacccccucaucuacgccuuccacucccaggagcuccgccgcacccucaaggagguccucaccugcuccugguga

SEQ ID NO: 1832 - RNA, 954 nt, Artificial Sequence
  AAO21073 variant
auggccguccagggcucccagcgccgccuccucggcucccucaacuccacccccaccgccaucccccagcucggccucgccgccaaccagaccggcgcccgcugccucgaggucuccaucuccgacggccucuuccucucccucggccucgucucccucgucgagaacgcccucgucgucgccaccaucgccaagaaccgcaaccuccacucccccauguacugcuucaucugcugccucgcccucuccgaccuccucgucuccggcuccaacguccgcgagaccgccgucauccuccuccucgaggccggcgcccucgucgcccgcgccgccguccuccagcagcucgacaacgucaucgacgucaucaccugcuccuccaugcucuccucccucugcuuccucggcgccaucgccgucgaccgcuacaucuccaucuucuacgcccuccgcuaccacuccaucgucacccucccccgcgcccgccgcgccgucgccgccaucugggucgccuccgucgucuucuccacccucuucaucgccuacuacgaccacgucgccguccuccucugccucgucgucuucuuccucgccaugcucguccucauggccguccucuacguccacaugcucgcccgcgccugccagcacgcccagggcaucgcccgccuccacaagcgccagcgccccguccaccagggcuucggccucaagggcgccgucacccucaccauccuccucggcaucuucuuccucugcuggggccccuucuuccuccaccucacccucaucguccucugccccgagcaccccaccugcggcugcaucuucaagaacuucaaccucuuccucgcccucaucaucugcaacgccaucaucgacccccucaucuacgccuuccacucccaggagcuccgccgcacccucaaggagguccucaccugcuccugguga

SEQ ID NO: 1833 - RNA, 954 nt, Artificial Sequence
  AHC09567 variant
auggccguccagggcucccagcgccgccuccucggcucccucaacuccacccccaccgccaucccccagcucggccucgccgccaaccagaccggcgcccgcugccucgaggucuccaucuccgacggccucuuccucucccucggccucgucucccucgucgagaacgcccucgucgucgccaccaucgccaagaaccgcaaccuccacucccccauguacugcuucaucugcugccucgcccuccccgaccuccucgucuccggcuccaacguccucgagaccgccgucauccuccuccucgaggccggcgcccucgucgcccgcgccgccguccuccagcagcucgacaacgucaucgacgucaucaccugcuccuccaugcucuccucccucugcuuccucggcgccaucgccgucgaccgcuacaucuccaucuucuacgcccuccgcuaccacuccaucgucacccucccccgcgcccgccgcgccgucgccgccaucugggucgccuccgucgucuucuccacccucuucaucgccuacuacgaccacgucgccguccuccucugccucgucgucuucuuccucgccaugcucguccucauggccguccucuacguccacaugcucgcccgcgccugccagcacgcccagggcaucgcccgccuccacaagcgccagcgccccguccaccagggcuucggccucaagggcgccgucacccucaccauccuccucggcaucuucuuccucugcuggggccccuucuuccuccaccucacccucaucguccucugccccgagcaccccaccugcggcugcaucuucaagaacuucaaccucuuccucgcccucaucaucugcaacgccaucaucgacccccucaucuacgccuuccacucccaggagcuccgccgcacccucaaggagguccucaccugcuccugguga

SEQ ID NO: 1834 - RNA, 954 nt, Artificial Sequence
  AHC09812 variant
auggccguccagggcucccagcgccgccuccucggcucccucaacuccacccccaccgccaucccccagcucggccucgccgccaaccagaccggcgcccgcugccucgaggucuccaucuccgacggccucuuccucucccucggccucgucucccucgucgagaacgcccucgucgucgccaccaucgccaagaaccgcaaccuccacucccccauguacugcuucaucugcugccucgcccucuccgaccuccucgucuccggcuccaacguccucgagaccgccgucauccuccuccucgaggccggcgcccucgucgcccgcgccgccguccuccagcagcucgacaacgucaucgacgucaucaccugcuccuccaugcucuccucccucugcuuccucggcgccaucgccgucgaccgcuacaucuccaucuucuacgcccuccgcuaccacuccaucgucacccucccccgcgcccgccgcgccgucgccgccaucugggucgccuccgucgucuucuccacccucuucaucgccuacuacgaccacgucgccguccuccucugccucauggucuucuuccucgccaugcucguccucauggccguccucuacguccacaugcucgcccgcgccugccagcacgcccagggcaucgcccgccuccacaagcgccagcgccccguccaccagggcuucggccucaagggcgccgucacccucaccauccuccucggcaucuucuuccucugcuggggccccuucuuccuccaccucacccucaucguccucugccccgagcaccccaccugcggcugcaucuucaagaacuucaaccucuuccucgcccucaucaucugcaacgccaucaucgacccccucaucuacgccuuccacucccaggagcuccgccgcacccucaaggagguccucaccugcuccugguga

SEQ ID NO: 1835 - RNA, 954 nt, Artificial Sequence
  AHC10192 variant
auggccguccagggcucccagcgccgccuccucggcucccucaacuccacccccaccgccaucccccagcucggccucgccgccaaccagaccggcgcccgcugccucgaggucuccaucuccgacggccucuuccucucccucggccucgucucccucgucgagaacgcccucgucgucgccaccaucgccaagaaccgcaaccuccacucccccauguacugcuucaucugcugccucgcccucuccgaccuccucgucuccggcuccaacguccucgagaccgccgucauccuccuccucgaggccggcgcccucgucgcccgcgccgccguccuccagcagcucgacaacgucaucgacgucaucaccugcuccuccaugcucuccucccucugcuuccucggcgccaucgccgucgaccgcuacaucuccaucuucuacgcccuccgcuaccacuccaucgucacccucccccgcgcccgccgcgccgucgccgccaucugggucgccuccgucgucuucuccacccucuucaucgccuacuacgaccacgucgccguccuccucugccucgucgucuucuuccucgccaugcucguccucauggccguccucuacguccacaugcucgcccgcgccugccagcacgcccagggcaccgcccgccuccacaagcgccagcgccccguccaccagggcuucggccucaagggcgccgucacccucaccauccuccucggcaucuucuuccucugcuggggccccuucuuccuccaccucacccucaucguccucugccccgagcaccccaccugcggcugcaucuucaagaacuucaaccucuuccucgcccucaucaucugcaacgccaucaucgacccccucaucuacgccuuccacucccaggagcuccgccgcacccucaaggagguccucaccugcuccugguga

SEQ ID NO: 1836 - RNA, 954 nt, Artificial Sequence
  AHC09641 variant
auggccguccagggcucccagcgccgccuccucggcucccucaacuccacccccaccgccaucccccagcucggccucgccgccaaccagaccggcgcccgcugccucgaggucuccaucuccgacggccucuuccucucccucggccucgucucccucgucgagaacgcccucgucgucgccaccaucgccaagaaccgcaaccuccacucccccauguacugcuucaucugcugccucgcccucuccgaccuccucgucuccggcuccaacguccucgagaccgccgucauccuccuccucgaggccggcgcccucgucgcccgcgccgccguccuccagcagcucgacaacgucaucgacgucaucaccugcuccuccaugcucuccucccucugcuuccucggcgccaucgccgucgaccgcuacaucuccaucuucuacgcccuccgcuaccacuccaccgucacccucccccgcgcccgccgcgccgucgccgccaucugggucgccuccgucgucuucuccacccucuucaucgccuacuacgaccacgucgccguccuccucugccucgucgucuucuuccucgccaugcucguccucauggccguccucuacguccacaugcucgcccgcgccugccagcacgcccagggcaucgcccgccuccacaagcgccagcgccccguccaccagggcuucggccucaagggcgccgucacccucaccauccuccucggcaucuucuuccucugcuggggccccuucuuccuccaccucacccucaucguccucugccccgagcaccccaccugcggcugcaucuucaagaacuucaaccucuuccucgcccucaucaucugcaacgccaucaucgacccccucaucuacgccuuccacucccaggagcuccgccgcacccucaaggagguccucaccugcuccugguga

SEQ ID NO: 1837 - RNA, 954 nt, Artificial Sequence
  AHC10044 variant
auggccguccagggcucccagcgccgccuccucggcucccucaacuccacccccaccgccaucccccagcucggccucgccgccaaccagaccggcgcccgcuaccucgaggucuccaucuccgacggccucuuccucucccucggccucgucucccucgucgagaacgcccucgucgucgccaccaucgccaagaaccgcaaccuccacucccccauguacugcuucaucugcugccucgcccucuccgaccuccucgucuccggcuccaacguccucgagaccgccgucauccuccuccucgaggccggcgcccucgucgcccgcgccgccguccuccagcagcucgacaacgucaucgacgucaucaccugcuccuccaugcucuccucccucugcuuccucggcgccaucgccgucgaccgcuacaucuccaucuucuacgcccuccgcuaccacuccaucgucacccucccccgcgcccgccgcgccgucgccgccaucugggucgccuccgucgucuucuccacccucuucaucgccuacuacgaccacgucgccguccuccucugccucgucgucuucuuccucgccaugcucguccucauggccguccucuacguccacaugcucgcccgcgccugccagcacgcccagggcaucgcccgccuccacaagcgccagcgccccguccaccagggcuucggccucaagggcgccgucacccucaccauccuccucggcaucuucuuccucugcuggggccccuucuuccuccaccucacccucaucguccucugccccgagcaccccaccugcggcugcaucuucaagaacuucaaccucuuccucgcccucaucaucugcaacgccaucaucgacccccucaucuacgccuuccacucccaggagcuccgccgcacccucaaggagguccucaccugcuccugguga

SEQ ID NO: 1838 - RNA, 954 nt, Artificial Sequence
  AHC09532 variant
auggccguccagggcucccagcgccgccuccucggcucccucaacuccacccccaccgccaucccccagcucggccucgccgccaaccagaccggcgcccgcugccucgaggucuccaucuccgacggccucuuccucucccucggccucgucucccucgucgagaacgcccucguccucgccaccaucgccaagaaccgcaaccuccacucccccauguacugcuucaucugcugccucgcccucuccgaccuccucgucuccggcuccaacguccucgagaccgccgucauccuccuccucgaggccggcgcccucgucgcccgcgccgccguccuccagcagcucgacaacgucaucgacgucaucaccugcuccuccaugcucuccucccucugcuuccucggcgccaucgccgucgaccgcuacaucuccaucuucuacgcccuccgcuaccacuccaucgucacccucccccgcgcccgccgcgccgucgccgccaucugggucgccuccgucgucuucuccacccucuucaucgccuacuacgaccacgucgccguccuccucugccucgucgucuucuuccucgccaugcucguccucauggccguccucuacguccacaugcucgcccgcgccugccagcacgcccagggcaucgcccgccuccacaagcgccagcgccccguccaccagggcuucggccucaagggcgccgucacccucaccauccuccucggcaucuucuuccucugcuggggccccuucuuccuccaccucacccucaucguccucugccccgagcaccccaccugcggcugcaucuucaagaacuucaaccucuuccucgcccucaucaucugcaacgccaucaucgacccccucaucuacgccuuccacucccaggagcuccgccgcacccucaaggagguccucaccugcuccugguga

SEQ ID NO: 1839 - RNA, 954 nt, Artificial Sequence
  AHC11042 variant
auggccguccagggcucccagcgccgccuccucggcucccucaacuccacccccaccgccaucccccagcucggccucgccgccaaccagaccggcgcccgcugccucgaggucuccaucuccgacggccucuuccucucccucggccucgucucccucgucgagaacgcccucgucgucgccaccaucgccaagaaccgcaaccuccacucccccauguacugcuucaucugcugccucccccucuccgaccuccucgucuccggcuccaacguccucgagaccgccgucauccuccuccucgaggccggcgcccucgucgcccgcgccgccguccuccagcagcucgacaacgucaucgacgucaucaccugcuccuccaugcucuccucccucugcuuccucggcgccaucgccgucgaccgcuacaucuccaucuucuacgcccuccgcuaccacuccaucgucacccucccccgcgcccgccgcgccgucgccgccaucugggucgccuccgucgucuucuccacccucuucaucgccuacuacgaccacgucgccguccuccucugccucgucgucuucuuccucgccaugcucguccucauggccguccucuacguccacaugcucgcccgcgccugccagcacgcccagggcaucgcccgccuccacaagcgccagcgccccguccaccagggcuucggccucaagggcgccgucacccucaccauccuccucggcaucuucuuccucugcuggggccccuucuuccuccaccucacccucaucguccucugccccgagcaccccaccugcggcugcaucuucaagaacuucaaccucuuccucgcccucaucaucugcaacgccaucaucgacccccucaucuacgccuuccacucccaggagcuccgccgcacccucaaggagguccucaccugcuccugguga

SEQ ID NO: 1840 - RNA, 954 nt, Artificial Sequence
  AHC10733 variant
auggccguccagggcucccagcgccgccuccucggcucccucaacuccacccccaccgccaucccccagcucggccucgccgccaaccagaccggcgcccgcugccucgaggucuccaucuccgacggccucuuccucucccucggccucgucucccucgucgagaacgcccucgucgucgccaccaucgccaagaaccgcaaccuccacucccccauguacugcuucaucugcugccucgcccucuccgaccuccucgucuccggcuccaacguccucgagaccgccgucauccuccuccucgaggccggcgcccucgucgcccgcgccgccguccuccagcagcucgacaacgucaucgacgucaucaccugcuccuccaugcucuccucccucugcuuccucggcgccaucgccgucgaccgcuacaucuccaucuucuacgcccuccgcuaccacuccaucgucacccucccccgcgcccgccgcgccgucgccgccaucugggucgccuccgucgucuucuccacccucuucaucgccuacuacgaccacgucgccguccuccucugccucgucgucuucuuccucgccaugcucguccucauggccguccucuacguccacaugcucgcccgcgccugccagcacgcccagggcaucgcccgccuccacaagcgccagcgccccguccaccagggcuucggccucaagggcgccgucacccucaccauccuccucggcaucuucuuccucugcuggggccccuucuuccuccaccucacccucaucguccucugccccgagcaccccaccugcggcugcaucuucaagaacuucucccucuuccucgcccucaucaucugcaacgccaucaucgacccccucaucuacgccuuccacucccaggagcuccgccgcacccucaaggagguccucaccugcuccugguga

SEQ ID NO: 1841 - RNA, 954 nt, Artificial Sequence
  AHC10696 variant
auggccguccagggcucccagcgccgccuccucggcucccucaacuccacccccaccgccaucccccagcucggccucgccgccaaccagaccggcgcccgcugccucgaggucuccaucuccgacggccucuuccucucccucggccucgucucccucgucgagaacgcccucgucgucgccaccaucgccaagaaccgcaaccuccacucccccauguacugcuucaucugcugccucgcccucuccgaccuccucgucuccggcuccaacguccucgagaccgccgucauccuccuccucgaggccggcgcccucgucgcccgcgccgccguccuccagcagcucgacaacgucaucgacgucaucaccugcuccuccaugcucuccucccucugcuuccucggcgccaucgccgucgaccgcuacaucuccaucuucuacgcccuccgcuaccacuccaucgucacccucccccgcgcccgccgcgccgucgccgccaucugggucgccuccgucgucuucuccacccucuucaucgccuacuacgaccacgucgccguccuccucugccucgucgucuucuuccucgccaugcucguccucauggccguccucuacguccacaugcucgcccgcgccugccagcacgcccagggcaucgcccgccuccacaagcgccagcgccccguccaccagggcuucggccucaagggcgccgucacccucaccauccuccucggcaucuucuuccucugcuggggccccuucuuccuccaccucacccucaucguccucugccccgagcaccccaccugcggcugcaucuucaagaacuucaaccucuuccucgcccucaucaucugcaacgccaucaucgacccccucauccacgccuuccacucccaggagcuccgccgcacccucaaggagguccucaccugcuccugguga

SEQ ID NO: 1842 - RNA, 954 nt, Artificial Sequence
  AHC09527 variant
auggccguccagggcucccagcgccgccuccucggcucccucaacuccacccccaccgccaucccccagcucggccucgccgccaaccagaccggcgcccgcugccucgaggucuccaucuccgacggccucuuccucucccucggccucgucucccucgucgagaacgcccucgucgucgccaccaucgccaagaaccgcaaccuccacucccccauguacugcuucaucugcugccucgcccucuccgaccuccucgucuccggcuccaacguccucgagaccgccgucauccuccuccucgaggccggcgcccucgucgcccgcgccgccguccuccagcagcucgacaacgucaucgacgucaucaccugcuccuccaugcucuccucccucugcuuccucggcgccaucgccgucgaccgcuacaucuccaucuucuacgcccuccgcuaccacuccaucgucacccucccccgcgcccgccgcgccgucgccgccaucugggucgccuccgucgucuucuccacccucuucaucgccuacuacgaccacgucgccguccuccucugccucgucgucuucuuccucgccaugcucguccucauggccguccucuacguccacaugcucgcccgcgccugccagcacgcccagggcaucgcccgccuccacaagcgccagcgccccguccaccagggcuucggccucaagggcgccgucacccucaccauccuccucggcaucuucuuccucugcuggggccccuucuuccuccaccucacccucaucguccucugccccgagcaccccaccugcggcugcaucuucaagaacuucaaccucuuccucgcccucaucaucugcaacgccaucauccacccccucaucuacgccuuccacucccaggagcuccgccgcacccucaaggagguccucaccugcuccugguga

SEQ ID NO: 1843 - RNA, 954 nt, Artificial Sequence
  AHC10869 variant
auggccguccagggcucccagcgccgccuccucggcucccucaacuccacccccaccgccaucccccagcucggccucgccgccaaccagaccggcgcccgcugccucgaggucuccaucuccgacggccucuuccucucccucggccucgucucccucgucgagaacgcccucgucgucgccaccaucgccaagaaccgcaaccuccacucccccauguacugcuucaucugcugccucgcccucuccgaccuccucgucuccggcuccaacguccucgagaccgccgucauccuccuccucgaggccggcgcccucgucgcccgcgccgccguccuccagcagcucgacaacgucaucgacgucaucaccugcuccuccaugcucuccucccucugcuuccucggcgccaucgccgucgaccgcuacaucuccaucuucuacgcccuccgcuaccacuccaucgucacccucccccgcgcccgccgcgccgucgccgccaucugggucgccuccgucgucuucuccacccucuucaucgccuacuacgaccacgucgccguccuccucugccucgucgucuucuuccucgccaugcucguccucauggccguccucuacguccacaugcucgcccgcgccugccagcacgcccagggcaucgcccgccuccacaagcgccagcaccccguccaccagggcuucggccucaagggcgccgucacccucaccauccuccucggcaucuucuuccucugcuggggccccuucuuccuccaccucacccucaucguccucugccccgagcaccccaccugcggcugcaucuucaagaacuucaaccucuuccucgcccucaucaucugcaacgccaucaucgacccccucaucuacgccuuccacucccaggagcuccgccgcacccucaaggagguccucaccugcuccugguga

SEQ ID NO: 1844 - RNA, 954 nt, Artificial Sequence
  AHC11615 variant
auggccguccagggcucccagcgccgccuccucggcucccucaacuccacccccaccgccaucccccagcucggccucgccgccaaccagaccggcgcccgcugccucgaggucuccaucuccgacggccucuuccucucccucggccucgucucccucgucgagaacgcccucgucgucgccaccaucgccaagaaccgcaaccuccacucccccauguacugcuucaucugcugccucgcccucuccgaccuccucgucuccggcuccaacguccucgagaccgccgucauccuccuccucgaggccggcgcccucgucgcccgcgccgccguccuccagcagcucgacaacgucaucgacgucaucaccugcuccuccaugcucuccucccucugcuuccucggcgccaucgccgucgaccgcuacaucuccaucuucuacgcccuccgcuaccacuccaucgucacccucccccgcgcccgccgcgccgucgccgccaucugggucgccuccgucgucuucuccacccucuucaucgccuacuacgaccacgucgccguccuccucugccucgucgucuucuuccucgccaugcucguccucauggccguccucuacguccacaugcucgcccgcgccugccagcacgcccagggcaucgcccgccuccacaagcgccagcgccccguccaccagggcuucggccucaagggcgccgucacccucaccauccuccucggcaucuucuuccucugcuggggccccuucuuccuccaccucacccucaucguccucugccccgagcaccccaccugcggcugcaucuucaagaacuucaaccucuuccucacccucaucaucugcaacgccaucaucgacccccucaucuacgccuuccacucccaggagcuccgccgcacccucaaggagguccucaccugcuccugguga

SEQ ID NO: 1845 - RNA, 954 nt, Artificial Sequence
  AHC09535 variant
auggccguccagggcucccagcgccgccuccucggcucccucaacuccacccccaccgccaucccccagcucggccucgccgccaaccagaccggcgcccgcugccucgaggucuccaucuccgacggccucuuccucucccucggccucgucucccucgucgagaacgcccucgucgucgccaccaucgccaagaaccgcaaccuccacucccccauguacugcuucaucugcugccucgcccucuccgaccuccucgucuccggcuccaacguccucgagaccgccgucauccuccuccucgaggccggcgcccucgucgcccgcgccgccguccuccagcagcucgacaacgucaucgacgucaucaccugcuccuccaugcucuccucccucugcuuccucggcgccaucgccgucgaccacuacaucuccaucuucuacgcccuccgcuaccacuccaucgucacccucccccgcgcccgccgcgccgucgccgccaucugggucgccuccgucgucuucuccacccucuucaucgccuacuacgaccacgucgccguccuccucugccucgucgucuucuuccucgccaugcucguccucauggccguccucuacguccacaugcucgcccgcgccugccagcacgcccagggcaucgcccgccuccacaagcgccagcgccccguccaccagggcuucggccucaagggcgccgucacccucaccauccuccucggcaucuucuuccucugcuggggccccuucuuccuccaccucacccucaucguccucugccccgagcaccccaccugcggcugcaucuucaagaacuucaaccucuuccucgcccucaucaucugcaacgccaucaucgacccccucaucuacgccuuccacucccaggagcuccgccgcacccucaaggagguccucaccugcuccugguga

SEQ ID NO: 1846 - RNA, 954 nt, Artificial Sequence
  AHC11840 variant
auggccguccagggcucccagcgccgccuccucggcucccucaacuccacccccaccgccaucccccagcucggccucgccgccaaccagaccggcgcccgcugccucgaggucuccaucuccgacggccucuuccucucccucggccucgucucccucgucgagaacgcccucgucgucgccaccaucgccaagaaccgcaaccuccacucccccauguacugcuucaucugcugccucgcccucuccgaccuccucgucuccggcuccaacguccucgagaccgccgucauccuccuccucgaggccggcgcccucgucgcccgcgccgccguccuccagcagcucgacaacgucaucgacgucaucaccugcuccuccaugcucuccucccucugcuuccucggcgccaucgccgucgaccgcuacaucuccaucuucuacgcccuccgcuaccacuccaucgucacccucccccgcgcccgccgcgccgucgccgccaucugggucgccuccgucgucuucuccacccucuucaucgccuacuacgaccacgucgccguccuccucugccucgucgucuucuuccucgccaugcucguccucauggccguccucuacguccacaugcucgcccgcgccugccagcacgcccagggcaucgcccgccuccacaagcgccagcgccccguccaccagggcuucggccucaagggcgccgucacccucaccauccuccucggcaucuucuuccucugcuggggccccuucuuccuccaccucacccucaucguccucugccccgagcaccccaccugcggcugcaucuucaagaacuucaaccucuuccucgcccucaucaucugcaacgccaucaucgacccccucaucuacgccuuccacaaccaggagcuccgccgcacccucaaggagguccucaccugcuccugguga

SEQ ID NO: 1847 - RNA, 954 nt, Artificial Sequence
  AHC09665 variant
auggccguccagggcucccagcgccgccuccucggcucccucaacuccacccccaccgccaucccccagcucggccucgccgccaaccagaccggcgcccgcugccucgaggucuccaucuccgacggccucuuccucucccucggccucgucucccucgucgagaacgcccucgucgucgccaccaucgccaagaaccgcaaccuccacucccccauguacugcuucaucugcugccucgcccucuccgaccuccucgucuccggcuccaacguccucgagaccgccgucauccuccuccucgaggccggcgcccucgucgcccgcgccgccguccuccagcagcucgacaacgucaucgacaugaucaccugcuccuccaugcucuccucccucugcuuccucggcgccaucgccgucgaccgcuacaucuccaucuucuacgcccuccgcuaccacuccaucgucacccucccccgcgcccgccgcgccgucgccgccaucugggucgccuccgucgucuucuccacccucuucaucgccuacuacgaccacgucgccguccuccucugccucgucgucuucuuccucgccaugcucguccucauggccguccucuacguccacaugcucgcccgcgccugccagcacgcccagggcaucgcccgccuccacaagcgccagcgccccguccaccagggcuucggccucaagggcgccgucacccucaccauccuccucggcaucuucuuccucugcuggggccccuucuuccuccaccucacccucaucguccucugccccgagcaccccaccugcggcugcaucuucaagaacuucaaccucuuccucgcccucaucaucugcaacgccaucaucgacccccucaucuacgccuuccacucccaggagcuccgccgcacccucaaggagguccucaccugcuccugguga

SEQ ID NO: 1848 - RNA, 954 nt, Artificial Sequence
  AHC11324 variant
auggccguccagggcucccagcgccgccuccucggcucccucaacuccacccccaccgccaucccccagcucggccucgccgccaaccagaccggcgcccgcugccucgaggucuccaucuccgacggccucuuccucucccucggccucgucucccucgucgagaacgcccucgucgucgccaccaucgccaagaaccgcaaccuccacucccccauguacugcuucaucugcugccucgcccucuccgaccuccucgucuccggcuccaacguccucgagaccgccgucauccuccuccucgaggccggcgcccucgucgcccgcgccgccguccuccagcagcucgacaacgucaucgacgucaucaccugcuccuccaugcucuccucccucugcuuccucggcgccaucgccgucgaccgcuacaucuccaucuucuacgcccuccgcuaccacuccaucgucacccucccccgcgcccgccgcgccgucgccgccaucugggucgccuccgucgucuucuccacccucuucaucgccuacuacgaccacgucgccguccuccucugccucgucgucuucuuccucgccaugcucguccucauggccguccucuacguccacaugcucgcccgcgccugccagcacgcccagggcaucgcccgccuccacaagcgccagcgccccguccaccagggcuucggccucaagggcgccgucacccucaccauccuccucggcaucuucuuccucugcuggggccccuucuuccuccaccucacccucaucguccucugccccgagcaccccaccugcggcugcaucuucaagaacuucaaccucuuccucgcccucaucauccgcaacgccaucaucgacccccucaucuacgccuuccacucccaggagcuccgccgcacccucaaggagguccucaccugcuccugguga

SEQ ID NO: 1849 - RNA, 954 nt, Artificial Sequence
  AHC09521 variant
auggccguccagggcucccagcgccgccuccucggcucccucaacuccacccccaccgccaucccccagcucggccucgccgccaaccagaccggcgcccgcugccucgaggucuccaucuccgacggccucuuccucucccucggccucgucucccucgucgagaacgcccucgucgucgccaccaucgccaagaaccgcaaccuccacucccccauguacugcuucaucugcugccucgcccucuccgaccuccucgucuccggcuccaacguccucgagaccgccgucauccuccuccucgaggccggcgcccucgucgcccgcgccgccguccuccagcagcucgacaacgucaucgacgucaucaccugcuccuccaugcucuccucccucugcuuccucggcgccaucgccgucgaccgcuacaucuccaucuucuacgcccuccgcuaccacuccaucgucacccuccccugggcccgccgcgccgucgccgccaucugggucgccuccgucgucuucuccacccucuucaucgccuacuacgaccacgucgccguccuccucugccucgucgucuucuuccucgccaugcucguccucauggccguccucuacguccacaugcucgcccgcgccugccagcacgcccagggcaucgcccgccuccacaagcgccagcgccccguccaccagggcuucggccucaagggcgccgucacccucaccauccuccucggcaucuucuuccucugcuggggccccuucuuccuccaccucacccucaucguccucugccccgagcaccccaccugcggcugcaucuucaagaacuucaaccucuuccucgcccucaucaucugcaacgccaucaucgacccccucaucuacgccuuccacucccaggagcuccgccgcacccucaaggagguccucaccugcuccugguga

SEQ ID NO: 1850 - RNA, 954 nt, Artificial Sequence
  AHC11794 variant
auggccguccagggcucccagcgccgccuccucggcucccucaacuccacccccaccgccaucccccagcucggccucgccgccaaccagaccggcgcccgcugccucgaggucuccaucuccgacggccucuuccucucccucggccucgucucccucgucgagaacgcccucgucgucgccaccaucgccaagaaccgcaaccuccacucccccauguacugcuucaucugcugccucgcccucuccgaccuccucgucuccggcuccaacguccucgagaccgccgucauccuccuccucgaggccggcgcccucgucgcccgcgccgccguccuccagcagcucgacaacgucaucgacgucaucaccugcuccuccaugcucuccucccucugcuuccucggcgccaucgccgucgaccgcuacaucuccaucuucuacgcccuccgcuaccacuccaucgucacccucccccgcgcccgccgcgccgucgccgccaucugggucgccuccgucgucuucuccacccucuucaucgccuacuacgaccacgucgccguccuccucugccucgucgucuucuuccucgccaugcucguccucauggccguccucuacguccacaugcucgcccgcgccugccagcacgcccagggcaucgcccgccuccacaagcgccagcgccccguccaccagggcuucggccucaagggcgccgucacccucaccauccuccucggcaucuucuuccucugcuggggccccuucuuccuccaccucacccucaucguccucugccccgagcaccccgagugcggcugcaucuucaagaacuucaaccucuuccucgcccucaucaucugcaacgccaucaucgacccccucaucuacgccuuccacucccaggagcuccgccgcacccucaaggagguccucaccugcuccugguga

SEQ ID NO: 1851 - RNA, 954 nt, Artificial Sequence
  AHC10874 variant
auggccguccagggcucccagcgccgccuccucggcucccucaacuccacccccaccgccaucccccagcucggccucgccgccaaccagaccggcgcccgcugccucgaggucuccaucuccgacggccucuuccucucccucggccucgucucccucgucgagaacgcccucgucgucgccaccaucgccaagaaccgcaaccuccacucccccauguacugcuucaucugcugccucgcccucuccgagcuccucgucuccggcuccaacguccucgagaccgccgucauccuccuccucgaggccggcgcccucgucgcccgcgccgccguccuccagcagcucgacaacgucaucgacgucaucaccugcuccuccaugcucuccucccucugcuuccucggcgccaucgccgucgaccgcuacaucuccaucuucuacgcccuccgcuaccacuccaucgucacccucccccgcgcccgccgcgccgucgccgccaucugggucgccuccgucgucuucuccacccucuucaucgccuacuacgaccacgucgccguccuccucugccucgucgucuucuuccucgccaugcucguccucauggccguccucuacguccacaugcucgcccgcgccugccagcacgcccagggcaucgcccgccuccacaagcgccagcgccccguccaccagggcuucggccucaagggcgccgucacccucaccauccuccucggcaucuucuuccucugcuggggccccuucuuccuccaccucacccucaucguccucugccccgagcaccccaccugcggcugcaucuucaagaacuucaaccucuuccucgcccucaucaucugcaacgccaucaucgacccccucaucuacgccuuccacucccaggagcuccgccgcacccucaaggagguccucaccugcuccugguga

SEQ ID NO: 1852 - RNA, 954 nt, Artificial Sequence
  AHC09597 variant
auggccguccagggcucccagcgccgccuccucggcucccucaacuccacccccaccgccaucccccagcucggccucgccgccaaccagaccggcgcccgcugccucgaggucuccaucuccgacggccucuuccucucccucggccucgucucccucgucgagaacgcccucgucgucgccaccaucgccaagaaccgcaaccuccacucccccauguacugcuucaucugcugccucgcccucuccgaccuccucgucuccggcuccaacguccucgagaccgccgucauccuccuccucgaggccggcgcccucgucgcccgcgccgccguccuccagcagcucgacaacgucaucgacgucaucaccugcuccuccaugcucuccucccucugcuuccucggcgccaucgccgucgaccgcuacaucuccaucuucuacgcccucugcuaccacuccaucgucacccucccccgcgcccgccgcgccgucgccgccaucugggucgccuccgucgucuucuccacccucuucaucgccuacuacgaccacgucgccguccuccucugccucgucgucuucuuccucgccaugcucguccucauggccguccucuacguccacaugcucgcccgcgccugccagcacgcccagggcaucgcccgccuccacaagcgccagcgccccguccaccagggcuucggccucaagggcgccgucacccucaccauccuccucggcaucuucuuccucugcuggggccccuucuuccuccaccucacccucaucguccucugccccgagcaccccaccugcggcugcaucuucaagaacuucaaccucuuccucgcccucaucaucugcaacgccaucaucgacccccucaucuacgccuuccacucccaggagcuccgccgcacccucaaggagguccucaccugcuccugguga

SEQ ID NO: 1853 - RNA, 1665 nt, Artificial Sequence
  CCDS816.1 variant
augaccgcccccggcgccgccggccgcugcccccccaccaccuggcucggcucccuccuccuccucgucugccuccucgccucccgcuccaucaccgaggaggucuccgaguacugcucccacaugaucggcuccggccaccuccagucccuccagcgccucaucgacucccagauggagaccuccugccagaucaccuucgaguucgucgaccaggagcagcucaaggaccccgucugcuaccucaagaaggccuuccuccucguccaggacaucauggaggacaccaugcgcuuccgcgacaacacccccaacgccaucgccaucguccagcuccaggagcucucccuccgccucaaguccugcuucaccaaggacuacgaggagcacgacaaggccugcguccgcaccuucuacgagaccccccuccagcuccucgagaaggucaagaacgucuucaacgagaccaagaaccuccucgacaaggacuggaacaucuucuccaagaacugcaacaacuccuucgccgagugcuccucccaggacgucgucaccaagcccgacugcaacugccucuaccccaaggccauccccuccuccgaccccgccuccgucuccccccaccagccccucgcccccuccauggcccccgucgccggccucaccugggaggacuccgagggcaccgagggcuccucccuccuccccggcgagcagccccuccacaccgucgaccccggcuccgccaagcagcgccccccccgcuccaccugccaguccuucgagccccccgagacccccgucgucaaggacuccaccaucggcggcuccccccagccccgccccuccgucggcgccuucaaccccggcauggaggacauccucgacuccgccaugggcaccaacuggguccccgaggaggccuccggcgaggccuccgagauccccgucccccagggcaccgagcucucccccucccgccccggcggcggcuccaugcagaccgagcccgcccgccccuccaacuuccucuccgccuccuccccccuccccgccuccgccaagggccagcagcccgccgacgucaccggcaccgcccucccccgcgucggccccguccgccccaccggccaggacuggaaccacaccccccagaagaccgaccaccccuccgcccuccuccgcgacccccccgagcccggcuccccccgcaucuccucccuccgcccccagggccucuccaaccccuccacccucuccgcccagccccagcucucccgcucccacuccuccggcuccguccucccccucggcgagcucgagggccgccgcuccacccgcgaccgccgcucccccgccgagcccgagggcggccccgccuccgagggcgccgcccgcccccucccccgcuucaacuccgucccccucaccgacaccggccacgagcgccaguccgagggcuccuucuccccccagcuccaggaguccgucuuccaccuccucguccccuccgucauccucguccuccucgccgucggcggccuccucuucuaccgcuggcgccgccgcucccaccaggagccccagcgcgccgacuccccccucgagcagcccgagggcuccccccucacccaggacgaccgccaggucgagcuccccgucuga

SEQ ID NO: 1854 - RNA, 1893 nt, Artificial Sequence
  EAW85719 variant
auggcccuccccaccgcccgcccccuccucggcuccugcggcacccccgcccucggcucccuccucuuccuccucuucucccucggcuggguccagcccucccgcacccucgccggcgagaccggccaggaggccgccccccucgacggcguccucgccaacccccccaacaucuccucccucuccccccgccagcuccucggcuuccccugcgccgaggucuccggccucuccaccgagcgcguccgcgagcucgccgucgcccucgcccagaagaacgucaagcucuccaccgagcagcuccgcugccucgcccaccgccucuccgagccccccgaggaccucgacgcccucccccucgaccuccuccucuuccucaaccccgacgccuucuccggcccccaggccugcacccgcuucuucucccgcaucaccaaggccaacgucgaccuccucccccgcggcgcccccgagcgccagcgccuccuccccgccgcccucgccugcuggggcguccgcggcucccuccucuccgaggccgacguccgcgcccucggcggccucgccugcgaccuccccggccgcuucgucgccgaguccgccgagguccuccucccccgccucgucuccugccccggcccccucgaccaggaccagcaggaggccgcccgcgccgcccuccagggcggcggcccccccuacggcccccccuccaccugguccgucuccaccauggacgcccuccgcggccuccuccccguccucggccagcccaucauccgcuccaucccccagggcaucgucgccgccuggcgccagcgcuccucccgcgaccccuccuggcgccagcccgagcgcaccauccuccgcccccgcuuccgccgcgaggucgagaagaccgccugccccuccggcaagaaggcccgcgagaucgacgagucccucaucuucuacaagaagugggagcucgaggccugcgucgacgccgcccuccucgccacccagauggaccgcgucaacgccauccccuucaccuacgagcagcucgacguccucaagcacaagcucgacgagcucuacccccagggcuaccccgaguccgucauccagcaccucggcuaccucuuccucaagaugucccccgaggacauccgcaaguggaacgucaccucccucgagacccucaaggcccuccucgaggucaacaagggccacgagauguccccccaggccccccgccgcccccucccccaggucgccacccucaucgaccgcuucgucaagggccgcggccagcucgacaaggacacccucgacacccucaccgccuucuaccccggcuaccucugcucccucucccccgaggagcucuccuccgucccccccuccuccaucugggccguccgcccccaggaccucgacaccugcgacccccgccagcucgacguccucuaccccaaggcccgccucgccuuccagaacaugaacggcuccgaguacuucgucaagauccaguccuuccucggcggcgcccccaccgaggaccucaaggcccucucccagcagaacgucuccauggaccucgccaccuucaugaagcuccgcaccgacgccguccucccccucaccgucgccgagguccagaagcuccucggcccccacgucgagggccucaaggccgaggagcgccaccgccccguccgcgacuggauccuccgccagcgccaggacgaccucgacacccucggccucggccuccagggcggcauccccaacggcuaccucguccucgaccucuccaugcaggaggcccucuccggcacccccugccuccucggccccggccccguccucaccguccucgcccuccuccucgccuccacccucgccuga

SEQ ID NO: 1855 - RNA, 1515 nt, Artificial Sequence
  CCDS46865.1 variant
auggaggcccuccgcguccagauguucaugcccugcuccuucgagucccucuaccucuccuccgccgagcaccccggcgccuccaagccccccaucuccuccuccuccaugaccucccgcauccuccuccgccagcagcucaugcgcgagcagaugcaggagcaggagcgccgcgagcagcagcagaagcuccaggccgcccaguucaugcagcagcgcguccccgucucccagacccccgccaucaacgucuccguccccaccacccuccccuccgccacccagguccccauggagguccucaagguccagacccaccucgagaaccccaccaaguaccacauccagcaggcccagcgccagcaggucaagcaguaccucuccaccacccucgccaacaagcacgccaaccagguccucucccuccccugccccaaccagcccggcgaccacgucaugccccccguccccggcuccuccgcccccaacucccccauggccaugcucacccucaacuccaacugcgagaaggagggcuucuacaaguucgaggagcagaaccgcgccgaguccgagugccccggcaugaacacccacucccgcgccuccugcaugcagauggacgacgucaucgacgacaucaucucccucgaguccuccuacaacgaggagauccucggccucauggaccccgcccuccagauggccaacacccuccccgucuccggcaaccucaucgaccucuacggcaaccagggccuccccccccccggccucaccaucuccaacuccugccccgccaaccuccccaacaucaagcgcgagcucaccgaguccgaggcccgcgcccucgccaaggagcgccagaagaaggacaaccacaaccucaucgagcgccgccgccgcuucaacaucaacgaccgcaucaaggagcucggcacccucauccccaaguccaacgaccccgacaugcgcuggaacaagggcaccauccucaaggccuccgucgacuacauccgcaagcuccagcgcgagcagcagcgcgccaaggagcucgagaaccgccagaagaagcucgagcacgccaaccgccaccuccuccuccgcauccaggagcucgagaugcaggcccgcgcccacggccucucccucauccccuccaccggccucugcucccccgaccucgucaaccgcaucaucaagcaggagcccguccucgagaacugcucccaggaccuccuccagcaccacgccgaccucaccugcaccaccacccucgaccucaccgacggcaccaucaccuucaacaacaaccucggcaccggcaccgaggccaaccaggccuacuccguccccaccaagaugggcuccaagcucgaggacauccucauggacgacacccucucccccgucggcgucaccgacccccuccucuccuccgucucccccggcgccuccaagaccuccucccgccgcuccuccauguccauggaggagaccgagcacaccugcuga

SEQ ID NO: 1856 - RNA, 1260 nt, Artificial Sequence
  CCDS2913.1 variant
augcucgagaugcucgaguacaaccacuaccagguccagacccaccucgagaaccccaccaaguaccacauccagcaggcccagcgccagcaggucaagcaguaccucuccaccacccucgccaacaagcacgccaaccagguccucucccuccccugccccaaccagcccggcgaccacgucaugccccccguccccggcuccuccgcccccaacucccccauggccaugcucacccucaacuccaacugcgagaaggagggcuucuacaaguucgaggagcagaaccgcgccgaguccgagugccccggcaugaacacccacucccgcgccuccugcaugcagauggacgacgucaucgacgacaucaucucccucgaguccuccuacaacgaggagauccucggccucauggaccccgcccuccagauggccaacacccuccccgucuccggcaaccucaucgaccucuacggcaaccagggccuccccccccccggccucaccaucuccaacuccugccccgccaaccuccccaacaucaagcgcgagcucaccgccugcaucuuccccaccgaguccgaggcccgcgcccucgccaaggagcgccagaagaaggacaaccacaaccucaucgagcgccgccgccgcuucaacaucaacgaccgcaucaaggagcucggcacccucauccccaaguccaacgaccccgacaugcgcuggaacaagggcaccauccucaaggccuccgucgacuacauccgcaagcuccagcgcgagcagcagcgcgccaaggagcucgagaaccgccagaagaagcucgagcacgccaaccgccaccuccuccuccgcauccaggagcucgagaugcaggcccgcgcccacggccucucccucauccccuccaccggccucugcucccccgaccucgucaaccgcaucaucaagcaggagcccguccucgagaacugcucccaggaccuccuccagcaccacgccgaccucaccugcaccaccacccucgaccucaccgacggcaccaucaccuucaacaacaaccucggcaccggcaccgaggccaaccaggccuacuccguccccaccaagaugggcuccaagcucgaggacauccucauggacgacacccucucccccgucggcgucaccgacccccuccucuccuccgucucccccggcgccuccaagaccuccucccgccgcuccuccauguccauggaggagaccgagcacaccugcuga

SEQ ID NO: 1857 - RNA, 1581 nt, Artificial Sequence
  XM_005264754 variant
augcaguccgaguccggcaucguccccgacuucgaggucggcgaggaguuccacgaggagcccaagaccuacuacgagcucaagucccagccccucaaguccuccuccuccgccgagcaccccggcgccuccaagccccccaucuccuccuccuccaugaccucccgcauccuccuccgccagcagcucaugcgcgagcagaugcaggagcaggagcgccgcgagcagcagcagaagcuccaggccgcccaguucaugcagcagcgcguccccgucucccagacccccgccaucaacgucuccguccccaccacccuccccuccgccacccagguccccauggagguccucaagguccagacccaccucgagaaccccaccaaguaccacauccagcaggcccagcgccagcaggucaagcaguaccucuccaccacccucgccaacaagcacgccaaccagguccucucccuccccugccccaaccagcccggcgaccacgucaugccccccguccccggcuccuccgcccccaacucccccauggccaugcucacccucaacuccaacugcgagaaggagggcuucuacaaguucgaggagcagaaccgcgccgaguccgagugccccggcaugaacacccacucccgcgccuccugcaugcagauggacgacgucaucgacgacaucaucucccucgaguccuccuacaacgaggagauccucggccucauggaccccgcccuccagauggccaacacccuccccgucuccggcaaccucaucgaccucuacggcaaccagggccuccccccccccggccucaccaucuccaacuccugccccgccaaccuccccaacaucaagcgcgagcucaccgccugcaucuuccccaccgaguccgaggcccgcgcccucgccaaggagcgccagaagaaggacaaccacaaccucaucgagcgccgccgccgcuucaacaucaacgaccgcaucaaggagcucggcacccucauccccaaguccaacgaccccgacaugcgcuggaacaagggcaccauccucaaggccuccgucgacuacauccgcaagcuccagcgcgagcagcagcgcgccaaggagcucgagaaccgccagaagaagcucgagcacgccaaccgccaccuccuccuccgcauccaggagcucgagaugcaggcccgcgcccacggccucucccucauccccuccaccggccucugcucccccgaccucgucaaccgcaucaucaagcaggagcccguccucgagaacugcucccaggaccuccuccagcaccacgccgaccucaccugcaccaccacccucgaccucaccgacggcaccaucaccuucaacaacaaccucggcaccggcaccgaggccaaccaggccuacuccguccccaccaagaugggcuccaagcucgaggacauccucauggacgacacccucucccccgucggcgucaccgacccccuccucuccuccgucucccccggcgccuccaagaccuccucccgccgcuccuccauguccauggaggagaccgagcacaccugcuga

SEQ ID NO: 1858 - RNA, 1065 nt, Artificial Sequence
  BAG52140 variant
auggcccccgccgccuggcuccgcuccgccgccgcccgcgcccuccucccccccaugcuccuccuccuccuccagccccccccccuccucgcccgcgcccucccccccgacguccaccaccuccacgccgagcgccgcggcccccagcccuggcacgccgcccuccccuccucccccgcccccgcccccgccacccaggaggccccccgccccgccuccucccuccgccccccccgcugcggcguccccgaccccuccgacggccucuccgcccgcaaccgccagaagcgcauccuccgcuuccccuggcagcucguccaggagcagguccgccagaccauggccgaggcccucaaggucugguccgacgucaccccccucaccuucaccgagguccacgagggccgcgccgacaucaugaucgacuucgcccgcuacuggcacggcgacgaccuccccuucgacggccccggcggcauccucgcccacgccuucuuccccaagacccaccgcgagggcgacguccacuucgacuacgacgagaccuggaccaucggcgacgaccagggcaccgaccuccuccaggucgccgcccacgaguucggccacguccucggccuccagcacaccaccgccgccaaggcccucauguccgccuucuacaccuuccgcuacccccucucccucucccccgacgacugccgcggcguccagcaccucuacggccagcccuggcccaccgucaccucccgcacccccgcccucggcccccaggccggcaucgacaccaacgagaucgccccccucgagcccgacgccccccccgacgccugcgaggccuccuucgacgccgucuccaccauccgcggcgagcucuucuucuucaaggccggcuucgucuggcgccuccgcggcggccagcuccagcccggcuaccccgcccucgccucccgccacuggcagggccuccccucccccgucgacgccgccuucgaggacgcccagggccacaucugguucuuccagggcaccaccggcgucuccacccccgcccccggcgucuga

SEQ ID NO: 1859 - RNA, 804 nt, Artificial Sequence
  AAV40839 variant
augcgccucaccguccucugcgccgucugccuccuccccggcucccucgcccucccccucccccaggaggccggcggcauguccgagcuccagugggagcaggcccaggacuaccucaagcgcuucuaccucuacgacuccgagaccaagaacgccaacucccucgaggccaagcucaaggagaugcagaaguucuucggccuccccaucaccggcaugcucaacucccgcgucaucgagaucaugcagaagccccgcugcggcguccccgacgucgccgaguacucccucuuccccaacucccccaaguggaccuccaaggucgucaccuaccgcaucgucuccuacacccgcgaccucccccacaucaccgucgaccgccucgucuccaaggcccucaacauguggggcaaggagaucccccuccacuuccgcaaggucgucuggggcaccgccgacaucaugaucggcuucgcccgcggcgcccacggcgacuccuaccccuucgacggccccggcaacacccucgcccacgccuucgcccccggcaccggccucggcggcgacgcccacuucgacgaggacgagcgcuggaccgacggcuccucccucggcaucaacuuccucuacgccgccacccacgagcucggccacucccucggcaugggccacuccuccgaccccaacgccgucauguaccccaccuacggcaacggcgacccccagaacuucaagcucucccaggacgacaucaagggcauccagaagcucuacggcaagcgcuccaacucccgcaagaaguga

SEQ ID NO: 1860 - RNA, 3768 nt, Artificial Sequence
  J05582.1 variant
augacccccggcacccagucccccuucuuccuccuccuccuccucaccguccucaccgucgucaccggcuccggccacgccuccuccacccccggcggcgagaaggagaccuccgccacccagcgcuccuccguccccuccuccaccgagaagaacgccgucuccaugaccuccuccguccucuccucccacucccccggcuccggcuccuccaccacccagggccaggacgucacccucgcccccgccaccgagcccgccuccggcuccgccgccaccuggggccaggacgucaccuccguccccgucacccgccccgcccucggcuccaccaccccccccgcccacgacgucaccuccgcccccgacaacaagcccgcccccggcuccaccgccccccccgcccacggcgucaccuccgcccccgacacccgccccgcccccggcuccaccgccccccccgcccacggcgucaccuccgcccccgacacccgccccgcccccggcuccaccgccccccccgcccacggcgucaccuccgcccccgacacccgccccgcccccggcuccaccgccccccccgcccacggcgucaccuccgcccccgacacccgccccgcccccggcuccaccgccccccccgcccacggcgucaccuccgcccccgacacccgccccgcccccggcuccaccgccccccccgcccacggcgucaccuccgcccccgacacccgccccgcccccggcuccaccgccccccccgcccacggcgucaccuccgcccccgacacccgccccgcccccggcuccaccgccccccccgcccacggcgucaccuccgcccccgacacccgccccgcccccggcuccaccgccccccccgcccacggcgucaccuccgcccccgacacccgccccgcccccggcuccaccgccccccccgcccacggcgucaccuccgcccccgacacccgccccgcccccggcuccaccgccccccccgcccacggcgucaccuccgcccccgacacccgccccgcccccggcuccaccgccccccccgcccacggcgucaccuccgcccccgacacccgccccgcccccggcuccaccgccccccccgcccacggcgucaccuccgcccccgacacccgccccgcccccggcuccaccgccccccccgcccacggcgucaccuccgcccccgacacccgccccgcccccggcuccaccgccccccccgcccacggcgucaccuccgcccccgacacccgccccgcccccggcuccaccgccccccccgcccacggcgucaccuccgcccccgacacccgccccgcccccggcuccaccgccccccccgcccacggcgucaccuccgcccccgacacccgccccgcccccggcuccaccgccccccccgcccacggcgucaccuccgcccccgacacccgccccgcccccggcuccaccgccccccccgcccacggcgucaccuccgcccccgacacccgccccgcccccggcuccaccgccccccccgcccacggcgucaccuccgcccccgacacccgccccgcccccggcuccaccgccccccccgcccacggcgucaccuccgcccccgacacccgccccgcccccggcuccaccgccccccccgcccacggcgucaccuccgcccccgacacccgccccgcccccggcuccaccgccccccccgcccacggcgucaccuccgcccccgacacccgccccgcccccggcuccaccgccccccccgcccacggcgucaccuccgcccccgacacccgccccgcccccggcuccaccgccccccccgcccacggcgucaccuccgcccccgacacccgccccgcccccggcuccaccgccccccccgcccacggcgucaccuccgcccccgacacccgccccgcccccggcuccaccgccccccccgcccacggcgucaccuccgcccccgacacccgccccgcccccggcuccaccgccccccccgcccacggcgucaccuccgcccccgacacccgccccgcccccggcuccaccgccccccccgcccacggcgucaccuccgcccccgacacccgccccgcccccggcuccaccgccccccccgcccacggcgucaccuccgcccccgacacccgccccgcccccggcuccaccgccccccccgcccacggcgucaccuccgcccccgacacccgccccgcccccggcuccaccgccccccccgcccacggcgucaccuccgcccccgacacccgccccgcccccggcuccaccgccccccccgcccacggcgucaccuccgcccccgacacccgccccgcccccggcuccaccgccccccccgcccacggcgucaccuccgcccccgacacccgccccgcccccggcuccaccgccccccccgcccacggcgucaccuccgcccccgacacccgccccgcccccggcuccaccgccccccccgcccacggcgucaccuccgcccccgacacccgccccgcccccggcuccaccgccccccccgcccacggcgucaccuccgcccccgacacccgccccgcccccggcuccaccgccccccccgcccacggcgucaccuccgcccccgacacccgccccgcccccggcuccaccgccccccccgcccacggcgucaccuccgcccccgacacccgccccgcccccggcuccaccgccccccccgcccacggcgucaccuccgcccccgacacccgccccgcccccggcuccaccgccccccccgcccacggcgucaccuccgcccccgacaaccgccccgcccucggcuccaccgccccccccguccacaacgucaccuccgccuccggcuccgccuccggcuccgccuccacccucguccacaacggcaccuccgcccgcgccaccaccacccccgccuccaaguccacccccuucuccauccccucccaccacuccgacacccccaccacccucgccucccacuccaccaagaccgacgccuccuccacccaccacuccuccguccccccccucaccuccuccaaccacuccaccuccccccagcucuccaccggcgucuccuucuucuuccucuccuuccacaucuccaaccuccaguucaacuccucccucgaggaccccuccaccgacuacuaccaggagcuccagcgcgacaucuccgagauguuccuccagaucuacaagcagggcggcuuccucggccucuccaacaucaaguuccgccccggcuccgucgucguccagcucacccucgccuuccgcgagggcaccaucaacguccacgacgucgagacccaguucaaccaguacaagaccgaggccgccucccgcuacaaccucaccaucuccgacgucuccgucuccgacguccccuuccccuucuccgcccaguccggcgccggcguccccggcuggggcaucgcccuccucguccucgucugcguccucgucgcccucgccaucgucuaccucaucgcccucgccgucugccagugccgccgcaagaacuacggccagcucgacaucuuccccgcccgcgacaccuaccaccccauguccgaguaccccaccuaccacacccacggccgcuacgucccccccuccuccaccgaccgcucccccuacgagaaggucuccgccggcaacggcggcuccucccucuccuacaccaaccccgccgucgccgccgccuccgccaaccucuga

SEQ ID NO: 1861 - RNA, 2136 nt, Artificial Sequence
  NM_032853 variant
augauggccgacgccaaguacguccucugccgcugggagaagcgccucuggcccgccaagguccucgcccgcaccgccaccuccaccaagaacaagcgccgcaaggaguacuuccucgccguccagauccucucccucgaggagaagaucaaggucaaguccaccgaggucgagauccucgagaagucccagaucgaggccaucgccuccucccucgccucccagaacgagguccccgccgccccccucgaggagcucgccuaccgccgcucccuccgcgucgcccucgacguccucuccgagggcuccaucuggucccaggaguccuccgccggcaccggccgcgccgaccgcucccuccgcggcaagcccauggagcacgucuccucccccugcgacuccaacuccuccucccucccccgcggcgacguccucggcuccucccgcccccaccgccgccgccccugcguccagcagucccucuccuccuccuucaccugcgagaaggaccccgagugcaaggucgaccacaagaagggccuccgcaaguccgagaacccccgcggcccccucguccuccccgccggcggcggcgcccaggacgaguccggcucccgcauccaccacaagaacuggacccucgccuccaagcgcggcggcaacuccgcccagaaggccucccucugccucaacggcuccucccucuccgaggacgacaccgagcgcgacaugggcuccaagggcggcuccugggccgcccccucccuccccuccggcguccgcgaggacgaccccugcgccaacgccgagggccacgaccccggccucccccucggcucccucaccgccccccccgcccccgagcccuccgccugcuccgagcccggcgagugccccgccaagaagcgcccccgccucgacggcucccagcgcccccccgccguccagcucgagcccauggccgccggcgccgcccccucccccggccccggccccggcccccgcgaguccgucaccccccgcuccaccgcccgccucggccccccccccucccacgccuccgccgacgccacccgcugccuccccugccccgacucccagaagcucgagaaggagugccaguccuccgaggaguccaugggcuccaacuccaugcgcuccauccucgaggaggacgaggaggacgaggagcccccccgcguccuccucuaccacgagccccgcuccuucgaggucggcaugcucgucuggcacaagcacaagaaguaccccuucuggcccgccgucgucaaguccguccgccagcgcgacaagaaggccuccguccucuacaucgagggccacaugaaccccaagaugaagggcuucaccgucucccucaagucccucaagcacuucgacugcaaggagaagcagacccuccucaaccaggcccgcgaggacuucaaccaggacaucggcuggugcgucucccucaucaccgacuaccgcguccgccucggcugcggcuccuucgccggcuccuuccucgaguacuacgccgccgacaucuccuaccccguccgcaaguccauccagcaggacguccucggcaccaagcucccccagcucuccaagggcucccccgaggagcccgucgucggcugcccccucggccagcgccagcccugccgcaagaugcuccccgaccgcucccgcgccgcccgcgaccgcgccaaccagaagcucgucgaguacaucgucaaggccaagggcgccgagucccaccuccgcgccauccucaagucccgcaagcccucccgcuggcuccagaccuuccucuccuccucccaguacgucaccugcgucgagaccuaccucgaggacgagggccagcucgaccucgucgucaaguaccuccagggcgucuaccaggaggucggcgccaagguccuccagcgcaccaacggcgaccgcauccgcuucauccucgacguccuccuccccgaggccaucaucugcgccaucuccgccgucgacgaggucgacuacaagaccgccgaggagaaguacaucaagggccccucccucuccuaccgcgagaaggagaucuucgacaaccagcuccucgaggagcgcaaccgccgccgccgcuga

SEQ ID NO: 1862 - RNA, 438 nt, Artificial Sequence
  AAD44697 variant
augaccguccacaaccucuaccucuucgaccgcaacggcgucugccuccacuacuccgaguggcaccgcaagaagcaggccggcauccccaaggaggaggaguacaagcucauguacggcaugcucuucuccauccgcuccuucgucuccaagauguccccccucgacaugaaggacggcuuccucgccuuccagaccucccgcuacaagcuccacuacuacgagacccccaccggcaucaaggucgucaugaacaccgaccucggcgucggccccauccgcgacguccuccaccacaucuacuccgcccucuacgucgagcucgucgucaagaacccccucugcccccucggccagaccguccaguccgagcucuuccgcucccgccucgacuccuacguccgcucccuccccuucuucuccgcccgcgccggcuga

SEQ ID NO: 1863 - RNA, 1395 nt, Artificial Sequence
  AAH02712 variant
augcccuccugcuccaccuccaccaugcccggcaugaucugcaagaaccccgaccucgaguucgacucccuccagcccugcuucuaccccgacgaggacgacuucuacuucggcggccccgacuccaccccccccggcgaggacaucuggaagaaguucgagcuccuccccacccccccccucucccccucccgcggcuucgccgagcacuccuccgagccccccuccugggucaccgagaugcuccucgagaacgagcucuggggcucccccgccgaggaggacgccuucggccucggcggccucggcggccucacccccaaccccgucauccuccaggacugcaugugguccggcuucuccgcccgcgagaagcucgagcgcgccgucuccgagaagcuccagcacggccgcggcccccccaccgccggcuccaccgcccagucccccggcgccggcgccgccucccccgccggccgcggccacggcggcgccgccggcgccggccgcgccggcgccgcccuccccgccgagcucgcccaccccgccgccgagugcgucgaccccgccgucgucuuccccuuccccgucaacaagcgcgagcccgcccccguccccgccgcccccgccuccgcccccgccgccggccccgccgucgccuccggcgccggcaucgccgcccccgccggcgcccccggcgucgcccccccccgccccggcggccgccagaccuccggcggcgaccacaaggcccucuccaccuccggcgaggacacccucuccgacuccgacgacgaggacgacgaggaggaggacgaggaggaggagaucgacgucgucaccgucgagaagcgccgcuccuccuccaacaccaaggccgucaccaccuucaccaucaccguccgccccaagaacgccgcccucggccccggccgcgcccaguccuccgagcucauccucaagcgcugccuccccauccaccagcagcacaacuacgccgcccccucccccuacgucgaguccgaggacgcccccccccagaagaagaucaaguccgaggccuccccccgcccccucaaguccgucaucccccccaaggccaagucccucuccccccgcaacuccgacuccgaggacuccgagcgccgccgcaaccacaacauccucgagcgccagcgccgcaacgaccuccgcuccuccuuccucacccuccgcgaccacguccccgagcucgucaagaacgagaaggccgccaaggucgucauccucaagaaggccaccgaguacguccacucccuccaggccgaggagcaccagcuccuccucgagaaggagaagcuccaggcccgccagcagcagcuccucaagaagaucgagcacgcccgcaccugcuga

SEQ ID NO: 1864 - RNA, 3132 nt, Artificial Sequence
  AAC78645 variant
augccccuccucgagggcuccgucggcgucgaggaccucguccuccucgagccccucgucgaggagucccuccucaagaaccuccagcuccgcuacgagaacaaggagaucuacaccuacaucggcaacgucgucaucuccgucaaccccuaccagcagcuccccaucuacggccccgaguucaucgccaaguaccaggacuacaccuucuacgagcucaagccccacaucuacgcccucgccaacgucgccuaccagucccuccgcgaccgcgaccgcgaccagugcauccucaucaccggcgaguccggcuccggcaagaccgaggccuccaagcucgucauguccuacgucgccgccgucugcggcaagggcgagcaggucaacuccgucaaggagcagcuccuccaguccaaccccguccucgaggccuucggcaacgccaagaccauccgcaacaacaacuccucccgcuucggcaaguacauggacaucgaguucgacuucaagggcuccccccucggcggcgucaucaccaacuaccuccucgagaagucccgccucgucaagcagcucaagggcgagcgcaacuuccacaucuucuaccagcuccucgccggcgccgacgagcagcuccucaaggcccucaagcucgagcgcgacaccaccggcuacgccuaccucaaccacgaggucucccgcgucgacggcauggacgacgccuccuccuuccgcgccguccaguccgccauggccgucaucggcuucuccgaggaggagauccgccagguccucgaggucaccuccaugguccucaagcucggcaacguccucgucgccgacgaguuccaggccuccggcauccccgccuccggcauccgcgacggccgcggcguccgcgagaucggcgagauggucggccucaacuccgaggaggucgagcgcgcccucugcucccgcaccauggagaccgccaaggagaaggucgucaccgcccucaacgucaugcaggcccaguacgcccgcgacgcccucgccaagaacaucuacucccgccucuucgacuggaucgucaaccgcaucaacgaguccaucaaggucggcaucggcgagaagaagaaggucaugggcguccucgacaucuacggcuucgagauccucgaggacaacuccuucgagcaguucgucaucaacuacugcaacgagaagcuccagcaggucuucaucgagaugacccucaaggaggagcaggaggaguacaagcgcgagggcauccccuggaccaaggucgacuacuucgacaacggcaucaucugcaagcucaucgagcacaaccagcgcggcauccucgccaugcucgacgaggagugccuccgccccggcgucgucuccgacuccaccuuccucgccaagcucaaccagcucuucuccaagcacggccacuacgaguccaaggucacccagaacgcccagcgccaguacgaccacaccaugggccucuccugcuuccgcaucugccacuacgccggcaaggucaccuacaacgucaccuccuucaucgacaagaacaacgaccuccucuuccgcgaccuccuccaggccauguggaaggcccagcacccccuccuccgcucccucuuccccgagggcaaccccaagcaggccucccucaagcgcccccccaccgccggcgcccaguucaaguccuccgucgccauccucaugaagaaccucuacuccaagucccccaacuacauccgcugcaucaagcccaacgagcaccagcagcgcggccaguucuccuccgaccucgucgccacccaggcccgcuaccucggccuccucgagaacguccgcguccgccgcgccggcuacgcccaccgccagggcuacggccccuuccucgagcgcuaccgccuccucucccgcuccaccuggccccacuggaacggcggcgaccgcgagggcgucgagaagguccucggcgagcucuccauguccuccggcgagcucgccuucggcaagaccaagaucuucauccgcucccccaagacccucuucuaccucgaggagcagcgccgccuccgccuccagcagcucgccacccucauccagaagaucuaccgcggcuggcgcugccgcacccacuaccagcucaugcgcaagucccagauccucaucuccuccugguuccgcggcaacaugcagaagaagugcuacggcaagaucaaggccuccguccuccucauccaggccuucguccgcggcuggaaggcccgcaagaacuaccgcaaguacuuccgcuccgaggccgcccucacccucgccgacuucaucuacaaguccaugguccagaaguuccuccucggccucaagaacaaccuccccuccaccaacguccucgacaagaccuggcccgccgcccccuacaagugccucuccaccgccaaccaggagcuccagcagcucuucuaccaguggaagugcaagcgcuuccgcgaccagcucucccccaagcaggucgagauccuccgcgagaagcucugcgccuccgagcucuucaagggcaagaaggccuccuacccccaguccguccccauccccuucugcggcgacuacaucggccuccagggcaaccccaagcuccagaagcucaagggcggcgaggagggccccguccucauggccgaggccgucaagaaggucaaccgcggcaacggcaagaccuccucccgcauccuccuccucaccaagggccacgucauccucaccgacaccaagaagucccaggccaagaucgucaucggccucgacaacgucgccggcgucuccgucaccucccucaaggacggccucuucucccuccaccucuccgagauguccuccgucggcuccaagggcgacuuccuccucgucuccgagcacgucaucgagcuccucaccaagauguaccgcgccguccucgacgccacccagcgccagcucaccgucaccgucaccgagaaguucuccguccgcuucaaggagaacuccgucgccgucaaggucguccagggccccgccggcggcgacaacuccaagcuccgcuacaagaagaagggcucccacugccucgaggucaccguccaguga

SEQ ID NO: 1865 - RNA, 3411 nt, Artificial Sequence
  AAH53558 variant
auggccaagauggaggucaagaccucccuccucgacaacaugaucggcgucggcgacaugguccuccucgagccccucaacgaggagaccuucaucaacaaccucaagaagcgcuucgaccacuccgagaucuacaccuacaucggcuccgucgucaucuccgucaaccccuaccgcucccuccccaucuacucccccgagaaggucgaggaguaccgcaaccgcaacuucuacgagcucuccccccacaucuucgcccucuccgacgaggccuaccgcucccuccgcgaccaggacaaggaccagugcauccucaucaccggcgaguccggcgccggcaagaccgaggccuccaagcucgucauguccuacgucgccgccgucugcggcaagggcgccgaggucaaccaggucaaggagcagcuccuccaguccaaccccguccucgaggccuucggcaacgccaagaccguccgcaacgacaacuccucccgcuucggcaaguacauggacaucgaguucgacuucaagggcgacccccucggcggcgucaucuccaacuaccuccucgagaagucccgcgucgucaagcagccccgcggcgagcgcaacuuccacgucuucuaccagcuccucuccggcgccuccgaggagcuccucaacaagcucaagcucgagcgcgacuucucccgcuacaacuaccucucccucgacuccgccaaggucaacggcgucgacgacgccgccaacuuccgcaccguccgcaacgccaugcagaucgucggcuucauggaccacgaggccgaguccguccucgccgucgucgccgccguccucaagcucggcaacaucgaguucaagcccgagucccgcgucaacggccucgacgaguccaagaucaaggacaagaacgagcucaaggagaucugcgagcucaccggcaucgaccaguccguccucgagcgcgccuucuccuuccgcaccgucgaggccaagcaggagaaggucuccaccacccucaacgucgcccaggccuacuacgcccgcgacgcccucgccaagaaccucuacucccgccucuucuccuggcucgucaaccgcaucaacgaguccaucaaggcccagaccaagguccgcaagaaggucaugggcguccucgacaucuacggcuucgagaucuucgaggacaacuccuucgagcaguucaucaucaacuacugcaacgagaagcuccagcagaucuucaucgagcucacccucaaggaggagcaggaggaguacauccgcgaggacaucgaguggacccacaucgacuacuucaacaacgccaucaucugcgaccucaucgagaacaacaccaacggcauccucgccaugcucgacgaggagugccuccgccccggcaccgucaccgacgagaccuuccucgagaagcucaaccaggucugcgccacccaccagcacuucgagucccgcauguccaagugcucccgcuuccucaacgacaccucccucccccacuccugcuuccgcauccagcacuacgccggcaagguccucuaccaggucgagggcuucgucgacaagaacaacgaccuccucuaccgcgaccucucccaggccauguggaaggccucccacgcccucaucaagucccucuuccccgagggcaaccccgccaagaucaaccucaagcgcccccccaccgccggcucccaguucaaggccuccgucgccacccucaugaagaaccuccagaccaagaaccccaacuacauccgcugcaucaagcccaacgacaagaaggccgcccacaucuucaacgaggcccucgucugccaccagauccgcuaccucggccuccucgagaacguccgcguccgccgcgccggcuacgccuuccgccaggccuacgagcccugccucgagcgcuacaagaugcucugcaagcagaccuggccccacuggaagggccccgcccgcuccggcgucgagguccucuucaacgagcucgagauccccgucgaggaguacuccuucggccgcuccaagaucuucauccgcaacccccgcacccucuucaagcucgaggaccuccgcaagcagcgccucgaggaccucgccacccucauccagaagaucuaccgcggcuggaagugccgcacccacuuccuccucaugaagaagucccagaucgucaucgccgccugguaccgccgcuacgcccagcagaagcgcuaccagcagaccaaguccuccgcccucgucauccaguccuacauccgcggcuggaaggcccgcaagauccuccgcgagcucaagcaccagaagcgcugcaaggaggccgucaccaccaucgccgccuacuggcacggcacccaggcccgccgcgagcuccgccgccucaaggaggaggcccgcaacaagcacgccaucgccgucaucugggccuacuggcucggcuccaaggcccgccgcgagcucaagcgccucaaggaggaggcccgccgcaagcacgccgucgccgucaucugggccuacuggcucggccucaagguccgccgcgaguaccgcaaguucuuccgcgccaacgccggcaagaagaucuacgaguucacccuccagcgcaucguccagaaguacuuccucgagaugaagaacaagaugcccucccucucccccaucgacaagaacuggcccucccgccccuaccucuuccucgacuccacccacaaggagcucaagcgcaucuuccaccucuggcgcugcaagaaguaccgcgaccaguucaccgaccagcagaagcucaucuacgaggagaagcucgaggccuccgagcucuucaaggacaagaaggcccucuaccccuccuccgucggccagcccuuccagggcgccuaccucgagaucaacaagaaccccaaguacaagaagcucaaggacgccaucgaggagaagaucaucaucgccgaggucgucaacaagaucaaccgcgccaacggcaaguccaccucccgcaucuuccuccucaccaacaacaaccuccuccucgccgaccagaaguccggccagaucaaguccgaggucccccucgucgacgucaccaaggucuccauguccucccagaacgacggcuucuucgccguccaccucaaggagggcuccgaggccgccuccaagggcgacuuccucuucuccuccgaccaccucaucgagauggccaccaagcucuaccgcaccacccucucccagaccaagcagaagcucaacaucgagaucuccgacgaguuccucguccaguuccgccaggacaaggucugcgucaaguucauccagggcaaccagaagaacggcuccguccccaccugcaagcgcaagaacaaccgccuccucgaggucgccguccccuga

SEQ ID NO: 1866 - RNA, 3192 nt, Artificial Sequence
  CCDS42226.1 variant
auggcccuccaggucgagcucguccccaccggcgagaucauccgcgucguccacccccaccgccccugcaagcucgcccucggcuccgacggcguccgcgucaccauggaguccgcccucaccgcccgcgaccgcgucggcguccaggacuucguccuccucgagaacuucaccuccgaggccgccuucaucgagaaccuccgccgccgcuuccgcgagaaccucaucuacaccuacaucggccccguccucgucuccgucaaccccuaccgcgaccuccagaucuacucccgccagcacauggagcgcuaccgcggcgucuccuucuacgagguccccccccaccucuucgccgucgccgacaccgucuaccgcgcccuccgcaccgagcgccgcgaccaggccgucaugaucuccggcgaguccggcgccggcaagaccgaggccaccaagcgccuccuccaguucuacgccgagaccugccccgcccccgagcgcggcggcgccguccgcgaccgccuccuccaguccaaccccguccucgaggccuucggcaacgccaagacccuccgcaacgacaacuccucccgcuucggcaaguacauggacguccaguucgacuucaagggcgcccccgucggcggccacauccucuccuaccuccucgagaagucccgcgucguccaccagaaccacggcgagcgcaacuuccacaucuucuaccagcuccucgagggcggcgaggaggagacccuccgccgccucggccucgagcgcaacccccaguccuaccucuaccucgucaagggccagugcgccaaggucuccuccaucaacgacaaguccgacuggaaggucguccgcaaggcccucaccgucaucgacuucaccgaggacgaggucgaggaccuccucuccaucgucgccuccguccuccaccucggcaacauccacuucgccgccaacgaggaguccaacgcccaggucaccaccgagaaccagcucaaguaccucacccgccuccucuccgucgagggcuccacccuccgcgaggcccucacccaccgcaagaucaucgccaagggcgaggagcuccucuccccccucaaccucgagcaggccgccuacgcccgcgacgcccucgccaaggccgucuacucccgcaccuucaccuggcucgucggcaagaucaaccgcucccucgccuccaaggacgucgagucccccuccuggcgcuccaccaccguccucggccuccucgacaucuacggcuucgaggucuuccagcacaacuccuucgagcaguucugcaucaacuacugcaacgagaagcuccagcagcucuucaucgagcucacccucaaguccgagcaggaggaguacgaggccgagggcaucgccugggagcccguccaguacuucaacaacaagaucaucugcgaccucgucgaggagaaguucaagggcaucaucuccauccucgacgaggagugccuccgccccggcgaggccaccgaccucaccuuccucgagaagcucgaggacaccgucaagcaccacccccacuuccucacccacaagcucgccgaccagcgcacccgcaagucccucggccgcggcgaguuccgccuccuccacuacgccggcgaggucaccuacuccgucaccggcuuccucgacaagaacaacgaccuccucuuccgcaaccucaaggagaccaugugcuccuccaagaaccccaucaugucccagugcuucgaccgcuccgagcucuccgacaagaagcgccccgagaccgucgccacccaguucaagaugucccuccuccagcucgucgagauccuccaguccaaggagcccgccuacguccgcugcaucaagcccaacgacgccaagcagcccggccgcuucgacgagguccucauccgccaccaggucaaguaccucggccuccucgagaaccuccgcguccgccgcgccggcuucgccuaccgccgcaaguacgaggccuuccuccagcgcuacaagucccucugccccgagaccuggcccaccugggccggccgcccccaggacggcgucgccguccucguccgccaccucggcuacaagcccgaggaguacaagaugggccgcaccaagaucuucauccgcuuccccaagacccucuucgccaccgaggacgcccucgagguccgccgccagucccucgccaccaagauccaggccgccuggcgcggcuuccacuggcgccagaaguuccuccgcgucaagcgcuccgccaucugcauccaguccugguggcgcggcacccucggccgccgcaaggccgccaagcgcaagugggccgcccagaccauccgccgccucauccgcggcuucguccuccgccacgccccccgcugccccgagaacgccuucuuccucgaccacguccgcaccuccuuccuccucaaccuccgccgccagcucccccagaacguccucgacaccuccuggcccacccccccccccgcccuccgcgaggccuccgagcuccuccgcgagcucugcaucaagaacauggucuggaaguacugccgcuccaucucccccgaguggaagcagcagcuccagcagaaggccgucgccuccgagaucuucaagggcaagaaggacaacuacccccaguccgucccccgccucuucaucuccacccgccucggcaccgacgagaucuccccccgcguccuccaggcccucggcuccgagcccauccaguacgccguccccgucgucaaguacgaccgcaagggcuacaagccccgcucccgccagcuccuccucacccccaacgccgucgucaucgucgaggacgccaaggucaagcagcgcaucgacuacgccaaccucaccggcaucuccgucuccucccucuccgacucccucuucguccuccacguccagcgcgccgacaacaagcagaagggcgacgucguccuccaguccgaccacgucaucgagacccucaccaagaccgcccucuccgccaaccgcgucaacuccaucaacaucaaccagggcuccaucaccuucgccggcggccccggccgcgacggcaccaucgacuucacccccggcuccgagcuccucaucaccaaggccaagaacggccaccucgccgucgucgccccccgccucaacucccgcuga

SEQ ID NO: 1867 - RNA, 3021 nt, Artificial Sequence
  AAI46764 variant
auggccgagcaggagucccucgaguucggcaaggccgacuucguccucauggacaccgucuccaugcccgaguucauggccaaccuccgccuccgcuucgagaagggccgcaucuacaccuucaucggcgaggucgucgucuccgucaaccccuacaagcuccucaacaucuacggccgcgacaccaucgagcaguacaagggccgcgagcucuacgagcgccccccccaccucuucgccaucgccgacgccgccuacaaggccaugaagcgccgcuccaaggacaccugcaucgucaucuccggcgaguccggcgccggcaagaccgaggccuccaaguacaucaugcaguacaucgccgccaucaccaaccccucccagcgcgccgaggucgagcgcgucaagaacaugcuccucaaguccaacugcguccucgaggccuucggcaacgccaagaccaaccgcaacgacaacuccucccgcuucggcaaguacauggacaucaacuucgacuucaagggcgaccccaucggcggccacaucaacaacuaccuccucgagaagucccgcgucaucguccagcagcccggcgagcgcuccuuccacuccuucuaccagcuccuccagggcggcuccgagcagaugcuccgcucccuccaccuccagaagucccucuccuccuacaacuacauccacgucggcgcccagcucaaguccuccaucaacgacgccgccgaguuccgcgucgucgccgacgccaugaaggucaucggcuucaagcccgaggagauccagaccgucuacaagauccucgccgccauccuccaccucggcaaccucaaguucgucgucgacggcgacaccccccucaucgagaacggcaaggucgucuccaucaucgccgagcuccucuccaccaagaccgacauggucgagaaggcccuccucuaccgcaccgucgccaccggccgcgacaucaucgacaagcagcacaccgagcaggaggccuccuacggccgcgacgccuucgccaaggccaucuacgagcgccucuucugcuggaucgucacccgcaucaacgacaucaucgaggucaagaacuacgacaccaccauccacggcaagaacaccgucaucggcguccucgacaucuacggcuucgagaucuucgacaacaacuccuucgagcaguucugcaucaacuacugcaacgagaagcuccagcagcucuucauccagcucguccucaagcaggagcaggaggaguaccagcgcgagggcauccccuggaagcacaucgacuacuucaacaaccagaucaucgucgaccucgucgagcagcagcacaagggcaucaucgccauccucgacgacgccugcaugaacgucggcaaggucaccgacgagauguuccucgaggcccucaacuccaagcucggcaagcacgcccacuucuccucccgcaagcucugcgccuccgacaagauccucgaguucgaccgcgacuuccgcauccgccacuacgccggcgacgucgucuacuccgucaucggcuucaucgacaagaacaaggacacccucuuccaggacuucaagcgccucauguacaacuccuccaaccccguccucaagaacauguggcccgagggcaagcucuccaucaccgaggucaccaagcgcccccucaccgccgccacccucuucaagaacuccaugaucgcccucgucgacaaccucgccuccaaggagcccuacuacguccgcugcaucaagcccaacgacaagaaguccccccagaucuucgacgacgagcgcugccgccaccaggucgaguaccucggccuccucgagaacguccgcguccgccgcgccggcuucgccuuccgccagaccuacgagaaguuccuccaccgcuacaagaugaucuccgaguucaccuggcccaaccacgaccuccccuccgacaaggaggccgucaagaagcucaucgagcgcugcggcuuccaggacgacgucgccuacggcaagaccaagaucuucauccgcaccccccgcacccucuucacccucgaggagcuccgcgcccagaugcucauccgcaucguccucuuccuccagaaggucuggcgcggcacccucgcccgcaugcgcuacaagcgcaccaaggccgcccucaccaucauccgcuacuaccgccgcuacaaggucaaguccuacauccacgaggucgcccgccgcuuccacggcgucaagaccaugcgcgacuacggcaagcacgucaaguggcccuccccccccaagguccuccgccgcuucgaggaggcccuccagaccaucuucaaccgcuggcgcgccucccagcucaucaaguccauccccgccuccgaccucccccagguccgcgccaaggucgccgccgucgagaugcucaagggccagcgcgccgaccucggccuccagcgcgccugggagggcaacuaccucgccuccaagcccgacaccccccagaccuccggcaccuucguccccgucgccaacgagcucaagcgcaaggacaaguacaugaacguccucuucuccugccacguccgcaaggucaaccgcuucuccaaggucgaggaccgcgccaucuucgucaccgaccgccaccucuacaagauggaccccaccaagcaguacaaggucaugaagaccaucccccucuacaaccucaccggccucuccgucuccaacggcaaggaccagcucgucgucuuccacaccaaggacaacaaggaccucaucgucugccucuucuccaagcagcccacccacgagucccgcaucggcgagcucgucggcguccucgucaaccacuucaaguccgagaagcgccaccuccaggucaacgucaccaaccccguccagugcucccuccacggcaagaagugcaccgucuccgucgagacccgccucaaccagccccagcccgacuucaccaagaaccgcuccggcuucauccucuccguccccggcaacuga

SEQ ID NO: 1868 - RNA, 3327 nt, Artificial Sequence
  CCDS32254.1 variant
augggcuccaagggcgucuaccaguaccacuggcagucccacaacgucaagcacuccggcgucgacgacaugguccuccucuccaagaucaccgagaacuccaucgucgagaaccucaagaagcgcuacauggacgacuacaucuucaccuacaucggcuccguccucaucuccgucaaccccuucaagcagaugcccuacuucggcgagaaggagaucgagauguaccagggcgccgcccaguacgagaaccccccccacaucuacgcccucgccgacaacauguaccgcaacaugaucaucgaccgcgagaaccagugcgucaucaucuccggcgaguccggcgccggcaagaccgucgccgccaaguacaucauguccuacaucucccgcgucuccggcggcggcaccaagguccagcacgucaaggacaucauccuccaguccaacccccuccucgaggccuucggcaacgccaagaccguccgcaacaacaacuccucccgcuucggcaaguacuucgagauccaguucucccccggcggcgagcccgacggcggcaagaucuccaacuuccuccucgagaagucccgcgucgucaugcgcaaccccggcgagcgcuccuuccacaucuucuaccagcucaucgagggcgccuccgccgagcagaagcacucccucggcaucaccuccauggacuacuacuacuaccucucccucuccggcuccuacaaggucgacgacaucgacgaccgccgcgaguuccaggagacccuccacgccaugaacgucaucggcaucuucgccgaggagcagacccucguccuccagaucgucgccggcauccuccaccucggcaacaucuccuucaaggaggucggcaacuacgccgccgucgaguccgaggaguuccucgccuuccccgccuaccuccucggcaucaaccaggaccgccucaaggagaagcucaccucccgccagauggacuccaaguggggcggcaaguccgaguccauccacgucacccucaacgucgagcaggccugcuacacccgcgacgcccucgccaaggcccuccacgcccgcgucuucgacuuccucgucgacuccaucaacaaggccauggagaaggaccacgaggaguacaacaucggcguccucgacaucuacggcuucgagaucuuccagaagaacggcuucgagcaguucugcaucaacuucgucaacgagaagcuccagcagaucuucaucgagcucacccucaaggccgagcaggaggaguacguccaggagggcauccgcuggacccccaucgaguacuucaacaacaagaucgucugcgaccucaucgagaacaaggucaacccccccggcaucauguccauccucgacgacgucugcgccaccaugcacgccgucggcgagggcgccgaccagacccuccuccagaagcuccagaugcagaucggcucccacgagcacuucaacuccuggaaccagggcuucaucauccaccacuacgccggcaaggucuccuacgacauggacggcuucugcgagcgcaaccgcgacguccucuucauggaccucaucgagcucaugcaguccuccgagcuccccuucaucaagucccucuuccccgagaaccuccaggccgacaagaagggccgccccaccaccgccggcuccaagaucaagaagcaggccaacgaccucgucuccacccucaugaagugcaccccccacuacauccgcugcaucaagcccaacgagaccaagaagccccgcgacugggaggagucccgcgucaagcaccaggucgaguaccucggccucaaggagaacauccgcguccgccgcgccggcuacgccuaccgccgcaucuuccagaaguuccuccagcgcuacgccauccucaccaaggccaccuggcccuccuggcagggcgaggagaagcagggcguccuccaccuccuccaguccgucaacauggacuccgaccaguuccagcucggccgcuccaaggucuucaucaaggcccccgagucccucuuccuccucgaggagaugcgcgagcgcaaguacgacggcuacgcccgcgucauccagaaguccuggcgcaaguucgucgcccgcaagaaguacguccagaugcgcgaggaggccuccgaccuccuccucaacaagaaggagcgccgccgcaacuccaucaaccgcaacuucaucggcgacuacaucggcauggaggagcaccccgagcuccagcaguucgucggcaagcgcgagaagaucgacuucgccgacaccgucaccaaguacgaccgccgcuucaagggcgucaagcgcgaccuccuccucacccccaagugccucuaccucaucggccgcgagaaggucaagcagggccccgacaagggccucgucaaggagguccucaagcgcaagaucgagaucgagcgcauccucuccgucucccucuccaccaugcaggacgacaucuucauccuccacgagcaggaguacgacucccuccucgaguccgucuucaagaccgaguuccucucccuccucgccaagcgcuacgaggagaagacccagaagcagcucccccucaaguucuccaacacccucgagcucaagcucaagaaggagaacuggggccccugguccgccggcggcucccgccagguccaguuccaccagggcuucggcgaccucgccguccucaagcccuccaacaagguccuccaggucuccaucggccccggccuccccaagaacucccgccccacccgccgcaacaccacccagaacaccggcuacuccuccggcacccagaacgccaacuaccccguccgcgccgccccccccccccccggcuaccaccagaacggcgucauccgcaaccaguacguccccuacccccacgcccccggcucccagcgcuccaaccagaagucccucuacaccuccauggcccgccccccccucccccgccagcaguccaccuccuccgaccgcgucucccagacccccgagucccucgacuuccucaagguccccgaccagggcgccgccggcguccgccgccagaccaccucccgccccccccccgccggcggccgccccaagccccagcccaagcccaagccccaggucccccagugcaaggcccucuacgccuacgacgcccaggacaccgacgagcucuccuucaacgccaacgacaucaucgacaucaucaaggaggaccccuccggcugguggaccggccgccuccgcggcaagcagggccucuuccccaacaacuacgucaccaagaucuga

SEQ ID NO: 1869 - RNA, 3297 nt, Artificial Sequence
  AAH28071 variant
augggcuccaaggagcgcuuccacuggcagucccacaacgucaagcaguccggcgucgacgacaugguccuccucccccagaucaccgaggacgccaucgccgccaaccuccgcaagcgcuucauggacgacuacaucuucaccuacaucggcuccguccucaucuccgucaaccccuucaagcagaugcccuacuucaccgaccgcgagaucgaccucuaccagggcgccgcccaguacgagaaccccccccacaucuacgcccucaccgacaacauguaccgcaacaugcucaucgacugcgagaaccagugcgucaucaucuccggcgaguccggcgccggcaagaccgucgccgccaaguacaucaugggcuacaucuccaaggucuccggcggcggcgagaagguccagcacgucaaggacaucauccuccaguccaacccccuccucgaggccuucggcaacgccaagaccguccgcaacaacaacuccucccgcuucggcaaguacuucgagauccaguucucccgcggcggcgagcccgacggcggcaagaucuccaacuuccuccucgagaagucccgcgucgucaugcagaacgagaacgagcgcaacuuccacaucuacuaccagcuccucgagggcgccucccaggagcagcgccagaaccucggccucaugacccccgacuacuacuacuaccucaaccaguccgacaccuaccaggucgacggcaccgacgaccgcuccgacuucggcgagacccucuccgccaugcaggucaucggcaucccccccuccauccagcagcucguccuccagcucgucgccggcauccuccaccucggcaacaucuccuucugcgaggacggcaacuacgcccgcgucgaguccgucgaccuccucgccuuccccgccuaccuccucggcaucgacuccggccgccuccaggagaagcucaccucccgcaagauggacucccgcuggggcggccgcuccgaguccaucaacgucacccucaacgucgagcaggccgccuacacccgcgacgcccucgccaagggccucuacgcccgccucuucgacuuccucgucgaggccaucaaccgcgccaugcagaagccccaggaggaguacuccaucggcguccucgacaucuacggcuucgagaucuuccagaagaacggcuucgagcaguucugcaucaacuucgucaacgagaagcuccagcagaucuucaucgagcucacccucaaggccgagcaggaggaguacguccaggagggcauccgcuggacccccauccaguacuucaacaacaaggucgucugcgaccucaucgagaacaagcucuccccccccggcaucauguccguccucgacgacgucugcgccaccaugcacgccaccggcggcggcgccgaccagacccuccuccagaagcuccaggccgccgucggcacccacgagcacuucaacuccugguccgccggcuucgucauccaccacuacgccggcaaggucuccuacgacgucuccggcuucugcgagcgcaaccgcgacguccucuucuccgaccucaucgagcucaugcagaccuccgagcaggccuuccuccgcaugcucuuccccgagaagcucgacggcgacaagaagggccgccccuccaccgccggcuccaagaucaagaagcaggccaacgaccucgucgccacccucaugcgcugcaccccccacuacauccgcugcaucaagcccaacgagaccaagcgcccccgcgacugggaggagaaccgcgucaagcaccaggucgaguaccucggccucaaggagaacauccgcguccgccgcgccggcuucgccuaccgccgccaguucgccaaguuccuccagcgcuacgccauccucacccccgagaccuggccccgcuggcgcggcgacgagcgccagggcguccagcaccuccuccgcgccgucaacauggagcccgaccaguaccagaugggcuccaccaaggucuucgucaagaaccccgagucccucuuccuccucgaggagguccgcgagcgcaaguucgacggcuucgcccgcaccauccagaaggccuggcgccgccacgucgccguccgcaaguacgaggagaugcgcgaggaggccuccaacauccuccucaacaagaaggagcgccgccgcaacuccaucaaccgcaacuucgucggcgacuaccucggccucgaggagcgccccgagcuccgccaguuccucggcaagcgcgagcgcgucgacuucgccgacuccgucaccaaguacgaccgccgcuucaagcccaucaagcgcgaccucauccucacccccaagugcgucuacgucaucggccgcgagaaggucaagaagggccccgagaagggccaggucugcgagguccucaagaagaaggucgacauccaggcccuccgcggcgucucccucuccacccgccaggacgacuucuucauccuccaggaggacgccgccgacuccuuccucgaguccgucuucaagaccgaguucgucucccuccucugcaagcgcuucgaggaggccacccgccgcccccucccccucaccuucuccgacacccuccaguuccgcgucaagaaggagggcuggggcggcggcggcacccgcuccgucaccuucucccgcggcuucggcgaccucgccguccucaaggucggcggccgcacccucaccgucuccgucggcgacggccuccccaaguccuccaagcccacccgcaagggcauggccaagggcaagccccgccgcuccucccaggcccccacccgcgccgcccccgcccccccccgcggcauggaccgcaacggcgucccccccuccgcccgcggcggcccccucccccucgagaucauguccggcggcggcacccaccgccccccccgcggcccccccuccaccucccucggcgccucccgccgcccccgcgcccgcccccccuccgagcacaacaccgaguuccucaacguccccgaccagggcauggccggcaugcagcgcaagcgcuccgucggccagcgccccguccccggcgucggccgccccaagccccagccccgcacccacggcccccgcugccgcgcccucuaccaguacgucggccaggacgucgacgagcucuccuucaacgucaacgaggucaucgagauccucauggaggaccccuccggcugguggaagggccgccuccacggccaggagggccucuuccccggcaacuacgucgagaagaucuga

SEQ ID NO: 1870 - RNA, 3057 nt, Artificial Sequence
  CCDS34629.1 variant
auggaggacgaggagggccccgaguacggcaagcccgacuucguccuccucgaccaggucaccauggaggacuucaugcgcaaccuccagcuccgcuucgagaagggccgcaucuacaccuacaucggcgagguccucgucuccgucaaccccuaccaggagcucccccucuacggccccgaggccaucgcccgcuaccagggccgcgagcucuacgagcgccccccccaccucuacgccgucgccaacgccgccuacaaggccaugaagcaccgcucccgcgacaccugcaucgucaucuccggcgaguccggcgccggcaagaccgaggccuccaagcacaucaugcaguacaucgccgccgucaccaaccccucccagcgcgccgaggucgagcgcgucaaggacguccuccucaaguccaccugcguccucgaggccuucggcaacgcccgcaccaaccgcaaccacaacuccucccgcuucggcaaguacauggacaucaacuucgacuucaagggcgaccccaucggcggccacauccacuccuaccuccucgagaagucccgcguccucaagcagcacgucggcgagcgcaacuuccacgccuucuaccagcuccuccgcggcuccgaggacaagcagcuccacgagcuccaccucgagcgcaaccccgccgucuacaacuucacccaccagggcgccggccucaacaugaccguccacuccgcccucgacuccgacgagcagucccaccaggccgucaccgaggccaugcgcgucaucggcuucucccccgaggaggucgaguccguccaccgcauccucgccgccauccuccaccucggcaacaucgaguucgucgagaccgaggagggcggccuccagaaggagggccucgccgucgccgaggaggcccucgucgaccacgucgccgagcucaccgccaccccccgcgaccucguccuccgcucccuccucgcccgcaccgucgccuccggcggccgcgagcucaucgagaagggccacaccgccgccgaggccuccuacgcccgcgacgccugcgccaaggccgucuaccagcgccucuucgagugggucgucaaccgcaucaacuccgucauggagccccgcggccgcgacccccgccgcgacggcaaggacaccgucaucggcguccucgacaucuacggcuucgaggucuuccccgucaacuccuucgagcaguucugcaucaacuacugcaacgagaagcuccagcagcucuucauccagcucauccucaagcaggagcaggaggaguacgagcgcgagggcaucaccuggcaguccgucgaguacuucaacaacgccaccaucgucgaccucgucgagcgcccccaccgcggcauccucgccguccucgacgaggccugcuccuccgccggcaccaucaccgaccgcaucuuccuccagacccucgacaugcaccaccgccaccaccuccacuacaccucccgccagcucugccccaccgacaagaccauggaguucggccgcgacuuccgcaucaagcacuacgccggcgacgucaccuacuccgucgagggcuucaucgacaagaaccgcgacuuccucuuccaggacuucaagcgccuccucuacaacuccaccgaccccacccuccgcgccauguggcccgacggccagcaggacaucaccgaggucaccaagcgcccccucaccgccggcacccucuucaagaacuccauggucgcccucgucgagaaccucgccuccaaggagcccuucuacguccgcugcaucaagcccaacgaggacaaggucgccggcaagcucgacgagaaccacugccgccaccaggucgccuaccucggccuccucgagaacguccgcguccgccgcgccggcuucgccucccgccagcccuacucccgcuuccuccuccgcuacaagaugaccugcgaguacaccuggcccaaccaccuccucggcuccgacaaggccgccgucuccgcccuccucgagcagcacggccuccagggcgacgucgccuucggccacuccaagcucuucauccgcuccccccgcacccucgucacccucgagcagucccgcgcccgccucauccccaucaucguccuccuccuccagaaggccuggcgcggcacccucgcccgcuggcgcugccgccgccuccgcgccaucuacaccaucaugcgcugguuccgccgccacaagguccgcgcccaccucgccgagcuccagcgccgcuuccaggccgcccgccagcccccccucuacggccgcgaccucgucuggccccucccccccgccguccuccagcccuuccaggacaccugccacgcccucuucugccgcuggcgcgcccgccagcucgucaagaacaucccccccuccgacaugccccagaucaaggccaaggucgccgccaugggcgcccuccagggccuccgccaggacuggggcugccgccgcgccugggcccgcgacuaccucuccuccgccaccgacaaccccaccgccuccucccucuucgcccagcgccucaagacccuccaggacaaggacggcuucggcgccguccucuucuccucccacguccgcaaggucaaccgcuuccacaagauccgcaaccgcgcccuccuccucaccgaccagcaccucuacaagcucgaccccgaccgccaguaccgcgucaugcgcgccgucccccucgaggccgucaccggccucuccgucaccuccggcggcgaccagcucgucguccuccacgcccgcggccaggacgaccucgucgucugccuccaccgcucccgccccccccucgacaaccgcgucggcgagcucgucggcguccucgccgcccacugccagggcgagggccgcacccucgagguccgcgucuccgacugcaucccccucucccaccgcggcguccgccgccucaucuccgucgagccccgccccgagcagcccgagcccgacuuccgcugcgcccgcggcuccuucacccuccucuggcccucccgcuga

SEQ ID NO: 1871 - RNA, 3069 nt, Artificial Sequence
  CCDS53826.1 variant
auggagggcgcccucaccgcccgcgacaaggucggcguccaggacuucguccuccucgacgccuacaccuccgaguccgccuucgucgacaaccuccgcaagcgcuucuccgagaaccucaucuacaccuacaucggcacccuccucgucuccgucaaccccuaccaggagcucggcaucuacaccgucucccagauggagcucuaccagggcgucaacuucuucgagcuccccccccacgucuacgccaucgccgacaacgccuaccgcaugaugugcgccgagcucaacaaccacuucauccucaucuccggcgaguccggcgccggcaagaccgaggccuccaagaagauccucgaguacuucgccgucaccugccccaugacccagucccuccagaucgcccgcgaccgccuccucuucuccaaccccguccucgaggccuucggcaacgcccgcacccuccgcaacgacaacuccucccgcuucggcaaguacauggacauccaguucgacuuccagggcauccccgucggcggccacaucaucuccuaccucaucgagaagucccgcgucgucuaccagaacgagggcgagcgcaacuuccacaucuucuaccagcuccucgccggcggcgaggaggagcgccucuccuaccucggccucgagcgcgacccccagcucuacaaguaccucucccagggccacugcgccaaggaguccuccaucuccgacaagaacgacuggaagaccgucuccaacgccuucuccgucaucgacuucaccgaggccgaccucgagaaccucuucggcaucaucgccuccguccuccaccucggcaacaucggcuucgaggaggacgaccagggcugcgccaccauccccgacacccacgagaucaaguggaucgccaagcuccucggcguccaccccuccguccuccucgaggcccucacccaccgcaagaucgaggccaagaccgaggaggucaucugcccccucacccucgagcucuccgucuacgcccgcgacgccauggccaaggccgucuacggccgcaccuucaccuggcucgucaacaagaucaacuccucccucgucaacaaggacuucacccgcaagaccgucaucggccuccucgacaucuacggcuucgaggucuucgacaagaacggcuucgagcaguucugcaucaacuacugcaacgagaagcuccagcagcuccucaucgagcgcacccucaaggccgagcaggccgaguacgagauggagggcaucgagugggagcccaucaaguacuucaacaacaagaucaucugcgaccucgucgaggagcgccacaagggcaucaucuccauccucgacgaggagugcauccgccccggccccgccaccgaccucuccuuccucgagaagcucgaggagaaggucggcaagcacgcccacuucgagacccgcaagcucgccggccccaagggccgcaagcgcaucggcuggauggaguuccgccuccuccacuacgccggcgaggucaccuacugcaccaagggcuuccucgagaagaacaacgaccuccucuaccgccaccucaaggagguccucugcaaguccaagaacaucauccuccgcgagugcuuccuccucgccgagcucgagaaccgccgccgcccccccaccgucggcacccaguucaagaacucccucuccucccuccucgagacccucaucuccaaggagcccuccuacauccgcugcaucaagcccaacgaccgcaaggagcccuccaaguucgacgacuuccucauccgccaccagaucaaguaccucggccucauggagcaccuccgcguccgccgcgccggcuucgccuaccgccgcaaguacgagcacuuccuccagcgcuacaagucccucugccccgacaccuggccccacuggcacggcccccccgccgagggcgucgagcgccucaucaaguacaucggcuacaagcccgaggaguacaagcucggcaagaccaagaucuucauccgcuucccccgcacccucuucgccaccgaggacgccuucgaguucuccaagcaccagcucgucgcccgcauccaggccaccuacaagcgcugccucggccgccgcgaguacgucaagaagcgccaggccgccaucaagcucgaggcccacuggcgcggcgcccucgcccgcaaggccauccagcgccgcaagugggccguccgcaucauccgcaaguucaucaagggcuucaucucccgcaacaagccccucugccccgacaacgaggaguucaucgucuucguccgcaagaacuacauccucaaccuccgcuaccaccuccccaagaccguccucgacaaguccuggcuccgcccccccggcauccucgagaacgccuccgaccuccuccgcaagaugugcguccgcaaccucguccagaaguacugccgcggcaucaccgccgagcgcaaggccaugaugcagcagaaggucgucaccuccgagaucuuccgcggccgcaaggacggcuacaccgagucccucaaccagcccuucgucaacucccgcaucgacgagggcgacaucaaccccaagguccuccagcucaucucccacgagaagauccaguacggcguccccgucaucaaguacgaccgcaagggcuucaaggcccgccagcgccagcucauccucacccagaaggccgccuacgucgucgagcucgccaagaucaagcagaagaucgaguacuccgcccucaagggcgucuccaccuccaaccucuccgacggcauccucgucauccacgucucccccgaggacuccaagcagaagggcgacgccguccuccagugcggccacgucuucgaggccgucaccaagcucgucaugcucgucaagaaggagaacaucgucaacgucguccagggcucccuccaguucuucaucucccccggcaaggagggcaccaucgucuucgacaccggccucgaggagcaggucuacaagaacaagaacggccagcucaccgucgucuccguccgccgcaaguccuga

SEQ ID NO: 1872 - RNA, 2379 nt, Artificial Sequence
  BAC84969 variant
augaucaccgucaaccccgacggcaagaucaugguccgccgcugccucgucacccuccgccccuuccgccucuucguccucggcaucggcuucuucacccucugcuuccucaugaccucccucggcggccaguucuccgcccgccgccucggcgacucccccuucaccauccgcaccgaggucaugggcggccccgagucccgcggcguccuccgcaagauguccgaccuccucgagcucauggucaagcgcauggacgcccucgcccgccucgagaacuccuccgagcuccaccgcgccggcggcgaccuccacuuccccgccgaccgcaugccccccggcgccggccucauggagcgcauccaggccaucgcccagaacgucuccgacaucgccgucaaggucgaccagauccuccgccacucccuccuccuccacuccaaggucuccgagggccgccgcgaccagugcgaggcccccuccgaccccaaguuccccgacugcuccggcaaggucgaguggaugcgcgcccgcuggaccuccgaccccugcuacgccuucuucggcgucgacggcaccgagugcuccuuccucaucuaccucuccgaggucgagugguucugccccccccuccccuggcgcaaccagaccgccgcccagcgcgcccccaagccccuccccaagguccaggccgucuuccgcuccaaccucucccaccuccucgaccucaugggcuccggcaaggagucccucaucuucaugaagaagcgcaccaagcgccucaccgcccagugggcccucgccgcccagcgccucgcccagaagcucggcgccacccagcgcgaccagaagcagauccucguccacaucggcuuccucaccgaggaguccggcgacgucuucuccccccgcguccucaagggcggcccccucggcgagaugguccagugggccgacauccucaccgcccucuacguccucggccacggccuccgcgucaccgucucccucaaggagcuccaguccaaccucggcgucccccccggccgcggcuccugcccccucaccaugccccuccccuucgaccucaucuacaccgacuaccacggccuccagcagaugaagcgccacaugggccucuccuucaagaaguaccgcugccgcauccgcgucaucgacaccuucggcaccgagcccgccuacaaccacgaggaguacgccacccuccacggcuaccgcaccaacuggggcuacuggaaccucaaccccaagcaguucaugaccauguucccccacacccccgacaacuccuucaugggcuucgucuccgaggagcucaacgagaccgagaagcgccucaucaagggcggcaaggccuccaacauggccgucgucuacggcaaggaggccuccaucuggaagcuccagggcaaggagaaguuccucggcauccucaacaaguacauggagauccacggcaccgucuacuacgagucccagcgcccccccgagguccccgccuucgucaagaaccacggccuccucccccagcccgaguuccagcagcuccuccgcaaggccaagcucuucaucggcuucggcuuccccuacgagggccccgccccccucgaggccaucgccaacggcugcaucuuccuccagucccgcuucucccccccccacuccucccucaaccacgaguucuuccgcggcaagcccaccucccgcgaggucuucucccagcaccccuacgccgagaacuucaucggcaagccccacgucuggaccgucgacuacaacaacuccgaggaguucgaggccgccaucaaggccaucaugcgcacccaggucgaccccuaccuccccuacgaguacaccugcgagggcaugcucgagcgcauccacgccuacauccagcaccaggacuucugccgcgcccccgaccccgcccuccccgaggcccacgccccccagucccccuucguccucgcccccaacgccacccaccucgagugggcccgcaacaccucccucgcccccggcgccuggccccccgcccacgcccuccgcgccuggcucgccguccccggccgcgccugcaccgacaccugccucgaccacggccucaucugcgagcccuccuucuuccccuuccucaacucccaggacgccuuccucaagcuccagguccccugcgacuccaccgaguccgagaugaaccaccucuaccccgccuucgcccagcccggccaggagugcuaccuccagaaggagccccuccucuucuccugcgccggcuccaacaccaaguaccgccgccucugccccugccgcgacuuccgcaagggccaggucgcccucugccagggcugccucuga

SEQ ID NO: 1873 - RNA, 36 nt, Artificial Sequence
  AF164963.1 variant
augacccagggccagcacuuccuccagaaggucuga

SEQ ID NO: 1874 - RNA, 2211 nt, Artificial Sequence
  AAI11702 variant
augaaggagauguccgccaacaccguccucgacucccagcgccagcagaagcacuacggcaucaccucccccaucucccucgccucccccaaggagaucgaccacaucuacacccagaagcucaucgacgccaugaagcccuucggcgucuucgaggacgaggaggagcucaaccaccgccucgucguccucggcaagcucaacaaccucgucaaggaguggaucuccgacgucuccgaguccaagaaccucccccccuccgucgucgccaccgucggcggcaagaucuucaccuucggcuccuaccgccucggcguccacaccaagggcgccgacaucgacgcccucugcgucgccccccgccacgucgagcgcuccgacuucuuccaguccuucuucgagaagcucaagcaccaggacggcauccgcaaccuccgcgccgucgaggacgccuucguccccgucaucaaguucgaguucgacggcaucgagaucgaccucgucuucgcccgccucgccauccagaccaucuccgacaaccucgaccuccgcgacgacucccgccuccgcucccucgacauccgcugcauccgcucccucaacggcugccgcgucaccgacgagauccuccaccucguccccaacaaggagaccuuccgccucacccuccgcgccgucaagcucugggccaagcgccgcggcaucuacuccaacaugcucggcuuccucggcggcgucuccugggccaugcucgucgcccgcaccugccagcucuaccccaacgccgccgccuccacccucguccacaaguucuuccucgucuucuccaagugggaguggcccaaccccguccuccucaagcagcccgaggaguccaaccucaaccuccccgucugggacccccgcgucaaccccuccgaccgcuaccaccucaugcccaucaucacccccgccuacccccagcagaacuccaccuacaacgucuccaccuccacccgcaccgucauggucgaggaguucaagcagggccucgccgucaccgacgagauccuccagggcaaguccgacugguccaagcuccucgagccccccaacuucuuccagaaguaccgccacuacaucguccucaccgccuccgccuccaccgaggagaaccaccucgagugggucggccucgucgaguccaagauccgcguccucgucggcaaccucgagcgcaacgaguucaucacccucgcccacgucaacccccaguccuuccccggcaacaaggagcaccacaaggacaacaacuacgucuccaugugguuccucggcaucaucuuccgccgcgucgagaacgccgaguccgucaacaucgaccucaccuacgacauccaguccuucaccgacaccgucuaccgccaggccaacaacaucaacaugcucaaggagggcaugaagaucgaggccacccacgucaagaagaagcagcuccaccacuaccuccccgccgagauccuccagaagaagaagaagcagucccucuccgacgucaaccgcuccuccggcggccuccaguccaagcgccucucccucgacuccuccugccucgacuccucccgcgacaccgacaacggcacccccuucaacucccccgccuccaaguccgacucccccuccgucggcgagaccgagcgcaacuccgccgagcccgccgccgucaucgucgagaagccccucuccgucccccccgcccagggccucuccauccccgucaucggcgccaaggucgacuccaccgucaagaccgucuccccccccaccgucugcaccauccccaccgucgucggccgcaacgucaucccccgcaucaccaccccccacaaccccgcccagggccagccccaccucaacggcauguccaacaucaccaagaccgucacccccaagcgcucccacucccccuccaucgacggcacccccaagcgccucaaggacgucgagaaguucauccgccucgaguccaccuucaaggacccccgcaccgccgaggagcgcaagcgcaaguccgucgacgccaucggcggcgaguccaugcccauccccaccaucgacaccucccgcaagaagcgccuccccuccaaggagcuccccgacuccuccucccccguccccgccaacaacauccgcgucaucaagaacuccauccgccucacccucaaccgcuga

SEQ ID NO: 1875 - RNA, 1377 nt, Artificial Sequence
  AAG28389 variant
auguccaccgagggcggcuucggcggcaccuccuccuccgacgcccagcagucccuccaguccuucuggccccgcgucauggaggagauccgcaaccucaccgucaaggacuuccgcguccaggagcucccccucgcccgcaucaagaagaucaugaagcucgacgaggacgucaagaugaucuccgccgaggcccccguccucuucgccaaggccgcccagaucuucaucaccgagcucacccuccgcgccuggauccacaccgaggacaacaagcgccgcacccuccagcgcaacgacaucgccauggccaucaccaaguucgaccaguucgacuuccucaucgacaucgucccccgcgacgagcucaagccccccaagcgccaggaggagguccgccaguccgucacccccgccgagcccguccaguacuacuucacccucgcccagcagcccaccgccguccagguccagggccagcagcagggccagcagaccaccuccuccaccaccaccauccagcccggccagaucaucaucgcccagccccagcagggccagaccacccccgucaccaugcaggucggcgagggccagcagguccagaucguccaggcccagccccagggccaggcccagcaggcccaguccggcaccggccagaccaugcaggucaugcagcagaucaucaccaacaccggcgagauccagcagauccccguccagcucaacgccggccagcuccaguacauccgccucgcccagcccgucuccggcacccaggucguccagggccagauccagacccucgccaccaacgcccagcagggccagcgcaacgccucccagggcaagccccgccgcugccucaaggagacccuccagaucacccagaccgagguccagcagggccagcagcaguucucccaguucaccgacggccagcgcaacuccguccagcaggcccgcgucuccgagcucaccggcgaggccgagccccgcgaggucaaggccaccggcaacuccacccccugcaccuccucccuccccaccacccacccccccucccaccgcgccggcgccuccugcgucugcugcucccagccccagcaguccuccaccucccccccccccuccgacgcccuccagugggucgucgucgaggucuccggcacccccaaccagcucgagacccaccgcgagcuccacgccccccuccccggcaugaccucccucuccccccuccaccccucccagcagcucuaccagauccagcaggucaccaugcccgccggccaggaccucgcccagcccauguucauccaguccgccaaccagcccuccgacggccaggccccccaggucaccggcgacuga

SEQ ID NO: 1876 - RNA, 2802 nt, Artificial Sequence
  CCDS33423.1 variant
augcgcauggccgccaccgccugggccggccuccagggccccccccuccccacccucugccccgccguccgcaccggccucuacugccgcgaccaggcccacgccgagcgcugggccaugaccuccgagaccuccuccggcucccacugcgcccgcucccgcaugcuccgccgccgcgcccaggaggaggacuccaccguccucaucgacgucuccccccccgaggccgagaagcgcggcuccuacggcuccaccgcccacgccuccgagcccggcggccagcaggccgccgccugccgcgccggcucccccgccaagccccgcaucgccgacuucguccucgucugggaggaggaccucaagcucgaccgccagcaggacuccgccgcccgcgaccgcaccgacaugcaccgcaccuggcgcgagaccuuccucgacaaccuccgcgccgccggccucugcgucgaccagcaggacguccaggacggcaacaccaccguccacuacgcccuccucuccgccuccugggccguccucugcuacuacgccgaggaccuccgccucaagcucccccuccaggagcuccccaaccaggccuccaacugguccgccggccuccucgccuggcucggcauccccaacguccuccucgaggucguccccgacgucccccccgaguacuacuccugccgcuuccgcgucaacaagcucccccgcuuccucggcuccgacaaccaggacaccuucuucaccuccaccaagcgccaccagauccucuucgagauccucgccaagacccccuacggccacgagaagaagaaccuccucggcauccaccagcuccucgccgagggcguccucuccgccgccuucccccuccacgacggccccuucaagaccccccccgagggcccccaggccccccgccucaaccagcgccagguccucuuccagcacugggcccgcuggggcaaguggaacaaguaccagccccucgaccacguccgccgcuacuucggcgagaaggucgcccucuacuucgccuggcucggcuucuacaccggcuggcuccuccccgccgccgucgucggcacccucgucuuccucgucggcugcuuccucgucuucuccgacauccccacccaggagcucugcggcuccaaggacuccuucgagaugugcccccucugccucgacugccccuucuggcuccucuccuccgccugcgcccucgcccaggccggccgccucuucgaccacggcggcaccgucuucuucucccucuucauggcccucugggccguccuccuccucgaguacuggaagcgcaaguccgccacccucgccuaccgcugggacugcuccgacuacgaggacaccgaggagcgcccccgcccccaguucgccgccuccgcccccaugaccgcccccaaccccaucaccggcgaggacgagcccuacuuccccgagcgcucccgcgcccgccgcaugcucgccggcuccgucgucaucgucgucauggucgccgucgucgucaugugccucgucuccaucauccucuaccgcgccaucauggccaucgucgucucccgcuccggcaacacccuccucgccgccugggccucccgcaucgccucccucaccggcuccgucgucaaccucgucuucauccucauccucuccaagaucuacgucucccucgcccacguccucacccgcugggagaugcaccgcacccagaccaaguucgaggacgccuucacccucaaggucuucaucuuccaguucgucaacuucuacuccucccccgucuacaucgccuucuucaagggccgcuucgucggcuaccccggcaacuaccacacccucuucggcguccgcaacgaggagugcgccgccggcggcugccucaucgagcucgcccaggagcuccucgucaucauggucggcaagcaggucaucaacaacaugcaggagguccucauccccaagcucaagggcugguggcagaaguuccgccuccgcuccaagaagcgcaaggccggcgccuccgccggcgccucccagggccccugggaggacgacuacgagcucguccccugcgagggccucuucgacgaguaccucgagaugguccuccaguucggcuucgucaccaucuucgucgccgccugcccccucgccccccucuucgcccuccucaacaacugggucgagauccgccucgacgcccgcaaguucgucugcgaguaccgccgccccgucgccgagcgcgcccaggacaucggcaucugguuccacauccucgccggccucacccaccucgccgucaucuccaacgccuuccuccucgccuucuccuccgacuuccucccccgcgccuacuaccgcuggacccgcgcccacgaccuccgcggcuuccucaacuucacccucgcccgcgcccccuccuccuucgccgccgcccacaaccgcaccugccgcuaccgcgccuuccgcgacgacgacggccacuacucccagaccuacuggaaccuccucgccauccgccucgccuucgucaucgucuucgagcacgucgucuucuccgucggccgccuccucgaccuccucguccccgacauccccgaguccgucgagaucaaggucaagcgcgaguacuaccucgccaagcaggcccucgccgagaacgagguccucuucggcaccaacggcaccaaggacgagcagcccgagggcuccgagcucuccucccacuggacccccuucaccguccccaaggccucccagcuccagcaguga

SEQ ID NO: 1877 - RNA, 885 nt, Artificial Sequence
  AAA36380 variant
auggaggacuccauggacauggacauguccccccuccgcccccagaacuaccucuucggcugcgagcucaaggccgacaaggacuaccacuucaaggucgacaacgacgagaacgagcaccagcucucccuccgcaccgucucccucggcgccggcgccaaggacgagcuccacaucgucgaggccgaggccaugaacuacgagggcucccccaucaaggucacccucgccacccucaagauguccguccagcccaccgucucccucggcggcuucgagaucaccccccccgucguccuccgccucaagugcggcuccggccccguccacaucuccggccagcaccucgucgccgucgaggaggacgccgaguccgaggacgaggaggaggaggacgucaagcuccucuccaucuccggcaagcgcuccgcccccggcggcggcuccaaggucccccagaagaaggucaagcucgccgccgacgaggacgacgacgacgacgacgaggaggacgacgacgaggacgacgacgacgacgacuucgacgacgaggaggccgaggagaaggcccccgucaagaaguccauccgcgacacccccgccaagaacgcccagaaguccaaccagaacggcaaggacuccaagcccuccuccaccccccgcuccaagggccaggaguccuucaagaagcaggagaagacccccaagacccccaagggccccuccuccgucgaggacaucaaggccaagaugcaggccuccaucgagaagggcggcucccuccccaaggucgaggccaaguucaucaacuacgucaagaacugcuuccgcaugaccgaccaggaggccauccaggaccucuggcaguggcgcaagucccucuga

SEQ ID NO: 1878 - RNA, 3915 nt, Artificial Sequence
  CCDS47686.1 variant
augcagcucaagaucaugcccaagaagaagcgccucuccgccggccgcgucccccucauccucuuccucugccagaugaucuccgcccucgaggucccccucgaccccaagcuccucgaggaccucguccagccccccaccaucacccagcagucccccaaggacuacaucaucgacccccgcgagaacaucgucauccagugcgaggccaagggcaagcccccccccuccuucuccuggacccgcaacggcacccacuucgacaucgacaaggacccccucgucaccaugaagcccggcaccggcacccucaucaucaacaucauguccgagggcaaggccgagaccuacgagggcgucuaccagugcaccgcccgcaacgagcgcggcgccgccgucuccaacaacaucgucguccgccccucccgcuccccccucuggaccaaggagaagcucgagcccaucacccuccaguccggccagucccucguccuccccugccgcccccccaucggccuccccccccccaucaucuucuggauggacaacuccuuccagcgccucccccaguccgagcgcgucucccagggccucaacggcgaccucuacuucuccaacguccuccccgaggacacccgcgaggacuacaucugcuacgcccgcuucaaccacacccagaccauccagcagaagcagcccaucuccgucaaggucaucuccgucgacgagcucaacgacaccaucgccgccaaccucuccgacaccgaguucuacggcgccaaguccucccgcgagcgcccccccaccuuccucacccccgagggcaacgccuccaacaaggaggagcuccgcggcaacguccucucccucgagugcaucgccgagggccuccccacccccaucaucuacugggccaaggaggacggcaugcuccccaagaaccgcaccgucuacaagaacuucgagaagacccuccagaucauccacgucuccgaggccgacuccggcaacuaccagugcaucgccaagaacgcccucggcgccauccaccacaccaucuccguccgcgucaaggccgcccccuacuggaucaccgccccccagaaccucguccucucccccggcgaggacggcacccucaucugccgcgccaacggcaaccccaagccccgcaucuccuggcucaccaacggcguccccaucgagaucgcccccgacgaccccucccgcaagaucgacggcgacaccaucaucuucuccaacguccaggagcgcuccuccgccgucuaccagugcaacgccuccaacgaguacggcuaccuccucgccaacgccuucgucaacguccucgccgagcccccccgcauccucacccccgccaacacccucuaccaggucaucgccaaccgccccgcccuccucgacugcgccuucuucggcuccccccuccccaccaucgagugguucaagggcgccaagggcuccgcccuccacgaggacaucuacguccuccacgagaacggcacccucgagauccccgucgcccagaaggacuccaccggcaccuacaccugcgucgcccgcaacaagcucggcauggccaagaacgagguccaccucgagaucaaggaccccaccuggaucgucaagcagcccgaguacgccgucguccagcgcggcuccauggucuccuucgagugcaaggucaagcacgaccacacccucucccucaccguccucuggcucaaggacaaccgcgagcuccccuccgacgagcgcuucaccgucgacaaggaccaccucgucgucgccgacgucuccgacgacgacuccggcaccuacaccugcgucgccaacaccacccucgacuccgucuccgccuccgccguccucuccgucgucgcccccacccccacccccgcccccgucuacgacguccccaacccccccuucgaccucgagcucaccgaccagcucgacaaguccguccagcucuccuggacccccggcgacgacaacaacucccccaucaccaaguucaucaucgaguacgaggacgccaugcacaagcccggccucuggcaccaccagaccgaggucuccggcacccagaccaccgcccagcucaagcucucccccuacgucaacuacuccuuccgcgucauggccgucaacuccaucggcaagucccuccccuccgaggccuccgagcaguaccucaccaaggccuccgagcccgacaagaaccccaccgccgucgagggccucggcuccgagcccgacaaccucgucaucaccuggaagccccucaacggcuucgaguccaacggccccggccuccaguacaaggucuccuggcgccagaaggacggcgacgacgaguggaccuccgucgucgucgccaacgucuccaaguacaucgucuccggcacccccaccuucguccccuaccucaucaagguccaggcccucaacgacaugggcuucgcccccgagcccgccgucgucaugggccacuccggcgaggaccuccccauggucgcccccggcaacguccgcgucaacgucgucaacuccacccucgccgagguccacugggaccccgucccccucaaguccauccgcggccaccuccagggcuaccgcaucuacuacuggaagacccaguccuccuccaagcgcaaccgccgccacaucgagaagaagauccucaccuuccagggcuccaagacccacggcaugcuccccggccucgagcccuucucccacuacacccucaacguccgcgucgucaacggcaagggcgagggccccgccucccccgaccgcgucuucaacacccccgagggcguccccuccgcccccuccucccucaagaucgucaaccccacccucgacucccucacccucgagugggacccccccucccaccccaacggcauccucaccgaguacacccucaaguaccagcccaucaacuccacccacgagcucggcccccucgucgaccucaagauccccgccaacaagacccgcuggacccucaagaaccucaacuucuccacccgcuacaaguucuacuucuacgcccagaccuccgccggcuccggcucccagaucaccgaggaggccgucaccaccgucgacgaggccggcauccucccccccgacgucggcgccggcaagguccaggccgucaacccccgcaucuccaaccucaccgccgccgccgccgagaccuacgccaacaucuccugggaguacgagggccccgagcacgucaacuucuacgucgaguacggcgucgccggcuccaaggaggaguggcgcaaggagaucgucaacggcucccgcuccuucuucggccucaagggccucaugcccggcaccgccuacaagguccgcgucggcgccgucggcgacuccggcuucgucuccuccgaggacgucuucgagaccggccccgccauggccucccgccaggucgacaucgccacccagggcugguucaucggccucaugugcgccgucgcccuccucauccucauccuccucaucgucugcuucauccgccgcaacaagggcggcaaguaccccgucaaggagaaggaggacgcccacgccgaccccgagauccagcccaugaaggaggacgacggcaccuucggcgaguacuccgacgccgaggaccacaagccccucaagaagggcucccgcacccccuccgaccgcaccgucaagaaggaggacuccgacgacucccucgucgacuacggcgagggcgucaacggccaguucaacgaggacggcuccuucaucggccaguacuccggcaagaaggagaaggagcccgccgagggcaacgaguccuccgaggcccccucccccgucaacgccaugaacuccuucgucuga

SEQ ID NO: 1879 - RNA, 1305 nt, Artificial Sequence
  AAB51320 variant
auguccaucgagaagaucugggcccgcgagauccucgacucccgcggcaaccccaccgucgaggucgaccucuacaccgccaagggccucuuccgcgccgccguccccuccggcgccuccaccggcaucuacgaggcccucgagcuccgcgacggcgacaagcagcgcuaccucggcaagggcguccucaaggccgucgaccacaucaacuccaccaucgcccccgcccucaucuccuccggccucuccgucgucgagcaggagaagcucgacaaccucaugcucgagcucgacggcaccgagaacaaguccaaguucggcgccaacgccauccucggcgucucccucgccgucugcaaggccggcgccgccgagcgcgagcucccccucuaccgccacaucgcccagcucgccggcaacuccgaccucauccuccccguccccgccuucaacgucaucaacggcggcucccacgccggcaacaagcucgccaugcaggaguucaugauccuccccgucggcgccgaguccuuccgcgacgccaugcgccucggcgccgaggucuaccacacccucaagggcgucaucaaggacaaguacggcaaggacgccaccaacgucggcgacgagggcggcuucgcccccaacauccucgagaacuccgaggcccucgagcucgucaaggaggccaucgacaaggccggcuacaccgagaagaucgucaucggcauggacgucgccgccuccgaguucuaccgcgacggcaaguacgaccucgacuucaagucccccaccgaccccucccgcuacaucaccggcgaccagcucggcgcccucuaccaggacuucguccgcgacuaccccgucgucuccaucgaggaccccuucgaccaggacgacugggccgccugguccaaguucaccgccaacgucggcauccagaucgucggcgacgaccucaccgucaccaaccccaagcgcaucgagcgcgccgucgaggagaaggccugcaacugccuccuccucaaggucaaccagaucggcuccgucaccgaggccauccaggccugcaagcucgcccaggagaacggcuggggcgucauggucucccaccgcuccggcgagaccgaggacaccuucaucgccgaccucgucgucggccucugcaccggccagaucaagaccggcgcccccugccgcuccgagcgccucgccaaguacaaccagcucaugcgcaucgaggaggagcucggcgacgaggcccgcuucgccggccacaacuuccgcaaccccuccguccucuga

SEQ ID NO: 1880 - RNA, 1395 nt, Artificial Sequence
  AAH08489 variant
auggagacccucuccuucccccgcuacaacgucgccgagaucgucauccacauccgcaacaagauccucaccggcgccgacggcaagaaccucaccaagaacgaccucuaccccaaccccaagcccgagguccuccacaugaucuacaugcgcgcccuccagaucgucuacggcauccgccucgagcacuucuacaugaugcccgucaacuccgaggucauguacccccaccucauggagggcuuccuccccuucuccaaccucgucacccaccucgacuccuuccuccccaucugccgcgucaacgacuucgagaccgccgacauccucugccccaaggccaagcgcaccucccgcuuccucuccggcaucaucaacuucauccacuuccgcgaggccugccgcgagaccuacauggaguuccucuggcaguacaaguccuccgccgacaagaugcagcagcucaacgccgcccaccaggaggcccucaugaagcucgagcgccucgacuccguccccgucgaggagcaggaggaguucaagcagcucuccgacggcauccaggagcuccagcagucccucaaccaggacuuccaccagaagaccaucguccuccaggagggcaacucccagaagaaguccaacaucuccgagaagaccaagcgccucaacgagcucaagcucuccgucgucucccucaaggagauccaggagucccucaagaccaagaucgucgacucccccgagaagcucaagaacuacaaggagaagaugaaggacaccguccagaagcucaagaacgcccgccaggaggucgucgagaaguacgagaucuacggcgacuccgucgacugccuccccuccugccagcucgagguccagcucuaccagaagaagauccaggaccucuccgacaaccgcgagaagcucgccuccauccucaaggagucccucaaccucgaggaccagaucgaguccgacgaguccgagcucaagaagcucaagaccgaggagaacuccuucaagcgccucaugaucgucaagaaggagaagcucgccaccgcccaguucaagaucaacaagaagcacgaggacgucaagcaguacaagcgcaccgucaucgaggacugcaacaagguccaggagaagcgcggcgccgucuacgagcgcgucaccaccaucaaccaggagauccagaagaucaagcucggcauccagcagcucaaggacgccgccgagcgcgagaagcucaagucccaggagaucuuccucaaccucaagaccgcccucgagaaguaccacgacggcaucgagaaggccgccgaggacuccuacgccaagaucgacgagaagaccgccgagcucaagcgcaagauguucaagauguccaccuga

SEQ ID NO: 1881 - RNA, 543 nt, Artificial Sequence
  AAB49693 variant
augcaggccgagggccgcggcaccggcggcuccaccggcgacgccgacggccccggcggccccggcauccccgacggccccggcggcaacgccggcggccccggcgaggccggcgccaccggcggccgcggcccccgcggcgccggcgccgcccgcgccuccggccccggcggcggcgccccccgcggcccccacggcggcgccgccuccggccucaacggcugcugccgcugcggcgcccgcggccccgagucccgccuccucgaguucuaccucgccaugcccuucgccacccccauggaggccgagcucgcccgccgcucccucgcccaggacgcccccccccuccccguccccggcguccuccucaaggaguucaccgucuccggcaacauccucaccauccgccucaccgccgccgaccaccgccagcuccagcucuccaucuccuccugccuccagcagcucucccuccucauguggaucacccagugcuuccuccccgucuuccucgcccagccccccuccggccagcgccgcuga

SEQ ID NO: 1882 - RNA, 1215 nt, Artificial Sequence
  CCDS14134.2 variant
auggccuccccccgccucggcaccuucugcugccccacccgcgacgccgccacccagcucguccucuccuuccagccccgcgccuuccacgcccucugccucggcuccggcggccuccgccucgcccucggccuccuccagcuccuccccggccgccgccccgccggccccggcucccccgccaccuccccccccgccuccguccgcauccuccgcgccgccgccgccugcgaccuccucggcugccucggcauggucauccgcuccaccgucuggcucggcuuccccaacuucgucgacuccgucuccgacaugaaccacaccgagaucuggcccgccgccuucugcgucggcuccgccauguggauccagcuccucuacuccgccugcuucugguggcucuucugcuacgccgucgacgccuaccucgucauccgccgcuccgccggccucuccaccauccuccucuaccacaucauggccuggggccucgccacccuccucugcgucgagggcgccgccaugcucuacuaccccuccgucucccgcugcgagcgcggccucgaccacgccaucccccacuacgucaccauguaccucccccuccuccucguccucgucgccaaccccauccucuuccagaagaccgucaccgccgucgccucccuccucaagggccgccagggcaucuacaccgagaacgagcgccgcaugggcgccgucaucaagauccgcuucuucaagaucaugcucguccucaucaucugcuggcucuccaacaucaucaacgagucccuccucuucuaccucgagaugcagaccgacaucaacggcggcucccucaagcccguccgcaccgccgccaagaccaccugguucaucaugggcauccucaaccccgcccagggcuuccuccucucccucgccuucuacggcuggaccggcugcucccucggcuuccaguccccccgcaaggagauccagugggagucccucaccaccuccgccgccgagggcgcccaccccuccccccucaugccccacgagaaccccgccuccggcaaggucucccaggucggcggccagaccuccgacgaggcccucuccaugcucuccgagggcuccgacgccuccaccaucgagauccacaccgccuccgaguccugcaacaagaacgagggcgaccccgcccuccccacccacggcgaccucuga

SEQ ID NO: 1883 - RNA, 3141 nt, Artificial Sequence
  AAH38180 variant
auggccuccuccgucggcaacgucgccgacuccaccgagcccaccaagcgcaugcucuccuuccagggccucgccgagcucgcccaccgcgaguaccaggccggcgacuucgaggccgccgagcgccacugcaugcagcucuggcgccaggagcccgacaacaccggcguccuccuccuccucuccuccauccacuuccagugccgccgccucgaccgcuccgcccacuucuccacccucgccaucaagcagaacccccuccucgccgaggccuacuccaaccucggcaacgucuacaaggagcgcggccagcuccaggaggccaucgagcacuaccgccacgcccuccgccucaagcccgacuucaucgacggcuacaucaaccucgccgccgcccucgucgccgccggcgacauggagggcgccguccaggccuacgucuccgcccuccaguacaaccccgaccucuacugcguccgcuccgaccucggcaaccuccucaaggcccucggccgccucgaggaggccaaggccugcuaccucaaggccaucgagacccagcccaacuucgccgucgccugguccaaccucggcugcgucuucaacgcccagggcgagaucuggcucgccauccaccacuucgagaaggccgucacccucgaccccaacuuccucgacgccuacaucaaccucggcaacguccucaaggaggcccgcaucuucgaccgcgccgucgccgccuaccuccgcgcccucucccucucccccaaccacgccgucguccacggcaaccucgccugcgucuacuacgagcagggccucaucgaccucgccaucgacaccuaccgccgcgccaucgagcuccagccccacuuccccgacgccuacugcaaccucgccaacgcccucaaggagaagggcuccgucgccgaggccgaggacugcuacaacaccgcccuccgccucugccccacccacgccgacucccucaacaaccucgccaacaucaagcgcgagcagggcaacaucgaggaggccguccgccucuaccgcaaggcccucgaggucuuccccgaguucgccgccgcccacuccaaccucgccuccguccuccagcagcagggcaagcuccaggaggcccucaugcacuacaaggaggccauccgcaucucccccaccuucgccgacgccuacuccaacaugggcaacacccucaaggagaugcaggacguccagggcgcccuccagugcuacacccgcgccauccagaucaaccccgccuucgccgacgcccacuccaaccucgccuccauccacaaggacuccggcaacauccccgaggccaucgccuccuaccgcaccgcccucaagcucaagcccgacuuccccgacgccuacugcaaccucgcccacugccuccagaucgucugcgacuggaccgacuacgacgagcgcaugaagaagcucgucuccaucgucgccgaccagcucgagaagaaccgccuccccuccguccacccccaccacuccaugcucuacccccucucccacggcuuccgcaaggccaucgccgagcgccacggcaaccucugccucgacaagaucaacguccuccacaagccccccuacgagcaccccaaggaccucaagcucuccgacggccgccuccgcgucggcuacgucuccuccgacuucggcaaccaccccaccucccaccucaugcaguccauccccggcaugcacaaccccgacaaguucgaggucuucugcuacgcccucucccccgacgacggcaccaacuuccgcgucaaggucauggccgaggccaaccacuucaucgaccucucccagauccccugcaacggcaaggccgccgaccgcauccaccaggacggcauccacauccucgucaacaugaacggcuacaccaagggcgcccgcaacgagcucuucgcccuccgccccgcccccauccaggccauguggcucggcuaccccggcaccuccggcgcccucuucauggacuacaucaucaccgaccaggagaccucccccgccgaggucgccgagcaguacuccgagaagcucgccuacaugccccacaccuucuucaucggcgaccacgccaacauguucccccaccucaagaagaaggccgucaucgacuucaaguccaacggccacaucuacgacaaccgcaucguccucaacggcaucgaccucaaggccuuccucgacucccuccccgacgucaagaucgucaagaugaagugccccgacggcggcgacaacgccgacuccuccaacaccgcccucaacaugcccgucauccccaugaacaccaucgccgaggccgucaucgagaugaucaaccgcggccagauccagaucaccaucaacggcuucuccaucuccaacggccucgccaccacccagaucaacaacaaggccgccaccggcgaggaggucccccgcaccaucaucgucaccacccgcucccaguacggccuccccgaggacgccaucgucuacugcaacuucaaccagcucuacaagaucgaccccuccacccuccagaugugggccaacauccucaagcgcguccccaacuccguccucuggcuccuccgcuuccccgccgucggcgagcccaacauccagcaguacgcccagaacaugggccucccccagaaccgcaucaucuucucccccgucgcccccaaggaggagcacguccgccgcggccagcucgccgacgucugccucgacaccccccucugcaacggccacaccaccggcauggacguccucugggccggcacccccauggucaccaugcccggcgagacccucgccucccgcgucgccgccucccagcucaccugccucggcugccucgagcucaucgccaagaaccgccaggaguacgaggacaucgccgucaagcucggcaccgaccucgaguaccucaagaagguccgcggcaaggucuggaagcagcgcaucuccuccccccucuucaacaccaagcaguacaccauggagcucgagcgccucuaccuccagaugugggagcacuacgccgccggcaacaagcccgaccacaugaucaagcccgucgaggucaccgaguccgccuga

SEQ ID NO: 1884 - RNA, 441 nt, Artificial Sequence
  BAG57972 variant
auggccgccgagacccuccucuccucccuccucggccuccuccuccucggccuccuccuccccgccucccucaccggcggcgucggcucccucaaccucgaggagcucuccgagaugcgcuacggcaucgagauccucccccuccccgucaugggcggccagucccaguccuccgacgucgucaucgucuccuccaaguacaagcagcgcuacgagugccgccuccccgucggcgccauccacuuccagcgcgagcgcgaggaggagacccccgccuaccagggccccggcauccccgagcuccucucccccaugcgcgacgcccccugccuccucaagaccaaggacugguggaccuacgaguucugcuacggccgccacauccagcaguaccacauggaggacuccgagaucaagggccuccaggccgccuccuccuga

SEQ ID NO: 1885 - RNA, 1221 nt, Artificial Sequence
  BAG65333 variant
auggccgccgagacccuccucuccucccuccucggccuccuccuccucggccuccuccuccccgccucccucaccggcggcgucggcucccucaaccucgaggagcucuccgagaugcgcuacggcaucgagauccucccccuccccgucaugggcggccagucccaguccuccgacgucgucaucgucuccuccaaguacaagcagcgcuacgagugccgccuccccgccggcgccauccacuuccagcgcgagcgcgaggaggagacccccgccuaccagggccccggcauccccgagcuccucucccccaugcgcgacgcccccugccuccucaagaccaaggacugguggaccuacgaguucugcuacggccgccacauccagcaguaccacauggaggacuccgccuccggcgcccccaacgacuuccagaacaacguccaggucaaggucauccgcucccccgccgaccucauccgcuucaucgaggagcucaagggcggcaccaagaagggcaagcccaacaucggccaggagcagcccgucgacgacgccgccgaggucccccagcgcgagcccgagaaggagcgcggcgaccccgagcgccagcgcgagauggaggaggaggaggacgaggacgaggacgaggacgaggacgaggacgagcgccagcuccucggcgaguucgagaaggagcucgagggcauccuccuccccuccgaccgcgaccgccuccgcuccgaggucaaggccggcauggagcgcgagcucgagaacaucauccaggagaccgagaaggagcucgaccccgacggccucaagaaggaguccgagcgcgaccgcgccaugcucgcccucaccuccacccucaacaagcucaucaagcgccucgaggagaagcagucccccgagcucgucaagaagcacaagaagaagcgcgucguccccaagaagcccccccccuccccccagcccaccggcaagaucgagaucaagaucguccgccccugggccgagggcaccgaggagggcgcccgcuggcucaccgacgaggacacccgcaaccucaaggagaucuucuucaacauccucguccccggcgccgaggaggcccagaaggagcgccagcgccagaaggagcucgaguccaacuaccgccgcgucuggggcucccccggcggcgagggcaccggcgaccucgacgaguucgacuucuga

SEQ ID NO: 1886 - RNA, 2223 nt, Artificial Sequence
  BAH13933 variant
auggccgucgagacccuccucuccucccuccucggccuccuccuccucggccuccuccuccccgccucccucaccggcggcgucggcucccucaaccucgaggagcucuccgagaugcgcuacggcaucgagauccucccccuccccgucaugggcggccagucccaguccuccgacgucgucaucgucuccuccaaguacaagcagcgcuacgagugccgccuccccgccggcgccauccacuuccagcgcgagcgcgaggaggagacccccgccuaccagggccccggcauccccgagcuccucucccccaugcgcgacgcccccugccuccucaagaccaaggacugguggaccuacgaguucugcuacggccgccacauccagcaguaccacauggaggacuccgagaucaagggcgagguccucuaccucggcuacuaccaguccgccuucgacugggacgacgagaccgccaaggccuccaagcagcaccgccucaagcgcuaccacucccagaccuacggcaacggcuccaagugcgaccucaacggccgcccccgcgaggccgagguccgcuuccucugcgacgagggcgccggcaucuccggcgacuacaucgaccgcgucgacgagccccucuccugcuccuacguccucaccauccgcaccccccgccucugcccccacccccuccuccgccccccccccuccgccgccccccaggccauccucugccaccccucccuccagcccgaggaguacauggccuacguccagcgccaggccgacuccaagcaguacggcgacaagaucaucgaggagcuccaggaccucggcccccaggucugguccgagaccaaguccggcgucgccccccagaagauggccggccgcacccucuuccaccucuuccgcgagauccacuuccacuucuuccccucccccgaccucaccguccucaccgacugguggggcggcggcggcgucgagaaguaccacggccccuccucccucggcgaccgcggcggcgagggcacccccuccuaccuccuccccuccgucuccccccuccucuccgaccagucccuccccguccucugcacccucggcgccucccccaccaaggacgacuccaaggacuccgacuucuggaagaugcucaacgagcccgaggaccaggcccccggcggcgaggagguccccgccgaggagcaggaccccucccccgaggccgccgacuccgccuccggcgcccccaacgacuuccagaacaacguccaggucaaggucauccgcucccccgccgaccucauccgcuucaucgaggagcucaagggcggcaccaagaagggcaagcccaacaucggccaggagcagcccgucgacgacgccgccgaggucccccagcgcgagcccgagaaggagcgcggcgaccccgagcgccagcgcgagauggaggaggaggaggacgaggacgaggacgaggacgaggacgaggacgagcgccagcuccucggcgaguucgagaaggagcucgagggcauccuccuccccuccgaccgcgaccgccuccgcuccgaggucaaggccggcauggagcgcgagcucgagaacaucauccaggagaccgagaaggagcucgaccccgacggccucaagaaggaguccgagcgcgaccgcgccaugcucgcccucaccuccacccucaacaagcucaucaagcgccucgaggagaagcagucccccgagcucgucaagaagcacaagaagaagcgcgucguccccaagaagcccccccccuccccccagcccaccgaggaggaccccgagcaccgcguccgcguccgcgucaccaagcuccgccucggcggccccaaccaggaccucaccguccucgagaugaagcgcgagaacccccagcucaagcagaucgagggccucgucaaggagcuccucgagcgcgagggccucaccgccgccggcaagaucgagaucaagaucguccgccccugggccgagggcaccgaggagggcgcccgcuggcucaccgacgaggacacccgcaaccucaaggagaucuucuucaacauccucguccccggcgccgaggaggcccagaaggagcgccagcgccagaaggagcucgaguccaacuaccgccgcgucuggggcucccccggcggcgagggcaccggcgaccucgacgaguucgacuucuga

SEQ ID NO: 1887 - RNA, 2004 nt, Artificial Sequence
  AAB06495 variant
auggccgccgagacccuccucuccucccuccucggccuccuccuccucggccuccuccuccccgccucccucaccggcggcgucggcucccucaaccucgaggagcucuccgagaugcgcuacggcaucgagauccucccccuccccgucaugggcggccagucccaguccuccgacgucgucaucgucuccuccaaguacaagcagcgcuacgagugccgccuccccgccggcgccauccacuuccagcgcgagcgcgaggaggagacccccgccuaccagggccccggcauccccgagcuccucucccccaugcgcgacgcccccugccuccucaagaccaaggacugguggaccuacgaguucugcuacggccgccacauccagcaguaccacauggaggacuccgagaucaagggcgagguccucuaccucggcuacuaccaguccgccuucgacugggacgacgagaccgccaaggccuccaagcagcaccgccucaagcgcuaccacucccagaccuacggcaacggcuccaagugcgaccucaacggccgcccccgcgaggccgagguccgcuuccucugcgacgagggcgccggcaucuccggcgacuacaucgaccgcgucgacgagccccucuccugcuccuacguccucaccauccgcaccccccgccucugcccccacccccuccuccgccccccccccuccgccgccccccaggccauccucugccaccccucccuccagcccgaggaguacauggccuacguccagcgccaggccgacuccaagcaguacggcgacaagaucaucgaggagcuccaggaccucggcccccaggucugguccgagaccaaguccggcgucgccccccagaagauggccggcgccucccccaccaaggacgacuccaaggacuccgacuucuggaagaugcucaacgagcccgaggaccaggcccccggcggcgaggagguccccgccgaggagcaggaccccucccccgaggccgccgacuccgccuccggcgcccccaacgacuuccagaacaacguccaggucaaggucauccgcucccccgccgaccucauccgcuucaucgaggagcucaagggcggcaccaagaagggcaagcccaacaucggccaggagcagcccgucgacgacgccgccgaggucccccagcgcgagcccgagaaggagcgcggcgaccccgagcgccagcgcgagauggaggaggaggaggacgaggacgaggacgaggacgaggacgaggacgagcgccagcuccucggcgaguucgagaaggagcucgagggcauccuccuccccuccgaccgcgaccgccuccgcuccgaggucaaggccggcauggagcgcgagcucgagaacaucauccaggagaccgagaaggagcucgaccccgacggccucaagaaggaguccgagcgcgaccgcgccaugcucgcccucaccuccacccucaacaagcucaucaagcgccucgaggagaagcagucccccgagcucgucaagaagcacaagaagaagcgcgucguccccaagaagcccccccccuccccccagcccaccgaggaggaccccgagcaccgcguccgcguccgcgucaccaagcuccgccucggcggccccaaccaggaccucaccguccucgagaugaagcgcgagaacccccagcucaagcagaucgagggccucgucaaggagcuccucgagcgcgagggccucaccgccgccggcaagaucgagaucaagaucguccgccccugggccgagggcaccgaggagggcgcccgcuggcucaccgacgaggacacccgcaaccucaaggagaucuucuucaacauccucguccccggcgccgaggaggcccagaaggagcgccagcgccagaaggagcucgaguccaacuaccgccgcgucuggggcucccccggcggcgagggcaccggcgaccucgacgaguucgacuucuga

SEQ ID NO: 1888 - RNA, 303 nt, Artificial Sequence
  AAI13433 variant
augcgcgcccucacccuccucgcccuccucgcccucgccgcccucugcaucgccggccaggccggcgccaagcccuccggcgccgaguccuccaagggcgccgccuucgucuccaagcaggagggcuccgaggucgucaagcgcccccgccgcuaccucuaccaguggcucggcgcccccguccccuaccccgacccccucgagccccgccgcgaggucugcgagcucaaccccgacugcgacgagcucgccgaccacaucggcuuccaggaggccuaccgccgcuucuacggccccgucuga

SEQ ID NO: 1889 - RNA, 945 nt, Artificial Sequence
  EAX06008 variant
augcgcaucgccgucaucugcuucugccuccucggcaucaccugcgccauccccgucaagcaggccgacuccggcuccuccgaggagaagcagcucuacaacaaguaccccgacgccgucgccaccuggcucaaccccgaccccucccagaagcagaaccuccucgccccccagaacgccgucuccuccgaggagaccaacgacuucaagcaggagacccuccccuccaaguccaacgagucccacgaccacauggacgacauggacgacgaggacgacgacgaccacgucgacucccaggacuccaucgacuccaacgacuccgacgacgucgacgacaccgacgacucccaccaguccgacgagucccaccacuccgacgaguccgacgagcucgucaccgacuuccccaccgaccuccccgccaccgaggucuucacccccgucguccccaccgucgacaccuacgacggccgcggcgacuccgucgucuacggccuccgcuccaaguccaagaaguuccgccgccccgacauccaguaccccgacgccaccgacgaggacaucaccucccacauggaguccgaggagcucaacggcgccuacaaggccauccccgucgcccaggaccucaacgcccccuccgacugggacucccgcggcaaggacuccuacgagaccucccagcucgacgaccaguccgccgagacccacucccacaagcagucccgccucuacaagcgcaaggccaacgacgaguccaacgagcacuccgacgucaucgacucccaggagcucuccaaggucucccgcgaguuccacucccacgaguuccacucccacgaggacaugcucgucgucgaccccaaguccaaggaggaggacaagcaccucaaguuccgcaucucccacgagcucgacuccgccuccuccgaggucaacuga

SEQ ID NO: 1890 - RNA, 903 nt, Artificial Sequence
  EAX06009 variant
augcgcaucgccgucaucugcuucugccuccucggcaucaccugcgccauccccgucaagcaggccgacuccggcuccuccgaggagaagcagcucuacaacaaguaccccgacgccgucgccaccuggcucaaccccgaccccucccagaagcagaaccuccucgccccccagacccuccccuccaaguccaacgagucccacgaccacauggacgacauggacgacgaggacgacgacgaccacgucgacucccaggacuccaucgacuccaacgacuccgacgacgucgacgacaccgacgacucccaccaguccgacgagucccaccacuccgacgaguccgacgagcucgucaccgacuuccccaccgaccuccccgccaccgaggucuucacccccgucguccccaccgucgacaccuacgacggccgcggcgacuccgucgucuacggccuccgcuccaaguccaagaaguuccgccgccccgacauccaguaccccgacgccaccgacgaggacaucaccucccacauggaguccgaggagcucaacggcgccuacaaggccauccccgucgcccaggaccucaacgcccccuccgacugggacucccgcggcaaggacuccuacgagaccucccagcucgacgaccaguccgccgagacccacucccacaagcagucccgccucuacaagcgcaaggccaacgacgaguccaacgagcacuccgacgucaucgacucccaggagcucuccaaggucucccgcgaguuccacucccacgaguuccacucccacgaggacaugcucgucgucgaccccaaguccaaggaggaggacaagcaccucaaguuccgcaucucccacgagcucgacuccgccuccuccgaggucaacuga

SEQ ID NO: 1891 - RNA, 864 nt, Artificial Sequence
  EAX06010 variant
augcgcaucgccgucaucugcuucugccuccucggcaucaccugcgccauccccgucaagcaggccgacuccggcuccuccgaggagaagcagaacgccgucuccuccgaggagaccaacgacuucaagcaggagacccuccccuccaaguccaacgagucccacgaccacauggacgacauggacgacgaggacgacgacgaccacgucgacucccaggacuccaucgacuccaacgacuccgacgacgucgacgacaccgacgacucccaccaguccgacgagucccaccacuccgacgaguccgacgagcucgucaccgacuuccccaccgaccuccccgccaccgaggucuucacccccgucguccccaccgucgacaccuacgacggccgcggcgacuccgucgucuacggccuccgcuccaaguccaagaaguuccgccgccccgacauccaguaccccgacgccaccgacgaggacaucaccucccacauggaguccgaggagcucaacggcgccuacaaggccauccccgucgcccaggaccucaacgcccccuccgacugggacucccgcggcaaggacuccuacgagaccucccagcucgacgaccaguccgccgagacccacucccacaagcagucccgccucuacaagcgcaaggccaacgacgaguccaacgagcacuccgacgucaucgacucccaggagcucuccaaggucucccgcgaguuccacucccacgaguuccacucccacgaggacaugcucgucgucgaccccaaguccaaggaggaggacaagcaccucaaguuccgcaucucccacgagcucgacuccgccuccuccgaggucaacuga

SEQ ID NO: 1892 - RNA, 984 nt, Artificial Sequence
  BAH12087 variant
augggcaucgucccccgcucccucgacaagaaggcccaccgcguccaguuccagcucaaccgcaucaaggccaagaucgagcuccccuggggcucccuccagcucgacugccucaugaagacccucaaggagcucuacaacaaguaccccgacgccgucgccaccuggcucaaccccgaccccucccagaagcagaaccuccucgccccccagaacgccgucuccuccgaggagaccaacgacuucaagcaggagacccuccccuccaaguccaacgagucccacgaccacauggacgacauggacgacgaggacgacgacgaccacgucgacucccaggacuccaucgacuccaacgacuccgacgacgucgacgacaccgacgacucccaccaguccgacgagucccaccacuccgacgaguccgacgagcucgucaccgacuuccccaccgaccuccccgccaccgaggucuucacccccgucguccccaccgucgacaccuacgacggccgcggcgacuccgucgucuacggccuccgcuccaaguccaagaaguuccgccgccccgacauccaguaccccgacgccaccgacgaggacaucaccucccacauggaguccgaggagcucaacggcgccuacaaggccauccccgucgcccaggaccucaacgcccccuccgacugggacucccgcggcaaggacuccuacgagaccucccagcucgacgaccaguccgccgagacccacucccacaagcagucccgccucuacaagcgcaaggccaacgacgaguccaacgagcacuccgacgucaucgacucccaggagcucuccaaggucucccgcgaguuccacucccacgaguuccacucccacgaggacaugcucgucgucgaccccaaguccaaggaggaggacaagcaccucaaguuccgcaucucccacgagcucgacuccgccuccuccgaggucaacuga

SEQ ID NO: 1893 - RNA, 879 nt, Artificial Sequence
  AEA49030 variant
augcgcaucgccgucaucugcuucugccuccucggcaucaccugcgccauccccgucaagcaggccgacuccggcuccuccgaggagaagcagcucuacaacaaguaccccgacgccgucgccaccuggcucaaccccgaccccucccagaagcagaaccuccucgccccccagaacgccgucuccuccgaggagaccaacgacuucaagcaggagacccuccccuccaaguccaacgagucccacgaccacauggacgacauggacgacgaggacgacgacucccaccaguccgacgagucccaccacuccgacgaguccgacgagcucgucaccgacuuccccaccgaccuccccgccaccgaggucuucacccccgucguccccaccgucgacaccuacgacggccgcggcgacuccgucgucuacggccuccgcuccaaguccaagaaguuccgccgccccgacauccaguaccccgacgccaccgacgaggacaucaccucccacauggaguccgaggagcucaacggcgccuacaaggccauccccgucgcccaggaccucaacgcccccuccgacugggacucccgcggcaaggacuccuacgagaccucccagcucgacgaccaguccgccgagacccacucccacaagcagucccgccucuacaagcgcaaggccaacgacgaguccaacgagcacuccgacgucaucgacucccaggagcucuccaaggucucccgcgaguuccacucccacgaguuccacucccacgaggacaugcucgucgucgaccccaaguccaaggaggaggacaagcaccucaaguuccgcaucucccacgagcucgacuccgccuccuccgaggucaacuga

SEQ ID NO: 1894 - RNA, 945 nt, Artificial Sequence; identical to SEQ ID NO: 1889
  AAA86886 variant

SEQ ID NO: 1895 - RNA, 1182 nt, Artificial Sequence
  AAA59988 variant
auggaggagccccaguccgaccccuccgucgagcccccccucucccaggagaccuucuccgaccucuggaagcuccuccccgagaacaacguccucuccccccuccccucccaggccauggacgaccucaugcucucccccgacgacaucgagcagugguucaccgaggaccccggccccgacgaggccccccgcaugcccgaggccgccccccccgucgcccccgcccccgccgcccccacccccgccgcccccgcccccgcccccuccuggccccucuccuccuccguccccucccagaagaccuaccagggcuccuacggcuuccgccucggcuuccuccacuccggcaccgccaaguccgucaccugcaccuacucccccgcccucaacaagauguucugccagcucgccaagaccugccccguccagcucugggucgacuccacccccccccccggcacccgcguccgcgccauggccaucuacaagcagucccagcacaugaccgaggucguccgccgcugcccccaccacgagcgcugcuccgacuccgacggccucgcccccccccagcaccucauccgcgucgagggcaaccuccgcgucgaguaccucgacgaccgcaacaccuuccgccacuccgucgucguccccuacgagccccccgaggucggcuccgacugcaccaccauccacuacaacuacaugugcaacuccuccugcaugggcggcaugaaccgccgccccauccucaccaucaucacccucgaggacuccuccggcaaccuccucggccgcaacuccuucgagguccgcgucugcgccugccccggccgcgaccgccgcaccgaggaggagaaccuccgcaagaagggcgagccccaccacgagcucccccccggcuccaccaagcgcgcccuccccaacaacaccuccuccuccccccagcccaagaagaagccccucgacggcgaguacuucacccuccagauccgcggccgcgagcgcuucgagauguuccgcgagcucaacgaggcccucgagcucaaggacgcccaggccggcaaggagcccggcggcucccgcgcccacuccucccaccucaaguccaagaagggccaguccaccucccgccacaagaagcucauguucaagaccgagggccccgacuccgacuga

SEQ ID NO: 1896 - RNA, 309 nt, Artificial Sequence
  AAF88037 variant
auguccgcccgcguccgcucccgcucccgcggccgcggcgacggccaggaggcccccgacgucgucgccuucgucgcccccggcgagucccagcaggaggagccccccaccgacaaccaggacaucgagcccggccaggagcgcgagggcaccccccccaucgaggagcgcaaggucgagggcgacugccaggagauggaccucgagaagacccgcuccgagcgcggcgacggcuccgacgucaaggagaagaccccccccaaccccaagcacgccaagaccaaggaggccggcgacggccagcccuga

SEQ ID NO: 1897 - RNA, 1209 nt, Artificial Sequence
  AAA60003 variant
augcagaugucccccgcccucaccugccucguccucggccucgcccucgucuucggcgagggcuccgccguccaccacccccccuccuacgucgcccaccucgccuccgacuucggcguccgcgucuuccagcaggucgcccaggccuccaaggaccgcaacgucgucuucucccccuacggcgucgccuccguccucgccaugcuccagcucaccaccggcggcgagacccagcagcagauccaggccgccaugggcuucaagaucgacgacaagggcauggcccccgcccuccgccaccucuacaaggagcucaugggccccuggaacaaggacgagaucuccaccaccgacgccaucuucguccagcgcgaccucaagcucguccagggcuucaugccccacuucuuccgccucuuccgcuccaccgucaagcaggucgacuucuccgaggucgagcgcgcccgcuucaucaucaacgacugggucaagacccacaccaagggcaugaucuccaaccuccucggcaagggcgccgucgaccagcucacccgccucguccucgucaacgcccucuacuucaacggccaguggaagacccccuuccccgacuccuccacccaccgccgccucuuccacaaguccgacggcuccaccgucuccguccccaugauggcccagaccaacaaguucaacuacaccgaguucaccacccccgacggccacuacuacgacauccucgagcuccccuaccacggcgacacccucuccauguucaucgccgcccccuacgagaaggaggucccccucuccgcccucaccaacauccucuccgcccagcucaucucccacuggaagggcaacaugacccgccucccccgccuccucguccuccccaaguucucccucgagaccgaggucgaccuccgcaagccccucgagaaccucggcaugaccgacauguuccgccaguuccaggccgacuucaccucccucuccgaccaggagccccuccacgucgcccaggcccuccagaaggucaagaucgaggucaacgaguccggcaccgucgccuccuccuccaccgccgucaucgucuccgcccgcauggcccccgaggagaucaucauggaccgccccuuccucuucgucguccgccacaaccccaccggcaccguccucuucaugggccaggucauggagcccuga

SEQ ID NO: 1898 - RNA, 1248 nt, Artificial Sequence
  AAA36797 variant
auggaggaccucugcgucgccaacacccucuucgcccucaaccucuucaagcaccucgccaaggccucccccacccagaaccucuuccucucccccugguccaucuccuccaccauggccauggucuacaugggcucccgcggcuccaccgaggaccagauggccaagguccuccaguucaacgaggucggcgccaacgccgucacccccaugacccccgagaacuucaccuccugcggcuucaugcagcagauccagaagggcuccuaccccgacgccauccuccaggcccaggccgccgacaagauccacuccuccuuccgcucccucuccuccgccaucaacgccuccaccggcaacuaccuccucgaguccgucaacaagcucuucggcgagaaguccgccuccuuccgcgaggaguacauccgccucugccagaaguacuacuccuccgagccccaggccgucgacuuccucgagugcgccgaggaggcccgcaagaagaucaacuccugggucaagacccagaccaagggcaagauccccaaccuccuccccgagggcuccgucgacggcgacacccgcaugguccucgucaacgccgucuacuucaagggcaaguggaagacccccuucgagaagaagcucaacggccucuaccccuuccgcgucaacuccgcccagcgcacccccguccagaugauguaccuccgcgagaagcucaacaucggcuacaucgaggaccucaaggcccagauccucgagcuccccuacgccggcgacgucuccauguuccuccuccuccccgacgagaucgccgacgucuccaccggccucgagcuccucgaguccgagaucaccuacgacaagcucaacaaguggaccuccaaggacaagauggccgaggacgaggucgaggucuacaucccccaguucaagcucgaggagcacuacgagcuccgcuccauccuccgcuccaugggcauggaggacgccuucaacaagggccgcgccaacuucuccggcauguccgagcgcaacgaccucuuccucuccgaggucuuccaccaggccauggucgacgucaacgaggagggcaccgaggccgccgccggcaccggcggcgucaugaccggccgcaccggccacggcggcccccaguucgucgccgaccaccccuuccucuuccucaucaugcacaagaucaccaacugcauccucuucuucggccgcuucuccucccccuga

SEQ ID NO: 1899 - RNA, 528 nt, Artificial Sequence
  AAA60020 variant
augcucccccccauggcccuccccuccgucuccuggaugcuccucuccugccucaugcuccucucccagguccagggcgaggagccccagcgcgagcuccccuccgcccgcauccgcugccccaagggcuccaaggccuacggcucccacugcuacgcccucuuccucucccccaaguccuggaccgacgccgaccucgccugccagaagcgccccuccggcaaccucgucuccguccucuccggcgccgagggcuccuucgucuccucccucgucaaguccaucggcaacuccuacuccuacgucuggaucggccuccacgaccccacccagggcaccgagcccaacggcgagggcugggagugguccuccuccgacgucaugaacuacuucgccugggagcgcaaccccuccaccaucuccucccccggccacugcgccucccucucccgcuccaccgccuuccuccgcuggaaggacuacaacugcaacguccgccuccccuacgucugcaaguucaccgacuga

SEQ ID NO: 1900 - RNA, 528 nt, Artificial Sequence; identical to SEQ ID NO: 1899
  AAT11159 variant

SEQ ID NO: 1901 - RNA, 381 nt, Artificial Sequence
  AAH39863 variant
auggacaagucccuccuccucgagcuccccauccuccucugcugcuuccgcgcccucuccggcucccucuccaugcgcaacgacgccgucaacgagaucgucgccgucaagaacaacuuccccgucaucgagaucguccagugccgcaugugccaccuccaguuccccggcgagaagugcucccgcggccgcggcaucugcaccgccaccaccgaggaggccugcauggucggccgcauguucaagcgcgacggcaaccccuggcucaccuucaugggcugccucaagaacugcgccgacgucaagggcauccgcugguccgucuaccucgucaacuuccgcugcugccgcucccacgaccucugcaacgaggaccucuga

SEQ ID NO: 1902 - RNA, 1440 nt, Artificial Sequence
  CCDS42826.1 variant
augaccacccucgccggcgccgucccccgcaugaugcgccccggccccggccagaacuacccccgcuccggcuucccccucgaggucuccaccccccucggccagggccgcgucaaccagcucggcggcgucuucaucaacggccgcccccuccccaaccacauccgccacaagaucgucgagauggcccaccacggcauccgccccugcgucaucucccgccagcuccgcgucucccacggcugcgucuccaagauccucugccgcuaccaggagaccggcuccauccgccccggcgccaucggcggcuccaagcccaagcaggucaccacccccgacgucgagaagaagaucgaggaguacaagcgcgagaaccccggcauguucuccugggagauccgcgacaagcuccucaaggacgccgucugcgaccgcaacaccguccccuccgucuccuccaucucccgcauccuccgcuccaaguucggcaagggcgaggaggaggaggccgaccucgagcgcaaggaggccgaggaguccgagaagaaggccaagcacuccaucgacggcauccucuccgagcgcgccuccgccccccaguccgacgagggcuccgacaucgacuccgagcccgaccucccccucaagcgcaagcagcgccgcucccgcaccaccuucaccgccgagcagcucgaggagcucgagcgcgccuucgagcgcacccacuaccccgacaucuacacccgcgaggagcucgcccagcgcgccaagcucaccgaggcccgcguccaggucugguucuccaaccgccgcgcccgcuggcgcaagcaggccggcgccaaccagcucauggccuucaaccaccucauccccggcggcuucccccccaccgccaugcccacccuccccaccuaccagcucuccgagaccuccuaccagcccaccuccaucccccaggccgucuccgaccccuccuccaccguccaccgcccccagccccucccccccuccaccguccaccaguccaccauccccuccaaccccgacuccuccuccgccuacugccuccccuccacccgccacggcuucuccuccuacaccgacuccuucgucccccccuccggccccuccaaccccaugaaccccaccaucggcaacggccucuccccccaggucaugggccuccucaccaaccacggcggcgucccccaccagccccagaccgacuacgcccucuccccccucaccggcggccucgagcccaccaccaccgucuccgccuccugcucccagcgccucgaccacaugaagucccucgacucccuccccaccucccaguccuacugcccccccaccuacuccaccaccggcuacuccauggaccccgucaccggcuaccaguacggccaguacggccaguccaagcccuggaccuucuga

SEQ ID NO: 1903 - RNA, 1176 nt, Artificial Sequence
  AAA58397 variant
auggaccucgagaagaacuaccccaccccccgcaccucccgcaccggccacggcggcgucaaccagcucggcggcgucuucgucaacggccgcccccuccccgacgucguccgccagcgcaucgucgagcucgcccaccagggcguccgccccugcgacaucucccgccagcuccgcgucucccacggcugcgucuccaagauccucggccgcuacuacgagaccggcuccaucaagcccggcgucaucggcggcuccaagcccaaggucgccacccccaaggucgucgagaagaucgccgaguacaagcgccagaaccccaccauguucgccugggagauccgcgaccgccuccucgccgagcgcgucugcgacaacgacaccguccccuccgucuccuccaucaaccgcaucauccgcaccaagguccagcagccccccaaccagcccguccccgccuccucccacuccaucgucuccaccggcuccgucacccaggucuccuccgucuccaccgacuccgccggcuccuccuacuccaucuccggcauccucggcaucaccucccccuccgccgacaccaacaagcgcaagcgcgacgagggcauccaggagucccccguccccaacggccacucccuccccggccgcgacuuccuccgcaagcagaugcgcggcgaccucuucacccagcagcagcucgagguccucgaccgcgucuucgagcgccagcacuacuccgacaucuucaccaccaccgagcccaucaagcccgagcagaccaccgaguacuccgccauggccucccucgccggcggccucgacgacaugaaggccaaccucgccucccccacccccgccgacaucggcuccuccguccccggcccccaguccuaccccaucgucaccggccgcgaccucgccuccaccacccuccccggcuaccccccccacgucccccccgccggccagggcuccuacuccgcccccacccucaccggcaugguccccggcuccgaguucuccggcucccccuacucccacccccaguacuccuccuacaacgacuccuggcgcuuccccaaccccggccuccucggcucccccuacuacuacuccgccgccgcccgcggcgccgccccccccgccgccgccaccgccuacgaccgccacuga

SEQ ID NO: 1904 - RNA, 873 nt, Artificial Sequence
  AAF25807 variant
augcgcaucuucgccgucuucaucuucaugaccuacuggcaccuccucaacgccuucaccgucaccguccccaaggaccucuacgucgucgaguacggcuccaacaugaccaucgagugcaaguuccccgucgagaagcagcucgaccucgccgcccucaucgucuacugggagauggaggacaagaacaucauccaguucguccacggcgaggaggaccucaagguccagcacuccuccuaccgccagcgcgcccgccuccucaaggaccagcucucccucggcaacgccgcccuccagaucaccgacgucaagcuccaggacgccggcgucuaccgcugcaugaucuccuacggcggcgccgacuacaagcgcaucaccgucaaggucaacgcccccuacaacaagaucaaccagcgcauccucgucgucgaccccgucaccuccgagcacgagcucaccugccaggccgagggcuaccccaaggccgaggucaucuggaccuccuccgaccaccagguccucuccggcaagaccaccaccaccaacuccaagcgcgaggagaagcucuucaacgucaccuccacccuccgcaucaacaccaccaccaacgagaucuucuacugcaccuuccgccgccucgaccccgaggagaaccacaccgccgagcucgucauccccgagcucccccucgcccacccccccaacgagcgcacccaccucgucauccucggcgccauccuccucugccucggcgucgcccucaccuucaucuuccgccuccgcaagggccgcaugauggacgucaagaagugcggcauccaggacaccaacuccaagaagcaguccgacacccaccucgaggagaccuga

SEQ ID NO: 1905 - RNA, 867 nt, Artificial Sequence
  AAH74740 variant
augcagaucccccaggcccccuggcccgucgucugggccguccuccagcucggcuggcgccccggcugguuccucgacucccccgaccgccccuggaacccccccaccuucucccccgcccuccucgucgucaccgagggcgacaacgccaccuucaccugcuccuucuccaacaccuccgaguccuucguccucaacugguaccgcaugucccccuccaaccagaccgacaagcucgccgccuuccccgaggaccgcucccagcccggccaggacugccgcuuccgcgucacccagcuccccaacggccgcgacuuccacauguccgucguccgcgcccgccgcaacgacuccggcaccuaccucugcggcgccaucucccucgcccccaaggcccagaucaaggagucccuccgcgccgagcuccgcgucaccgagcgccgcgccgagguccccaccgcccaccccucccccuccccccgccccgccggccaguuccagacccucgucgucggcgucgucggcggccuccucggcucccucguccuccucgucuggguccucgccgucaucugcucccgcgccgcccgcggcaccaucggcgcccgccgcaccggccagccccucaaggaggaccccuccgccguccccgucuucuccgucgacuacggcgagcucgacuuccaguggcgcgagaagacccccgagccccccguccccugcguccccgagcagaccgaguacgccaccaucgucuuccccuccggcaugggcaccuccucccccgcccgccgcggcuccgccgacggcccccgcuccgcccagccccuccgccccgaggacggccacugcuccuggccccucuga

SEQ ID NO: 1906 - RNA, 1008 nt, Artificial Sequence
  AAC95296 variant
augggcuccgccucccccggccucuccuccgucucccccucccaccuccuccucccccccgacaccgucucccgcaccggccucgagaaggccgccgccggcgccgucggccucgagcgccgcgacuggucccccuccccccccgccacccccgagcagggccucuccgccuucuaccucuccuacuucgacaugcucuaccccgaggacuccuccugggccgccaaggcccccggcgccuccucccgcgaggagccccccgaggagcccgagcagugccccgucaucgacucccaggcccccgccggcucccucgaccucguccccggcggccucacccucgaggagcacucccucgagcagguccaguccauggucgucggcgagguccucaaggacaucgagaccgccugcaagcuccucaacaucaccgccgaccccauggacuggucccccuccaacguccagaaguggcuccucuggaccgagcaccaguaccgccucccccccaugggcaaggccuuccaggagcucgccggcaaggagcucugcgccauguccgaggagcaguuccgccagcgcuccccccucggcggcgacguccuccacgcccaccucgacaucuggaaguccgccgccuggaugaaggagcgcaccucccccggcgccauccacuacugcgccuccaccuccgaggaguccuggaccgacuccgaggucgacuccuccugcuccggccagcccauccaccucuggcaguuccucaaggagcuccuccucaagccccacuccuacggccgcuucauccgcuggcucaacaaggagaagggcaucuucaagaucgaggacuccgcccaggucgcccgccucuggggcauccgcaagaaccgccccgccaugaacuacgacaagcucucccgcuccauccgccaguacuacaagaagggcaucauccgcaagcccgacaucucccagcgccucgucuaccaguucguccaccccaucuga

SEQ ID NO: 1907 - RNA, 2217 nt, Artificial Sequence
  AAA36429 variant
augcagccccgcugggcccagggcgccaccauguggcucggcguccuccucacccuccuccucugcuccucccucgagggccaggagaacuccuucaccaucaacuccgucgacaugaagucccuccccgacuggaccguccagaacggcaagaaccucacccuccagugcuucgccgacgucuccaccaccucccacgucaagccccagcaccagaugcucuucuacaaggacgacguccucuucuacaacaucuccuccaugaaguccaccgaguccuacuucauccccgagguccgcaucuacgacuccggcaccuacaagugcaccgucaucgucaacaacaaggagaagaccaccgccgaguaccagcuccucgucgagggcguccccuccccccgcgucacccucgacaagaaggaggccauccagggcggcaucguccgcgucaacugcuccguccccgaggagaaggcccccauccacuucaccaucgagaagcucgagcucaacgagaagauggucaagcucaagcgcgagaagaacucccgcgaccagaacuucgucauccucgaguuccccgucgaggagcaggaccgcguccucuccuuccgcugccaggcccgcaucaucuccggcauccacaugcagaccuccgaguccaccaaguccgagcucgucaccgucaccgaguccuucuccacccccaaguuccacaucucccccaccggcaugaucauggagggcgcccagcuccacaucaagugcaccauccaggucacccaccucgcccaggaguuccccgagaucaucauccagaaggacaaggccaucgucgcccacaaccgccacggcaacaaggccgucuacuccgucauggccauggucgagcacuccggcaacuacaccugcaaggucgaguccucccgcaucuccaaggucuccuccaucgucgucaacaucaccgagcucuucuccaagcccgagcucgaguccuccuucacccaccucgaccagggcgagcgccucaaccucuccugcuccauccccggcgccccccccgccaacuucaccauccagaaggaggacaccaucgucucccagacccaggacuucaccaagaucgccuccaaguccgacuccggcaccuacaucugcaccgccggcaucgacaaggucgucaagaaguccaacaccguccagaucgucgucugcgagaugcucucccagccccgcaucuccuacgacgcccaguucgaggucaucaagggccagaccaucgagguccgcugcgaguccaucuccggcacccuccccaucuccuaccagcuccucaagaccuccaagguccucgagaacuccaccaagaacuccaacgaccccgccgucuucaaggacaaccccaccgaggacgucgaguaccagugcgucgccgacaacugccacucccacgccaagaugcucuccgagguccuccgcgucaaggucaucgcccccgucgacgagguccagaucuccauccucuccuccaaggucgucgaguccggcgaggacaucguccuccagugcgccgucaacgagggcuccggccccaucaccuacaaguucuaccgcgagaaggagggcaagcccuucuaccagaugaccuccaacgccacccaggccuucuggaccaagcagaaggccuccaaggagcaggagggcgaguacuacugcaccgccuucaaccgcgccaaccacgccuccuccgucccccgcuccaagauccucaccguccgcgucauccucgcccccuggaagaagggccucaucgccgucgucaucaucggcgucaucaucgcccuccucaucaucgccgccaagugcuacuuccuccgcaaggccaaggccaagcagaugcccgucgagaugucccgccccgccgucccccuccucaacuccaacaacgagaagauguccgaccccaacauggaggccaacucccacuacggccacaacgacgacguccgcaaccacgccaugaagcccaucaacgacaacaaggagccccucaacuccgacguccaguacaccgagguccaggucuccuccgccgagucccacaaggaccucggcaagaaggacaccgagaccgucuacuccgagguccgcaaggccguccccgacgccgucgagucccgcuacucccgcaccgagggcucccucgacggcaccuga

SEQ ID NO: 1908 - RNA, 2736 nt, Artificial Sequence
  AAG23134 variant
auggcccagcucuuccucccccuccucgccgcccucguccucgcccaggcccccgccgcccucgccgacguccucgagggcgacuccuccgaggaccgcgccuuccgcguccgcaucgccggcgacgccccccuccagggcguccucggcggcgcccucaccauccccugccacguccacuaccuccgccccccccccucccgccgcgccguccucggcuccccccgcgucaaguggaccuuccucucccgcggccgcgaggccgagguccucgucgcccgcggcguccgcgucaaggucaacgaggccuaccgcuuccgcgucgcccuccccgccuaccccgccucccucaccgacgucucccucgcccucuccgagcuccgccccaacgacuccggcaucuaccgcugcgagguccagcacggcaucgacgacuccuccgacgccgucgaggucaaggucaagggcgucgucuuccucuaccgcgagggcuccgcccgcuacgccuucuccuucuccggcgcccaggaggccugcgcccgcaucggcgcccacaucgccacccccgagcagcucuacgccgccuaccucggcggcuacgagcagugcgacgccggcuggcucuccgaccagaccguccgcuaccccauccagaccccccgcgaggccugcuacggcgacauggacggcuuccccggcguccgcaacuacggcgucgucgaccccgacgaccucuacgacgucuacugcuacgccgaggaccucaacggcgagcucuuccucggcgacccccccgagaagcucacccucgaggaggcccgcgccuacugccaggagcgcggcgccgagaucgccaccaccggccagcucuacgccgccugggacggcggccucgaccacugcucccccggcuggcucgccgacggcuccguccgcuaccccaucgucacccccucccagcgcugcggcggcggccuccccggcgucaagacccucuuccucuuccccaaccagaccggcuuccccaacaagcacucccgcuucaacgucuacugcuuccgcgacuccgcccagcccuccgccauccccgaggccuccaaccccgccuccaaccccgccuccgacggccucgaggccaucgucaccgucaccgagacccucgaggagcuccagcucccccaggaggccaccgaguccgagucccgcggcgccaucuacuccauccccaucauggaggacggcggcggcggcuccuccacccccgaggaccccgccgaggccccccgcacccuccucgaguucgagacccaguccauggucccccccaccggcuucuccgaggaggagggcaaggcccucgaggaggaggagaaguacgaggacgaggaggagaaggaggaggaggaggaggaggaggaggucgaggacgaggcccucugggccuggcccuccgagcucuccucccccggccccgaggccucccuccccaccgagcccgccgcccaggaggagucccucucccaggcccccgcccgcgccguccuccagcccggcgccuccccccuccccgacggcgaguccgaggccucccgccccccccgcguccacggcccccccaccgagacccuccccaccccccgcgagcgcaaccucgccucccccucccccuccacccucgucgaggcccgcgaggucggcgaggccaccggcggccccgagcucuccggcgucccccgcggcgaguccgaggagaccggcuccuccgagggcgcccccucccuccuccccgccacccgcgcccccgagggcacccgcgagcucgaggcccccuccgaggacaacuccggccgcaccgcccccgccggcaccuccguccaggcccagcccguccuccccaccgacuccgccucccgcggcggcgucgccgucguccccgccuccggcgacugcguccccucccccugccacaacggcggcaccugccucgaggaggaggagggcguccgcugccucugccuccccggcuacggcggcgaccucugcgacgucggccuccgcuucugcaaccccggcugggacgccuuccagggcgccugcuacaagcacuucuccacccgccgcuccugggaggaggccgagacccagugccgcauguacggcgcccaccucgccuccaucuccacccccgaggagcaggacuucaucaacaaccgcuaccgcgaguaccaguggaucggccucaacgaccgcaccaucgagggcgacuuccucugguccgacggcgucccccuccucuacgagaacuggaaccccggccagcccgacuccuacuuccucuccggcgagaacugcgucgucauggucuggcacgaccagggccagugguccgacguccccugcaacuaccaccucuccuacaccugcaagaugggccucgucuccugcggccccccccccgagcucccccucgcccaggucuucggccgcccccgccuccgcuacgaggucgacaccguccuccgcuaccgcugccgcgagggccucgcccagcgcaaccucccccucauccgcugccaggagaacggccgcugggaggccccccagaucuccugcgucccccgccgccccgcccgcgcccuccaccccgaggaggaccccgagggccgccagggccgccuccucggccgcuggaaggcccuccucaucccccccuccucccccaugcccggccccuga

SEQ ID NO: 1909 - RNA, 3321 nt, Artificial Sequence
  AAA60049 variant
augcgccuccccggcgccaugcccgcccucgcccucaagggcgagcuccuccuccucucccuccuccuccuccucgagccccagaucucccagggccucgucgucaccccccccggccccgagcucguccucaacgucuccuccaccuucguccucaccugcuccggcuccgcccccgucgucugggagcgcaugucccaggagcccccccaggagauggccaaggcccaggacggcaccuucuccuccguccucacccucaccaaccucaccggccucgacaccggcgaguacuucugcacccacaacgacucccgcggccucgagaccgacgagcgcaagcgccucuacaucuucguccccgaccccaccgucggcuuccuccccaacgacgccgaggagcucuucaucuuccucaccgagaucaccgagaucaccauccccugccgcgucaccgacccccagcucgucgucacccuccacgagaagaagggcgacgucgcccuccccguccccuacgaccaccagcgcggcuucuccggcaucuucgaggaccgcuccuacaucugcaagaccaccaucggcgaccgcgaggucgacuccgacgccuacuacgucuaccgccuccaggucuccuccaucaacgucuccgucaacgccguccagaccgucguccgccagggcgagaacaucacccucaugugcaucgucaucggcaacgaggucgucaacuucgaguggaccuacccccgcaaggaguccggccgccucgucgagcccgucaccgacuuccuccucgacaugcccuaccacauccgcuccauccuccacauccccuccgccgagcucgaggacuccggcaccuacaccugcaacgucaccgaguccgucaacgaccaccaggacgagaaggccaucaacaucaccgucgucgaguccggcuacguccgccuccucggcgaggucggcacccuccaguucgccgagcuccaccgcucccgcacccuccaggucgucuucgaggccuaccccccccccaccguccucugguucaaggacaaccgcacccucggcgacuccuccgccggcgagaucgcccucuccacccgcaacgucuccgagacccgcuacgucuccgagcucacccucguccgcgucaaggucgccgaggccggccacuacaccaugcgcgccuuccacgaggacgccgagguccagcucuccuuccagcuccagaucaacguccccguccgcguccucgagcucuccgagucccaccccgacuccggcgagcagaccguccgcugccgcggccgcggcaugccccagcccaacaucaucugguccgccugccgcgaccucaagcgcugcccccgcgagcucccccccacccuccucggcaacuccuccgaggaggagucccagcucgagaccaacgucaccuacugggaggaggagcaggaguucgaggucgucuccacccuccgccuccagcacgucgaccgcccccucuccguccgcugcacccuccgcaacgccgucggccaggacacccaggaggucaucgucgucccccacucccuccccuucaaggucgucgucaucuccgccauccucgcccucgucguccucaccaucaucucccucaucauccucaucaugcucuggcagaagaagccccgcuacgagauccgcuggaaggucaucgaguccgucuccuccgacggccacgaguacaucuacgucgaccccaugcagcuccccuacgacuccaccugggagcucccccgcgaccagcucguccucggccgcacccucggcuccggcgccuucggccaggucgucgaggccaccgcccacggccucucccacucccaggccaccaugaaggucgccgucaagaugcucaaguccaccgcccgcuccuccgagaagcaggcccucauguccgagcucaagaucaugucccaccucggcccccaccucaacgucgucaaccuccucggcgccugcaccaagggcggccccaucuacaucaucaccgaguacugccgcuacggcgaccucgucgacuaccuccaccgcaacaagcacaccuuccuccagcaccacuccgacaagcgccgcccccccuccgccgagcucuacuccaacgcccuccccgucggccucccccuccccucccacgucucccucaccggcgaguccgacggcggcuacauggacauguccaaggacgaguccgucgacuacguccccaugcucgacaugaagggcgacgucaaguacgccgacaucgaguccuccaacuacauggcccccuacgacaacuacguccccuccgcccccgagcgcaccugccgcgccacccucaucaacgagucccccguccucuccuacauggaccucgucggcuucuccuaccaggucgccaacggcauggaguuccucgccuccaagaacugcguccaccgcgaccucgccgcccgcaacguccucaucugcgagggcaagcucgucaagaucugcgacuucggccucgcccgcgacaucaugcgcgacuccaacuacaucuccaagggcuccaccuuccucccccucaaguggauggcccccgaguccaucuucaacucccucuacaccacccucuccgacgucugguccuucggcauccuccucugggagaucuucacccucggcggcacccccuaccccgagcuccccaugaacgagcaguucuacaacgccaucaagcgcggcuaccgcauggcccagcccgcccacgccuccgacgagaucuacgagaucaugcagaagugcugggaggagaaguucgagauccgcccccccuucucccagcucguccuccuccucgagcgccuccucggcgagggcuacaagaagaaguaccagcaggucgacgaggaguuccuccgcuccgaccaccccgccauccuccgcucccaggcccgccuccccggcuuccacggccuccgcuccccccucgacaccuccuccguccucuacaccgccguccagcccaacgagggcgacaacgacuacaucaucccccuccccgaccccaagcccgaggucgccgacgagggcccccucgagggcucccccucccucgccuccuccacccucaacgaggucaacaccuccuccaccaucuccugcgacuccccccucgagccccaggacgagcccgagcccgagccccagcucgagcuccaggucgagcccgagcccgagcucgagcagcuccccgacuccggcugccccgccccccgcgccgaggccgaggacuccuuccucuga

SEQ ID NO: 1910 - RNA, 942 nt, Artificial Sequence
  EAX03935 variant
augcuccucuccaagaucaacucccucgcccaccuccgcgccgcccccugcaacgaccuccacgccaccaagcucgcccccggcaaggagaaggagccccucgagucccaguaccaggucggcccccuccucggcuccggcggcuucggcuccgucuacuccggcauccgcgucuccgacaaccuccccgucgccaucaagcacgucgagaaggaccgcaucuccgacuggggcgagcuccccaacggcacccgcguccccauggaggucguccuccucaagaaggucuccuccggcuucuccggcgucauccgccuccucgacugguucgagcgccccgacuccuucguccucauccucgagcgccccgagcccguccaggaccucuucgacuucaucaccgagcgcggcgcccuccaggaggagcucgcccgcuccuucuucuggcagguccucgaggccguccgccacugccacaacugcggcguccuccaccgcgacaucaaggacgagaacauccucaucgaccucaaccgcggcgagcucaagcucaucgacuucggcuccggcgcccuccucaaggacaccgucuacaccgacuucgacggcacccgcgucuacuccccccccgaguggauccgcuaccaccgcuaccacggccgcuccgccgccgucuggucccucggcauccuccucuacgacauggucugcggcgacauccccuucgagcacgacgaggagaucauccgcggccaggucuucuuccgccagcgcgucuccuccgagugccagcaccucauccgcuggugccucgcccuccgccccuccgaccgccccaccuucgaggagauccagaaccaccccuggaugcaggacguccuccucccccaggagaccgccgagauccaccuccacucccucucccccggccccuccaaguga

SEQ ID NO: 1911 - RNA, 303 nt, Artificial Sequence
  AAB81333 variant
auggccgacgaggagaagcucccccccggcugggagaagcgcaugucccgccccuccggccgcggcuacuacuucaaccacaucaccaaccccucccagugggagcgccccuccggcaacuccuccuccggcggcaagaucuggcagggcgagcccgcccgcguccgccgcucccaccuccucgucaagcccgucaaggccgcccucgaccucgccgccggcaaccaccccgaccagggcggcggccccggcgccgaccagcgccuccaccccgaggaccagggccgccgcgagggccucuga

SEQ ID NO: 1912 - RNA, 492 nt, Artificial Sequence
  AAC50492 variant
auggccgacgaggagaagcucccccccggcugggagaagcgcaugucccgcuccuccggccgcgucuacuacuucaaccacaucaccaacgccucccagugggagcgccccuccggcaacuccuccuccggcggcaagaacggccagggcgagcccgcccgcguccgcugcucccaccuccucgucaagcacucccagucccgccgccccuccuccuggcgccaggagaagaucacccgcaccaaggaggaggcccucgagcucaucaacggcuacauccagaagaucaaguccggcgaggaggacuucgagucccucgccucccaguucuccgacugcuccuccgccaaggcccgcggcgaccucggcgccuucucccgcggccagaugcagaagcccuucgaggacgccuccuucgcccuccgcaccggcgagauguccggccccgucuucaccgacuccggcauccacaucauccuccgcaccgaguga

SEQ ID NO: 1913 - RNA, 138 nt, Artificial Sequence
  AAH31971 variant
augcagaagcccuucgaggacgccuccuucgcccuccgcaccggcgagauguccggccccgucuucaccgacuccggcauccacaucauccuccgcaccgagugcuggcgccagacccgcggccccaacugcuucuga

SEQ ID NO: 1914 - RNA, 639 nt, Artificial Sequence
  AAG22596 variant
augaaggucuucaaguucaucggccucaugauccuccucaccuccgccuucuccgccggcuccggccagucccccaugaccguccucugcuccaucgacugguucauggucaccguccaccccuucaugcucaacaacgacgucugcguccacuuccacgagcuccaccucggccucggcugcccccccaaccacguccagccccacgccuaccaguucaccuaccgcgucaccgagugcggcauccgcgccaaggccgucucccaggacauggucaucuacuccaccgagauccacuacuccuccaagggcacccccuccaaguucgucauccccgucuccugcgccgccccccagaagucccccuggcucaccaagcccugcuccaugcgcgucgccuccaagucccgcgccaccgcccagaaggacgagaagugcuacgaggucuucucccucucccaguccucccagcgccccaacugcgacugcccccccugcgucuucuccgaggaggagcacacccagguccccugccaccaggccggcgcccaggaggcccagccccuccagcccucccacuuccucgacaucuccgaggacuggucccuccacaccgacgacaugaucggcuccauguga

SEQ ID NO: 1915 - RNA, 1986 nt, Artificial Sequence
  AAB00386 variant
auggaccucguccucaagcgcugccuccuccaccucgccgucaucggcgcccuccucgccgucggcgccaccaaggucccccgcaaccaggacuggcucggcgucucccgccagcuccgcaccaaggccuggaaccgccagcucuaccccgaguggaccgaggcccagcgccucgacugcuggcgcggcggccaggucucccucaaggucuccaacgacggccccacccucaucggcgccaacgccuccuucuccaucgcccucaacuuccccggcucccagaagguccuccccgacggccaggucaucugggucaacaacaccaucaucaacggcucccaggucuggggcggccagcccgucuacccccaggagaccgacgacgccugcaucuuccccgacggcggccccugccccuccggcuccuggucccagaagcgcuccuucgucuacgucuggaagaccuggggccaguacuggcagguccucggcggccccgucuccggccucuccaucggcaccggccgcgccaugcucggcacccacaccauggaggucaccgucuaccaccgccgcggcucccgcuccuacgucccccucgcccacuccuccuccgccuucaccaucaccgaccagguccccuucuccgucuccgucucccagcuccgcgcccucgacggcggcaacaagcacuuccuccgcaaccagccccucaccuucgcccuccagcuccacgaccccuccggcuaccucgccgaggccgaccucuccuacaccugggacuucggcgacuccuccggcacccucaucucccgcgcccucgucgucacccacaccuaccucgagcccggccccgucaccgcccaggucguccuccaggccgccaucccccucaccuccugcggcuccucccccguccccggcaccaccgacggccaccgccccaccgccgaggcccccaacaccaccgccggccagguccccaccaccgaggucgucggcaccacccccggccaggcccccaccgccgagcccuccggcaccaccuccguccagguccccaccaccgaggucaucuccaccgcccccguccagaugcccaccgccgaguccaccggcaugacccccgagaagguccccgucuccgaggucaugggcaccacccucgccgagauguccacccccgaggccaccggcaugacccccgccgaggucuccaucgucguccucuccggcaccaccgccgcccaggucaccaccaccgagugggucgagaccaccgcccgcgagcuccccauccccgagcccgagggccccgacgccuccuccaucauguccaccgaguccaucaccggcucccucggcccccuccucgacggcaccgccacccuccgccucgucaagcgccaggucccccucgacugcguccucuaccgcuacggcuccuucuccgucacccucgacaucguccagggcaucgaguccgccgagauccuccaggccguccccuccggcgagggcgacgccuucgagcucaccgucuccugccagggcggccuccccaaggaggccugcauggagaucuccucccccggcugccagccccccgcccagcgccucugccagcccguccuccccucccccgccugccagcucguccuccaccagauccucaagggcggcuccggcaccuacugccucaacgucucccucgccgacaccaacucccucgccgucgucuccacccagcucaucaugcccggccaggaggccggccucggccaggucccccucaucgucggcauccuccucguccucauggccgucguccucgccucccucaucuaccgccgccgccucaugaagcaggacuucuccgucccccagcucccccacuccuccucccacuggcuccgccucccccgcaucuucugcuccugccccaucggcgagaacuccccccuccucuccggccagcaggucuga

SEQ ID NO: 1916 - RNA, 2649 nt, Artificial Sequence
  CCDS10255.1 variant
auggagcccgcccccgcccgcuccccccgcccccagcaggaccccgcccgcccccaggagcccaccaugcccccccccgagacccccuccgagggccgccagcccucccccucccccucccccaccgagcgcgcccccgccuccgaggaggaguuccaguuccuccgcugccagcagugccaggccgaggccaagugccccaagcuccuccccugccuccacacccucugcuccggcugccucgaggccuccggcaugcagugccccaucugccaggcccccuggccccucggcgccgacacccccgcccucgacaacgucuucuucgagucccuccagcgccgccucuccgucuaccgccagaucgucgacgcccaggccgucugcacccgcugcaaggaguccgccgacuucuggugcuucgagugcgagcagcuccucugcgccaagugcuucgaggcccaccagugguuccucaagcacgaggcccgcccccucgccgagcuccgcaaccaguccguccgcgaguuccucgacggcacccgcaagaccaacaacaucuucugcuccaaccccaaccaccgcacccccacccucaccuccaucuacugccgcggcugcuccaagccccucugcugcuccugcgcccuccucgacuccucccacuccgagcucaagugcgacaucuccgccgagauccagcagcgccaggaggagcucgacgccaugacccaggcccuccaggagcaggacuccgccuucggcgccguccacgcccagaugcacgccgccgucggccagcucggccgcgcccgcgccgagaccgaggagcucauccgcgagcgcguccgccaggucgucgcccacguccgcgcccaggagcgcgagcuccucgaggccgucgacgcccgcuaccagcgcgacuacgaggagauggccucccgccucggccgccucgacgccguccuccagcgcauccgcaccggcuccgcccucguccagcgcaugaagugcuacgccuccgaccaggagguccucgacaugcacggcuuccuccgccaggcccucugccgccuccgccaggaggagccccagucccuccaggccgccguccgcaccgacggcuucgacgaguucaagguccgccuccaggaccucuccuccugcaucacccagggcaaggacgccgccgucuccaagaaggccucccccgaggccgccuccaccccccgcgaccccaucgacgucgaccuccccgaggaggccgagcgcgucaaggcccagguccaggcccucggccucgccgaggcccagcccauggccgucguccaguccguccccggcgcccaccccguccccgucuacgccuucuccaucaagggccccuccuacggcgaggacgucuccaacaccaccaccgcccagaagcgcaagugcucccagacccagugcccccgcaaggucaucaagauggaguccgaggagggcaaggaggcccgccucgcccgcuccucccccgagcagccccgccccuccaccuccaaggccgucucccccccccaccucgacggcccccccuccccccgcucccccgucaucggcuccgaggucuuccuccccaacuccaaccacgucgccuccggcgccggcgaggccgaggagcgcgucgucgucaucuccuccuccgaggacuccgacgccgagaacuccuccucccgcgagcucgacgacuccuccuccgaguccuccgaccuccagcucgagggccccuccacccuccgcguccucgacgagaaccucgccgacccccaggccgaggaccgcccccucgucuucuucgaccucaagaucgacaacgagacccagaagaucucccagcucgccgccgucaaccgcgaguccaaguuccgcgucgucauccagcccgaggccuucuucuccaucuacuccaaggccgucucccucgaggucggccuccagcacuuccucuccuuccucuccuccaugcgccgccccauccucgccugcuacaagcucuggggccccggccuccccaacuucuuccgcgcccucgaggacaucaaccgccucugggaguuccaggaggccaucuccggcuuccucgccgcccucccccucauccgcgagcgcguccccggcgccuccuccuucaagcucaagaaccucgcccagaccuaccucgcccgcaacauguccgagcgcuccgccauggccgccguccucgccaugcgcgaccucugccgccuccucgaggucucccccggcccccagcucgcccagcacgucuaccccuucuccucccuccagugcuucgccucccuccagccccucguccaggccgccguccucccccgcgccgaggcccgccuccucgcccuccacaacgucuccuucauggagcuccucuccgcccaccgccgcgaccgccagggcggccucaagaaguacucccgcuaccucucccuccagaccaccacccucccccccgcccagcccgccuucaaccuccaggcccucggcaccuacuucgagggccuccucgagggccccgcccucgcccgcgccgagggcgucuccaccccccucgccggccgcggccucgccgagcgcgccucccagcaguccuga

SEQ ID NO: 1917 - RNA, 3228 nt, Artificial Sequence
  CCDS46409.1 variant
auggucgucgaggucgacuccaugcccgccgccuccuccgucaagaagcccuucggccuccgcuccaagaugggcaaguggugcugccgcugcuuccccugcugccgcgaguccggcaaguccaacgucggcaccuccggcgaccacgacgacuccgccaugaagacccuccgcuccaagaugggcaaguggugccgccacugcuuccccugcugccgcggcuccggcaaguccaacgucggcgccuccggcgaccacgacgacuccgccaugaagacccuccgcaacaagaugggcaaguggugcugccacugcuuccccugcugccgcggcuccuccaaguccaaggucggcgccuggggcgacuacgacgacuccgccuucauggagccccgcuaccacguccgcggcgaggaccucgacaagcuccaccgcgccgccugguggggcaaggucccccgcaaggaccucaucgucaugcuccgcgacaccgacgucaacaagcaggacaagcagaagcgcaccgcccuccaccucgccuccgccaacggcaacuccgaggucgucaagcuccuccucgaccgccgcugccagcucaacguccucgacaacaagaagcgcaccgcccucaucaaggccguccagugccaggaggacgagugcgcccucaugcuccucgagcacggcaccgaccccaacauccccgacgaguacggcaacaccacccuccacuacgccaucuacaacgaggacaagcucauggccaaggcccuccuccucuacggcgccgacaucgaguccaagaacaagcacggccucaccccccuccuccucggcguccacgagcagaagcagcaggucgucaaguuccucaucaagaagaaggccaaccucaacgcccucgaccgcuacggccgcaccgcccucauccucgccgucugcugcggcuccgccuccaucgucucccuccuccucgagcagaacaucgacgucuccucccaggaccucuccggccagaccgcccgcgaguacgccgucuccucccaccaccacgucaucugccagcuccucuccgacuacaaggagaagcagaugcucaagaucuccuccgagaacuccaaccccgagcaggaccucaagcucaccuccgaggaggagucccagcgcuucaagggcuccgagaacucccagcccgagaagaugucccaggagcccgagaucaacaaggacggcgaccgcgaggucgaggaggagaugaagaagcacgaguccaacaacgucggccuccucgagaaccucaccaacggcgucaccgccggcaacggcgacaacggccucaucccccagcgcaagucccgcacccccgagaaccagcaguuccccgacaacgaguccgaggaguaccaccgcaucugcgagcuccucuccgacuacaaggagaagcagaugcccaaguacuccuccgagaacuccaaccccgagcaggaccucaagcucaccuccgaggaggagucccagcgccucaagggcuccgagaacggccagcccgagaagcgcucccaggagcccgagaucaacaaggacggcgaccgcgagcucgagaacuucauggccaucgaggagaugaagaagcaccgcuccacccacgucggcuuccccgagaaccucaccaacggcgccaccgccggcaacggcgacgacggccucauccccccccgcaagucccgcacccccgagucccagcaguuccccgacaccgagaacgaggaguaccacuccgacgagcagaacgacacccagaagcaguucugcgaggagcagaacaccggcauccuccacgacgagauccucauccacgaggagaagcagaucgaggucgucgagaagaugaacuccgagcucucccucuccugcaagaaggagaaggacauccuccacgagaacuccacccuccgcgaggagaucgccaugcuccgccucgagcucgacaccaugaagcaccagucccagcuccgcgagaagaaguaccucgaggacaucgaguccgucaagaagcgcaacgacaaccuccucaaggcccuccagcucaacgagcucaccauggacgacgacaccgccguccucgucaucgacaacggcuccggcaugugcaaggccggcuucgccggcgacgacgccccccgcgccgucuuccccuccaucgucggccgcccccgccagcagggcaugaugggcggcaugcaccagaaggaguccuacgucggcaaggaggcccaguccaagcgcggcauccucacccucaaguaccccauggagcacggcaucaucaccaacugggacgacauggagaagaucuggcaccacaccuucuacaacgagcuccgcgucgcccccgaggagcaccccguccuccucaccgaggccacccucaaccccaaggccaaccgcgagaagaugacccagaucauguucgagaccuucaacacccccgccauguacgucgccauccaggccguccucucccucuacaccuccggccgcaccaccggcaucgucauggacuccggcgacggcgucacccacaccguccccaucuacgagggcaacgcccucccccacgccacccuccgccucgaccucgccggccgcgagcuccccgacuaccucaugaagauccucaccgagcacggcuaccgcuucaccaccauggccgagcgcgagaucguccgcgacaucaaggagaagcucugcuacgucgcccucgacuucgagcaggagauggccaccgucgccuccuccuccucccucgagaaguccuacgagcuccccgacggccaggucaucaccaucggcaacgagcgcuuccgcugccccgaggcccucuuccagcccugcuuccucggcauggaguccugcggcauccacgagaccaccuucaacuccaucaugaaguccgacgucgacauccgcaaggaccucuacaccaacaccguccucuccggcggcaccaccauguaccccggcauggcccaccgcaugcagaaggagaucgccgcccucgcccccuccaugaugaagauccgcaucaucgccccccccaagcgcaaguacuccgucugggucggcggcuccauccucgccucccucuccaccuuccagcagauguggaucuccaagcaggaguacgacgaguccggccccuccaucguccaccgcaagugccucuga

SEQ ID NO: 1918 - RNA, 1755 nt, Artificial Sequence
  CCDS13562.1 variant
auggucgccgaggucugcuccaugcccaccgccuccaccgucaagaagcccuucgaccuccgcuccaagaugggcaaguggugccaccaccgcuuccccugcugccgcggcuccggcaaguccaacaugggcaccuccggcgaccacgacgacuccuucaugaagaugcuccgcuccaagaugggcaagugcugccgccacugcuuccccugcugccgcggcuccggcaccuccaacgucggcaccuccggcgaccacgagaacuccuucaugaagaugcuccgcuccaagaugggcaaguggugcugccacugcuuccccugcugccgcggcuccggcaaguccaacgucggcgccuggggcgacuacgaccacuccgccuucauggagccccgcuaccacauccgccgcgaggaccucgacaagcuccaccgcgccgccugguggggcaaggucccccgcaaggaccucaucgucaugcuccgcgacaccgacaugaacaagcgcgacaaggagaagcgcaccgcccuccaccucgccuccgccaacggcaacuccgaggucguccagcuccuccucgaccgccgcugccagcucaacguccucgacaacaagaagcgcaccgcccucaucaaggccauccagugccaggaggacgagugcguccucaugcuccucgagcacggcgccgaccgcaacauccccgacgaguacggcaacaccgcccuccacuacgccaucuacaacgaggacaagcucauggccaaggcccuccuccucuacggcgccgacaucgaguccaagaacaagugcggccucaccccccuccuccucggcguccacgagcagaagcagcaggucgucaaguuccucaucaagaagaaggccaaccucaacguccucgaccgcuacggccgcaccgcccucauccucgccgucugcugcggcuccgccuccaucgucaaccuccuccucgagcagaacgucgacgucuccucccaggaccucuccggccagaccgcccgcgaguacgccgucuccucccaccaccacgucaucugcgagcuccucuccgacuacaaggagaagcagaugcucaagaucuccuccgagaacuccaaccccgagcaggaccucaagcucaccuccgaggaggagucccagcgccucaaggucuccgagaacucccagcccgagaagaugucccaggagcccgagaucaacaaggacugcgaccgcgaggucgaggaggagaucaagaagcacggcuccaaccccgucggccuccccgagaaccucaccaacggcgccuccgccggcaacggcgacgacggccucaucccccagcgccgcucccgcaagcccgagaaccagcaguuccccgacaccgagaacgaggaguaccacuccgacgagcagaacgacacccgcaagcagcucuccgaggagcagaacaccggcaucucccaggacgagauccucaccaacaagcagaagcagaucgaggucgccgagcagaagaugaacuccgagcucucccucucccacaagaaggaggaggaccuccuccgcgagaacuccguccuccaggaggagaucgccaugcuccgccucgagcucgacgagaccaagcaccagaaccagcuccgcgagaacaagauccucgaggagaucgaguccgucaaggagaagaccgacaagcuccuccgcgccaugcagcucaacgaggaggcccucaccaagaccaacaucuga

SEQ ID NO: 1919 - RNA, 1530 nt, Artificial Sequence
  EAW59519 variant
auggagcgccgccgccucuggggcuccauccagucccgcuacaucuccauguccgucuggaccuccccccgccgccucgucgagcucgccggccagucccuccucaaggacgaggcccucgccaucgccgcccucgagcuccucccccgcgagcucuuccccccccucuucauggccgccuucgacggccgccacucccagacccucaaggccaugguccaggccuggcccuucaccugccucccccucggcguccucaugaagggccagcaccuccaccucgagaccuucaaggccguccucgacggccucgacguccuccucgcccaggagguccgcccccgccgcuggaagcuccagguccucgaccuccgcaagaacucccaccaggacuucuggaccgucugguccggcaaccgcgccucccucuacuccuuccccgagcccgaggccgcccagcccaugaccaagaagcgcaaggucgacggccucuccaccgaggccgagcagcccuucauccccgucgagguccucgucgaccucuuccucaaggagggcgccugcgacgagcucuucuccuaccucaucgagaaggucaagcgcaagaagaacguccuccgccucugcugcaagaagcucaagaucuucgccaugcccaugcaggacaucaagaugauccucaagaugguccagcucgacuccaucgaggaccucgaggucaccugcaccuggaagcuccccacccucgccaaguucucccccuaccucggccagaugaucaaccuccgccgccuccuccucucccacauccacgccuccuccuacaucucccccgagaaggaggagcaguacaucgcccaguucaccucccaguuccucucccuccagugccuccaggcccucuacgucgacucccucuucuuccuccgcggccgccucgaccagcuccuccgccacgucaugaacccccucgagacccucuccaucaccaacugccgccucuccgagggcgacgucaugcaccucucccagucccccuccgucucccagcucuccguccucucccucuccggcgucaugcucaccgacgucucccccgagccccuccaggcccuccucgagcgcgccuccgccacccuccaggaccucgucuucgacgagugcggcaucaccgacgaccagcuccucgcccuccuccccucccucucccacugcucccagcucaccacccucuccuucuacggcaacuccaucuccaucuccgcccuccagucccuccuccagcaccucaucggccucuccaaccucacccacguccucuaccccgucccccucgaguccuacgaggacauccacggcacccuccaccucgagcgccucgccuaccuccacgcccgccuccgcgagcuccucugcgagcucggccgccccuccauggucuggcucuccgccaaccccugcccccacugcggcgaccgcaccuucuacgaccccgagcccauccucugccccugcuucaugcccaacuga

SEQ ID NO: 1920 - RNA, 1530 nt, Artificial Sequence; identical to SEQ ID NO: 1919
  AAC51160 variant

SEQ ID NO: 1921 - RNA, 645 nt, Artificial Sequence
  CCDS8069.1 variant
augggccucgccggcgucugcgcccuccgccgcuccgccggcuacauccucgucggcggcgccggcggccaguccgccgccgccgccgcccgccgcuacuccgagggcgagugggccuccggcggcguccgcuccuucucccgcgccgccgccgccauggcccccaucaaggucggcgacgccauccccgccgucgaggucuucgagggcgagcccggcaacaaggucaaccucgccgagcucuucaagggcaagaagggcguccucuucggcguccccggcgccuucacccccggcugcuccaagacccaccuccccggcuucgucgagcaggccgaggcccucaaggccaagggcguccaggucgucgccugccucuccgucaacgacgccuucgucaccggcgaguggggccgcgcccacaaggccgagggcaagguccgccuccucgccgaccccaccggcgccuucggcaaggagaccgaccuccuccucgacgacucccucgucuccaucuucggcaaccgccgccucaagcgcuucuccauggucguccaggacggcaucgucaaggcccucaacgucgagcccgacggcaccggccucaccugcucccucgcccccaacaucaucucccagcucuga

SEQ ID NO: 1922 - RNA, 309 nt, Artificial Sequence
  AAA63250 variant
augguccgcuaccgcguccgcucccucuccgagcgcucccacgaggucuaccgccagcagcuccacggccaggagcagggccaccacggccaggaggagcagggccucucccccgagcacgucgaggucuacgagcgcacccacggccagucccacuaccgccgccgccacugcucccgccgccgccuccaccgcauccaccgccgccagcaccgcuccugccgccgccgcaagcgccgcuccugccgccaccgccgccgccaccgccgcggcugccgcacccgcaagcgcaccugccgccgccacuga

SEQ ID NO: 1923 - RNA, 1662 nt, Artificial Sequence
  AAH50416 variant
augguccagcgccucugggucucccgccuccuccgccaccgcaaggcccagcuccuccucgucaaccuccucaccuucggccucgaggucugccucgccgccggcaucaccuacguccccccccuccuccucgaggucggcgucgaggagaaguucaugaccaugguccucggcaucggccccguccucggccucgucugcgucccccuccucggcuccgccuccgaccacuggcgcggccgcuacggccgccgccgccccuucaucugggcccucucccucggcauccuccucucccucuuccucaucccccgcgccggcuggcucgccggccuccucugccccgacccccgcccccucgagcucgcccuccucauccucggcgucggccuccucgacuucugcggccaggucugcuucaccccccucgaggcccuccucuccgaccucuuccgcgaccccgaccacugccgccaggccuacuccgucuacgccuucaugaucucccucggcggcugccucggcuaccuccuccccgccaucgacugggacaccuccgcccucgcccccuaccucggcacccaggaggagugccucuucggccuccucacccucaucuuccucaccugcgucgccgccacccuccucgucgccgaggaggccgcccucggccccaccgagcccgccgagggccucuccgcccccucccucuccccccacugcugccccugccgcgcccgccucgccuuccgcaaccucggcgcccuccucccccgccuccaccagcucugcugccgcaugccccgcacccuccgccgccucuucgucgccgagcucugcuccuggauggcccucaugaccuucacccucuucuacaccgacuucgucggcgagggccucuaccagggcgucccccgcgccgagcccggcaccgaggcccgccgccacuacgacgagggcguccgcaugggcucccucggccucuuccuccagugcgccaucucccucgucuucucccucgucauggaccgccucguccagcgcuucggcacccgcgccgucuaccucgccuccgucgccgccuuccccgucgccgccggcgccaccugccucucccacuccgucgccgucgucaccgccuccgccgcccucaccggcuucaccuucuccgcccuccagauccuccccuacacccucgccucccucuaccaccgcgagaagcaggucuuccuccccaaguaccgcggcgacaccggcggcgccuccuccgaggacucccucaugaccuccuuccuccccggccccaagcccggcgcccccuuccccaacggccacgucggcgccggcggcuccggccuccucccccccccccccgcccucugcggcgccuccgccugcgacgucuccguccgcgucgucgucggcgagcccaccgaggcccgcgucguccccggccgcggcaucugccucgaccucgccauccucgacuccgccuuccuccucucccaggucgcccccucccucuucaugggcuccaucguccagcucucccaguccgucaccgccuacauggucuccgccgccggccucggccucgucgccaucuacuucgccacccaggucgucuucgacaaguccgaccucgccaaguacuccgccuga

SEQ ID NO: 1924 - RNA, 648 nt, Artificial Sequence
  CBI83574 variant
auggccucccuccagaugcgcggcaaccccggcucccacuucugcggcggcacccucauccaccccuccuucguccucaccgccgcccacugccuccgcgacaucccccagcgccucgucaacgucguccucggcgcccacaacguccgcacccaggagcccacccagcagcacuucuccgucgcccaggucuuccucaacaacuacgacgccgagaacaagcucaacgacauccuccucauccagcucuccucccccgccaaccucuccgccuccgucgccaccguccagcucccccagcaggaccagcccgucccccacggcacccagugccucgccaugggcuggggccgcgucggcgcccacgacccccccgcccagguccuccaggagcucaacgucaccgucgucaccuucuucugccgcccccacaacaucugcaccuucgucccccgccgcaaggccggcaucugcuucggcgacuccggcggcccccucaucugcgacggcaucauccagggcaucgacuccuucgucaucuggggcugcgccacccgccucuuccccgacuucuucacccgcgucgcccucuacgucgacuggauccgcuccacccuccgccgcgucgaggccaagggccgccccuga

SEQ ID NO: 1925 - RNA, 771 nt, Artificial Sequence
  AAH96183 variant
auggcccaccgcccccccucccccgcccucgccuccguccuccucgcccuccuccucuccggcgccgcccgcgccgccgagaucgucggcggccacgaggcccagccccacucccgccccuacauggccucccuccagaugcgcggcaaccccggcucccacuucugcggcggcacccucauccaccccuccuucguccucaccgccgcccacugccuccgcgacaucccccagcgccucgucaacgucguccucggcgcccacaacguccgcacccaggagcccacccagcagcacuucuccgucgcccaggucuuccucaacaacuacgacgccgagaacaagcucaacgacguccuccucauccagcucuccucccccgccaaccucuccgccuccgucgccaccguccagcucccccagcaggaccagcccgucccccacggcacccagugccucgccaugggcuggggccgcgucggcgcccacgacccccccgcccagguccuccaggagcucaacgucaccgucgucaccuucuucugccgcccccacaacaucugcaccuucgucccccgccgcaaggccggcaucugcuucggcgacuccggcggcccccucaucugcgacggcaucauccagggcaucgacuccuucgucaucuggggcugcgccacccgccucuuccccgacuucuucacccgcgucgcccucuacgucgacuggauccgcuccacccuccgccgcgucgaggccaagggccgccccuga

SEQ ID NO: 1926 - RNA, 2760 nt, Artificial Sequence
  CCDS45721.1 variant
auguggcucgccgccgccgcccccucccucgcccgccgccuccucuuccucggcccccccccccccccccuccuccuccucgucuucucccgcuccucccgccgccgccuccacucccucggccucgccgccaugcccgagaagcgccccuucgagcgccuccccgccgacgucucccccaucaacuacucccucugccucaagcccgaccuccucgacuucaccuucgagggcaagcucgaggccgccgcccagguccgccaggccaccaaccagaucgucaugaacugcgccgacaucgacaucaucaccgccuccuacgcccccgagggcgacgaggagauccacgccaccggcuucaacuaccagaacgaggacgagaaggucacccucuccuuccccuccacccuccagaccggcaccggcacccucaagaucgacuucgucggcgagcucaacgacaagaugaagggcuucuaccgcuccaaguacaccacccccuccggcgagguccgcuacgccgccgucacccaguucgaggccaccgacgcccgccgcgccuuccccugcugggacgagcccgccaucaaggccaccuucgacaucucccucgucguccccaaggaccgcgucgcccucuccaacaugaacgucaucgaccgcaagcccuaccccgacgacgagaaccucgucgaggucaaguucgcccgcacccccgucauguccaccuaccucgucgccuucgucgucggcgaguacgacuucgucgagacccgcuccaaggacggcgucugcguccgcgucuacacccccgucggcaaggccgagcagggcaaguucgcccucgaggucgccgccaagacccuccccuucuacaaggacuacuucaacguccccuacccccuccccaagaucgaccucaucgccaucgccgacuucgccgccggcgccauggagaacuggggccucgucaccuaccgcgagaccgcccuccucaucgaccccaagaacuccugcuccuccucccgccagugggucgcccucgucgucggccacgagcucgcccaccagugguucggcaaccucgucaccauggagugguggacccaccucuggcucaacgagggcuucgccuccuggaucgaguaccucugcgucgaccacugcuuccccgaguacgacaucuggacccaguucgucuccgccgacuacacccgcgcccaggagcucgacgcccucgacaacucccaccccaucgaggucuccgucggccaccccuccgaggucgacgagaucuucgacgccaucuccuacuccaagggcgccuccgucauccgcaugcuccacgacuacaucggcgacaaggacuucaagaagggcaugaacauguaccucaccaaguuccagcagaagaacgccgccaccgaggaccucugggagucccucgagaacgccuccggcaagcccaucgccgccgucaugaacaccuggaccaagcagaugggcuucccccucaucuacgucgaggccgagcaggucgaggacgaccgccuccuccgccucucccagaagaaguucugcgccggcggcuccuacgucggcgaggacugcccccaguggaugguccccaucaccaucuccaccuccgaggaccccaaccaggccaagcucaagauccucauggacaagcccgagaugaacgucguccucaagaacgucaagcccgaccagugggucaagcucaaccucggcaccgucggcuucuaccgcacccaguacuccuccgccaugcucgagucccuccuccccggcauccgcgaccucucccucccccccgucgaccgccucggccuccagaacgaccucuucucccucgcccgcgccggcaucaucuccaccgucgagguccucaaggucauggaggccuucgucaacgagcccaacuacaccgucugguccgaccucuccugcaaccucggcauccucuccacccuccucucccacaccgacuucuacgaggagauccaggaguucgucaaggacgucuucucccccaucggcgagcgccucggcugggaccccaagcccggcgagggccaccucgacgcccuccuccgcggccucguccucggcaagcucggcaaggccggccacaaggccacccucgaggaggcccgccgccgcuucaaggaccacgucgagggcaagcagauccucuccgccgaccuccgcucccccgucuaccucaccguccucaagcacggcgacggcaccacccucgacaucaugcucaagcuccacaagcaggccgacaugcaggaggagaagaaccgcaucgagcgcguccucggcgccacccuccuccccgaccucauccagaagguccucaccuucgcccucuccgaggagguccgcccccaggacaccgucuccgucaucggcggcgucgccggcggcuccaagcacggccgcaaggccgccuggaaguucaucaaggacaacugggaggagcucuacaaccgcuaccagggcggcuuccucaucucccgccucaucaagcucuccgucgagggcuucgccgucgacaagauggccggcgaggucaaggccuucuucgagucccaccccgcccccuccgccgagcgcaccauccagcagugcugcgagaacauccuccucaacgccgccuggcucaagcgcgacgccgaguccauccaccaguaccuccuccagcgcaaggccuccccccccaccgucuga

SEQ ID NO: 1927 - RNA, 660 nt, Artificial Sequence
  AAH65513 variant
augcuccgcgccggcgcccccaccggcgaccucccccgcgccggcgagguccacaccggcaccaccaucauggccgucgaguucgacggcggcgucgucaugggcuccgacucccgcgucuccgccggcgaggccgucgucaaccgcgucuucgacaagcucuccccccuccacgagcgcaucuacugcgcccucuccggcuccgccgccgacgcccaggccgucgccgacauggccgccuaccagcucgagcuccacggcaucgagcucgaggagcccccccucguccucgccgccgccaacgucguccgcaacaucuccuacaaguaccgcgaggaccucuccgcccaccucauggucgccggcugggaccagcgcgagggcggccaggucuacggcacccucggcggcaugcucacccgccagcccuucgccaucggcggcuccggcuccaccuucaucuacggcuacgucgacgccgccuacaagcccggcaugucccccgaggagugccgccgcuucaccaccgacgccaucgcccucgccaugucccgcgacggcuccuccggcggcgucaucuaccucgucaccaucaccgccgccggcgucgaccaccgcgucauccucggcaacgagcuccccaaguucuacgacgaguga

SEQ ID NO: 1928 - RNA, 345 nt, Artificial Sequence
  EAW82312 variant
auggccggccucgcccuccagcccggcaccgcccuccucugcuacuccugcaaggcccaggucuccaacgaggacugccuccaggucgagaacugcacccagcucggcgagcagugcuggaccgcccgcauccgcgccgucggccuccucaccgucaucuccaagggcugcucccucaacugcgucgacgacucccaggacuacuacgucggcaagaagaacaucaccugcugcgacaccgaccucugcaacgccuccggcgcccacgcccuccagcccgccgccgccauccucgcccuccuccccgcccucggccuccuccucuggggccccggccagcucuga

SEQ ID NO: 1929 - RNA, 372 nt, Artificial Sequence
  AAC39607 variant
augaaggccguccuccucgcccuccucauggccggccucgcccuccagcccggcaccgcccuccucugcuacuccugcaaggcccaggucuccaacgaggacugccuccaggucgagaacugcacccagcucggcgagcagugcuggaccgcccgcauccgcgccgucggccuccucaccgucaucuccaagggcugcucccucaacugcgucgacgacucccaggacuacuacgucggcaagaagaacaucaccugcugcgacaccgaccucugcaacgccuccggcgcccacgcccuccagcccgccgccgccauccucgcccuccuccccgcccucggccuccuccucuggggccccggccagcucuga

SEQ ID NO: 1930 - RNA, 963 nt, Artificial Sequence
  AAG40776 variant
auguccuccugcaacuucacccacgccaccuucguccucaucggcauccccggccucgagaaggcccacuucugggucggcuucccccuccucuccauguacgucgucgccauguucggcaacugcaucgucgucuucaucguccgcaccgagcgcucccuccacgcccccauguaccucuuccucugcaugcucgccgccaucgaccucgcccucuccaccuccaccaugcccaagauccucgcccucuucugguucgacucccgcgagaucuccuucgaggccugccucacccagauguucuucauccacgcccucuccgccaucgaguccaccauccuccucgccauggccuucgaccgcuacgucgccaucugccacccccuccgccacgccgccguccucaacaacaccgucaccgcccagaucggcaucgucgccgucguccgcggcucccucuucuucuucccccucccccuccucaucaagcgccucgccuucugccacuccaacguccucucccacuccuacugcguccaccaggacgucaugaagcucgccuacgccgacacccuccccaacgucgucuacggccucaccgccauccuccucgucaugggcgucgacgucauguucaucucccucuccuacuuccucaucauccgcaccguccuccagcuccccuccaaguccgagcgcgccaaggccuucggcaccugcgucucccacaucggcgucguccucgccuucuacgucccccucaucggccucuccgucguccaccgcuucggcaacucccuccaccccaucguccgcgucgucaugggcgacaucuaccuccuccucccccccgucaucaaccccaucaucuacggcgccaagaccaagcagauccgcacccgcguccucgccauguucaagaucuccugcgacaaggaccuccaggccgucggcggcaaguga

SEQ ID NO: 1931 - RNA, 2253 nt, Artificial Sequence
  AAA60209 variant
auguggaaccuccuccacgagaccgacuccgccgucgccaccgcccgccgcccccgcuggcucugcgccggcgcccucguccucgccggcggcuucuuccuccucggcuuccucuucggcugguucaucaaguccuccaacgaggccaccaacaucacccccaagcacaacaugaaggccuuccucgacgagcucaaggccgagaacaucaagaaguuccucuacaacuucacccagaucccccaccucgccggcaccgagcagaacuuccagcucgccaagcagauccagucccaguggaaggaguucggccucgacuccgucgagcucgcccacuacgacguccuccucuccuaccccaacaagacccaccccaacuacaucuccaucaucaacgaggacggcaacgagaucuucaacaccucccucuucgagccccccccccccggcuacgagaacgucuccgacaucgucccccccuucuccgccuucuccccccagggcaugcccgagggcgaccucgucuacgucaacuacgcccgcaccgaggacuucuucaagcucgagcgcgacaugaagaucaacugcuccggcaagaucgucaucgcccgcuacggcaaggucuuccgcggcaacaaggucaagaacgcccagcucgccggcgccaagggcgucauccucuacuccgaccccgccgacuacuucgcccccggcgucaaguccuaccccgacggcuggaaccuccccggcggcggcguccagcgcggcaacauccucaaccucaacggcgccggcgacccccucacccccggcuaccccgccaacgaguacgccuaccgccgcggcaucgccgaggccgucggccuccccuccauccccguccaccccaucggcuacuacgacgcccagaagcuccucgagaagaugggcggcuccgccccccccgacuccuccuggcgcggcucccucaagguccccuacaacgucggccccggcuucaccggcaacuucuccacccagaaggucaagaugcacauccacuccaccaacgaggucacccgcaucuacaacgucaucggcacccuccgcggcgccgucgagcccgaccgcuacgucauccucggcggccaccgcgacuccugggucuucggcggcaucgacccccaguccggcgccgccgucguccacgagaucguccgcuccuucggcacccucaagaaggagggcuggcgcccccgccgcaccauccucuucgccuccugggacgccgaggaguucggccuccucggcuccaccgagugggccgaggagaacucccgccuccuccaggagcgcggcgucgccuacaucaacgccgacuccuccaucgagggcaacuacacccuccgcgucgacugcaccccccucauguacucccucguccacaaccucaccaaggagcucaagucccccgacgagggcuucgagggcaagucccucuacgaguccuggaccaagaagucccccucccccgaguucuccggcaugccccgcaucuccaagcucggcuccggcaacgacuucgaggucuucuuccagcgccucggcaucgccuccggccgcgcccgcuacaccaagaacugggagaccaacaaguucuccggcuacccccucuaccacuccgucuacgagaccuacgagcucgucgagaaguucuacgaccccauguucaaguaccaccucaccgucgcccagguccgcggcggcauggucuucgagcucgccaacuccaucguccuccccuucgacugccgcgacuacgccgucguccuccgcaaguacgccgacaagaucuacuccaucuccaugaagcacccccaggagaugaagaccuacuccgucuccuucgacucccucuucuccgccgucaagaacuucaccgagaucgccuccaaguucuccgagcgccuccaggacuucgacaaguccaaccccaucguccuccgcaugaugaacgaccagcucauguuccucgagcgcgccuucaucgacccccucggccuccccgaccgccccuucuaccgccacgucaucuacgcccccuccucccacaacaaguacgccggcgaguccuuccccggcaucuacgacgcccucuucgacaucgaguccaaggucgaccccuccaaggccuggggcgaggucaagcgccagaucuacgucgccgccuucaccguccaggccgccgccgagacccucuccgaggucgccuga

SEQ ID NO: 1932 - RNA, 3921 nt, Artificial Sequence
  CCDS1397.2 variant
augaccauguaccucuggcucaagcuccucgccuucggcuucgccuuccucgacaccgaggucuucgucaccggccagucccccacccccucccccaccggccucaccaccgccaagaugcccuccgucccccucuccuccgacccccuccccacccacaccaccgccuucucccccgccuccaccuucgagcgcgagaacgacuucuccgagaccaccaccucccucucccccgacaacaccuccacccaggucucccccgacucccucgacaacgccuccgccuucaacaccaccggcgucuccuccguccagaccccccaccuccccacccacgccgacucccagacccccuccgccggcaccgacacccagaccuucuccggcuccgccgccaacgccaagcucaaccccacccccggcuccaacgccaucuccgacguccccggcgagcgcuccaccgccuccaccuuccccaccgaccccgucuccccccucaccaccacccucucccucgcccaccacuccuccgccgcccuccccgcccgcaccuccaacaccaccaucaccgccaacaccuccgacgccuaccucaacgccuccgagaccaccacccucucccccuccggcuccgccgucaucuccaccaccaccaucgccaccacccccuccaagcccaccugcgacgagaaguacgccaacaucaccgucgacuaccucuacaacaaggagaccaagcucuucaccgccaagcucaacgucaacgagaacgucgagugcggcaacaacaccugcaccaacaacgagguccacaaccucaccgagugcaagaacgccuccgucuccaucucccacaacuccugcaccgcccccgacaagacccucauccucgacgucccccccggcgucgagaaguuccagcuccacgacugcacccaggucgagaaggccgacaccaccaucugccucaaguggaagaacaucgagaccuucaccugcgacacccagaacaucaccuaccgcuuccagugcggcaacaugaucuucgacaacaaggagaucaagcucgagaaccucgagcccgagcacgaguacaagugcgacuccgagauccucuacaacaaccacaaguucaccaacgccuccaagaucaucaagaccgacuucggcucccccggcgagccccagaucaucuucugccgcuccgaggccgcccaccagggcgucaucaccuggaaccccccccagcgcuccuuccacaacuucacccucugcuacaucaaggagaccgagaaggacugccucaaccucgacaagaaccucaucaaguacgaccuccagaaccucaagcccuacaccaaguacguccucucccuccacgccuacaucaucgccaagguccagcgcaacggcuccgccgccaugugccacuucaccaccaaguccgccccccccucccaggucuggaacaugaccgucuccaugaccuccgacaacuccaugcacgucaagugccgccccccccgcgaccgcaacggcccccacgagcgcuaccaccucgaggucgaggccggcaacacccucguccgcaacgagucccacaagaacugcgacuuccgcgucaaggaccuccaguacuccaccgacuacaccuucaaggccuacuuccacaacggcgacuaccccggcgagcccuucauccuccaccacuccaccuccuacaacuccaaggcccucaucgccuuccucgccuuccucaucaucgucaccuccaucgcccuccucgucguccucuacaagaucuacgaccuccacaagaagcgcuccugcaaccucgacgagcagcaggagcucgucgagcgcgacgacgagaagcagcucaugaacgucgagcccauccacgccgacauccuccucgagaccuacaagcgcaagaucgccgacgagggccgccucuuccucgccgaguuccaguccaucccccgcgucuucuccaaguuccccaucaaggaggcccgcaagcccuucaaccagaacaagaaccgcuacgucgacauccuccccuacgacuacaaccgcgucgagcucuccgagaucaacggcgacgccggcuccaacuacaucaacgccuccuacaucgacggcuucaaggagccccgcaaguacaucgccgcccagggcccccgcgacgagaccgucgacgacuucuggcgcaugaucugggagcagaaggccaccgucaucgucauggucacccgcugcgaggagggcaaccgcaacaagugcgccgaguacuggcccuccauggaggagggcacccgcgccuucggcgacgucgucgucaagaucaaccagcacaagcgcugccccgacuacaucauccagaagcucaacaucgucaacaagaaggagaaggccaccggccgcgaggucacccacauccaguucaccuccuggcccgaccacggcguccccgaggacccccaccuccuccucaagcuccgccgccgcgucaacgccuucuccaacuucuucuccggccccaucgucguccacugcuccgccggcgucggccgcaccggcaccuacaucggcaucgacgccaugcucgagggccucgaggccgagaacaaggucgacgucuacggcuacgucgucaagcuccgccgccagcgcugccucaugguccaggucgaggcccaguacauccucauccaccaggcccucgucgaguacaaccaguucggcgagaccgaggucaaccucuccgagcuccaccccuaccuccacaacaugaagaagcgcgacccccccuccgagcccuccccccucgaggccgaguuccagcgccuccccuccuaccgcuccuggcgcacccagcacaucggcaaccaggaggagaacaaguccaagaaccgcaacuccaacgucauccccuacgacuacaaccgcgucccccucaagcacgagcucgagauguccaaggaguccgagcacgacuccgacgaguccuccgacgacgacuccgacuccgaggagcccuccaaguacaucaacgccuccuucaucauguccuacuggaagcccgaggucaugaucgccgcccagggcccccucaaggagaccaucggcgacuucuggcagaugaucuuccagcgcaaggucaaggucaucgucaugcucaccgagcucaagcacggcgaccaggagaucugcgcccaguacuggggcgagggcaagcagaccuacggcgacaucgaggucgaccucaaggacaccgacaaguccuccaccuacacccuccgcgucuucgagcuccgccacuccaagcgcaaggacucccgcaccgucuaccaguaccaguacaccaacugguccgucgagcagcuccccgccgagcccaaggagcucaucuccaugauccaggucgucaagcagaagcucccccagaagaacuccuccgagggcaacaagcaccacaaguccaccccccuccucauccacugccgcgacggcucccagcagaccggcaucuucugcgcccuccucaaccuccucgaguccgccgagaccgaggaggucgucgacaucuuccaggucgucaaggcccuccgcaaggcccgccccggcauggucuccaccuucgagcaguaccaguuccucuacgacgucaucgccuccaccuaccccgcccagaacggccaggucaagaagaacaaccaccaggaggacaagaucgaguucgacaacgaggucgacaaggucaagcaggacgccaacugcgucaacccccucggcgcccccgagaagcuccccgaggccaaggagcaggccgagggcuccgagcccaccuccggcaccgagggccccgagcacuccgucaacggccccgccucccccgcccucaaccagggcuccuga

SEQ ID NO: 1933 - RNA, 624 nt, Artificial Sequence
  AAH02977 variant
auggccaagaccuacgacuaccucuucaagcuccuccucaucggcgacuccggcgucggcaagaccugcguccucuuccgcuucuccgaggacgccuucaacuccaccuucaucuccaccaucggcaucgacuucaagauccgcaccaucgagcucgacggcaagcgcaucaagcuccagaucugggacaccgccggccaggagcgcuuccgcaccaucaccaccgccuacuaccgcggcgccaugggcaucaugcucgucuacgacaucaccaacgagaaguccuucgacaacauccgcaacuggauccgcaacaucgaggagcacgccuccgccgacgucgagaagaugauccucggcaacaagugcgacgucaacgacaagcgccaggucuccaaggagcgcggcgagaagcucgcccucgacuacggcaucaaguucauggagaccuccgccaaggccaacaucaacgucgagaacgccuucuucacccucgcccgcgacaucaaggccaagauggacaagaagcucgagggcaacuccccccagggcuccaaccagggcgucaagaucacccccgaccagcagaagcgcuccuccuucuuccgcugcguccuccucuga

SEQ ID NO: 1934 - RNA, 1260 nt, Artificial Sequence
  BAA81688 variant
augaagaacuacaaggccaucggcaagaucggcgagggcaccuucuccgaggucaugaagaugcagucccuccgcgacggcaacuacuacgccugcaagcagaugaagcagcgcuucgaguccaucgagcaggucaacaaccuccgcgagauccaggcccuccgccgccucaacccccaccccaacauccucaugcuccacgaggucgucuucgaccgcaaguccggcucccucgcccucaucugcgagcucauggacaugaacaucuacgagcucauccgcggccgccgcuacccccucuccgagaagaagaucaugcacuacauguaccagcucugcaagucccucgaccacauccaccgcaacggcaucuuccaccgcgacgucaagcccgagaacauccucaucaagcaggacguccucaagcucggcgacuucggcuccugccgcuccgucuacuccaagcagcccuacaccgaguacaucuccacccgcugguaccgcgcccccgagugccuccucaccgacggcuucuacaccuacaagauggaccucugguccgccggcugcgucuucuacgagaucgccucccuccagccccucuuccccggcgucaacgagcucgaccagaucuccaagauccacgacgucaucggcacccccgcccagaagauccucaccaaguucaagcagucccgcgccaugaacuucgacuuccccuucaagaagggcuccggcaucccccuccucaccaccaaccucuccccccagugccucucccuccuccacgccauggucgccuacgaccccgacgagcgcaucgccgcccaccaggcccuccagcaccccuacuuccaggagcagcgcaagaccgagaagcgcgcccucggcucccaccgcaaggccggcuuccccgagcaccccgucgcccccgagccccucuccaacuccugccagaucuccaaggagggccgcaagcagaagcagucccucaagcaggaggaggaccgccccaagcgccgcggccccgccuacgucauggagcuccccaagcucaagcucuccggcgucguccgccucuccuccuacuccucccccacccuccaguccguccucggcuccggcaccaacggccgcguccccguccuccgcccccucaagugcauccccgccuccaagaagaccgacccccagaaggaccucaagcccgccccccagcagugccgccuccccaccaucguccgcaagggcggccgcuga

SEQ ID NO: 1935 - RNA, 1389 nt, Artificial Sequence
  AAH08727 variant
auggccuccaacuccuccuccugccccacccccggcggcggccaccucaacggcuaccccgucccccccuacgccuucuucuucccccccaugcucggcggccucuccccccccggcgcccucaccacccuccagcaccagcuccccgucuccggcuacuccacccccucccccgccaccaucgagacccaguccuccuccuccgaggagaucguccccuccccccccuccccccccccccucccccgcaucuacaagcccugcuucgucugccaggacaaguccuccggcuaccacuacggcgucuccgccugcgagggcugcaagggcuucuuccgccgcuccauccagaagaacauggucuacaccugccaccgcgacaagaacugcaucaucaacaaggucacccgcaaccgcugccaguacugccgccuccagaagugcuucgaggucggcauguccaaggaguccguccgcaacgaccgcaacaagaagaagaaggagguccccaagcccgagugcuccgaguccuacacccucacccccgaggucggcgagcucaucgagaagguccgcaaggcccaccaggagaccuuccccgcccucugccagcucggcaaguacaccaccaacaacuccuccgagcagcgcgucucccucgacaucgaccucugggacaaguucuccgagcucuccaccaagugcaucaucaagaccgucgaguucgccaagcagcuccccggcuucaccacccucaccaucgccgaccagaucacccuccucaaggccgccugccucgacauccucauccuccgcaucugcacccgcuacacccccgagcaggacaccaugaccuucuccgacggccucacccucaaccgcacccagaugcacaacgccggcuucggcccccucaccgaccucgucuucgccuucgccaaccagcuccucccccucgagauggacgacgccgagaccggccuccucuccgccaucugccucaucugcggcgaccgccaggaccucgagcagcccgaccgcgucgacaugcuccaggagccccuccucgaggcccucaaggucuacguccgcaagcgccgccccucccgcccccacauguuccccaagaugcucaugaagaucaccgaccuccgcuccaucuccgccaagggcgccgagcgcgucaucacccucaagauggagauccccggcuccaugcccccccucauccaggagaugcucgagaacuccgagggccucgacacccucuccggccagcccggcggcggcggccgcgacggcggcggccucgcccccccccccggcuccugcucccccucccucucccccuccuccaaccgcuccucccccgccacccacucccccuga

SEQ ID NO: 1936 - RNA, 570 nt, Artificial Sequence
  AAB02605 variant
augaccgaguacaagcucgucgucgucggcgccggcggcgucggcaaguccgcccucaccauccagcucauccagaaccacuucgucgacgaguacgaccccaccaucgaggacuccuaccgcaagcaggucgucaucgacggcgagaccugccuccucgacauccucgacaccgccggccaggaggaguacuccgccaugcgcgaccaguacaugcgcaccggcgagggcuuccucugcgucuucgccaucaacaacaccaaguccuucgaggacauccaccaguaccgcgagcagaucaagcgcgucaaggacuccgacgacguccccaugguccucgucggcaacaagugcgaccucgccgcccgcaccgucgagucccgccaggcccaggaccucgcccgcuccuacggcauccccuacaucgagaccuccgccaagacccgccagggcgucgaggacgccuucuacacccucguccgcgagauccgccagcacaagcuccgcaagcucaacccccccgacgaguccggccccggcugcauguccugcaagugcguccucuccuga

SEQ ID NO: 1937 - RNA, 570 nt, Artificial Sequence
  AAB59445 variant
augaccgaguacaagcucgucgucgucggcgccggcggcgucggcaaguccgcccucaccauccagcucauccagaaccacuucgucgacgaguacgaccccaccaucgaggacuccuaccgcaagcaggucgucaucgacggcgagaccugccuccucgacauccucgacaccgccggccaggaggaguacuccgccaugcgcgaccaguacaugcgcaccggcgagggcuuccucugcgucuucgccaucaacaacaccaaguccuucgaggacauccaccacuaccgcgagcagaucaagcgcgucaaggacuccgaggacguccccaugguccucgucggcaacaagugcgaccuccccucccgcaccgucgacaccaagcaggcccaggaccucgcccgcuccuacggcauccccuucaucgagaccuccgccaagacccgccagcgcgucgaggacgccuucuacacccucguccgcgagauccgccaguaccgccucaagaagaucuccaaggaggagaagacccccggcugcgucaagaucaagaagugcaucaucauguga

SEQ ID NO: 1938 - RNA, 570 nt, Artificial Sequence
  AAA60255 variant
augaccgaguacaagcucgucgucgucggcgccggcggcgucggcaaguccgcccucaccauccagcucauccagaaccacuucgucgacgaguacgaccccaccaucgaggacuccuaccgcaagcaggucgucaucgacggcgagaccugccuccucgacauccucgacaccgccggccaggaggaguacuccgccaugcgcgaccaguacaugcgcaccggcgagggcuuccucugcgucuucgccaucaacaacuccaaguccuucgccgacaucaaccucuaccgcgagcagaucaagcgcgucaaggacuccgacgacguccccaugguccucgucggcaacaagugcgaccuccccacccgcaccgucgacaccaagcaggcccacgagcucgccaaguccuacggcauccccuucaucgagaccuccgccaagacccgccagggcgucgaggacgccuucuacacccucguccgcgagauccgccaguaccgcaugaagaagcucaacuccuccgacgacggcacccagggcugcaugggccuccccugcgucgucauguga

SEQ ID NO: 1939 - RNA, 546 nt, Artificial Sequence
  AAB84001 variant
augugcaagggccucgccgcccucccccacuccugccucgagcgcgccaaggagaucaagaucaagcucggcauccuccuccagaagcccgacuccgucggcgaccucgucauccccuacaacgagaagcccgagaagcccgccaagacccagaagaccucccucgacgaggcccuccaguggcgcgacucccucgacaagcuccuccagaacaacuacggccucgccuccuucaaguccuuccucaaguccgaguucuccgaggagaaccucgaguucuggaucgccugcgaggacuacaagaagaucaagucccccgccaagauggccgagaaggccaagcagaucuacgaggaguucauccagaccgaggcccccaaggaggucaacaucgaccacuucaccaaggacaucaccaugaagaaccucgucgagcccucccucuccuccuucgacauggcccagaagcgcauccacgcccucauggagaaggacucccucccccgcuucguccgcuccgaguucuaccaggagcucaucaaguga

SEQ ID NO: 1940 - RNA, 2175 nt, Artificial Sequence
  CCDS4362.1 variant
auguccuuccccaaggccccccucaagcgcuucaacgaccccuccggcugcgcccccucccccggcgccuacgacgucaagacccucgagguccucaagggccccgucuccuuccagaagucccagcgcuucaagcagcagaaggaguccaagcagaaccucaacgucgacaaggacaccacccuccccgccuccgcccgcaaggucaaguccuccgaguccaaggagucccagaagaacgacaaggaccucaagauccucgagaaggagauccgcguccuccuccaggagcgcggcgcccaggaccgccgcauccaggaccucgagaccgagcucgagaagauggaggcccgccucaacgccgcccuccgcgagaagaccucccucuccgccaacaacgccacccucgagaagcagcucaucgagcucacccgcaccaacgagcuccucaaguccaaguucuccgagaacggcaaccagaagaaccuccgcauccucucccucgagcucaugaagcuccgcaacaagcgcgagaccaagaugcgcggcaugauggccaagcaggagggcauggagaugaagcuccaggucacccagcgcucccucgaggagucccagggcaagaucgcccagcucgagggcaagcucgucuccaucgagaaggagaagaucgacgagaaguccgagaccgagaagcuccucgaguacaucgaggagaucuccugcgccuccgaccaggucgagaaguacaagcucgacaucgcccagcucgaggagaaccucaaggagaagaacgacgagauccucucccucaagcagucccucgaggagaacaucgucauccucuccaagcaggucgaggaccucaacgucaagugccagcuccucgagaaggagaaggaggaccacgucaaccgcaaccgcgagcacaacgagaaccucaacgccgagaugcagaaccucaagcagaaguucauccucgagcagcaggagcgcgagaagcuccagcagaaggagcuccagaucgacucccuccuccagcaggagaaggagcucuccuccucccuccaccagaagcucugcuccuuccaggaggagauggucaaggagaagaaccucuucgaggaggagcucaagcagacccucgacgagcucgacaagcuccagcagaaggaggagcaggccgagcgccucgucaagcagcucgaggaggaggccaagucccgcgccgaggagcucaagcuccucgaggagaagcucaagggcaaggaggccgagcucgagaaguccuccgccgcccacacccaggccacccuccuccuccaggagaaguacgacuccaugguccagucccucgaggacgucaccgcccaguucgaguccuacaaggcccucaccgccuccgagaucgaggaccucaagcucgagaacuccucccuccaggagaaggccgccaaggccggcaagaacgccgaggacguccagcaccagauccucgccaccgaguccuccaaccaggaguacguccgcaugcuccucgaccuccagaccaaguccgcccucaaggagaccgagaucaaggagaucaccgucuccuuccuccagaagaucaccgaccuccagaaccagcucaagcagcaggaggaggacuuccgcaagcagcucgaggacgaggagggccgcaaggccgagaaggagaacaccaccgccgagcucaccgaggagaucaacaaguggcgccuccucuacgaggagcucuacaacaagaccaagcccuuccagcuccagcucgacgccuucgaggucgagaagcaggcccuccucaacgagcacggcgccgcccaggagcagcucaacaagauccgcgacuccuacgccaagcuccucggccaccagaaccucaagcagaagaucaagcacgucgucaagcucaaggacgagaacucccagcucaaguccgaggucuccaagcuccgcugccagcucgccaagaagaagcaguccgagaccaagcuccaggaggagcucaacaagguccucggcaucaagcacuucgaccccuccaaggccuuccaccacgaguccaaggagaacuucgcccucaagaccccccucaaggagggcaacaccaacugcuaccgcgcccccauggagugccaggaguccuggaaguga

SEQ ID NO: 1941 - RNA, 582 nt, Artificial Sequence
  AAC33179 variant
auggccgccauccgcaagaagcucgucaucgucggcgacggcgccugcggcaagaccugccuccucaucgucuucuccaaggaccaguuccccgaggucuacguccccaccgucuucgagaacuacaucgccgacaucgaggucgacggcaagcaggucgagcucgcccucugggacaccgccggccaggaggacuacgaccgccuccgcccccucuccuaccccgacaccgacgucauccucaugugcuucuccaucgacucccccgacucccucgagaacauccccgagaaguggacccccgaggucaagcacuucugccccaacguccccaucauccucgucggcaacaagaaggaccuccgccaggacgagcacacccgccgcgagcucgccaagaugaagcaggagcccguccgcuccgaggagggccgcgacauggccaaccgcaucuccgccuucggcuaccucgagugcuccgccaagaccaaggagggcguccgcgaggucuucgagauggccacccgcgccggccuccagguccgcaagaacaagcgccgccgcggcugccccauccucuga

SEQ ID NO: 1942 - RNA, 888 nt, Artificial Sequence
  AAA36161 variant
auguccggcgcccucgacguccuccagaugaaggaggaggacguccucaaguuccucgccgccggcacccaccucggcggcaccaaccucgacuuccagauggagcaguacaucuacaagcgcaaguccgacggcaucuacaucaucaaccucaagcgcaccugggagaagcuccuccucgccgcccgcgccaucgucgccaucgagaaccccgccgacgucuccgucaucuccucccgcaacaccggccagcgcgccguccucaaguucgccgccgccaccggcgccacccccaucgccggccgcuucacccccggcaccuucaccaaccagauccaggccgccuuccgcgagccccgccuccucgucgucaccgacccccgcgccgaccaccagccccucaccgaggccuccuacgucaaccuccccaccaucgcccucugcaacaccgacuccccccuccgcuacgucgacaucgccauccccugcaacaacaagggcgcccacuccgucggccucaugugguggaugcucgcccgcgagguccuccgcaugcgcggcaccaucucccgcgagcaccccugggaggucaugcccgaccucuacuucuaccgcgaccccgaggagaucgagaaggaggagcaggccgccgccgagaaggccgucaccaaggaggaguuccagggcgaguggaccgcccccgcccccgaguucaccgccacccagcccgaggucgccgacugguccgagggcguccagguccccuccguccccauccagcaguuccccaccgaggacugguccgcccagcccgccaccgaggacugguccgccgcccccaccgcccaggccaccgagugggucggcgccaccaccgacugguccuga

SEQ ID NO: 1943 - RNA, 2601 nt, Artificial Sequence
  AAH14614 variant
augaacggcgagcagcagcucgacgccgacgccggcuccggcauggaggaggucgagcucuccugggaggacuaccucgaggagaccggcuccaccgccguccccuacggcuccuucaagcacgucgacacccgccuccagaacggcuucgcccccggcaugaagcucgaggucgccguccgcaccgaccccgagaccuacugggucgccaccgucaucaccaccugcgagcagcuccuccuccuccgcuacgacggcuacggcgaggaccgccgcgccgacuucuggugcgacauccgcaaggccgaccucuaccccaucggcuggugcgagcagaacaagaagacccucgaggcccccgagggcauccgcgacaaggucuccgacugggacgaguuccuccgccagacccucaucggcgccugcuccccccccgucccccuccucgagggccuccgcaacggccgcaacccccucgaccucaucgcccccggcucccgccucgagugccaggccuuccaggacucccucuccaccuggaucgucaccgucgucgagaacaucggcggccgccucaagcuccgcuacgagggccucgaguccuccgacaacuacgagcacuggcucuacuaccucgaccccuuccuccaccacgucggcugggccgcccagcagggcuacgagcuccagccccccuccgccauccgccaccucaagaacgaggccgaguggcaggagauccucgccaaggucaaggaggaggaggaggagccccuccccuccuaccucuucaaggacaagcaggucaucggcauccacaccuucuccgucaacaugaagcucgaggccgucgaccccuggucccccuucggcaucucccccgccaccgucgucaaggucuucgacgagaaguacuuccucgucgagauggacgaccuccgccccgagaaccacgcccgccgcuccuucgucugccacgccgacucccccggcaucuuccccguccaguggucccucaagaacggccuccacaucucccccccccccggcuaccccucccaggacuucgacugggccgacuaccucaagcagugcggcgccgaggccgccccccagcgcugcuuccccccccucaucuccgagcacgaguucaaggagaacaugaagcucgaggccgucaaccccauccuccccgaggaggucugcgucgccaccaucaccgccguccgcggcuccuaccucuggcuccagcucgagggcuccaagaagcccauccccgagugcaucgucuccgucgaguccauggacaucuucccccucggcuggugcgagaccaacggccacccccucuccaccccccgccgcgcccgcgucuacaagcagcgcaagaucgccgucguccagcccgagaagcagguccccuccucccgcaccguccacgagggccuccgcaaccaggagcucaacuccaccgaguccgucaugaucaacggcaaguacugcugccccaagaucuacuucaaccaccgcugcuucuccggccccuaccucaacaagggccgcaucgccgagcucccccagugcgucggccccggcaacugcguccucguccuccgcgagguccucacccuccucaucaacgccgccuacaagcccucccgcguccuccgcgagcuccagcucgacaaggacuccgucuggcacggcugcggcgagguccucaaggccaaguacaagggcaaguccuaccgcgccaccgucgagaucgucaagaccgccgaccgcgucaccgaguucugccgccagaccugcaucaagcucgagugcugccccaaccucuucggcccccgcaugguccucgacaagugcuccgagaacugcuccguccucaccaagaccaaguacacccacuacuacggcaagaagaagaacaagcgcaucggccgcccccccggcggccacuccaaccucgccugcgcccucaagaaggccuccaagcgccgcaagcgccgcaagaacgucuucguccacaagaagaagcgcuccuccgccuccgucgacaacacccccgccggcuccccccagggcuccggcggcgaggacgaggacgaccccgacgagggcgacgacgacucccucuccgagggcuccaccuccgagcagcaggacgagcuccaggaggaguccgagauguccgagaagaaguccugcuccuccucccccacccaguccgagaucuccaccucccucccccccgaccgccagcgccgcaagcgcgagcuccgcaccuucuccuucuccgacgacgagaacaagccccccucccccaaggagauccgcaucgaggucgccgagcgccuccaccucgacuccaacccccucaagugguccgucgccgacgucguccgcuucauccgcuccaccgacugcgccccccucgcccgcaucuuccucgaccaggagaucgacggccaggcccuccuccuccucacccuccccaccguccaggagugcauggaccucaagcucggccccgccaucaagcucugccaccacaucgagcgcaucaaguucgccuucuacgagcaguucgccaacuga

SEQ ID NO: 1944 - RNA, 1431 nt, Artificial Sequence
  CCDS4550.1 variant
auguccggcuccuccgcccgcuccucccaccucucccagcccgucgucaaguccguccucgucuaccgcaacggcgaccccuucuacgccggccgccgcgucgucauccacgagaagaaggucuccuccuucgaggucuuccucaaggaggucaccggcggcguccaggcccccuucggcgccguccgcaacaucuacaccccccgcaccggccaccgcauccgcaagcucgaccagauccaguccggcggcaacuacgucgccggcggccaggaggccuucaagaagcucaacuaccucgacaucggcgagaucaagaagcgccccauggaggucgucaacaccgaggucaagcccgucauccacucccgcaucaacgucuccgcccgcuuccgcaagccccuccaggagcccugcaccaucuuccucaucgccaacggcgaccucaucaaccccgccucccgccuccucaucccccgcaagacccucaaccagugggaccacguccuccagauggucaccgagaagaucacccuccgcuccggcgccguccaccgccucuacacccucgagggcaagcucgucgaguccggcgccgagcucgagaacggccaguucuacgucgccgucggccgcgacaaguucaagaagcuccccuacuccgagcuccucuucgacaaguccaccaugcgccgccccuucggccagaaggccuccucccucccccccaucgucggcucccgcaaguccaagggcuccggcaacgaccgccacuccaaguccaccgucggcuccuccgacaacuccuccccccagccccucaagcgcaagggcaagaaggaggacgucaacuccgagaagcucaccaagcucaagcagaacgucaagcucaagaacucccaggagaccauccccaacuccgacgagggcaucuucaaggccggcgccgagcgcuccgagacccgcggcgccgccgagguccaggaggacgaggacacccaggucgagguccccgucgaccagcgccccgccgagaucgucgacgaggaggaggacggcgagaaggccaacaaggacgccgagcagaaggaggacuucuccggcaugaacggcgaccucgaggaggagggcggccgcgaggccaccgacgcccccgagcaggucgaggagauccucgaccacuccgagcagcaggcccgccccgcccgcgucaacggcggcaccgacgaggagaacggcgaggagcuccagcaggucaacaacgagcuccagcucguccucgacaaggagcgcaagucccagggcgccggcuccggccaggacgaggccgacgucgacccccagcgccccccccgccccgaggucaagaucaccucccccgaggagaacgagaacaaccagcagaacaaggacuacgccgccgucgccuga

SEQ ID NO: 1945 - RNA, 1362 nt, Artificial Sequence
  BAA07903 variant
augcgcauccccgucgacgccuccaccucccgccgcuucaccccccccuccaccgcccucucccccggcaagauguccgaggcccucccccucggcgcccccgacgccggcgccgcccucgccggcaagcuccgcuccggcgaccgcuccauggucgagguccucgccgaccaccccggcgagcucguccgcaccgacucccccaacuuccucugcuccguccuccccacccacuggcgcugcaacaagacccuccccaucgccuucaaggucgucgcccucggcgacguccccgacggcacccucgucaccgucauggccggcaacgacgagaacuacuccgccgagcuccgcaacgccaccgccgccaugaagaaccaggucgcccgcuucaacgaccuccgcuucgucggccgcuccggccgcggcaaguccuucacccucaccaucaccgucuucaccaaccccccccaggucgccaccuaccaccgcgccaucaagaucaccgucgacggcccccgcgagccccgccgccaccgccagaagcucgacgaccagaccaagcccggcucccucuccuucuccgagcgccucuccgagcucgagcagcuccgccgcaccgccaugcgcgucuccccccaccaccccgcccccacccccaacccccgcgccucccucaaccacuccaccgccuucaacccccagccccagucccagaugcaggacacccgccagauccagcccuccccccccugguccuacgaccaguccuaccaguaccucggcuccaucgccucccccuccguccaccccgccacccccaucucccccggccgcgccuccggcaugaccacccucuccgccgagcucuccucccgccucuccaccgcccccgaccucaccgccuucuccgacccccgccaguuccccgcccuccccuccaucuccgacccccgcaugcacuaccccggcgccuucaccuacucccccacccccgucaccuccggcaucggcaucggcauguccgccaugggcuccgccacccgcuaccacaccuaccuccccccccccuaccccggcuccucccaggcccagggcggccccuuccaggccuccucccccuccuaccaccucuacuacggcgccuccgccggcuccuaccaguucuccauggucggcggcgagcgcucccccccccgcauccucccccccugcaccaacgccuccaccggcuccgcccuccucaaccccucccuccccaaccaguccgacgucgucgaggccgagggcucccacuccaacucccccaccaacauggcccccuccgcccgccucgaggaggccgucuggcgccccuacuga

SEQ ID NO: 1946 - RNA, 1080 nt, Artificial Sequence
  ACI46041 variant
augccccucgagcucgagcucugccccggccgcugggucggcggccagcaccccugcuucaucaucgccgagaucggccagaaccaccagggcgaccucgacgucgccaagcgcaugauccgcauggccaaggagugcggcgccgacugcgccaaguuccagaaguccgagcucgaguucaaguucaaccgcaaggcccucgagcgccccuacaccuccaagcacuccuggggcaagaccuacggcgagcacaagcgccaccucgaguucucccacgaccaguaccgcgagcuccagcgcuacgccgaggaggucggcaucuucuucaccgccuccggcauggacgagauggccgucgaguuccuccacgagcucaacguccccuucuucaaggucggcuccggcgacaccaacaacuuccccuaccucgagaagaccgccaagaagggccgccccauggucaucuccuccggcaugcaguccauggacaccaugaagcaggucuaccagaucgucaagccccucaaccccaacuucugcuuccuccagugcaccuccgccuacccccuccagcccgaggacgucaaccuccgcgucaucuccgaguaccagaagcucuuccccgacauccccaucggcuacuccggccacgagaccggcaucgccaucuccgucgccgccgucgcccucggcgccaagguccucgagcgccacaucacccucgacaagaccuggaagggcuccgaccacuccgccucccucgagcccggcgagcucgccgagcucguccgcuccguccgccucgucgagcgcgcccucggcucccccaccaagcagcuccuccccugcgagauggccugcaacgagaagcucggcaaguccgucgucgccaaggucaagauccccgagggcaccauccucaccauggacaugcucaccgucaaggucggcgagcccaaggccuacccccccgaggacaucuucaaccucgucggcaagaagguccucgucaccgucgaggaggacgacaccaucauggaggagcucgucgacaaccacggcaagaagaucaaguccuga

SEQ ID NO: 1947 - RNA, 2715 nt, Artificial Sequence
  CCDS14652.1 variant
augcaggccuccccccuccagaccucccagcccaccccccccgaggagcuccacgccgccgccuacgucuucaccaacgacggccagcagaugcgcuccgacgaggucaaccucgucgccaccggccaccaguccaagaagaagcacucccgcaaguccaagcgccacuccuccuccaagcgccgcaaguccauguccuccuggcucgacaagcaggaggacgccgccgucacccacuccaucugcgaggagcgcaucaacaacggccagcccgucgccgacaacguccucuccaccgccccccccuggcccgacgccaccaucgcccacaacauccgcgaggagcgcauggagaacggccagucccgcaccgacaagguccucuccaccgcccccccccagcucguccacauggccgccgccggcauccccuccauguccacccgcgaccuccacuccaccgucacccacaacauccgcgaggagcgcauggagaacggccagccccagcccgacaacguccucuccaccggccccaccggccucaucaacauggccgccacccccauccccgccauguccgcccgcgaccucuacgccaccgucacccacaacgucugcgagcagaagauggagaacguccagcccgcccccgacaacguccuccucacccuccgcccccgccgcaucaacaugaccgacaccggcaucucccccauguccacccgcgaccccuacgccaccaucaccuacaacguccccgaggagaagauggagaagggccagccccagcccgacaacauccucuccaccgccuccaccggccucaucaacgucgccggcgccggcacccccgccaucuccaccaacggccucuacuccaccgucccccacaacgucugcgaggagaagauggagaacgaccagccccagcccaacaacguccucuccaccguccagcccgucaucaucuaccucaccgccaccggcauccccggcaugaacacccgcgaccaguacgccaccaucacccacaacgucugcgaggagcgcgucgucaacaaccagccccuccccuccaacgcccucuccaccguccuccccggccucgccuaccucgccaccgccgacaugcccgccauguccacccgcgaccagcacgccaccaucauccacaaccuccgcgaggagaagaaggacaacucccagcccacccccgacaacguccucuccgccgucacccccgagcucaucaaccucgccggcgccggcaucccccccauguccacccgcgaccaguacgccaccgucaaccaccacguccacgaggcccgcauggagaacggccagcgcaagcaggacaacguccucuccaacguccucuccggccucaucaacauggccggcgccuccauccccgccauguccucccgcgaccucuacgccaccaucacccacuccguccgcgaggagaagauggaguccggcaagccccagaccgacaaggucaucuccaacgacgccccccagcucggccacauggccgccggcggcauccccuccauguccaccaaggaccucuacgccaccgucacccagaacguccacgaggagcgcauggagaacaaccagccccagcccuccuacgaccucuccaccguccuccccggccucaccuaccucaccgucgccggcauccccgccauguccacccgcgaccaguacgccaccgucacccacaacguccacgaggagaagaucaagaacggccaggccgccuccgacaacgucuucuccaccgucccccccgccuucaucaacauggccgccaccggcgucuccuccauguccacccgcgaccaguacgccgccgucacccacaacauccgcgaggagaagaucaacaacucccagcccgcccccggcaacauccucuccaccgccccccccuggcuccgccacauggccgccgccggcaucuccuccaccaucacccgcgaccucuacgucaccgccacccacuccguccacgaggagaagaugaccaacggccagcaggcccccgacaacucccucuccaccgucccccccggcugcaucaaccucuccggcgccggcaucuccugccgcuccacccgcgaccucuacgccaccgucauccacgacauccaggaggaggagauggagaacgaccagaccccccccgacggcuuccucuccaacuccgacucccccgagcucaucaacaugaccggccacugcaugccccccaacgcccucgacuccuucucccacgacuucaccucccucuccaaggacgagcuccucuacaagcccgacuccaacgaguucgccgucggcaccaagaacuacuccgucuccgccggcgacccccccgucaccgucaugucccucgucgagaccguccccaacaccccccagaucucccccgccauggccaagaagaucaacgacgacaucaaguaccagcucaugaaggagguccgccgcuucggccagaacuacgagcgcaucuucauccuccucgaggagguccagggcuccaugaaggucaagcgccaguucgucgaguucaccaucaaggaggccgcccgcuucaagaaggucguccucauccagcagcucgagaaggcccucaaggagaucgacucccacugccaccuccgcaaggucaagcacaugcgcaagcgcuga

SEQ ID NO: 1948 - RNA, 2403 nt, Artificial Sequence
  AAH01058 variant
augggcuccuccaagaagcaccgcggcgagaaggaggccgccggcaccaccgccgccgccggcaccggcggcgccaccgagcagcccccccgccaccgcgagcacaagaagcacaagcaccgcuccggcggcuccggcggcuccggcggcgagcgccgcaagcgcucccgcgagcgcggcggcgagcgcggcuccggccgccgcggcgccgaggccgaggcccgcuccuccacccacggccgcgagcgcucccaggccgagcccuccgagcgccgcgucaagcgcgagaagcgcgacgacggcuacgaggccgccgccuccuccaagaccuccuccggcgacgccuccucccucuccaucgaggagaccaacaagcuccgcgccaagcucggccucaagccccucgaggucaacgccaucaagaaggaggccggcaccaaggaggagcccgucaccgccgacgucaucaaccccauggcccuccgccagcgcgaggagcuccgcgagaagcucgccgccgccaaggagaagcgccuccucaaccagaagcucggcaagaucaagacccucggcgaggacgaccccuggcucgacgacaccgccgccuggaucgagcgcucccgccagcuccagaaggagaaggaccucgccgagaagcgcgccaagcuccucgaggagauggaccaggaguucggcgucuccacccucgucgaggaggaguucggccagcgccgccaggaccucuacuccgcccgcgaccuccagggccucaccgucgagcacgccaucgacuccuuccgcgagggcgagaccaugauccucacccucaaggacaagggcguccuccaggaggaggaggacguccucgucaacgucaaccucgucgacaaggagcgcgccgagaagaacgucgagcuccgcaagaagaagcccgacuaccuccccuacgccgaggacgaguccgucgacgaccucgcccagcagaagccccgcuccauccucuccaaguacgacgaggagcucgagggcgagcgcccccacuccuuccgccucgagcagggcggcaccgccgacggccuccgcgagcgcgagcucgaggagauccgcgccaagcuccgccuccaggcccagucccucuccaccgucggcccccgccucgccuccgaguaccucacccccgaggagauggucaccuucaagaagaccaagcgccgcgucaagaagauccgcaagaaggagaaggaggucgucguccgcgccgacgaccuccucccccucggcgaccagacccaggacggcgacuucggcucccgccuccgcggccgcggccgccgccgcgucuccgaggucgaggaggagaaggagcccgucccccagccccuccccuccgacgacacccgcgucgagaacauggacaucuccgacgaggaggagggcggcgcccccccccccggcuccccccagguccucgaggaggacgaggccgagcucgagcuccagaagcagcucgagaagggccgccgccuccgccagcuccagcagcuccagcagcuccgcgacuccggcgagaaggucgucgagaucgucaagaagcucgagucccgccagcgcggcugggaggaggacgaggaccccgagcgcaagggcgccaucgucuucaacgccaccuccgaguucugccgcacccucggcgagauccccaccuacggccucgccggcaaccgcgaggagcaggaggagcucauggacuucgagcgcgacgaggagcgcuccgccaacggcggcuccgaguccgacggcgaggagaacaucggcugguccaccgucaaccucgacgaggagaagcagcagcaggacuucuccgccuccuccaccaccauccucgacgaggagcccaucgucaaccgcggccucgccgccgcccuccuccucugccagaacaagggccuccucgagaccaccguccagaaggucgcccgcgucaaggcccccaacaagucccuccccuccgccgucuacugcaucgaggacaagauggccaucgacgacaaguacucccgccgcgaggaguaccgcggcuucacccaggacuucaaggagaaggacggcuacaagcccgacgucaagaucgaguacgucgacgagaccggccgcaagcucacccccaaggaggccuuccgccagcucucccaccgcuuccacggcaagggcuccggcaagaugaagaccgagcgccgcaugaagaagcucgacgaggaggcccuccucaagaagauguccuccuccgacaccccccucggcaccgucgcccuccuccaggagaagcagaaggcccagaagacccccuacaucguccucuccggcuccggcaaguccaugaacgccaacaccaucaccaaguga

SEQ ID NO: 1949 - RNA, 2877 nt, Artificial Sequence
  AAF00087 variant
augcgcacccacacccgcggcgcccccuccgucuucuucaucuaccuccucugcuucgucuccgccuacaucaccgacgagaaccccgaggucaugauccccuucaccaacgccaacuacgacucccaccccaugcucuacuucucccgcgccgaggucgccgagcuccagcuccgcgccgccuccucccacgagcacaucgccgcccgccucaccgaggccguccacaccaugcucuccuccccccucgaguaccucccccccugggaccccaaggacuacuccgcccgcuggaacgagaucuucggcaacaaccucggcgcccucgccauguucugcguccucuaccccgagaacaucgaggcccgcgacauggccaaggacuacauggagcgcauggccgcccagcccuccuggcucgucaaggacgcccccugggacgaggucccccucgcccacucccucgucggcuucgccaccgccuacgacuuccucuacaacuaccucuccaagacccagcaggagaaguuccucgaggucaucgccaacgccuccggcuacauguacgagaccuccuaccgccgcggcuggggcuuccaguaccuccacaaccaccagcccaccaacugcauggcccuccucaccggcucccucguccucaugaaccagggcuaccuccaggaggccuaccucuggaccaagcagguccucaccaucauggagaagucccucguccuccuccgcgaggucaccgacggcucccucuacgagggcgucgccuacggcuccuacaccacccgcucccucuuccaguacauguuccucguccagcgccacuucaacaucaaccacuucggccaccccuggcucaagcagcacuucgccuucauguaccgcaccauccuccccggcuuccagcgcaccgucgccaucgccgacuccaacuacaacugguucuacggccccgagucccagcucgucuuccucgacaaguucgucaugcgcaacggcuccggcaacuggcucgccgaccagauccgccgcaaccgcgucgucgagggccccggcacccccuccaagggccagcgcuggugcacccuccacaccgaguuccucugguacgacggcucccucaaguccguccccccccccgacuucggcacccccacccuccacuacuucgaggacuggggcgucgucaccuacggcuccgcccuccccgccgagaucaaccgcuccuuccucuccuucaaguccggcaagcucggcggccgcgccaucuacgacaucguccaccgcaacaaguacaaggacuggaucaagggcuggcgcaacuucaacgccggccacgagcaccccgaccagaacuccuucaccuucgcccccaacggcguccccuucaucaccgaggcccucuacggccccaaguacaccuucuucaacaacguccucauguucucccccgccgucuccaaguccugcuucucccccugggucggccaggucaccgaggacugcuccuccaagugguccaaguacaagcacgaccucgccgccuccugccagggccgcgucgucgccgccgaggagaagaacggcgucgucuucauccgcggcgagggcgucggcgccuacaacccccagcucaaccucaagaacguccagcgcaaccucauccuccuccacccccagcuccuccuccucgucgaccagauccaccucggcgaggaguccccccucgagaccgccgccuccuucuuccacaacgucgacguccccuucgaggagaccgucgucgacggcguccacggcgccuucauccgccagcgcgacggccucuacaagauguacuggauggacgacaccggcuacuccgagaaggccaccuucgccuccgucaccuacccccgcggcuaccccuacaacggcaccaacuacgucaacgucaccaugcaccuccgcucccccaucacccgcgccgccuaccucuucaucggccccuccaucgacguccaguccuucaccguccacggcgacucccagcagcucgacgucuucaucgccaccuccaagcacgccuacgccaccuaccucuggaccggcgaggccaccggccaguccgccuucgcccaggucaucgccgaccgccacaagauccucuucgaccgcaacuccgccaucaaguccuccaucguccccgaggucaaggacuacgccgccaucgucgagcagaaccuccagcacuucaagcccgucuuccagcuccucgagaagcagauccucucccgcguccgcaacaccgccuccuuccgcaagaccgccgagcgccuccuccgcuucuccgacaagcgccagaccgaggaggccaucgaccgcaucuucgccaucucccagcagcagcagcagcaguccaaguccaagaagaaccgccgcgccggcaagcgcuacaaguucgucgacgccguccccgacaucuucgcccagaucgaggucaacgagaagaagauccgccagaaggcccagauccucgcccagaaggagcuccccaucgacgaggacgaggagaugaaggaccuccucgacuucgccgacgucaccuacgagaagcacaagaacggcggccucaucaagggccgcuucggccaggcccgcauggucaccaccacccacucccgcgcccccucccucuccgccuccuacacccgccucuuccucauccucaacaucgccaucuucuucgucaugcucgccaugcagcucaccuacuuccagcgcgcccagucccuccacggccagcgcugccucuacgccguccuccucaucgacuccugcauccuccucuggcucuacuccuccugcucccagucccagugcuga

SEQ ID NO: 1950 - RNA, 2892 nt, Artificial Sequence
  AAH93784 variant
auggccaccgccgccgagaccuccgccuccgagcccgaggccgaguccaaggccggccccaaggccgacggcgaggaggacgaggucaaggccgcccgcacccgccgcaagguccucucccgcgccgucgccgccgccaccuacaagaccaugggccccgccugggaccagcaggaggagggcgucuccgaguccgacggcgacgaguacgccauggccuccuccgccgaguccucccccggcgaguacgagugggaguacgacgaggaggaggagaagaaccagcucgagaucgagcgccucgaggagcagcucuccaucaacgucuacgacuacaacugccacgucgaccucauccgccuccuccgccucgagggcgagcucaccaagguccgcauggcccgccagaagauguccgagaucuucccccucaccgaggagcucuggcucgaguggcuccacgacgagaucuccauggcccaggacggccucgaccgcgagcacgucuacgaccucuucgagaaggccgucaaggacuacaucugccccaacaucuggcucgaguacggccaguacuccgucggcggcaucggccagaagggcggccucgagaagguccgcuccgucuucgagcgcgcccucuccuccgucggccuccacaugaccaagggccucgcccucugggaggccuaccgcgaguucgaguccgccaucgucgaggccgcccgccucgagaagguccacucccucuuccgccgccagcucgccaucccccucuacgacauggaggccaccuucgccgaguacgaggagugguccgaggaccccauccccgaguccgucauccagaacuacaacaaggcccuccagcagcucgagaaguacaagcccuacgaggaggcccuccuccaggccgaggccccccgccucgccgaguaccaggccuacaucgacuucgagaugaagaucggcgaccccgcccgcauccagcucaucuucgagcgcgcccucgucgagaacugccucguccccgaccucuggauccgcuacucccaguaccucgaccgccagcucaaggucaaggaccucguccucuccguccacaaccgcgccauccgcaacugccccuggaccgucgcccucuggucccgcuaccuccucgccauggagcgccacggcgucgaccaccaggucaucuccgucaccuucgagaaggcccucaacgccggcuucauccaggccaccgacuacgucgagaucuggcaggccuaccucgacuaccuccgccgccgcgucgacuucaagcaggacuccuccaaggagcucgaggagcuccgcgccgccuucacccgcgcccucgaguaccucaagcaggaggucgaggagcgcuucaacgaguccggcgaccccuccugcgucaucaugcagaacugggcccgcaucgaggcccgccucugcaacaacaugcagaaggcccgcgagcucugggacuccaucaugacccgcggcaacgccaaguacgccaacauguggcucgaguacuacaaccucgagcgcgcccacggcgacacccagcacugccgcaaggcccuccaccgcgccguccagugcaccuccgacuaccccgagcacgucugcgagguccuccucaccauggagcgcaccgagggcucccucgaggacugggacaucgccguccagaagaccgagacccgccucgcccgcgucaacgagcagcgcaugaaggccgccgagaaggaggccgcccucguccagcaggaggaggagaaggccgagcagcgcaagcgcgcccgcgccgagaagaaggcccucaagaagaagaagaagauccgcggccccgagaagcgcggcgccgacgaggacgacgagaaggaguggggcgacgacgaggaggagcagcccuccaagcgccgccgcgucgagaacuccauccccgccgccggcgagacccagaacgucgaggucgccgccggccccgccggcaagugcgccgccgucgacgucgagccccccuccaagcagaaggagaaggccgccucccucaagcgcgacaugcccaagguccuccacgacuccuccaaggacuccaucaccgucuucgucuccaaccuccccuacuccaugcaggagcccgacaccaagcuccgcccccucuucgaggccugcggcgaggucguccagauccgccccaucuucuccaaccgcggcgacuuccgcggcuacugcuacgucgaguucaaggaggagaaguccgcccuccaggcccucgagauggaccgcaaguccgucgagggccgccccauguucgucucccccugcgucgacaaguccaagaaccccgacuucaaggucuuccgcuacuccaccucccucgagaagcacaagcucuucaucuccggccuccccuucuccugcaccaaggaggagcucgaggagaucugcaaggcccacggcaccgucaaggaccuccgccucgucaccaaccgcgccggcaagcccaagggccucgccuacgucgaguacgagaacgagucccaggccucccaggccgucaugaagauggacggcaugaccaucaaggagaacaucaucaaggucgccaucuccaaccccccccagcgcaagguccccgagaagcccgagacccgcaaggcccccggcggccccaugcuccucccccagaccuacggcgcccgcggcaagggccgcacccagcucucccuccucccccgcgcccuccagcgccccuccgccgccgccccccaggccgagaacggccccgccgccgcccccgccgucgccgcccccgccgccaccgaggcccccaagauguccaacgccgacuucgccaagcucuuccuccgcaaguga

SEQ ID NO: 1951 - RNA, 2283 nt, Artificial Sequence
  AAC51668 variant
augaagaccugggucaagaucgucuucggcgucgccaccuccgccguccucgcccuccucgucaugugcaucguccuccgccccucccgcguccacaacuccgaggagaacaccaugcgcgcccucacccucaaggacauccucaacggcaccuucuccuacaagaccuucuuccccaacuggaucuccggccaggaguaccuccaccaguccgccgacaacaacaucguccucuacaacaucgagaccggccaguccuacaccauccucuccaaccgcaccaugaaguccgucaacgccuccaacuacggccucucccccgaccgccaguucgucuaccucgaguccgacuacuccaagcucuggcgcuacuccuacaccgccaccuacuacaucuacgaccucuccaacggcgaguucguccgcggcaacgagcucccccgccccauccaguaccucugcuggucccccgucggcuccaagcucgccuacgucuaccagaacaacaucuaccucaagcagcgccccggcgacccccccuuccagaucaccuucaacggccgcgagaacaagaucuucaacggcauccccgacugggucuacgaggaggagaugcucgccaccaaguacgcccucugguggucccccaacggcaaguuccucgccuacgccgaguucaacgacaccgacauccccgucaucgccuacuccuacuacggcgacgagcaguacccccgcaccaucaacauccccuaccccaaggccggcgccaagaaccccgucguccgcaucuucaucaucgacaccaccuaccccgccuacgucggcccccaggagguccccguccccgccaugaucgccuccuccgacuacuacuucuccuggcucaccugggucaccgacgagcgcgucugccuccaguggcucaagcgcguccagaacgucuccguccucuccaucugcgacuuccgcgaggacuggcagaccugggacugccccaagacccaggagcacaucgaggagucccgcaccggcugggccggcggcuucuucgucuccacccccgucuucuccuacgacgccaucuccuacuacaagaucuucuccgacaaggacggcuacaagcacauccacuacaucaaggacaccgucgagaacgccauccagaucaccuccggcaagugggaggccaucaacaucuuccgcgucacccaggacucccucuucuacuccuccaacgaguucgaggaguaccccggccgccgcaacaucuaccgcaucuccaucggcuccuacccccccuccaagaagugcgucaccugccaccuccgcaaggagcgcugccaguacuacaccgccuccuucuccgacuacgccaaguacuacgcccucgucugcuacggccccggcauccccaucuccacccuccacgacggccgcaccgaccaggagaucaagauccucgaggagaacaaggagcucgagaacgcccucaagaacauccagcuccccaaggaggagaucaagaagcucgaggucgacgagaucacccucugguacaagaugauccuccccccccaguucgaccgcuccaagaaguacccccuccucauccaggucuacggcggccccugcucccaguccguccgcuccgucuucgccgucaacuggaucuccuaccucgccuccaaggagggcauggucaucgcccucgucgacggccgcggcaccgccuuccagggcgacaagcuccucuacgccgucuaccgcaagcucggcgucuacgaggucgaggaccagaucaccgccguccgcaaguucaucgagaugggcuucaucgacgagaagcgcaucgccaucuggggcugguccuacggcggcuacgucuccucccucgcccucgccuccggcaccggccucuucaagugcggcaucgccgucgcccccgucuccuccugggaguacuacgccuccgucuacaccgagcgcuucaugggccuccccaccaaggacgacaaccucgagcacuacaagaacuccaccgucauggcccgcgccgaguacuuccgcaacgucgacuaccuccucauccacggcaccgccgacgacaacguccacuuccagaacuccgcccagaucgccaaggcccucgucaacgcccaggucgacuuccaggccaugugguacuccgaccagaaccacggccucuccggccucuccaccaaccaccucuacacccacaugacccacuuccucaagcagugcuucucccucuccgacuga

SEQ ID NO: 1952 - RNA, 1128 nt, Artificial Sequence
  CCDS32839.1 variant
auggacgcccuccagcucgccaacuccgccuucgccgucgaccucuucaagcagcucugcgagaaggagccccucggcaacguccucuucucccccaucugccucuccaccucccucucccucgcccaggucggcgccaagggcgacaccgccaacgagaucggccagguccuccacuucgagaacgucaaggacguccccuucggcuuccagaccgucaccuccgacgucaacaagcucuccuccuucuacucccucaagcucaucaagcgccucuacgucgacaagucccucaaccucuccaccgaguucaucuccuccaccaagcgccccuacgccaaggagcucgagaccgucgacuucaaggacaagcucgaggagaccaagggccagaucaacaacuccaucaaggaccucaccgacggccacuucgagaacauccucgccgacaacuccgucaacgaccagaccaagauccucgucgucaacgccgccuacuucgucggcaaguggaugaagaaguucuccgaguccgagaccaaggagugccccuuccgcgucaacaagaccgacaccaagcccguccagaugaugaacauggaggccaccuucugcaugggcaacaucgacuccaucaacugcaagaucaucgagcuccccuuccagaacaagcaccucuccauguucauccuccuccccaaggacgucgaggacgaguccaccggccucgagaagaucgagaagcagcucaacuccgagucccucucccaguggaccaaccccuccaccauggccaacgccaaggucaagcucuccauccccaaguucaaggucgagaagaugaucgaccccaaggccugccucgagaaccucggccucaagcacaucuucuccgaggacaccuccgacuucuccggcauguccgagaccaagggcgucgcccucuccaacgucauccacaaggucugccucgagaucaccgaggacggcggcgacuccaucgagguccccggcgcccgcauccuccagcacaaggacgagcucaacgccgaccaccccuucaucuacaucauccgccacaacaagacccgcaacaucaucuucuucggcaaguucugcucccccuga

SEQ ID NO: 1953 - RNA, 1002 nt, Artificial Sequence
  AAH06564 variant
auggccugcucccgcccccccucccagugcgagcccaccucccucccccccggcccccccgccggccgccgccaccucccccucucccgccgccgccgcgagauguccuccaacaaggagcagcgcuccgccgucuucgucauccucuucgcccucaucaccauccucauccucuacuccuccaacuccgccaacgaggucuuccacuacggcucccuccgcggccgcucccgccgccccgucaaccucaagaagugguccaucaccgacggcuacguccccauccucggcaacaagacccuccccucccgcugccaccagugcgucaucgucuccuccuccucccaccuccucggcaccaagcucggccccgagaucgagcgcgccgagugcaccauccgcaugaacgacgcccccaccaccggcuacuccgccgacgucggcaacaagaccaccuaccgcgucgucgcccacuccuccgucuuccgcguccuccgccgcccccaggaguucgucaaccgcacccccgagaccgucuucaucuucuggggcccccccuccaagaugcagaagccccagggcucccucguccgcgucauccagcgcgccggccucgucuuccccaacauggaggccuacgccgucucccccggccgcaugcgccaguucgacgaccucuuccgcggcgagaccggcaaggaccgcgagaagucccacuccuggcucuccaccggcugguucaccauggucaucgccgucgagcucugcgaccacguccacgucuacggcauggucccccccaacuacugcucccagcgcccccgccuccagcgcaugcccuaccacuacuacgagcccaagggccccgacgagugcgucaccuacauccagaacgagcacucccgcaagggcaaccaccaccgcuucaucaccgagaagcgcgucuucuccuccugggcccagcucuacggcaucaccuucucccaccccuccuggaccuga

SEQ ID NO: 1954 - RNA, 1071 nt, Artificial Sequence
  AAC37586 variant
augucccccugcggccgcgcccgccgccagaccucccgcggcgccauggccguccucgccuggaaguucccccgcacccgccuccccaugggcgccuccgcccucugcgucgucguccucugcuggcucuacaucuuccccgucuaccgccuccccaacgagaaggagaucguccagggcguccuccagcagggcaccgccuggcgccgcaaccagaccgccgcccgcgccuuccgcaagcagauggaggacugcugcgaccccgcccaccucuucgccaugaccaagaugaacucccccaugggcaaguccaugugguacgacggcgaguuccucuacuccuucaccaucgacaacuccaccuacucccucuucccccaggccacccccuuccagcucccccucaagaagugcgccgucgucggcaacggcggcauccucaagaaguccggcugcggccgccagaucgacgaggccaacuucgucaugcgcugcaaccuccccccccucuccuccgaguacaccaaggacgucggcuccaagucccagcucgucaccgccaaccccuccaucauccgccagcgcuuccagaaccuccucuggucccgcaagaccuucgucgacaacaugaagaucuacaaccacuccuacaucuacaugcccgccuucuccaugaagaccggcaccgagcccucccuccgcgucuacuacacccucuccgacgucggcgccaaccagaccguccucuucgccaaccccaacuuccuccgcuccaucggcaaguucuggaagucccgcggcauccacgccaagcgccucuccaccggccucuuccucgucuccgccgcccucggccucugcgaggaggucgccaucuacggcuucuggcccuucuccgucaacaugcacgagcagcccaucucccaccacuacuacgacaacguccuccccuucuccggcuuccacgccaugcccgaggaguuccuccagcucugguaccuccacaagaucggcgcccuccgcaugcagcucgaccccugcgaggacaccucccuccagcccaccuccuga

SEQ ID NO: 1955 - RNA, 1257 nt, Artificial Sequence
  BAG50894 variant
augcgcaccaaggccgccggcugcgccgagcgccgcccccuccagccccgcaccgaggccgccgccgcccccgccggccgcgccaugcccuccgaguacaccuacgucaagcuccgcuccgacugcucccgccccucccuccagugguacacccgcgcccaguccaagaugcgccgccccucccuccuccucaaggacauccucaagugcacccuccucgucuucggcgucuggauccucuacauccucaagcucaacuacaccaccgaggagugcgacaugaagaagaugcacuacgucgaccccgaccacgucaagcgcgcccagaaguacgcccagcagguccuccagaaggagugccgccccaaguucgccaagaccuccauggcccuccucuucgagcaccgcuacuccgucgaccuccuccccuucguccagaaggcccccaaggacuccgaggccgaguccaaguacgacccccccuucggcuuccgcaaguucuccuccaagguccagacccuccucgagcuccuccccgagcacgaccuccccgagcaccucaaggccaagaccugccgccgcugcgucgucaucggcuccggcggcauccuccacggccucgagcucggccacacccucaaccaguucgacgucgucauccgccucaacuccgcccccgucgagggcuacuccgagcacgucggcaacaagaccaccauccgcaugaccuaccccgagggcgccccccucuccgaccucgaguacuacuccaacgaccucuucgucgccguccucuucaaguccgucgacuucaacuggcuccaggccauggucaagaaggagacccuccccuucuggguccgccucuucuucuggaagcaggucgccgagaagaucccccuccagcccaagcacuuccgcauccucaaccccgucaucaucaaggagaccgccuucgacauccuccaguacuccgagccccagucccgcuucuggggccgcgacaagaacguccccaccaucggcgucaucgccgucguccucgccacccaccucugcgacgaggucucccucgccggcuucggcuacgaccucaaccagccccgcaccccccuccacuacuucgacucccagugcauggccgccaugaacuuccagaccaugcacaacgucaccaccgagaccaaguuccuccucaagcucgucaaggagggcgucgucaaggaccucuccggcggcaucgaccgcgaguucuga

SEQ ID NO: 1956 - RNA, 1059 nt, Artificial Sequence
  EAW56837 variant
auggacuuccuccgcaaccucuucucccagacccucucccucggcucccagaaggagcgccuccucgacgagcucacccucgagggcgucgcccgcuacaugcaguccgagcgcugccgccgcgucaucugccucgucggcgccggcaucuccaccuccgccggcauccccgacuuccgcucccccuccaccggccucuacgacaaccucgagaaguaccaccuccccuaccccgaggccaucuucgagaucuccuacuucaagaagcaccccgagcccuucuucgcccucgccaaggagcucuaccccggccaguucaagcccaccaucugccacuacuucaugcgccuccucaaggacaagggccuccuccuccgcugcuacacccagaacaucgacacccucgagcgcaucgccggccucgagcaggaggaccucgucgaggcccacggcaccuucuacaccucccacugcgucuccgccuccugccgccacgaguacccccucuccuggaugaaggagaagaucuucuccgaggucacccccaagugcgaggacugccagucccucgucaagcccgacaucgucuucuucggcgagucccuccccgcccgcuucuucuccugcaugcaguccgacuuccucaaggucgaccuccuccucgucaugggcaccucccuccagguccagcccuucgccucccucaucuccaaggccccccucuccaccccccgccuccucaucaacaaggagaaggccggccaguccgaccccuuccucggcaugaucaugggccucggcggcggcauggacuucgacuccaagaaggccuaccgcgacgucgccuggcucggcgagugcgaccagggcugccucgcccucgccgagcuccucggcuggaagaaggagcucgaggaccucguccgccgcgagcacgccuccaucgacgcccaguccggcgccggcguccccaaccccuccaccuccgccucccccaagaagucccccccccccgccaaggacgaggcccgcaccaccgagcgcgagaagccccaguga

SEQ ID NO: 1957 - RNA, 1170 nt, Artificial Sequence
  AAD40850 variant
auggccgagcccgaccccucccacccccucgagacccaggccggcaagguccaggaggcccaggacuccgacuccgacuccgagggcggcgccgccggcggcgaggccgacauggacuuccuccgcaaccucuucucccagacccucucccucggcucccagaaggagcgccuccucgacgagcucacccucgagggcgucgcccgcuacaugcaguccgagcgcugccgccgcgucaucugccucgucggcgccggcaucuccaccuccgccggcauccccgacuuccgcucccccuccaccggccucuacgacaaccucgagaaguaccaccuccccuaccccgaggccaucuucgagaucuccuacuucaagaagcaccccgagcccuucuucgcccucgccaaggagcucuaccccggccaguucaagcccaccaucugccacuacuucaugcgccuccucaaggacaagggccuccuccuccgcugcuacacccagaacaucgacacccucgagcgcaucgccggccucgagcaggaggaccucgucgaggcccacggcaccuucuacaccucccacugcgucuccgccuccugccgccacgaguacccccucuccuggaugaaggagaagaucuucuccgaggucacccccaagugcgaggacugccagucccucgucaagcccgacaucgucuucuucggcgagucccuccccgcccgcuucuucuccugcaugcaguccgacuuccucaaggucgaccuccuccucgucaugggcaccucccuccagguccagcccuucgccucccucaucuccaaggccccccucuccaccccccgccuccucaucaacaaggagaaggccggccaguccgaccccuuccucggcaugaucaugggccucggcggcggcauggacuucgacuccaagaaggccuaccgcgacgucgccuggcucggcgagugcgaccagggcugccucgcccucgccgagcuccucggcuggaagaaggagcucgaggaccucguccgccgcgagcacgccuccaucgacgcccaguccggcgccggcguccccaaccccuccaccuccgccucccccaagaagucccccccccccgccaaggacgaggcccgcaccaccgagcgcgagaagccccaguga

SEQ ID NO: 1958 - RNA, 1401 nt, Artificial Sequence
  AAH02824 variant
auggccgaggagcaggaccucuccgaggucgagcucucccccgucggcuccgaggagccccgcugccucucccccggcuccgcccccucccucggccccgacggcggcggcggcggcuccggccuccgcgccucccccggccccggcgagcucggcaaggucaagaaggagcagcaggacggcgaggccgacgacgacaaguuccccgucugcauccgcgaggccgucucccagguccucuccggcuacgacuggacccucguccccaugcccguccgcgucaacggcgccuccaaguccaagccccacgucaagcgccccaugaacgccuucauggucugggcccaggccgcccgccgcaagcucgccgaccaguacccccaccuccacaacgccgagcucuccaagacccucggcaagcucuggcgccuccucaacgaguccgacaagcgccccuucaucgaggaggccgagcgccuccgcaugcagcacaagaaggaccaccccgacuacaaguaccagccccgccgccgcaagaacggcaaggccgcccagggcgaggccgagugccccggcggcgaggccgagcagggcggcaccgccgccauccaggcccacuacaaguccgcccaccucgaccaccgccaccccggcgagggcucccccauguccgacggcaaccccgagcaccccuccggccagucccacggcccccccaccccccccaccacccccaagaccgagcuccaguccggcaaggccgaccccaagcgcgacggccgcuccaugggcgagggcggcaagccccacaucgacuucggcaacgucgacaucggcgagaucucccacgaggucauguccaacauggagaccuucgacgucgccgagcucgaccaguaccucccccccaacggccaccccggccacgucuccuccuacuccgccgccggcuacggccucggcuccgcccucgccgucgccuccggccacuccgccuggaucuccaagccccccggcgucgcccuccccaccgucuccccccccggcgucgacgccaaggcccaggucaagaccgagaccgccggcccccagggccccccccacuacaccgaccagcccuccaccucccagaucgccuacaccucccucucccucccccacuacggcuccgccuuccccuccaucucccgcccccaguucgacuacuccgaccaccagcccuccggccccuacuacggccacuccggccaggccuccggccucuacuccgccuucuccuacaugggccccucccagcgcccccucuacaccgccaucuccgaccccucccccuccggcccccagucccacucccccacccacugggagcagcccgucuacaccacccucucccgccccuga

SEQ ID NO: 1959 - RNA, 456 nt, Artificial Sequence
  AAH32457 variant
auguccauccccuucuccaacacccacuaccgcaucccccagggcuucggcaaccuccucgagggccucacccgcgagauccuccgcgagcagcccgacaacauccccgccuucgccgccgccuacuucgagucccuccucgagaagcgcgagaagaccaacuucgaccccgccgaguggggcuccaaggucgaggaccgcuucuacaacaaccacgccuucgaggagcaggagccccccgagaaguccgaccccaagcaggaggagucccagaucuccggcaaggaggaggagaccuccgucaccauccucgacuccuccgaggaggacaaggagaaggaggaggucgccgccgucaagauccaggccgccuuccgcggccacaucgcccgcgaggaggccaagaagaugaagaccaacucccuccagaacgaggagaaggaggagaacaaguga

SEQ ID NO: 1960 - RNA, 294 nt, Artificial Sequence
  AAF28420 variant
auggacaagcaguccuccgccggcggcgucaagcgcuccguccccugcgacuccaacgaggccaacgagaugaugcccgagacccccaccggcgacuccgacccccagcccgcccccaagaagaugaagaccuccgaguccuccaccauccucgucguccgcuaccgccgcaacuucaagcgcaccucccccgaggagcuccucaacgaccacgcccgcgagaaccgcaucaacccccuccagauggaggaggaggaguucauggagaucauggucgagauccccgccaaguga

SEQ ID NO: 1961 - RNA, 426 nt, Artificial Sequence
  AAH62750 variant
auggagcagcccaccuccuccaccaacggcgagaagaccaagucccccugcgaguccaacaacaagaagaacgacgagaugcaggagguccccaaccgcguccucgcccccgagcagucccucaagaagaccaagaccuccgaguaccccaucaucuucgucuacuaccuccgcaagggcaagaagaucaacuccaaccagcucgagaacgagcagucccaggagaacuccaucaaccccauccagaaggaggaggacgagggcgucgaccucuccgagggcuccuccaacgaggacgaggaccucggccccugcgagggccccuccaaggaggacaaggaccucgacuccuccgagggcuccucccaggaggacgaggaccucggccucuccgagggcuccucccaggacuccggcgaggacuga

SEQ ID NO: 1962 - RNA, 567 nt, Artificial Sequence
  AAH01003 variant
augaacggcgacgacaccuucgccaagcgcccccgcgacgacgccaaggccuccgagaagcgcuccaaggccuucgacgacaucgccaccuacuucuccaagaaggaguggaagaagaugaaguacuccgagaagaucuccuacgucuacaugaagcgcaacuacaaggccaugaccaagcucggcuucaaggucacccucccccccuucaugugcaacaagcaggccaccgacuuccagggcaacgacuucgacaacgaccacaaccgccgcauccaggucgagcacccccagaugaccuucggccgccuccaccgcaucauccccaagaucaugcccaagaagcccgccgaggacgagaacgacuccaagggcgucuccgaggccuccggcccccagaacgacggcaagcagcuccacccccccggcaaggccaacaucuccgagaagaucaacaagcgcuccggccccaagcgcggcaagcacgccuggacccaccgccuccgcgagcgcaagcagcucgucaucuacgaggagaucuccgaccccgaggaggacgacgaguga

SEQ ID NO: 1963 - RNA, 567 nt, Artificial Sequence
  AAH16957 variant
augaacggcgacgacgccuucgcccgccgccccaccgucggcgcccagauccccgagaagauccagaaggccuucgacgacaucgccaaguacuucuccaaggaggagugggagaagaugaaggccuccgagaagaucuucuacgucuacaugaagcgcaaguacgaggccaugaccaagcucggcuucaaggccacccucccccccuucaugugcaacaagcgcgccgaggacuuccagggcaacgaccucgacaacgaccccaaccgcggcaaccaggucgagcgcccccagaugaccuucggccgccuccagggcaucucccccaagaucaugcccaagaagcccgccgaggagggcaacgacuccgaggagguccccgaggccuccggcccccagaacgacggcaaggagcucugcccccccggcaagcccaccaccuccgagaagauccacgagcgcuccggccccaagcgcggcgagcacgccuggacccaccgccuccgcgagcgcaagcagcucgucaucuacgaggagaucuccgaccccgaggaggacgacgaguga

SEQ ID NO: 1964 - RNA, 567 nt, Artificial Sequence
  AAC05819 variant
augaacggcgacgacaccuucgcccgccgccccaccgucggcgcccagauccccgagaagauccagaaggccuucgacgacaucgccaaguacuucuccaaggaggagugggagaagaugaaggucuccgagaagaucgucuacgucuacaugaagcgcaaguacgaggccaugaccaagcucggcuucaaggccauccuccccuccuucaugcgcaacaagcgcgucaccgacuuccagggcaacgacuucgacaacgaccccaaccgcggcaaccagguccagcgcccccagaugaccuucggccgccuccagggcaucuuccccaagaucaugcccaagaagcccgccgaggagggcaacgucuccaaggagguccccgaggccuccggcccccagaacgacggcaagcagcucugcccccccggcaagcccaccaccuccgagaagaucaacaugaucuccggccccaagcgcggcgagcacgccuggacccaccgccuccgcgagcgcaagcagcucgucaucuacgaggagaucuccgaccccgaggaggacgacgaguga

SEQ ID NO: 1965 - RNA, 567 nt, Artificial Sequence
  AAC05820 variant
augaacggcgacgacgccuucgcccgccgcccccgcgacgacgcccagaucuccgagaagcuccgcaaggccuucgacgacaucgccaaguacuucuccaagaaggagugggagaagaugaaguccuccgagaagaucgucuacgucuacaugaagcucaacuacgaggucaugaccaagcucggcuucaaggucacccucccccccuucaugcgcuccaagcgcgccgccgacuuccacggcaacgacuucggcaacgaccgcaaccaccgcaaccaggucgagcgcccccagaugaccuucggcucccuccagcgcaucuuccccaagaucaugcccaagaagcccgccgaggaggagaacggccucaaggagguccccgaggccuccggcccccagaacgacggcaagcagcucugcccccccggcaaccccuccacccucgagaagaucaacaagaccuccggccccaagcgcggcaagcacgccuggacccaccgccuccgcgagcgcaagcagcucgucgucuacgaggagaucuccgaccccgaggaggacgacgaguga

SEQ ID NO: 1966 - RNA, 888 nt, Artificial Sequence
  CCDS32420.1 variant
auggagcucauccaggacaccucccgccccccccucgaguacgucaagggcgucccccucaucaaguacuucgccgaggcccucggcccccuccaguccuuccaggcccgccccgacgaccuccucaucuccaccuaccccaaguccggcaccaccugggucucccagauccucgacaugaucuaccagggcggcgaccucgagaagugccaccgcgcccccaucuucaugcgcguccccuuccucgaguucaaggcccccggcauccccuccggcauggagacccucaaggacacccccgccccccgccuccucaagacccaccucccccucgcccuccucccccagacccuccucgaccagaaggucaaggucgucuacgucgcccgcaacgccaaggacgucgccgucuccuacuaccacuucuaccacauggccaagguccaccccgagcccggcaccugggacuccuuccucgagaaguucauggucggcgaggucuccuacggcuccugguaccagcacguccaggaguggugggagcucucccgcacccaccccguccucuaccucuucuacgaggacaugaaggagaaccccaagcgcgagauccagaagauccucgaguucgucggccgcucccuccccgaggagaccgucgacuucgucguccagcacaccuccuucaaggagaugaagaagaaccccaugaccaacuacaccaccgucccccaggaguucauggaccacuccaucucccccuucaugcgcaagggcauggccggcgacuggaagaccaccuucaccgucgcccagaacgagcgcuucgacgccgacuacgccgagaagauggccggcugcucccucuccuuccgcuccgagcucuga

SEQ ID NO: 1967 - RNA, 3807 nt, Artificial Sequence
  CCDS43990.1 variant
augaucgccgcccccgagauccccaccgacuucaaccuccuccaggaguccgagacccacuucuccuccgacaccgacuucgaggacaucgagggcaagaaccagaagcagggcaagggcaagaccugcaagaagggcaagaagggccccgccgagaagggcaagggcggcaacggcggcggcaagccccccuccggccccaaccgcaugaacggccaccaccagcagaacggcgucgagaacaugaugcucuucgaggucgucaagaugggcaaguccgccaugcaguccgucgucgacgacuggaucgaguccuacaagcacgaccgcgacaucgcccuccucgaccucaucaacuucuucauccagugcuccggcugcaagggcgucgucaccgccgagauguuccgccacaugcagaacuccgagaucauccgcaagaugaccgaggaguucgacgaggacuccggcgacuacccccucaccauggccggcccccaguggaagaaguucaaguccuccuucugcgaguucaucggcguccucguccgccagugccaguacuccaucaucuacgacgaguacaugauggacaccgucaucucccuccucaccggccucuccgacucccagguccgcgccuuccgccacaccuccacccucgccgccaugaagcucaugaccgcccucgucaacgucgcccucaaccucuccaucaacauggacaacacccagcgccaguacgaggccgagcgcaacaagaugaucggcaagcgcgccaacgagcgccucgagcuccuccuccagaagcgcaaggagcuccaggagaaccaggacgagaucgagaacaugaugaacgccaucuucaagggcgucuucguccaccgcuaccgcgacgccaucgccgagauccgcgccaucugcaucgaggagaucggcaucuggaugaagauguacuccgacgccuuccucaacgacuccuaccucaaguacgucggcuggaccaugcacgacaagcagggcgagguccgccucaagugccucaccgcccuccagggccucuacuacaacaaggagcucaacuccaagcucgagcucuucaccucccgcuucaaggaccgcaucgucuccaugacccucgacaaggaguacgacgucgccguccaggccaucaagcuccucacccucguccuccaguccuccgaggagguccucaccgccgaggacugcgagaacgucuaccaccucgucuacuccgcccaccgccccgucgccgucgccgccggcgaguuccucuacaagaagcucuucucccgccgcgaccccgaggaggacggcaugaugaagcgccgcggccgccagggccccaacgccaaccucgucaagacccucgucuucuucuuccucgaguccgagcuccacgagcacgccgccuaccucgucgacuccaugugggacugcgccaccgagcuccucaaggacugggagugcaugaacucccuccuccucgaggagccccucuccggcgaggaggcccucaccgaccgccaggaguccgcccucaucgagaucaugcucugcaccauccgccaggccgccgagugccacccccccgucggccgcggcaccggcaagcgcguccucaccgccaaggagaagaagacccagcucgacgaccgcaccaagaucaccgagcucuucgccgucgcccucccccagcuccucgccaaguacuccgucgacgccgagaaggucaccaaccuccuccagcucccccaguacuucgaccucgagaucuacaccaccggccgccucgagaagcaccucgacgcccuccuccgccagauccgcaacaucgucgagaagcacaccgacaccgacguccucgaggccugcuccaagaccuaccacgcccucugcaacgaggaguucaccaucuucaaccgcgucgacaucucccgcucccagcucaucgacgagcucgccgacaaguucaaccgccuccucgaggacuuccuccaggagggcgaggagcccgacgaggacgacgccuaccagguccucuccacccucaagcgcaucaccgccuuccacaacgcccacgaccucuccaagugggaccucuucgccugcaacuacaagcuccucaagaccggcaucgagaacggcgacaugcccgagcagaucgucauccacgcccuccagugcacccacuacgucauccucuggcagcucgccaagaucaccgaguccuccuccaccaaggaggaccuccuccgccucaagaagcagaugcgcgucuucugccagaucugccagcacuaccucaccaacgucaacaccaccgucaaggagcaggccuucaccauccucugcgacauccucaugaucuucucccaccagaucauguccggcggccgcgacaugcucgagccccucgucuacacccccgacuccucccuccaguccgagcuccucuccuucauccucgaccacgucuucaucgagcaggacgacgacaacaacuccgccgacggccagcaggaggacgaggccuccaagaucgaggcccuccacaagcgccgcaaccuccucgccgccuucugcaagcucaucgucuacaccgucgucgagaugaacaccgccgccgacaucuucaagcaguacaugaaguacuacaacgacuacggcgacaucaucaaggagaccauguccaagacccgccagaucgacaagauccagugcgccaagacccucauccucucccuccagcagcucuucaacgagaugauccaggagaacggcuacaacuucgaccgcuccuccuccaccuucuccggcaucaaggagcucgcccgccgcuucgcccucaccuucggccucgaccagcucaagacccgcgaggccaucgccaugcuccacaaggacggcaucgaguucgccuucaaggagcccaacccccagggcgagucccaccccccccucaaccucgccuuccucgacauccucuccgaguucuccuccaagcuccuccgccaggacaagcgcaccgucuacgucuaccucgagaaguucaugaccuuccagaugucccuccgccgcgaggacgucuggcucccccucauguccuaccgcaacucccuccucgccggcggcgacgacgacaccauguccgucaucuccggcaucuccucccgcggcuccaccguccgcuccaagaaguccaagcccuccaccggcaagcgcaaggucgucgagggcaugcagcucucccucaccgaggaguccuccuccuccgacuccauguggcucucccgcgagcagacccuccacacccccgucaugaugcagaccccccagcucaccuccaccaucaugcgcgagcccaagcgccuccgccccgaggacuccuucauguccgucuaccccaugcagaccgagcaccaccagaccccccucgacuacaacacccaggucaccuggaugcucgcccagcgccagcaggaggaggcccgccagcagcaggagcgcgccgccauguccuacgucaagcuccgcaccaaccuccagcacgccauccgccgcggcaccucccucauggaggacgacgaggagcccaucgucgaggacgucaugauguccuccgagggccgcaucgaggaccucaacgagggcauggacuucgacaccauggacaucgaccucccccccuccaagaaccgccgcgagcgcaccgagcucaagcccgacuucuucgaccccgccuccaucauggacgaguccguccucggcgucuccauguucuga

SEQ ID NO: 1968 - RNA, 1473 nt, Artificial Sequence
  CCDS5615.1 variant
auggaguccaucuccaugaugggcucccccaagucccucuccgagaccuuccuccccaacggcaucaacggcaucaaggacgcccgcaaggucaccgucggcgucaucggcuccggcgacuucgccaagucccucaccauccgccucauccgcugcggcuaccacgucgucaucggcucccgcaaccccaaguucgccuccgaguucuucccccacgucgucgacgucacccaccacgaggacgcccucaccaagaccaacaucaucuucgucgccauccaccgcgagcacuacaccucccucugggaccuccgccaccuccucgucggcaagauccucaucgacgucuccaacaacaugcgcaucaaccaguaccccgaguccaacgccgaguaccucgccucccucuuccccgacucccucaucgucaagggcuucaacgucgucuccgccugggcccuccagcucggccccaaggacgccucccgccaggucuacaucugcuccaacaacauccaggcccgccagcaggucaucgagcucgcccgccagcucaacuucauccccaucgaccucggcucccucuccuccgcccgcgagaucgagaaccucccccuccgccucuucacccucuggcgcggccccgucgucgucgccaucucccucgccaccuucuucuuccucuacuccuucguccgcgacgucauccaccccuacgcccgcaaccagcaguccgacuucuacaagauccccaucgagaucgucaacaagacccuccccaucgucgccaucacccuccucucccucgucuaccucgccggccuccucgccgccgccuaccagcucuacuacggcaccaaguaccgccgcuucccccccuggcucgagaccuggcuccagugccgcaagcagcucggccuccucuccuucuucuucgccaugguccacgucgccuacucccucugccuccccaugcgccgcuccgagcgcuaccucuuccucaacauggccuaccagcagguccacgccaacaucgagaacuccuggaacgaggaggaggucuggcgcaucgagauguacaucuccuucggcaucaugucccucggccuccucucccuccucgccgucaccuccauccccuccgucuccaacgcccucaacuggcgcgaguucuccuucauccaguccacccucggcuacgucgcccuccucaucuccaccuuccacguccucaucuacggcuggaagcgcgccuucgaggaggaguacuaccgcuucuacaccccccccaacuucguccucgcccucguccuccccuccaucgucauccucggcaagaucauccucuuccuccccugcaucucccgcaagcucaagcgcaucaagaagggcugggagaagucccaguuccucgaggagggcaugggcggcaccaucccccacgucucccccgagcgcgucaccgucauguga

SEQ ID NO: 1969 - RNA, 777 nt, Artificial Sequence
  EAW93749 variant
auggagucccgcaaggacaucaccaaccaggaggagaucuggaagaugaagccccgccgcaaccucgaggacaacgacuaccuccacaaggacaccggcgagaccuccaugcucaagcgccccguccuccuccaccuccagcagaccgcccacgccgacgaguucgacugccccuccgagcuccagcacgcccaggagcucuucccccaguggcaccuccccaucaagaucgccgccgucauggccucccucaccuuccucuacacccuccuccgcgaggucauccacccccucgccaccucccaccagcaguacuucuacaagauccccauccucgucaucaacaagguccuccccauggucuccaucacccuccucgcccucgucuaccuccccggcgucaucgccgccaucguccagguccacaacggcaccaaguacaagaaguucccccacuggcucgacaaguggaugcucacccgcaagcaguucggccuccucucccucuucuucgccguccuccacgccaucuacacccucuccuacgccaugcgccgcuccuaccgcuacaagcuccucaacugggccuaccagcagguccagcagaacaaggaggacgccuggaucgagcacgacgucuggcgcauggagaucuacgucucccucggcaucgucggccucgccauccucgcccuccucgccgucaccuccauccccuccgucuccgacucccucaccuggcgcgaguuccacuacauccaggucaacaacaucuga

SEQ ID NO: 1970 - RNA, 1020 nt, Artificial Sequence
  AAD15620 variant
auggagucccgcaaggacaucaccaaccaggaggagcucuggaagaugaagccccgccgcaaccucgaggaggacgacuaccuccacaaggacaccggcgagaccuccaugcucaagcgccccguccuccuccaccuccaccagaccgcccacgccgacgaguucgacugccccuccgagcuccagcacacccaggagcucuucccccaguggcaccuccccaucaagaucgccgccaucaucgccucccucaccuuccucuacacccuccuccgcgaggucauccacccccucgccaccucccaccagcaguacuucuacaagauccccauccucgucaucaacaagguccuccccauggucuccaucacccuccucgcccucgucuaccuccccggcgucaucgccgccaucguccagcuccacaacggcaccaaguacaagaaguucccccacuggcucgacaaguggaugcucacccgcaagcaguucggccuccucuccuucuucuucgccguccuccacgccaucuacucccucuccuaccccaugcgccgcuccuaccgcuacaagcuccucaacugggccuaccagcagguccagcagaacaaggaggacgccuggaucgagcacgacgucuggcgcauggagaucuacgucucccucggcaucgucggccucgccauccucgcccuccucgccgucaccuccauccccuccgucuccgacucccucaccuggcgcgaguuccacuacauccaguccaagcucggcaucgucucccuccuccucggcaccauccacgcccucaucuucgccuggaacaaguggaucgacaucaagcaguucgucugguacaccccccccaccuucaugaucgccgucuuccuccccaucgucguccucaucuucaaguccauccucuuccuccccugccuccgcaagaagauccucaagauccgccacggcugggaggacgucaccaagaucaacaagaccgagaucugcucccagcucuga

SEQ ID NO: 1971 - RNA, 498 nt, Artificial Sequence
  CCDS32752.1 variant
augggcgcccccacccucccccccgccuggcagcccuuccucaaggaccaccgcaucuccaccuucaagaacuggcccuuccucgagggcugcgccugcacccccgagcgcauggccgaggccggcuucauccacugccccaccgagaacgagcccgaccucgcccagugcuucuucugcuucaaggagcucgagggcugggagcccgacgacgaccccaucggccccggcaccgucgccuacgccugcaacaccuccacccucggcggccgcggcggccgcaucacccgcgaggagcacaagaagcacuccuccggcugcgccuuccucuccgucaagaagcaguucgaggagcucacccucggcgaguuccucaagcucgaccgcgagcgcgccaagaacaagaucgccaaggagaccaacaacaagaagaaggaguucgaggagaccgccgagaagguccgccgcgccaucgagcagcucgccgccauggacuga

SEQ ID NO: 1972 - RNA, 429 nt, Artificial Sequence
  AAC51660 variant
augggcgcccccacccucccccccgccuggcagcccuuccucaaggaccaccgcaucuccaccuucaagaacuggcccuuccucgagggcugcgccugcacccccgagcgcauggccgaggccggcuucauccacugccccaccgagaacgagcccgaccucgcccagugcuucuucugcuucaaggagcucgagggcugggagcccgacgacgaccccaucgaggagcacaagaagcacuccuccggcugcgccuuccucuccgucaagaagcaguucgaggagcucacccucggcgaguuccucaagcucgaccgcgagcgcgccaagaacaagaucgccaaggagaccaacaacaagaagaaggaguucgaggagaccgccaagaagguccgccgcgccaucgagcagcucgccgccauggacuga

SEQ ID NO: 1973 - RNA, 2931 nt, Artificial Sequence
  EAW56623 variant
auggagaagcagaagcccuucgcccucuucguccccccccgcuccuccuccucccaggucuccgccgucaagccccagacccucggcggcgacuccaccuucuucaaguccuucaacaagugcaccgaggacgacuucgaguuccccuucgccaagaccaaccucuccaagaacggcgagaacaucgacuccgaccccgcccuccagaaggucaacuuccuccccguccucgagcaggucggcaacuccgacugccacuaccaggagggccucaaggacuccgaccucgagaacuccgagggccucucccgcgucuacuccaagcucuacaaggaggccgagaagaucaagaaguggaaggucuccaccgaggccgagcuccgccagaaggaguccaagcuccaggagaaccgcaagaucaucgaggcccagcgcaaggccauccaggagcuccaguucggcaacgagaaggucucccucaagcucgaggagggcauccaggagaacaaggaccucaucaaggagaacaacgccacccgccaccucugcaaccuccucaaggagaccugcgcccgcuccgccgagaagaccaagaaguacgaguacgagcgcgaggagacccgccaggucuacauggaccucaacaacaacaucgagaagaugaucaccgccuucgaggagcuccgcguccaggccgagaacucccgccucgagaugcacuucaagcucaaggaggacuacgagaagauccagcaccucgagcaggaguacaagaaggagaucaacgacaaggagaagcaggucucccuccuccucauccagaucaccgagaaggagaacaagaugaaggaccucaccuuccuccucgaggagucccgcgacaaggucaaccagcucgaggagaagaccaagcuccaguccgagaaccucaagcaguccaucgagaagcagcaccaccucaccaaggagcucgaggacaucaaggucucccuccagcgcuccgucuccacccagaaggcccucgaggaggaccuccagaucgccaccaagaccaucugccagcucaccgaggagaaggagacccagauggaggaguccaacaaggcccgcgccgcccacuccuucgucgucaccgaguucgagaccaccgucugcucccucgaggagcuccuccgcaccgagcagcagcgccucgagaagaacgaggaccagcucaagauccucaccauggagcuccagaagaaguccuccgagcucgaggagaugaccaagcucaccaacaacaaggaggucgagcucgaggagcucaagaagguccucggcgagaaggagacccuccucuacgagaacaagcaguucgagaagaucgccgaggagcucaagggcaccgagcaggagcucaucggccuccuccaggcccgcgagaaggagguccacgaccucgagauccagcucaccgccaucaccaccuccgagcaguacuacuccaaggaggucaaggaccucaagaccgagcucgagaacgagaagcucaagaacaccgagcucaccucccacugcaacaagcucucccucgagaacaaggagcucacccaggagaccuccgacaugacccucgagcucaagaaccagcaggaggacaucaacaacaacaagaagcaggaggagcgcaugcucaagcagaucgagaaccuccaggagaccgagacccagcuccgcaacgagcucgaguacguccgcgaggagcucaagcagaagcgcgacgaggucaagugcaagcucgacaaguccgaggagaacugcaacaaccuccgcaagcaggucgagaacaagaacaaguacaucgaggagcuccagcaggagaacaaggcccucaagaagaagggcaccgccgaguccaagcagcucaacgucuacgagaucaaggucaacaagcucgagcucgagcucgaguccgccaagcagaaguucggcgagaucaccgacaccuaccagaaggagaucgaggacaagaagaucuccgaggagaaccuccucgaggaggucgagaaggccaaggucaucgccgacgaggccgucaagcuccagaaggagaucgacaagcgcugccagcacaagaucgccgagauggucgcccucauggagaagcacaagcaccaguacgacaagaucaucgaggagcgcgacuccgagcucggccucuacaaguccaaggagcaggagcaguccucccuccgcgccucccucgagaucgagcucuccaaccucaaggccgagcuccucuccgucaagaagcagcucgagaucgagcgcgaggagaaggagaagcucaagcgcgaggccaaggagaacaccgccacccucaaggagaagaaggacaagaagacccagaccuuccuccucgagacccccgagaucuacuggaagcucgacuccaaggccguccccucccagaccgucucccgcaacuucaccuccgucgaccacggcaucuccaaggacaagcgcgacuaccucuggaccuccgccaagaacacccucuccaccccccuccccaaggccuacaccgucaagacccccaccaagcccaagcuccagcagcgcgagaaccucaacauccccaucgaggaguccaagaagaagcgcaagauggccuucgaguucgacaucaacuccgacuccuccgagaccaccgaccuccucuccauggucuccgaggaggagacccucaagacccucuaccgcaacaacaacccccccgccucccaccucugcgucaagacccccaagaaggcccccuccucccucaccacccccggcuccacccucaaguucggcgccauccgcaagaugcgcgaggaccgcugggccgucaucgccaagauggaccgcaagaagaagcucaaggaggccgagaagcucuucgucuga

SEQ ID NO: 1974 - RNA, 2931 nt, Artificial Sequence
  AAI44020 variant
auggagaagcagaagcccuucgcccucuucguccccccccgcuccuccuccucccaggucuccgccgucaagccccagacccucggcggcgacuccaccuucuucaaguccuucaacaagugcaccgaggacgacuucgaguuccccuucgccaagaccaaccucuccaagaacggcgagaacaucgacuccgaccccgcccuccagaaggucaacuuccuccccgucuucgagcaggucggcaacuccgacugccacuaccaggagggccucaaggacuccgaccucgagaacuccgagggccucucccgcgucuacuccaagcucuacaaggaggccgagaagaucaagaaguggaaggucuccaccgaggccgagcuccgccagaaggaguccaagcuccaggagaaccgcaagaucaucgaggcccagcgcaaggccauccaggagcuccaguucggcaacgagaaggucucccucaagcucgaggagggcauccaggagaacaaggaccucaucaaggagaacaacgccacccgccaccucugcaaccuccucaaggagaccugcgcccgcuccgccgagaagaccaagaaguacgaguacgagcgcgaggagacccgccaggucuacauggaccucaacuccaacaucgagaagaugaucaccgccuucgaggagcuccgcguccaggccgagaacucccgccucgagaugcacuucaagcucaaggaggacuacgagaagauccagcaccucgagcaggaguacaagaaggagaucaacgacaaggagaagcaggucucccuccuccucauccagaucaccgagaaggagaacaagaugaaggaccucaccuuccuccucgaggagucccgcgacaaggucaaccagcucgaggagaagaccaagcuccaguccgagaaccucaagcaguccaucgagaagcagcaccaccucaccaaggagcucgaggacaucaaggucucccuccagcgcuccgucuccacccagaaggcccucgaggaggaccuccagaucgccaccaagaccaucugccagcucaccgaggagaaggagacccagauggaggaguccaacaaggcccgcgccgcccacuccuucgucgucaccgaguucgagaccaccgucugcucccucgaggagcuccuccgcaccgagcagcagcgccucgagaagaacgaggaccagcucaagauccucaccauggagcuccagaagaaguccuccgagcucgaggagaugaccaagcucaccaacaacaaggaggucgagcucgaggagcucaagaagguccucggcgagaaggagacccuccucuacgagaacaagcaguucgagaagaucgccgaggagcucaagggcaccgagcaggagcucaucggccuccuccaggcccgcgagaaggagguccacgaccucgagauccagcucaccgccaucaccaccuccgagcaguacuacuccaaggaggucaaggaccucaagaccgagcucgagaacgagaagcucaagaacaccgagcucaccucccacugcaacaagcucucccucgagaacaaggagcucacccaggagaccuccgacaugacccucgagcucaagaaccagcaggaggacaucaacaacaacaagaagcaggaggagcgcaugcucaagcagaucgagaaccuccaggagaccgagacccagcuccgcaacgagcucgaguacguccgcgaggagcucaagcagaagcgcgacgaggucaagugcaagcucgacaaguccgaggagaacugcaacaaccuccgcaagcaggucgagaacaagaacaaguacaucgaggagcuccagcaggagaacaaggcccucaagaagaagggcaccgccgaguccaagcagcucaacgucuacgagaucaaggucaacaagcucgagcucgagcucgaguccgccaagcagaaguucggcgagaucaccgacaccuaccagaaggagaucgaggacaagaagaucuccgaggagaaccuccucgaggaggucgagaaggccaaggucaucgccgacgaggccgucaagcuccagaaggagaucgacaagcgcugccagcacaagaucgccgagauggucgcccucauggagaagcacaagcaccaguacgacaagaucaucgaggagcgcgacuccgagcucggccucuacaaguccaaggagcaggagcaguccucccuccgcgccucccucgagaucgagcucuccaaccucaaggccgagcuccucuccgucaagaagcagcucgagaucgagcgcgaggagaaggagaagcucaagcgcgaggccaaggagaacaccgccacccucaaggagaagaaggacaagaagacccagaccuuccuccucgagacccccgagaucuacuggaagcucgacuccaaggccguccccucccagaccgucucccgcaacuucaccuccgucgaccacggcaucuccaaggacaagcgcgacuaccucuggaccuccgccaagaacacccucuccaccccccuccccaaggccuacaccgucaagacccccaccaagcccaagcuccagcagcgcgagaaccucaacauccccaucgaggaguccaagaagaagcgcaagauggccuucgaguucgacaucaacuccgacuccuccgagaccaccgaccuccucuccauggucuccgaggaggagacccucaagacccucuaccgcaacaacaacccccccgccucccaccucugcgucaagacccccaagaaggcccccuccucccucaccacccccggcuccacccucaaguucggcgccauccgcaagaugcgcgaggaccgcugggccgucaucgccaagauggaccgcaagaagaagcucaaggaggccgagaagcucuucgucuga

SEQ ID NO: 1975 - RNA, 2931 nt, Artificial Sequence; identical to SEQ ID NO: 1973
  AAI26267 variant

SEQ ID NO: 1976 - RNA, 330 nt, Artificial Sequence
  AAI05300 variant
auggagaagcagaagcccuucgcccucuucguccccccccgcuccuccuccucccaggucuccgccgucaagccccagacccucggcggcgacuccaccuucuucaaguccuucaacaagugcaccgaggacgacuucgaguuccccuucgccaagaccaaccucuccaagaacggcgagaacaucgacuccgaccccgcccuccagaacgucaacuuccuccccguccucgagcaggucggcaacuccgacugccacuaccaggagggccucaaggacuccgaccucgagaacuccgagggccucucccgcgucuacuccaagcucuga

SEQ ID NO: 1977 - RNA, 1467 nt, Artificial Sequence
  BAF56181 variant
auguccgucgccuucgccgccccccgccagcgcggcaagggcgagaucacccccgccgccauccagaagaugcucgacgacaacaaccaccucauccagugcaucauggacucccagaacaagggcaagaccuccgagugcucccaguaccagcagaugcuccacaccaaccucgucuaccucgccaccaucgccgacuccaaccagaacaugcagucccuccuccccgccccccccacccagaacaugcccaugggccccggcggcaugaaccaguccggcccccccccccccccccgcucccacaacaugcccuccgacggcauggucggcggcggcccccccgccccccacaugcagaaccagaugaacggccagaugcccggccccaaccacaugcccaugcagggccccggccccaaccagcucaacaugaccaacuccuccaugaacaugcccuccuccucccacggcuccaugggcggcuacaaccacuccguccccuccucccaguccaugcccguccagaaccagaugaccaugucccagggccagcccaugggcaacuacggcccccgccccaacauguccaugcagcccaaccagggccccaugaugcaccagcagccccccucccagcaguacaacaugccccagggcggcggccagcacuaccagggccagcagccccccaugggcaugaugggccaggucaaccagggcaaccacaugaugggccagcgccagaucccccccuaccgccccccccagcagggccccccccagcaguacuccggccaggaggacuacuacggcgaccaguacucccacggcggccagggcccccccgagggcaugaaccagcaguacuaccccgacggccacaacgacuacggcuaccagcagcccuccuaccccgagcagggcuacgaccgccccuacgaggacuccucccagcacuacuacgagggcggcaacucccaguacggccagcagcaggacgccuaccagggcccccccccccagcagggcuaccccccccagcagcagcaguaccccggccagcagggcuaccccggccagcagcagggcuacggccccucccagggcggccccggcccccaguaccccaacuacccccagggccagggccagcaguacggcggcuaccgccccacccagcccggccccccccagcccccccagcagcgccccuacggcuacgaccagaucaugcccaagaagcccgccgaggacgagaacgacuccaagggcgucuccgaggccuccggcccccagaacgacggcaagcagcuccacccccccggcaaggccaacaucuccgagaagaucaacaagcgcuccggccccaagcgcggcaagcacgccuggacccaccgccuccgcgagcgcaagcagcucgucaucuacgaggagaucuccgaccccgaggaggacgacgaguga

SEQ ID NO: 1978 - RNA, 1374 nt, Artificial Sequence
  BAF56182 variant
auguccgucgccuucgccgccccccgccagcgcggcaagggcgagaucacccccgccgccauccagaagaugcucgacgacaacaaccaccucauccagugcaucauggacucccagaacaagggcaagaccuccgagugcucccaguaccagcagaugcuccacaccaaccucgucuaccucgccaccaucgccgacuccaaccagaacaugcagucccuccuccccgccccccccacccagaacaugcccaugggccccggcggcaugaaccaguccggcccccccccccccccccgcucccacaacaugcccuccgacggcauggucggcggcggcccccccgccccccacaugcagaaccagaugaacggccagaugcccggccccaaccacaugcccaugcagggccccggccccaaccagcucaacaugaccaacuccuccaugaacaugcccuccuccucccacggcuccaugggcggcuacaaccacuccguccccuccucccaguccaugcccguccagaaccagaugaccaugucccagggccagcccaugggcaacuacggcccccgccccaacauguccaugcagcccaaccagggccccaugaugcaccagcagccccccucccagcaguacaacaugccccagggcggcggccagcacuaccagggccagcagccccccaugggcaugaugggccaggucaaccagggcaaccacaugaugggccagcgccagaucccccccuaccgccccccccagcagggccccccccagcaguacuccggccaggaggacuacuacggcgaccaguacucccacggcggccagggcccccccgagggcaugaaccagcaguacuaccccgacggcaacucccaguacggccagcagcaggacgccuaccagggcccccccccccagcagggcuaccccccccagcagcagcaguaccccggccagcagggcuaccccggccagcagcagggcuacggccccucccagggcggccccggcccccaguaccccaacuacccccagggccagggccagcaguacggcggcuaccgccccacccagcccggccccccccagcccccccagcagcgccccuacggcuacgaccagaucaugcccaagaagcccgccgaggacgagaacgacuccaagggcgucuccgaggccuccggcccccagaacgacggcaagcagcuccacccccccggcaaggccaacaucuccgagaagaucaacaagcgcuccggccccaagcgcggcaagcacgccuggacccaccgccuccgcgagcgcaagcagcucgucaucuacgaggagaucuccgaccccgaggaggacgacgaguga

SEQ ID NO: 1979 - RNA, 1467 nt, Artificial Sequence
  BAF56183 variant
auguccgucgccuucgccgccccccgccagcgcggcaagggcgagaucacccccgccgccauccagaagaugcucgacgacaacaaccaccucauccagugcaucauggacucccagaacaagggcaagaccuccgagugcucccaguaccagcagaugcuccacaccaaccucgucuaccucgccaccaucgccgacuccaaccagaacaugcagucccuccuccccgccccccccacccagaacaugcccaugggccccggcggcaugaaccaguccggcccccccccccccccccgcucccacaacaugcccuccgacggcauggucggcggcggcccccccgccccccacaugcagaaccagaugaacggccagaugcccggccccaaccacaugcccaugcagggccccggccccaaccagcucaacaugaccaacuccuccaugaacaugcccuccuccucccacggcuccaugggcggcuacaaccacuccguccccuccucccaguccaugcccguccagaaccagaugaccaugucccagggccagcccaugggcaacuacggcccccgccccaacauguccaugcagcccaaccagggccccaugaugcaccagcagccccccucccagcaguacaacaugccccagggcggcggccagcacuaccagggccagcagccccccaugggcaugaugggccaggucaaccagggcaaccacaugaugggccagcgccagaucccccccuaccgccccccccagcagggccccccccagcaguacuccggccaggaggacuacuacggcgaccaguacucccacggcggccagggcccccccgagggcaugaaccagcaguacuaccccgacggccacaacgacuacggcuaccagcagcccuccuaccccgagcagggcuacgaccgccccuacgaggacuccucccagcacuacuacgagggcggcaacucccaguacggccagcagcaggacgccuaccagggcccccccccccagcagggcuaccccccccagcagcagcaguaccccggccagcagggcuaccccggccagcagcagggcuacggccccucccagggcggccccggcccccaguaccccaacuacccccagggccagggccagcaguacggcggcuaccgccccacccagcccggccccccccagcccccccagcagcgccccuacggcuacgaccagaucaugcccaagaagcccgccgaggagggcaacgacuccgaggagguccccgaggccuccggcccccagaacgacggcaaggagcucugcccccccggcaagcccaccaccuccgagaagauccacgagcgcuccggccccaagcgcggcgagcacgccuggacccaccgccuccgcgagcgcaagcagcucgucaucuacgaggagaucuccgaccccgaggaggacgacgaguga

SEQ ID NO: 1980 - RNA, 1374 nt, Artificial Sequence
  BAF56184 variant
auguccgucgccuucgccgccccccgccagcgcggcaagggcgagaucacccccgccgccauccagaagaugcucgacgacaacaaccaccucauccagugcaucauggacucccagaacaagggcaagaccuccgagugcucccaguaccagcagaugcuccacaccaaccucgucuaccucgccaccaucgccgacuccaaccagaacaugcagucccuccuccccgccccccccacccagaacaugcccaugggccccggcggcaugaaccaguccggcccccccccccccccccgcucccacaacaugcccuccgacggcauggucggcggcggcccccccgccccccacaugcagaaccagaugaacggccagaugcccggccccaaccacaugcccaugcagggccccggccccaaccagcucaacaugaccaacuccuccaugaacaugcccuccuccucccacggcuccaugggcggcuacaaccacuccguccccuccucccaguccaugcccguccagaaccagaugaccaugucccagggccagcccaugggcaacuacggcccccgccccaacauguccaugcagcccaaccagggccccaugaugcaccagcagccccccucccagcaguacaacaugccccagggcggcggccagcacuaccagggccagcagccccccaugggcaugaugggccaggucaaccagggcaaccacaugaugggccagcgccagaucccccccuaccgccccccccagcagggccccccccagcaguacuccggccaggaggacuacuacggcgaccaguacucccacggcggccagggcccccccgagggcaugaaccagcaguacuaccccgacggcaacucccaguacggccagcagcaggacgccuaccagggcccccccccccagcagggcuaccccccccagcagcagcaguaccccggccagcagggcuaccccggccagcagcagggcuacggccccucccagggcggccccggcccccaguaccccaacuacccccagggccagggccagcaguacggcggcuaccgccccacccagcccggccccccccagcccccccagcagcgccccuacggcuacgaccagaucaugcccaagaagcccgccgaggagggcaacgacuccgaggagguccccgaggccuccggcccccagaacgacggcaaggagcucugcccccccggcaagcccaccaccuccgagaagauccacgagcgcuccggccccaagcgcggcgagcacgccuggacccaccgccuccgcgagcgcaagcagcucgucaucuacgaggagaucuccgaccccgaggaggacgacgaguga

SEQ ID NO: 1981 - RNA, 336 nt, Artificial Sequence
  AAI05590 variant
augaagaccaacgacaccuacaugaaguucuccuggcucaccguccccgagaagucccucgacaaggagcaccgcugcaucguccgccacgagaacaacaagaacggcgucgaccaggagaucaucuucccccccaucaagaccgacgucaucaccauggaccccaaggacaacugcuccaaggacgccaacgacacccuccuccuccagcucaccaacaccuccgccuacuacauguaccuccuccuccuccucaaguccgucgucuacuucgccaucaucaccugcugccuccuccgccgcaccgccuucugcugcaacggcgagaaguccuga

SEQ ID NO: 1982 - RNA, 177 nt, Artificial Sequence
  AAG29337 variant
augcagauguucccccccuccccccucuucuucuuccuccagcuccucaagcaguccucccgccgccucgagcacaccuucgucuuccuccgcaacuucucccucaugcuccuccgcuacaucggcaagaagcgccgcgccacccgcuucugggacccccgccgcggcacccccuga

SEQ ID NO: 1983 - RNA, 1131 nt, Artificial Sequence
  AAF26776 variant
auggccaacuccgccaacaccaacaccguccccaagcucuaccgcuccgucaucgaggacgucaucaacgacguccgcgacaucuuccucgacgacggcgucgacgagcagguccucauggagcucaagacccucugggagaacaagcucaugcagucccgcgccgucgacggcuuccacuccgaggagcagcagcuccuccuccagguccagcagcagcaccagccccagcagcagcagcaccaccaccaccaccaccaccagcaggcccagccccagcagaccgucccccagcaggcccagacccagcagguccucauccccgccucccagcaggccaccgccccccaggucaucguccccgacuccaagcucauccagcacaugaacgccuccaacauguccgccgccgccaccgccgccacccucgcccuccccgccggcgucacccccguccagcagauccucaccaacuccggccagcuccuccaggucguccgcgccgccaacggcgcccaguacaucuuccagccccagcaguccgucguccuccagcagcaggucaucccccagaugcagcccggcggcguccaggcccccgucauccagcagguccucgccccccuccccggcggcaucuccccccagaccggcgucaucauccagccccagcagauccucuucaccggcaacaagacccaggucauccccaccaccgucgccgcccccacccccgcccaggcccagaucaccgccaccggccagcagcagccccaggcccagcccgcccagacccaggccccccucguccuccaggucgacggcaccggcgacaccuccuccgaggaggacgaggacgaggaggaggacuacgacgacgacgaggaggaggacaaggagaaggacggcgccgaggacggccaggucgaggaggagccccucaacuccgaggacgacgucuccgacgaggagggccaggagcucuucgacaccgagaacgucgucgucugccaguacgacaagauccaccgcuccaagaacaaguggaaguuccaccucaaggacggcaucaugaaccucaacggccgcgacuacaucuucuccaaggccaucggcgacgccgagugguga

SEQ ID NO: 1984 - RNA, 1173 nt, Artificial Sequence
  AAH00125 variant
augccccccuccggccuccgccuccuccuccuccuccucccccuccucuggcuccucguccucacccccggccgccccgccgccggccucuccaccugcaagaccaucgacauggagcucgucaagcgcaagcgcaucgaggccauccgcggccagauccucuccaagcuccgccucgccuccccccccucccagggcgaggucccccccggcccccuccccgaggccguccucgcccucuacaacuccacccgcgaccgcgucgccggcgaguccgccgagcccgagcccgagcccgaggccgacuacuacgccaaggaggucacccgcguccucauggucgagacccacaacgagaucuacgacaaguucaagcaguccacccacuccaucuacauguucuucaacaccuccgagcuccgcgaggccguccccgagcccguccuccucucccgcgccgagcuccgccuccuccgccucaagcucaaggucgagcagcacgucgagcucuaccagaaguacuccaacaacuccuggcgcuaccucuccaaccgccuccucgcccccuccgacucccccgaguggcucuccuucgacgucaccggcgucguccgccaguggcucucccgcggcggcgagaucgagggcuuccgccucuccgcccacugcuccugcgacucccgcgacaacacccuccaggucgacaucaacggcuucaccaccggccgccgcggcgaccucgccaccauccacggcaugaaccgccccuuccuccuccucauggccaccccccucgagcgcgcccagcaccuccaguccucccgccaccgccgcgcccucgacaccaacuacugcuucuccuccaccgagaagaacugcugcguccgccagcucuacaucgacuuccgcaaggaccucggcuggaaguggauccacgagcccaagggcuaccacgccaacuucugccucggccccugccccuacaucuggucccucgacacccaguacuccaagguccucgcccucuacaaccagcacaaccccggcgccuccgccgcccccugcugcgucccccaggcccucgagccccuccccaucgucuacuacgucggccgcaagcccaaggucgagcagcucuccaacaugaucguccgcuccugcaagugcuccuga

SEQ ID NO: 1985 - RNA, 1704 nt, Artificial Sequence
  AAT70724 variant
augggccgcggccuccuccgcggccucuggccccuccacaucguccucuggacccgcaucgccuccaccauccccccccacguccagaaguccgucaacaacgacaugaucgucaccgacaacaacggcgccgucaaguucccccagcucugcaaguucugcgacguccgcuucuccaccugcgacaaccagaaguccugcauguccaacugcuccaucaccuccaucugcgagaagccccaggaggucugcgucgccgucuggcgcaagaacgacgagaacaucacccucgagaccgucugccacgaccccaagcuccccuaccacgacuucauccucgaggacgccgccucccccaagugcaucaugaaggagaagaagaagcccggcgagaccuucuucaugugcuccugcuccuccgacgagugcaacgacaacaucaucuucuccgaggaguacaacaccuccaaccccgaccuccuccucgucaucuuccaggucaccggcaucucccuccuccccccccucggcgucgccaucuccgucaucaucaucuucuacugcuaccgcgucaaccgccagcagaagcucuccuccaccugggagaccggcaagacccgcaagcucauggaguucuccgagcacugcgccaucauccucgaggacgaccgcuccgacaucuccuccaccugcgccaacaacaucaaccacaacaccgagcuccuccccaucgagcucgacacccucgucggcaagggccgcuucgccgaggucuacaaggccaagcucaagcagaacaccuccgagcaguucgagaccgucgccgucaagaucuuccccuacgaggaguacgccuccuggaagaccgagaaggacaucuucuccgacaucaaccucaagcacgagaacauccuccaguuccucaccgccgaggagcgcaagaccgagcucggcaagcaguacuggcucaucaccgccuuccacgccaagggcaaccuccaggaguaccucacccgccacgucaucuccugggaggaccuccgcaagcucggcuccucccucgcccgcggcaucgcccaccuccacuccgaccacacccccugcggccgccccaagaugcccaucguccaccgcgaccucaaguccuccaacauccucgucaagaacgaccucaccugcugccucugcgacuucggccucucccuccgccucgaccccacccucuccgucgacgaccucgccaacuccggccaggucggcaccgcccgcuacauggcccccgagguccucgagucccgcaugaaccucgagaacgucgaguccuucaagcagaccgacgucuacuccauggcccucguccucugggagaugaccucccgcugcaacgccgucggcgaggucaaggacuacgagccccccuucggcuccaagguccgcgagcaccccugcgucgaguccaugaaggacaacguccuccgcgaccgcggccgccccgagauccccuccuucuggcucaaccaccagggcauccagauggucugcgagacccucaccgagugcugggaccacgaccccgaggcccgccucaccgcccagugcgucgccgagcgcuucuccgagcucgagcaccucgaccgccucuccggccgcuccugcuccgaggagaagauccccgaggacggcucccucaacaccaccaaguga

SEQ ID NO: 1986 - RNA, 2055 nt, Artificial Sequence
  BAG35778 variant
augauggacgccuccaaggagcuccagguccuccacaucgacuuccucaaccaggacaacgccgucucccaccacaccugggaguuccagaccuccucccccgucuuccgccgcggccaggucuuccaccuccgccucguccucaaccagcccccccaguccuaccaccagcucaagcucgaguucuccaccggccccaaccccuccaucgccaagcacacccucgucguccucgacccccgcacccccuccgaccacuacaacuggcaggccacccuccagaacgaguccggcaaggaggucaccgucgccgucaccuccucccccaacgccauccucggcaaguaccagcucaacgucaagaccggcaaccacauccucaaguccgaggagaacauccucuaccuccucuucaaccccuggugcaaggaggacauggucuucaugcccgacgaggacgagcgcaaggaguacauccucaacgacaccggcugccacuacgucggcgccgcccgcuccaucaagugcaagcccuggaacuucggccaguucgagaagaacguccucgacugcugcaucucccuccucaccgaguccucccucaagcccaccgaccgccgcgaccccguccucgucugccgcgccaugugcgccaugauguccuucgagaagggccagggcguccucaucggcaacuggaccggcgacuacgagggcggcaccgcccccuacaaguggaccggcuccgcccccauccuccagcaguacuacaacaccaagcaggccgucugcuucggccagugcugggucuucgccggcauccucaccaccguccuccgcgcccucggcauccccgcccgcuccgucaccggcuucgacuccgcccacgacaccgagcgcaaccucaccgucgacaccuacgucaacgagaacggcgagaagaucaccuccaugacccacgacuccgucuggaacuuccacgucuggaccgacgccuggaugaagcgccccgaccuccccaagggcuacgacggcuggcaggccgucgacgccaccccccaggagcgcucccagggcgucuucugcugcggccccuccccccucaccgccauccgcaagggcgacaucuucaucgucuacgacacccgcuucgucuucuccgaggucaacggcgaccgccucaucuggcucgucaagauggucaacggccaggaggagcuccacgucaucuccauggagaccaccuccaucggcaagaacaucuccaccaaggccgucggccaggaccgccgccgcgacaucaccuacgaguacaaguaccccgagggcuccuccgaggagcgccaggucauggaccacgccuuccuccuccucuccuccgagcgcgagcaccgccgccccgucaaggagaacuuccuccacauguccguccaguccgacgacguccuccucggcaacuccgucaacuucaccgucauccucaagcgcaagaccgccgcccuccagaacgucaacauccucggcuccuucgagcuccagcucuacaccggcaagaagauggccaagcucugcgaccucaacaagaccucccagauccagggccaggucuccgaggucacccucacccucgacuccaagaccuacaucaacucccucgccauccucgacgacgagcccgucauccgcggcuucaucaucgccgagaucgucgaguccaaggagaucauggccuccgaggucuucaccuccuuccaguaccccgaguucuccaucgagcuccccaacaccggccgcaucggccagcuccucgucugcaacugcaucuucaagaacacccucgccaucccccucaccgacgucaaguucucccucgagucccucggcaucuccucccuccagaccuccgaccacggcaccguccagcccggcgagaccauccagucccagaucaagugcacccccaucaagaccggccccaagaaguucaucgucaagcucuccuccaagcaggucaaggagaucaacgcccagaagaucguccucaucaccaaguga

SEQ ID NO: 1987 - RNA, 3375 nt, Artificial Sequence
  CCDS6519.1 variant
auggacucccucgccucccucguccucugcggcgucucccuccuccucuccggcaccgucgagggcgccauggaccucauccucaucaacucccucccccucgucuccgacgccgagaccucccucaccugcaucgccuccggcuggcgcccccacgagcccaucaccaucggccgcgacuucgaggcccucaugaaccagcaccaggacccccucgaggucacccaggacgucacccgcgagugggccaagaaggucgucuggaagcgcgagaaggccuccaagaucaacggcgccuacuucugcgagggccgcguccgcggcgaggccauccgcauccgcaccaugaagaugcgccagcaggccuccuuccuccccgccacccucaccaugaccgucgacaagggcgacaacgucaacaucuccuucaagaagguccucaucaaggaggaggacgccgucaucuacaagaacggcuccuucauccacuccgucccccgccacgagguccccgacauccucgagguccaccucccccacgcccagccccaggacgccggcgucuacuccgcccgcuacaucggcggcaaccucuucaccuccgccuucacccgccucaucguccgccgcugcgaggcccagaaguggggccccgagugcaaccaccucugcaccgccugcaugaacaacggcgucugccacgaggacaccggcgagugcaucugcccccccggcuucaugggccgcaccugcgagaaggccugcgagcuccacaccuucggccgcaccugcaaggagcgcugcuccggccaggagggcugcaaguccuacgucuucugccuccccgaccccuacggcugcuccugcgccaccggcuggaagggccuccagugcaacgaggccugccaccccggcuucuacggccccgacugcaagcuccgcugcuccugcaacaacggcgagaugugcgaccgcuuccagggcugccucugcucccccggcuggcagggccuccagugcgagcgcgagggcauccagcgcaugacccccaagaucgucgaccuccccgaccacaucgaggucaacuccggcaaguucaaccccaucugcaaggccuccggcuggccccuccccaccaacgaggagaugacccucgucaagcccgacggcaccguccuccaccccaaggacuucaaccacaccgaccacuucuccgucgccaucuucaccauccaccgcauccucccccccgacuccggcgucugggucugcuccgucaacaccgucgccggcauggucgagaagcccuucaacaucuccgucaagguccuccccaagccccucaacgcccccaacgucaucgacaccggccacaacuucgccgucaucaacaucuccuccgagcccuacuucggcgacggccccaucaaguccaagaagcuccucuacaagcccgucaaccacuacgaggccuggcagcacauccaggucaccaacgagaucgucacccucaacuaccucgagccccgcaccgaguacgagcucugcguccagcucguccgccgcggcgagggcggcgagggccaccccggccccguccgccgcuucaccaccgccuccaucggccucccccccccccgcggccucaaccuccuccccaagucccagaccacccucaaccucaccuggcagcccaucuuccccuccuccgaggacgacuucuacgucgaggucgagcgccgcuccguccagaaguccgaccagcagaacaucaagguccccggcaaccucaccuccguccuccucaacaaccuccacccccgcgagcaguacgucguccgcgcccgcgucaacaccaaggcccagggcgagugguccgaggaccucaccgccuggacccucuccgacauccuccccccccagcccgagaacaucaagaucuccaacaucacccacuccuccgccgucaucuccuggaccauccucgacggcuacuccaucuccuccaucaccauccgcuacaagguccagggcaagaacgaggaccagcacgucgacgucaagaucaagaacgccaccaucacccaguaccagcucaagggccucgagcccgagaccgccuaccaggucgacaucuucgccgagaacaacaucggcuccuccaaccccgccuucucccacgagcucgucacccuccccgagucccaggcccccgccgaccucggcggcggcaagaugcuccucaucgccauccucggcuccgccggcaugaccugccucaccguccuccucgccuuccucaucauccuccagcucaagcgcgccaacguccagcgccgcauggcccaggccuuccagaacguccgcgaggagcccgccguccaguucaacuccggcacccucgcccucaaccgcaaggucaagaacaaccccgaccccaccaucuaccccguccucgacuggaacgacaucaaguuccaggacgucaucggcgagggcaacuucggccagguccucaaggcccgcaucaagaaggacggccuccgcauggacgccgccaucaagcgcaugaaggaguacgccuccaaggacgaccaccgcgacuucgccggcgagcucgagguccucugcaagcucggccaccaccccaacaucaucaaccuccucggcgccugcgagcaccgcggcuaccucuaccucgccaucgaguacgccccccacggcaaccuccucgacuuccuccgcaagucccgcguccucgagaccgaccccgccuucgccaucgccaacuccaccgccuccacccucuccucccagcagcuccuccacuucgccgccgacgucgcccgcggcauggacuaccucucccagaagcaguucauccaccgcgaccucgccgcccgcaacauccucgucggcgagaacuacgucgccaagaucgccgacuucggccucucccgcggccaggaggucuacgucaagaagaccaugggccgccuccccguccgcuggauggccaucgagucccucaacuacuccgucuacaccaccaacuccgacgucugguccuacggcguccuccucugggagaucgucucccucggcggcacccccuacugcggcaugaccugcgccgagcucuacgagaagcucccccagggcuaccgccucgagaagccccucaacugcgacgacgaggucuacgaccucaugcgccagugcuggcgcgagaagcccuacgagcgccccuccuucgcccagauccucgucucccucaaccgcaugcucgaggagcgcaagaccuacgucaacaccacccucuacgagaaguucaccuacgccggcaucgacugcuccgccgaggaggccgccuga

SEQ ID NO: 1988 - RNA, 1791 nt, Artificial Sequence
  BAF84950 variant
auggccgacgccgaggcccgcgccgaguuccccgaggaggcccgccccgaccgcggcacccuccagguccuccaggacauggccucccgccuccgcauccacuccauccgcgccaccugcuccaccuccuccggccaccccaccuccugcuccuccuccuccgagaucauguccguccucuucuucuacaucaugcgcuacaagcaguccgaccccgagaaccccgacaacgaccgcuucguccucgccaagcgccucuccuucgucgacgucgccaccggcuggcucggccagggccucggcgucgccugcggcauggccuacaccggcaaguacuucgaccgcgccuccuaccgcgucuucugccucauguccgacggcgaguccuccgagggcuccgucugggaggccauggccuucgccuccuacuacucccucgacaaccucgucgccaucuucgacgucaaccgccucggccacuccggcgcccuccccgccgagcacugcaucaacaucuaccagcgccgcugcgaggccuucggcuggaacaccuacgucgucgacggccgcgacgucgaggcccucugccaggucuucuggcaggccucccaggucaagcacaagcccaccgccgucgucgccaagaccuucaagggccgcggcacccccuccaucgaggacgccgaguccuggcacgccaagcccaugccccgcgagcgcgccgacgccaucaucaagcucaucgagucccagauccagaccucccgcaaccucgacccccagccccccaucgaggacucccccgaggucaacaucaccgacguccgcaugaccuccccccccgacuaccgcgucggcgacaagaucgccacccgcaaggccugcggccucgcccucgccaagcucggcuacgccaacaaccgcgucgucguccucgacggcgacacccgcuacuccaccuucuccgagaucuucaacaaggaguaccccgagcgcuucaucgagugcuucauggccgagcagaacauggucuccgucgcccucggcugcgccucccgcggccgcaccaucgccuucgccuccaccuucgccgccuuccucacccgcgccuucgaccacauccgcaucggcggccucgccgaguccaacaucaacaucaucggcucccacugcggcgucuccgucggcgacgacggcgccucccagauggcccucgaggacaucgccauguuccgcaccauccccaagugcaccaucuucuaccccaccgacgccgucuccaccgagcacgccgucgcccucgccgccaacgccaagggcaugugcuucauccgcaccacccgccccgagaccauggucaucuacaccccccaggagcgcuucgagaucggccaggccaagguccuccgccacugcgucuccgacaaggucaccgucaucggcgccggcaucaccgucuacgaggcccucgccgccgccgacgagcucuccaagcaggacaucuucauccgcgucaucgaccucuucaccaucaagccccucgacgucgccaccaucgucuccuccgccaaggccaccgagggccgcaucaucaccgucgaggaccacuacccccagggcggcaucggcgaggccgucugcgccgccgucuccauggaccccgacauccagguccacucccucgccgucuccggcgucccccaguccggcaaguccgaggagcuccucgacauguacggcaucuccgcccgccacaucaucgucgccgucaagugcaugcuccucaacuga

SEQ ID NO: 1989 - RNA, 861 nt, Artificial Sequence
  EAW88722 variant
auggccgaggacggcgaggaggccgaguuccacuucgccgcccucuacaucuccggccaguggccccgccuccgcgccgacaccgaccuccagcgccucggcuccuccgccauggcccccucccgcaaguucuucgucggcggcaacuggaagaugaacggccgcaagcagucccucggcgagcucaucggcacccucaacgccgccaagguccccgccgacaccgaggucgucugcgccccccccaccgccuacaucgacuucgcccgccagaagcucgaccccaagaucgccgucgccgcccagaacugcuacaaggucaccaacggcgccuucaccggcgagaucucccccggcaugaucaaggacugcggcgccaccugggucguccucggccacuccgagcgccgccacgucuucggcgaguccgacgagcucaucggccagaaggucgcccacgcccucgccgagggccucggcgucaucgccugcaucggcgagaagcucgacgagcgcgaggccggcaucaccgagaaggucgucuucgagcagaccaaggucaucgccgacaacgucaaggacugguccaaggucguccucgccuacgagcccgucugggccaucggcaccggcaagaccgccaccccccagcaggcccaggagguccacgagaagcuccgcggcuggcucaaguccaacgucuccgacgccgucgcccaguccacccgcaucaucuacggcggcuccgucaccggcgccaccugcaaggagcucgccucccagcccgacgucgacggcuuccucgucggcggcgccucccucaagcccgaguucgucgacaucaucaacgccaagcaguga

SEQ ID NO: 1990 - RNA, 357 nt, Artificial Sequence
  CAA72108 variant
augccccucgucgucgccgucaucuucuucucccucugggucuucgcccucggccagcucgagcagcccgagaucuccaucucccgccccgccaacaaguccgcccacaucuccuggaaggccuccauccagggcuucuccuccaagaucauccacugguacuggcagaagcccaacaagggccucgaguaccuccuccacgucuuccucaccaucuccgcccaggacugcuccggcggcaagaccaagaagcucgaggucuccaagaacgcccacaccuccaccuccacccucaagaucaaguuccucgagaaggaggacgaggucgucuaccacugcgccugcuggauccgccac

SEQ ID NO: 1991 - RNA, 414 nt, Artificial Sequence
  EAL23985 variant
augcucucccuccuccacaccuccacccucgccguccucggcgcccucugcgucuacggcgccggccaccucgagcagccccagaucuccuccaccaagacccucuccaagaccgcccgccucgagugcgucgucuccggcaucaccaucuccgccaccuccgucuacugguaccgcgagcgccccggcgaggucauccaguuccucgucuccaucuccuacgacggcaccguccgcaaggaguccggcauccccuccggcaaguucgaggucgaccgcauccccgagaccuccaccuccacccucaccauccacaacgucgagaagcaggacaucgccaccuacuacugcgcccucugggagguccacuccucccgccaguucgagcccucccacuccaucaacgucuacuga

SEQ ID NO: 1992 - RNA, 366 nt, Artificial Sequence
  CAA30181 variant
augcucucccuccuccacaccuccacccucgccguccucggcgcccucugcgucuacggcgccggccaccucgagcagccccagaucuccuccaccaagacccucuccaagaccgcccgccucgagugcgucgucuccggcaucaccaucuccgccaccuccgucuacugguaccgcgagcgccccggcgaggucauccaguuccucgucuccaucuccuacgacggcaccguccgcaaggaguccggcauccccuccggcaaguucgaggucgaccgcauccccgagaccuccaccuccacccucaccauccacaacgucgagaagcaggacaucgccaccuacuacugcgcccucugggagguc

SEQ ID NO: 1993 - RNA, 366 nt, Artificial Sequence
  CAA33345 variant
augcucucccuccuccacaccuccacccucgccguccucggcgcccucugcgucuacggcgccggccaccucgagcagccccagaucuccuccaccaagacccucuccaagaccgcccgccucgagugcgucgucuccggcaucaagaucuccgccaccuccgucuacugguaccgcgagcgccccggcgaggucauccaguuccucgucuccaucuccuacgacggcaccguccgcaaggaguccggcauccccuccggcaaguucgaggucgaccgcauccccgagaccuccaccuccacccucaccauccacaacgucgagaagcaggacaucgccaccuacuacugcgcccucugggagguc

SEQ ID NO: 1994 - RNA, 2382 nt, Artificial Sequence
  AAA93251 variant
augauggccgcccucuaccccuccaccgaccucuccggcgccuccuccuccucccuccccuccucccccuccuccuccucccccaacgaggucauggcccucaaggacguccgcgaggucaaggaggagaacacccucaacgagaagcucuuccuccucgccugcgacaagggcgacuacuacauggucaagaagauccucgaggagaacuccuccggcgaccucaacaucaacugcgucgacguccucggccgcaacgccgucaccaucaccaucgagaacgagaaccucgacauccuccagcuccuccucgacuacggcugccaguccgccgacgcccuccucgucgccaucgacuccgaggucgucggcgccgucgacauccuccucaaccaccgccccaagcgcuccucccgccccaccaucgucaagcucauggagcgcauccagaaccccgaguacuccaccaccauggacgucgcccccgucauccucgccgcccaccgcaacaacuacgagauccucaccaugcuccucaagcaggacgucucccuccccaagccccacgccgucggcugcgagugcacccucugcuccgccaagaacaagaaggacucccuccgccacucccgcuuccgccucgacaucuaccgcugccucgccucccccgcccucaucaugcucaccgaggaggaccccauccuccgcgccuucgagcucuccgccgaccucaaggagcucucccucgucgaggucgaguuccgcaacgacuacgaggagcucgcccgccagugcaagauguucgccaaggaccuccucgcccaggcccgcaacucccgcgagcucgaggucauccucaaccacaccuccuccgacgagccccucgacaagcgcggccuccucgaggagcgcaugaaccucucccgccucaagcucgccaucaaguacaaccagaaggaguucgucucccaguccaacugccagcaguuccucaacaccgucugguucggccagauguccggcuaccgccgcaagcccaccugcaagaagaucaugaccguccucaccgucggcaucuucuggcccguccucucccucugcuaccucaucgcccccaagucccaguucggccgcaucauccacacccccuucaugaaguucaucauccacggcgccuccuacuucaccuuccuccuccuccucaaccucuacucccucgucuacaacgaggacaagaagaacaccaugggccccgcccucgagcgcaucgacuaccuccucauccucuggaucaucggcaugaucugguccgacaucaagcgccucugguacgagggccucgaggacuuccucgaggagucccgcaaccagcucuccuucgucaugaacucccucuaccucgccaccuucgcccucaaggucgucgcccacaacaaguuccacgacuucgccgaccgcaaggacugggacgccuuccaccccacccucgucgccgagggccucuucgccuucgccaacguccucuccuaccuccgccucuucuucauguacaccaccuccuccauccucggcccccuccagaucuccaugggccagaugcuccaggacuucggcaaguuccucggcauguuccuccucguccucuucuccuucaccaucggccucacccagcucuacgacaagggcuacaccuccaaggagcagaaggacugcgucggcaucuucugcgagcagcaguccaacgacaccuuccacuccuucaucggcaccugcuucgcccucuucugguacaucuucucccucgcccacgucgccaucuucgucacccgcuucuccuacggcgaggagcuccaguccuucgucggcgccgucaucgucggcaccuacaacgucgucgucgucaucguccucaccaagcuccucgucgccaugcuccacaaguccuuccagcucaucgccaaccacgaggacaaggaguggaaguucgcccgcgccaagcucuggcucuccuacuucgacgacaagugcacccuccccccccccuucaacaucauccccucccccaagaccaucugcuacaugaucuccucccucuccaaguggaucugcucccacaccuccaagggcaaggucaagcgccagaacucccucaaggaguggcgcaaccucaagcagaagcgcgacgagaacuaccagaaggucaugugcugccucguccaccgcuaccucaccuccaugcgccagaagaugcaguccaccgaccaggccaccgucgagaaccucaacgagcuccgccaggaccucuccaaguuccgcaacgagauccgcgaccuccucggcuuccgcaccuccaaguacgccauguucuacccccgcaacuga

SEQ ID NO: 1995 - RNA, 3315 nt, Artificial Sequence
  AAZ73614 variant
auguccuuccgcgccgcccgccucuccaugcgcaaccgccgcaacgacacccucgacuccacccgcacccucuacuccuccgccucccgcuccaccgaccucuccuacuccgaguccgaccucgucaacuucauccaggccaacuucaagaagcgcgagugcgucuucuucaccaaggacuccaaggccaccgagaacgucugcaagugcggcuacgcccagucccagcacauggagggcacccagaucaaccaguccgagaaguggaacuacaagaagcacaccaaggaguuccccaccgacgccuucggcgacauccaguucgagacccucggcaagaagggcaaguacauccgccucuccugcgacaccgacgccgagauccucuacgagcuccucacccagcacuggcaccucaagacccccaaccucgucaucuccgucaccggcggcgccaagaacuucgcccucaagccccgcaugcgcaagaucuucucccgccucaucuacaucgcccaguccaagggcgccuggauccucaccggcggcacccacuacggccucaugaaguacaucggcgaggucguccgcgacaacaccaucucccgcuccuccgaggagaacaucgucgccaucggcaucgccgccuggggcauggucuccaaccgcgacacccucauccgcaacugcgacgccgagggcuacuuccucgcccaguaccucauggacgacuucacccgcgacccccucuacauccucgacaacaaccacacccaccuccuccucgucgacaacggcugccacggccaccccaccgucgaggccaagcuccgcaaccagcucgagaaguacaucuccgagcgcaccauccaggacuccaacuacggcggcaagauccccaucgucugcuucgcccagggcggcggcaaggagacccucaaggccaucaacaccuccaucaagaacaagauccccugcgucgucgucgagggcuccggccagaucgccgacgucaucgccucccucgucgaggucgaggacgcccucaccuccuccgccgucaaggagaagcucguccgcuuccucccccgcaccgucucccgccuccccgaggaggagaccgaguccuggaucaaguggcucaaggagauccucgagugcucccaccuccucaccgucaucaagauggaggaggccggcgacgagaucgucuccaacgccaucuccuacgcccucuacaaggccuucuccaccuccgagcaggacaaggacaacuggaacggccagcucaagcuccuccucgaguggaaccagcucgaccucgccaacgacgagaucuucaccaacgaccgccgcugggaguccgccgaccuccaggaggucauguucaccgcccucaucaaggaccgccccaaguucguccgccucuuccucgagaacggccucaaccuccgcaaguuccucacccacgacguccucaccgagcucuucuccaaccacuucuccacccucgucuaccgcaaccuccagaucgccaagaacuccuacaacgacgcccuccucaccuucgucuggaagcucgucgccaacuuccgccgcggcuuccgcaaggaggaccgcaacggccgcgacgagauggacaucgagcuccacgacgucucccccaucacccgccacccccuccaggcccucuucaucugggccauccuccagaacaagaaggagcucuccaaggucaucugggagcagacccgcggcugcacccucgccgcccucggcgccuccaagcuccucaagacccucgccaaggucaagaacgacaucaacgccgccggcgaguccgaggagcucgccaacgaguacgagacccgcgccgucgagcucuucaccgagugcuacuccuccgacgaggaccucgccgagcagcuccucgucuacuccugcgaggccuggggcggcuccaacugccucgagcucgccgucgaggccaccgaccagcacuucaucgcccagcccggcguccagaacuuccucuccaagcagugguacggcgagaucucccgcgacaccaagaacuggaagaucauccucugccucuucaucaucccccucgucggcugcggcuucgucuccuuccgcaagaagcccgucgacaagcacaagaagcuccucugguacuacgucgccuucuucaccucccccuucgucgucuucuccuggaacgucgucuucuacaucgccuuccuccuccucuucgccuacguccuccucauggacuuccacuccgucccccacccccccgagcucguccucuacucccucgucuucguccucuucugcgacgagguccgccagugguacgucaacggcgucaacuacuucaccgaccucuggaacgucauggacacccucggccucuucuacuucaucgccggcaucgucuuccgccuccacuccuccaacaaguccucccucuacuccggccgcgucaucuucugccucgacuacaucaucuucacccuccgccucauccacaucuucaccgucucccgcaaccucggccccaagaucaucaugcuccagcgcaugcucaucgacgucuucuucuuccucuuccucuucgccgucuggauggucgccuucggcgucgcccgccagggcauccuccgccagaacgagcagcgcuggcgcuggaucuuccgcuccgucaucuacgagcccuaccucgccauguucggccagguccccuccgacgucgacggcaccaccuacgacuucgcccacugcaccuucaccggcaacgaguccaagccccucugcgucgagcucgacgagcacaaccucccccgcuuccccgaguggaucaccaucccccucgucugcaucuacaugcucuccaccaacauccuccucgucaaccuccucgucgccauguucggcuacaccgucggcaccguccaggagaacaacgaccaggucuggaaguuccagcgcuacuuccucguccaggaguacugcucccgccucaacauccccuuccccuucaucgucuucgccuacuucuacauggucgucaagaagugcuucaagugcugcugcaaggagaagaacauggaguccuccgucugcugcuucaagaacgaggacaacgagacccucgccugggagggcgucaugaaggagaacuaccucgucaagaucaacaccaaggccaacgacaccuccgaggagaugcgccaccgcuuccgccagcucgacaccaagcucaacgaccucaagggccuccucaaggagaucgccaacaagaucaaguga

SEQ ID NO: 1996 - RNA, 2097 nt, Artificial Sequence
  AAK13079 variant
augaugcgcucccgcuccaaguccccccgccgccccucccccaccgcccgcggcgccaacugcgacgucgagcuccucaagaccaccacccgcgaccgcgaggagcucaagugcaugcucgagaaguacgagcgccaccucgccgagauccagggcaacgucaagguccucaaguccgagcgcgacaagaucuuccuccucuacgagcaggcccaggaggagaucacccgccuccgccgcgagaugaugaaguccugcaagucccccaaguccaccaccgcccacgccauccuccgccgcgucgagaccgagcgcgacgucgccuucaccgaccuccgccgcaugaccaccgagcgcgacucccuccgcgagcgccucaagaucgcccaggagaccgccuucaacgagaaggcccaccucgagcagcgcaucgaggagcucgagugcaccguccacaaccucgacgacgagcgcauggagcagauguccaacaugacccucaugaaggagaccaucuccaccgucgagaaggagaugaagucccucgcccgcaaggccauggacaccgaguccgagcucggccgccagaaggccgagaacaacucccuccgccuccucuacgagaacaccgagaaggaccucuccgacacccagcgccaccucgccaagaagaaguacgagcuccagcucacccaggagaagaucaugugccucgacgagaagaucgacaacuucacccgccagaacaucgcccagcgcgaggagaucuccauccucggcggcacccucaacgaccucgccaaggagaaggagugccuccaggccugccucgacaagaaguccgagaacaucgccucccucggcgagucccucgccaugaaggagaagaccaucuccggcaugaagaacaucaucgccgagauggagcaggccucccgccagugcaccgaggcccucaucgucugcgagcaggacgucucccgcaugcgccgccagcucgacgagaccaacgacgagcucgcccagaucgcccgcgagcgcgacauccucgcccacgacaacgacaaccuccaggagcaguucgccaaggccaagcaggagaaccaggcccucuccaagaagcucaacgacacccacaacgagcucaacgacaucaagcagaagguccaggacaccaaccucgaggucaacaagcucaagaacauccucaaguccgaggaguccgagaaccgccagaugauggagcagcuccgcaaggccaacgaggacgccgagaacugggagaacaaggcccgccaguccgaggccgacaacaacacccucaagcucgagcucaucaccgccgaggccgagggcaaccgccucaaggagaaggucgacucccucaaccgcgaggucgagcagcaccucaacgccgagcgcuccuacaagucccagaucuccacccuccacaaguccgucgucaagauggaggaggagcuccagaagguccaguucgagaaggucuccgcccucgccgaccucuccuccacccgcgagcucugcaucaagcucgacuccuccaaggagcuccucaaccgccagcucgucgccaaggaccaggagaucgagaugcgcgagaacgagcucgacuccgcccacuccgagaucgagcuccuccgcucccagauggccaacgagcgcaucuccaugcagaaccucgaggcccuccucgucgccaaccgcgacaaggaguaccagucccagaucgcccuccaggagaaggaguccgagauccagcuccucaaggagcaccucugccucgccgagaacaagauggccauccagucccgcgacgucgcccaguuccgcaacgucgucacccagcucgaggccgaccucgacaucaccaagcgccagcucggcaccgagcgcuucgagcgcgagcgcgccguccaggagcuccgccgccagaacuacuccuccaacgccuaccacauguccuccaccaugaagcccaacaccaagugccacucccccgagcgcgcccaccaccgcucccccgaccgcggccucgaccgcucccucgaggagaaccucugcuaccgcgacuucuga

SEQ ID NO: 1997 - RNA, 927 nt, Artificial Sequence
  CCDS48205.1 variant
augcgccccgagggcucccucaccuaccgcguccccgagcgccuccgccagggcuucugcggcgucggccgcgccgcccaggcccucgucugcgccuccgccaaggagggcaccgccuuccgcauggaggccguccaggagggcgccgccggcgucgaguccgagcaggccgcccucggcgaggaggccguccuccuccucgacgacaucauggccgaggucgaggucgucgccgaggaggagggccucgucgagcgccgcgaggaggcccagcgcgcccagcaggccguccccggccccggccccaugacccccgaguccgcccccgaggagcuccucgccguccaggucgagcucgagcccgucaacgcccaggcccgcaaggccuucucccgccagcgcgagaagauggagcgccgccgcaagccccaccucgaccgccgcggcgccgucauccaguccguccccggcuucugggccaacgucaucgccaaccacccccagauguccgcccucaucaccgacgaggacgaggacaugcucuccuacauggucucccucgaggucggcgaggagaagcaccccguccaccucugcaagaucaugcucuucuuccgcuccaaccccuacuuccagaacaaggucaucaccaaggaguaccucgucaacaucaccgaguaccgcgccucccacuccacccccaucgagugguaccccgacuacgaggucgaggccuaccgccgccgccaccacaacuccucccucaacuucuucaacugguucuccgaccacaacuucgccggcuccaacaagaucgccgagauccucugcaaggaccucuggcgcaacccccuccaguacuacaagcgcaugaagccccccgaggagggcaccgagaccuccggcgacucccagcuccucuccuga

SEQ ID NO: 1998 - RNA, 369 nt, Artificial Sequence
  M13231.1 variant
augcgcugggcccuccucguccuccucgccuuccucucccccgccucccagaaguccuccaaccucgagggccgcaccaaguccgucacccgccagaccggcuccuccgccgagaucaccugcgaccucaccgucaccaacaccuucuacauccacugguaccuccaccaggagggcaaggccccccagcgccuccucuacuacgacgucuccaccgcccgcgacguccucgaguccggccucucccccggcaaguacuacacccacaccccccgccgcugguccuggauccuccgccuccagaaccucaucgagaacgacuccggcgucuacuacugcgccaccugggaccgccagaagcuccucuga

SEQ ID NO: 1999 - RNA, 804 nt, Artificial Sequence
  CCDS12619.1 variant
augggcgcccgccagauccagaccuccuccucccagaccucccccgaggaggccaugggcaccccccgcauccagcaccuccucauccuccucguccucggcgccucccuccucaccuccggccucgagcucuacugccagaagggccucuccaugaccgucgaggccgaccccgccaacauguucaacuggaccaccgaggaggucgagaccugcgacaagggcgcccucugccaggagaccauccucaucaucaaggccggcaccgagaccgccauccucgccaccaagggcugcauccccgagggcgaggaggccaucaccaucguccagcacuccuccccccccggccucaucgucaccuccuacuccaacuacugcgaggacuccuucugcaacgacaaggacucccucucccaguucugggaguucuccgagaccaccgccuccaccgucuccaccacccuccacugccccaccugcgucgcccucggcaccugcuucuccgcccccucccuccccugccccaacggcaccacccgcugcuaccagggcaagcucgagaucaccggcggcggcaucgaguccuccgucgaggucaagggcugcaccgccaugaucggcugccgccucauguccggcauccucgccgucggccccauguucguccgcgaggccugcccccaccagcuccucacccagccccgcaagaccgagaacggcgccaccugccuccccauccccgucuggggccuccagcuccuccucccccuccuccuccccuccuucauccacuucuccuga

SEQ ID NO: 2000 - RNA, 1590 nt, Artificial Sequence
  AHZ44440 variant
augcuccucgccguccucuacugccuccucugguccuuccagaccuccgccggccacuucccccgcgccugcgucuccuccaagaaccucauggagaaggagugcugcccccccugguccggcgaccgcucccccugcggccagcucuccggccgcggcuccugccagaacauccuccucuccaacgccccccucggcccccaguuccccuucaccggcgucgacgaccgcgaguccuggcccuccgucuucuacaaccgcaccugccagugcuccggcaacuucaugggcuucaacugcggcaacugcaaguucggcuucuggggccccaacugcaccgagcgccgccuccucguccgccgcaacaucuucgaccucuccgcccccgagaaggacaaguucuucgccuaccucacccucgccaagcacaccaucuccuccgacuacgucauccccaucggcaccuacggccagaugaagaacggcuccacccccauguucaacgacaucaacaucuacgaccucuucgucuggaugcacuacuacgucuccauggacgcccuccucggcggcuccgagaucuggcgcgacaucgacuucgcccacgaggcccccgccuuccuccccuggcaccgccucuuccuccuccgcugggagcaggagauccagaagcucaccggcgacgagaacuucaccauccccuacugggacuggcgcgacgccgagaagugcgacaucugcaccgacgaguacaugggcggccagcaccccaccaaccccaaccuccucucccccgccuccuucuucuccuccuggcagaucgucugcucccgccucgaggaguacaacucccaccagucccucugcaacggcacccccgagggcccccuccgccgcaaccccggcaaccacgacaagucccgcaccccccgccuccccuccuccgccgacgucgaguucugccucucccucacccaguacgaguccggcuccauggacaaggccgccaacuucuccuuccgcaacacccucgagggcuucgccuccccccucaccggcaucgccgacgccucccaguccuccaugcacaacgcccuccacaucuacaugaacggcaccaugucccagguccagggcuccgccaacgaccccaucuuccuccuccaccacgccuucgucgacuccaucuucgagcaguggcuccgccgccaccgcccccuccaggaggucuaccccgaggccaacgcccccauccgccacaaccgcgaguccuacaugguccccuucaucccccucuaccgcaacggcgacuucuucaucuccuccaaggaccucggcuacgacuacuccuaccuccaggacuccgaccccgacuccuuccaggacuacaucaaguccuaccucgagcaggccucccgcaucugguccuggcuccucggcgccgccauggucggcgccguccucaccgcccuccucgccggccucgucucccuccucugccgccacaagcgcaagcagcuccccgaggagaagcagccccuccucauggagaaggaggacuaccacucccucuaccagucccaccucuga

SEQ ID NO: 2001 - RNA, 1590 nt, Artificial Sequence
  AGV39051 variant
augcuccucgccguccucuacugccuccucugguccuuccagaccuccgccggccacuucccccgcgccugcgucuccuccaagaaccucauggagaaggagugcugcccccccugguccggcgaccgcucccccugcggccagcucuccggccgcggcuccugccagaacauccuccucuccaacgccccccucggcccccaguuccccuucaccggcgucgacgaccgcgaguccuggcccuccgucuucuacaaccgcaccugccagugcuccggcaacuucaugggcuucaacugcggcaacugcaaguucggcuucuggggccccaacugcaccgagcgccgccuccucguccgccgcaacaucuucgaccucuccgcccccgagaaggacaaguucuucgccuaccucacccucgccaagcacaccaucuccuccgacuacgucauccccaucggcaccuacggccagaugaagaacggcuccacccccauguucaacgacaucaacaucuacgaccucuucgucuggaugcacuacuacgucuccauggacgcccuccucggcggcuccgagaucuggcgcgacaucgacuucgcccacgaggcccccgccuuccuccccuggcaccgccucuuccuccuccgcugggagcaggagauccagaagcucaccggcgacgagaacuucaccauccccuacugggacuggcgcgacgccgagaagugcgacaucugcaccgacgaguacaugggcggccagcaccccaccaaccccaaccuccucucccccgccuccuucuucuccuccuggcagaucgucugcucccgccucgaggaguacaacucccaccagucccucugcaacggcacccccgagggcccccuccgccgcaaccccggcaaccacgacaagucccgcaccccccgccuccccuccuccgccgacgucgaguucugccucucccucacccaguacgaguccggcuccauggacaaggccgccaacuucuccuuccgcaacacccucgagggcuucgccuccccccucaccggcaucgccgacgccucccaguccuccaugcacaacgcccuccacaucuacaugaacggcaccaugucccagguccagggcuccgccaacgaccccaucuuccuccuccaccacgccuucgucgacuccaucuucgagcaguggcuccgccgccaccgcccccuccaggaggucuaccccgaggccaacgcccccaucggccacaaccgcgaguccuacaugguccccuucaucccccucuaccgcaacggcgacuucuucaucuccuccaaggaccucggcuacgacuacuccuaccuccaggacuccgaccccgacuccuuccaggacuacaucaaguccuaccucgagcaggccucccgcaucugguccuggcuccucggcgccgccauggucggcgccguccucaccgcccuccucgccggccucgucucccuccucugccgccacaagcgcaagcagcuccccgaggagaagcagccccuccucauggagaaggaggacuaccacucccucuaccagucccaccucuga

SEQ ID NO: 2002 - RNA, 1590 nt, Artificial Sequence
  AGV39049 variant
augcuccucgccguccucuacugccuccucugguccuuccagaccuccgccggccacuucccccgcgccugcgucuccuccaagaaccucauggagaaggagugcugcccccccugguccggcgaccgcucccccugcggccagcucuccggccgcggcuccugccagaacauccuccucuccaacgccccccucggcccccaguuccccuucaccggcgucgacgaccgcgaguccuggcccuccgucuucuacaaccgcaccugccagugcuccggcaacuucaugggcuucaacugcggcaacugcaaguucggcuucuggggccccaacugcaccgagcgccgccuccucguccgccgcaacaucuucgaccucuccgcccccgagaaggacaaguucuucgccuaccucacccucgccaagcacaccaucuccuccgacuacgucauccccaucggcaccuacggccagaugaagaacggcuccacccccauguucaacgacaucaacaucuacgaccucuucgucuggaugcacuacuacgucuccauggacgcccuccucggcggcuccgagaucuggcgcgacaucgacuucgcccacgaggcccccgccuuccuccccuggcaccgccucuuccuccuccgcugggagcaggagauccagaagcucaccggcgacgagaacuucaccauccccuacugggacuggcgcgacgccgagaagugcgacaucugcaccgacgaguacaugggcggccagcaccccaccaaccccaaccuccucucccccgccuccuucuucuccuccuggcagaucgucugcucccgccucgaggaguacaacucccaccagucccucugcaacggcacccccgagggcccccuccgccgcaaccccggcaaccacgacaagucccgcaccccccgccuccccuccuccgccgacgucgaguucugccucucccucacccaguacgaguccggcuccauggacaaggccgccaacuucuccuuccgcaacacccucgagggcuucgccuccccccucaccggcaucgccgacgccucccaguccuccaugcacaacgcccuccacaucuacaugaacggcaccaugucccagguccagggcuccgccaacgaccccaucuuccuccuccaccacgccuucgucgacuccaucuucgagcaguggcuccagcgccaccgcccccuccaggaggucuaccccgaggccaacgcccccaucggccacaaccgcgaguccuacaugguccccuucaucccccucuaccgcaacggcgacuucuucaucuccuccaaggaccucggcuacgacuacuccuaccuccaggacuccgaccccgacuccuuccaggacuacaucaaguccuaccucgagcaggccucccgcaucugguccuggcuccucggcgccgccauggucggcgccguccucaccgcccuccucgccggccucgucucccuccucugccgccacaagcgcaagcagcuccccgaggagaagcagccccuccucauggagaaggaggacuaccacucccucuaccagucccaccucuga

SEQ ID NO: 2003 - RNA, 1590 nt, Artificial Sequence
  AGV39050 variant
augcuccucgccguccucuacugccuccucugguccuuccagaccuccgccggccacuucccccgcgccugcgucuccuccaagaaccucauggagaaggagugcugcccccccugguccggcgaccgcucccccugcggccagcucuccggccgcggcuccugccagaacauccuccucuccaacgccccccucggcccccaguuccccuucaccggcgucgacgaccgcgaguccuggcccuccgucuucuacaaccgcaccugccagugcuccggcaacuucaugggcuucaacugcggcaacugcaaguucggcuucuggggccccaacugcaccgagcgccgccuccucguccgccgcaacaucuucgaccucuccgcccccgagaaggacaaguucuucgccuaccucacccucgccaagcacaccaucuccuccgacuacgucauccccaucggcaccuacggccagaugaagaacggcuccacccccauguucaacgacaucaacaucuacgaccucuucgucuggaugcacuacuacgucuccauggacgcccuccucggcggcuacgagaucuggcgcgacaucgacuucgcccacgaggcccccgccuuccuccccuggcaccgccucuuccuccuccgcugggagcaggagauccagaagcucaccggcgacgagaacuucaccauccccuacugggacuggcgcgacgccgagaagugcgacaucugcaccgacgaguacaugggcggccagcaccccaccaaccccaaccuccucucccccgccuccuucuucuccuccuggcagaucgucugcucccgccucgaggaguacaacucccaccagucccucugcaacggcacccccgagggcccccuccgccgcaaccccggcaaccacgacaagucccgcaccccccgccuccccuccuccgccgacgucgaguucugccucucccucacccaguacgaguccggcuccauggacaaggccgccaacuucuccuuccgcaacacccucgagggcuucgccuccccccucaccggcaucgccgacgccucccaguccuccaugcacaacgcccuccacaucuacaugaacggcaccaugucccagguccagggcuccgccaacgaccccaucuuccuccuccaccacgccuucgucgacuccaucuucgagcaguggcuccgccgccaccgcccccuccaggaggucuaccccgaggccaacgcccccaucggccacaaccgcgaguccuacaugguccccuucaucccccucuaccgcaacggcgacuucuucaucuccuccaaggaccucggcuacgacuacuccuaccuccaggacuccgaccccgacuccuuccaggacuacaucaaguccuaccucgagcaggccucccgcaucugguccuggcuccucggcgccgccauggucggcgccguccucaccgcccuccucgccggccucgucucccuccucugccgccacaagcgcaagcagcuccccgaggagaagcagccccuccucauggagaaggaggacuaccacucccucuaccagucccaccucuga

SEQ ID NO: 2004 - RNA, 714 nt, Artificial Sequence
  CAA04137 variant
auguccccccucugguggggcuuccuccucuccugccucggcugcaagauccuccccggcgcccagggccaguucccccgcgucugcaugaccgucgacucccucgucaacaaggagugcugcccccgccucggcgccgaguccgccaacgucugcggcucccagcagggccgcggccagugcaccgagguccgcgccgacacccgccccugguccggccccuacauccuccgcaaccaggacgaccgcgagcucuggccccgcaaguucuuccaccgcaccugcaagugcaccggcaacuucgccggcuacaacugcggcgacugcaaguucggcuggaccggccccaacugcgagcgcaagaagccccccgucauccgccagaacauccacucccucuccccccaggagcgcgagcaguuccucggcgcccucgaccucgccaagaagcgcguccaccccgacuacgucaucaccacccagcacugggucggccuccucggccccaacggcacccagccccaguucgccaacugcuccgucuacgacuucuucgucuggcuccacuacuacuccguccgcgacacccuccucggcggcuucuuccccuggcucaaggucuacuacuaccgcuucgucaucggccuccgcgucuggcagugggaggucaucuccugcaagcucaucaagcgcgccaccacccgccagcccuga

SEQ ID NO: 2005 - RNA, 1590 nt, Artificial Sequence; identical to SEQ ID NO: 2001
  AAA61242 variant

SEQ ID NO: 2006 - RNA, 1590 nt, Artificial Sequence
  AGV39054 variant
augcuccucgccguccucuacugccuccucugguccuuccagaccuccgccggccacuucccccgcgccugcgucuccuccaagaaccucauggagaaggagugcugcccccccugguccggcgaccgcucccccugcggccagcucuccggccgcggcuccugccagaacauccuccucuccaacgccccccucggcccccaguuccccuucaccggcgucgacgaccgcgaguccuggcccuccgucuucuacaaccgcaccugccagugcuccggcaacuucaugggcuucaacugcggcaacugcaaguucggcuucuggggccccaacugcaccgagcgccgccuccucguccgccgcaacaucuucgaccucuccgcccccgagaaggacaaguucuucgccuaccucacccucgccaagcacaccaucuccuccgacuacgucauccccaucggcaccuacggccagaugaagaacggcuccacccccauguucaacgacaucaacaucuacgaccucuucgucuggaugcacuacuacgucuccauggacgcccuccucggcggcuccgagaucuggcgcgacaucgacuucgcccacgaggcccccgccuuccuccccuggcaccgccucuuccuccuccgcugggagcaggagauccagaagcucaccggcgacgagaacuucaccauccccuacugggacuggcgcgacgccgagaagugcgacaucugcaccgacgaguacgucggcggccagcaccccaccaaccccaaccuccucucccccgccuccuucuucuccuccuggcagaucgucugcucccgccucgaggaguacaacucccaccagucccucugcaacggcacccccgagggcccccuccgccgcaaccccggcaaccacgacaagucccgcaccccccgccuccccuccuccgccgacgucgaguucugccucucccucacccaguacgaguccggcuccauggacaaggccgccaacuucuccuuccgcaacacccucgagggcuucgccuccccccucaccggcaucgccgacgccucccaguccuccaugcacaacgcccuccacaucuacaugaacggcaccaugucccagguccagggcuccgccaacgaccccaucuuccuccuccaccacgccuucgucgacuccaucuucgagcaguggcuccgccgccaccgcccccuccaggaggucuaccccgaggccaacgcccccaucggccacaaccgcgaguccuacaugguccccuucaucccccucuaccgcaacggcgacuucuucaucuccuccaaggaccucggcuacgacuacuccuaccuccaggacuccgaccccgacuccuuccaggacuacaucaaguccuaccucgagcaggccucccgcaucugguccuggcuccucggcgccgccauggucggcgccguccucaccgcccuccucgccggccucgucucccuccucugccgccacaagcgcaagcagcuccccgaggagaagcagccccuccucauggagaaggaggacuaccacucccucuaccagucccaccucuga

SEQ ID NO: 2007 - RNA, 1590 nt, Artificial Sequence
  AGV39162 variant
augcuccucgccguccucuacugccuccucugguccuuccagaccuccgccggccacuucccccgcgccugcgucuccuccaagaaccucauggagaaggagugcugcccccccugguccggcgaccgcucccccugcggccagcucuccggccgcggcuccugccagaacauccuccucuccaacgccccccucggcccccaguuccccuucaccggcgucgacgaccgcgaguccuggcccuccgucuucuacaaccgcaccugccagugcuccggcaacuucaugggcuucaacugcggcaacugcaaguucggcuucuggggccccaacugcaccgagcgccgccuccucguccgccgcaacaucuucgaccucuccgcccccgagaaggacaaguucuucgccuaccucacccucgccaagcacaccaucuccuccgacuacgucauccccaucggcaccuacggccagaugaagaacggcuccacccccauguucaacgacaucaacaucuacgaccucuucgucuggaugcacuacuacgucuccauggacgcccuccucggcggcuccgagaucuggcgcgacaucgacuucgcccacgaggcccccgccuuccuccccuggcaccgccucuuccuccuccgcugggagcaggagauccagaagcucaccggcgacgagaacuucaccauccccuacugggacuggcgcgacgccgagaagugcgacaucugcaccgacgaguacaugggcggccagcaccccaccaaccccaaccuccucucccccgccuccuucuucuccuccuggcagaucgucugcucccgccucgaggaguacaacucccaccagucccucugcaacggcacccccgagggcccccuccgccgcaaccccggcaaccacgacaagucccgcaccccccgccuccccuccuccgccgacgucgaguucugccucucccucacccaguacgaguccggcuccauggacaaggccgccaacuucuccuuccgcaacacccucgagggcuucgccuccccccucaccggcaucgccgacgccucccaguccuccaugcacaacgcccuccacaucuacaugaacggcaccaugucccagguccagggcuccgccaacgaccccaucuuccuccuccaccacgccuucgucgacuccaucuucgagcaguggcuccgccgccaccgccuccuccaggaggucuaccccgaggccaacgcccccaucggccacaaccgcgaguccuacaugguccccuucaucccccucuaccgcaacggcgacuucuucaucuccuccaaggaccucggcuacgacuacuccuaccuccaggacuccgaccccgacuccuuccaggacuacaucaaguccuaccucgagcaggccucccgcaucugguccuggcuccucggcgccgccauggucggcgccguccucaccgcccuccucgccggccucgucucccuccucugccgccacaagcgcaagcagcuccccgaggagaagcagccccuccucauggagaaggaggacuaccacucccucuaccagucccaccucuga

SEQ ID NO: 2008 - RNA, 1590 nt, Artificial Sequence
  AGV39086 variant
augcuccucgccguccucuacugccuccucugguccuuccagaccuccgccggccacuucccccgcgccugcgucuccuccaagaaccucauggagaaggagugcugcccccccugguccggcgaccgcucccccugcggccagcucuccggccgcggcuccugccagaacauccuccucuccaacgccccccucggcccccaguuccccuucaccggcgucgacgaccgcgaguccuggcccuccgucuucuacaaccgcaccugccagugcuccggcaacuucaugggcuucaacugcggcaacugcaaguucggcuucuggggccccaacugcaccgagcgccgccuccucguccgccgcaacaucuucgaccucuccgcccccgagaaggacaaguucuucgccuaccucacccucgccaagcacaccaucuccuccgacuacgucauccccaucggcaccuacggccagaugaagaacggcuccacccccauguucaacgacaucaacaucuacgaccucuucgucuggaugcacuacuacgucuccauggacgcccuccucggcggcuccgagaucuggcgcgacaucgacuucgcccacgaggcccccgccuuccuccccuggcaccgccucuuccuccuccgcugggagcaggagauccagaagcucaccggcgacgagaacuucaccauccccuacugggacuggcgcgacgccgagaagugcgacaucugcaccgacgaguacaugggcggccagcaccccaccaaccccaaccuccucucccccgccuccuucuucuccuccuggcagaucgucugcucccgccucgaggaguacaacucccaccagucccucugcaacggcacccccgagggcccccuccgccgcaaccccggcaaccacgacaagucccgcaccccccgccuccccuccuccgccgacgucgaguucugccucucccucacccaguacgaguccggcuccauggacaaggccgccaacuucuccuuccgcaacacccucgagggcuucgccuccccccucaccggcaucgccgacgccucccaguccuccaugcacaacgcccuccacaucuacaugaacggcaccaugucccagguccagggcuccgccaacgaccccaucuuccuccuccaccacgccuucgucgacuccauguucgagcaguggcuccgccgccaccgcccccuccaggaggucuaccccgaggccaacgcccccaucggccacaaccgcgaguccuacaugguccccuucaucccccucuaccgcaacggcgacuucuucaucuccuccaaggaccucggcuacgacuacuccuaccuccaggacuccgaccccgacuccuuccaggacuacaucaaguccuaccucgagcaggccucccgcaucugguccuggcuccucggcgccgccauggucggcgccguccucaccgcccuccucgccggccucgucucccuccucugccgccacaagcgcaagcagcuccccgaggagaagcagccccuccucauggagaaggaggacuaccacucccucuaccagucccaccucuga

SEQ ID NO: 2009 - RNA, 1614 nt, Artificial Sequence
  AAC15468 variant
auguccgcccccaagcuccucucccucggcugcaucuucuucccccuccuccucuuccagcaggcccgcgcccaguucccccgccagugcgccaccgucgaggcccuccgcuccggcaugugcugccccgaccucucccccgucuccggccccggcaccgaccgcugcggcuccuccuccggccgcggccgcugcgaggccgucaccgccgacucccgcccccacuccccccaguacccccacgacggccgcgacgaccgcgaggucuggccccuccgcuucuucaaccgcaccugccacugcaacggcaacuucuccggccacaacugcggcaccugccgccccggcuggcgcggcgccgccugcgaccagcgcguccucaucguccgccgcaaccuccucgaccucuccaaggaggagaagaaccacuucguccgcgcccucgacauggccaagcgcaccacccacccccucuucgucaucgccacccgccgcuccgaggagauccucggccccgacggcaacaccccccaguucgagaacaucuccaucuacaacuacuucgucuggacccacuacuacuccgucaagaagaccuuccucggcgucggccaggaguccuucggcgaggucgacuucucccacgagggccccgccuuccucaccuggcaccgcuaccaccuccuccgccucgagaaggacaugcaggagaugcuccaggagcccuccuucucccuccccuacuggaacuucgccaccggcaagaacgucugcgacaucugcaccgacgaccucaugggcucccgcuccaacuucgacuccacccucaucucccccaacuccgucuucucccaguggcgcgucgucugcgacucccucgaggacuacgacacccucggcacccucugcaacuccaccgaggacggccccauccgccgcaaccccgccggcaacgucgcccgccccaugguccagcgccuccccgagccccaggacgucgcccagugccucgaggucggccucuucgacaccccccccuucuacuccaacuccaccaacuccuuccgcaacaccgucgagggcuacuccgaccccaccggcaaguacgaccccgccguccgcucccuccacaaccucgcccaccucuuccucaacggcaccggcggccagacccaccucucccccaacgaccccaucuucguccuccuccacaccuucaccgacgccgucuucgacgaguggcuccgccgcuacaacgccgacaucuccaccuucccccucgagaacgcccccaucggccacaaccgccaguacaacaugguccccuucuggccccccgucaccaacaccgagauguucgucaccgcccccgacaaccucggcuacaccuacgagauccaguggcccucccgcgaguucuccguccccgagaucaucgccaucgccgucgucggcgcccuccuccucgucgcccucaucuucggcaccgccuccuaccucauccgcgcccgccgcuccauggacgaggccaaccagccccuccucaccgaccaguaccagugcuacgccgaggaguacgagaagcuccagaaccccaaccaguccgucgucuga

SEQ ID NO: 2010 - RNA, 1560 nt, Artificial Sequence
  AAA20870 variant
auguccccccucugguggggcuuccuccucuccugccucggcugcaagauccuccccggcgcccagggccaguucccccgcgucugcaugaccgucgacucccucgucaacaaggagugcugcccccgccucggcgccgaguccgccaacgucugcggcucccagcagggccgcggccagugcaccgagguccgcgccgacacccgccccugguccggccccuacauccuccgcaaccaggacgaccgcgagcucuggccccgcaaguucuuccaccgcaccugcaagugcaccggcaacuucgccggcuacaacugcggcgacugcaaguucggcuggaccggccccaacugcgagcgcaagaagccccccgucauccgccagaacauccacucccucuccccccaggagcgcgagcaguuccucggcgcccucgaccucgccaagaagcgcguccaccccgacuacgucaucaccacccagcacuggcucggccuccucggccccaacggcacccagccccaguucgccaacugcuccgucuacgacuucuucgucuggcuccacuacuacuccguccgcgacacccuccucggccccggccgccccuaccgcgccaucgacuucucccaccagggccccgccuucgucaccuggcaccgcuaccaccuccucugccucgagcgcgaccuccagcgccucaucggcaacgaguccuucgcccuccccuacuggaacuucgccaccggccgcaacgagugcgacgucugcaccgaccagcucuucggcgccgcccgccccgacgaccccacccucaucucccgcaacucccgcuucuccuccugggagaccgucugcgacucccucgacgacuacaaccaccucgucacccucugcaacggcaccuacgagggccuccuccgccgcaaccagaugggccgcaacuccaugaagcuccccacccucaaggacauccgcgacugccucucccuccagaaguucgacaacccccccuucuuccagaacuccaccuucuccuuccgcaacgcccucgagggcuucgacaaggccgacggcacccucgacucccaggucaugucccuccacaaccucguccacuccuuccucaacggcaccaacgcccucccccacuccgccgccaacgaccccaucuucgucguccuccacuccuucaccgacgccaucuucgacgaguggaugaagcgcuucaacccccccgccgacgccuggccccaggagcucgcccccaucggccacaaccgcauguacaacaugguccccuucuucccccccgucaccaacgaggagcucuuccucaccuccgaccagcucggcuacuccuacgccaucgaccuccccgucuccgucgaggagacccccggcuggcccaccacccuccucgucgucaugggcacccucgucgcccucgucggccucuucguccuccucgccuuccuccaguaccgccgccuccgcaagggcuacaccccccucauggagacccaccucuccuccaagcgcuacaccgaggaggccuga

SEQ ID NO: 2011 - RNA, 456 nt, Artificial Sequence
  CCDS7679.1 variant
augcgccgccuccuccucgucaccucccucgucgucguccuccucugggaggccggcgccguccccgcccccaagguccccaucaagaugcaggucaagcacuggcccuccgagcaggaccccgagaaggccuggggcgcccgcgucgucgagccccccgagaaggacgaccagcucgucguccucuuccccguccagaagcccaagcuccucaccaccgaggagaagccccgcggccagggccgcggccccauccuccccggcaccaaggccuggauggagaccgaggacacccucggccacguccucucccccgagcccgaccacgacucccucuaccaccccccccccgaggaggaccagggcgaggagcgcccccgccucugggucaugcccaaccaccagguccuccucggccccgaggaggaccaggaccacaucuaccacccccaguga

SEQ ID NO: 2012 - RNA, 525 nt, Artificial Sequence
  ACF47598 variant
auggucuccuacugggacaccggcguccuccucugcgcccuccucuccugccuccuccucaccggcuccuccuccggcuccaagcucaaggaccccgagcucucccucaagggcacccagcacaucaugcaggccggccagacccuccaccuccagugccgcggcgaggccgcccacaaguggucccuccccgagauggucuccaaggaguccgagcgccucuccaucaccaaguccgccugcggccgcaacggcaagcaguucugcuccacccucacccucaacaccgcccaggccaaccacaccggcuucuacuccugcaaguaccucgccguccccaccuccaagaagaaggagaccgaguccgccaucuacaucuucaucuccgacaccggccgccccuucgucgagauguacuccgagauccccgagaucauccacaugaccgagggccgcgagcucgucauccccugccgcgucaccucccccaacaucaccgucacccucaagaagaagaaggccuga

SEQ ID NO: 2013 - RNA, 750 nt, Artificial Sequence
  BAR92607 variant
augggcuccgacguccgcgaccucaacgcccuccuccccgccguccccucccucggcggcggcggcggcugcgcccuccccgucuccggcgccgcccagugggcccccguccucgacuucgccccccccggcgccuccgccuacggcucccucggcggccccgcccccccccccgccccccccccccccccccccccccccccccacuccuucaucaagcaggagcccuccuggggcggcgccgagccccacgaggagcagugccucuccgccuucaccguccacuucuccggccaguucaccggcaccgccggcgccugccgcuacggccccuucggcccccccccccccucccaggccuccuccggccaggcccgcauguuccccaacgcccccuaccuccccuccugccucgagucccagcccgccauccgcaaccagggcuacuccaccgucaccuucgacggcacccccuccuacggccacacccccucccaccacgccgcccaguuccccaaccacuccuucaagcacgaggaccccaugggccagcagggcucccucggcgagcagcaguacuccguccccccccccgucuacggcugccacacccccaccgacuccugcaccggcucccaggcccuccuccuccgcacccccuacuccuccgacaaccucuaccagaugaccucccagcucgagugcaugaccuggaaccagaugaaccucggcgccacccucaagggcuga

SEQ ID NO: 2014 - RNA, 1350 nt, Artificial Sequence
  AAA61299 variant
augggcuccgacguccgcgaccucaacgcccuccuccccgccguccccucccucggcggcggcggcggcugcgcccuccccgucuccggcgccgcccagugggcccccguccucgacuucgccccccccggcgccuccgccuacggcucccucggcggccccgcccccccccccgccccccccccccccccccccccccccccccacuccuucaucaagcaggagcccuccuggggcggcgccgagccccacgaggagcagugccucuccgccuucaccguccacuucuccggccaguucaccggcaccgccggcgccugccgcuacggccccuucggcccccccccccccucccaggccuccuccggccaggcccgcauguuccccaacgcccccuaccuccccuccugccucgagucccagcccgccauccgcaaccagggcuacuccaccgucaccuucgacggcacccccuccuacggccacacccccucccaccacgccgcccaguuccccaaccacuccuucaagcacgaggaccccaugggccagcagggcucccucggcgagcagcaguacuccguccccccccccgucuacggcugccacacccccaccgacuccugcaccggcucccaggcccuccuccuccgcacccccuacuccuccgacaaccucuaccagaugaccucccagcucgagugcaugaccuggaaccagaugaaccucggcgccacccucaagggcgucgccgccggcuccuccuccuccgucaaguggaccgagggccaguccaaccacuccaccggcuacgaguccgacaaccacaccacccccauccucugcggcgcccaguaccgcauccacacccacggcgucuuccgcggcauccaggacguccgccgcguccccggcgucgcccccacccucguccgcuccgccuccgagaccuccgagaagcgccccuucaugugcgccuaccccggcugcaacaagcgcuacuucaagcucucccaccuccagaugcacucccgcaagcacaccggcgagaagcccuaccagugcgacuucaaggacugcgagcgccgcuucucccgcuccgaccagcucaagcgccaccagcgccgccacaccggcgucaagcccuuccagugcaagaccugccagcgcaaguucucccgcuccgaccaccucaagacccacacccgcacccacaccggcaagaccuccgagaagcccuucuccugccgcuggcccuccugccagaagaaguucgcccgcuccgacgagcucguccgccaccacaacaugcaccagcgcaacaugaccaagcuccagcucgcccucuga

SEQ ID NO: 2015 - RNA, 279 nt, Artificial Sequence
  AAA63269 variant
augcagcgccgcggccagccccucgagaaccacgucgcccucauccacuggcaguccgccggcauccccgccuccaagguccacaacuacugcaacaugaagaagucccgccucggccgcucccgcgccguccgcaucucccagccccuccucuccccccgccgcugcccccuccaccucaccgagcgcggcgccggccuccuccagccccagccccagggccccguccgcacccccggcccccccuccggcucccaccccgccgccgccgacaacuga

SEQ ID NO: 2016 - RNA, 246 nt, Artificial Sequence
  AAP35763 variant
auggagucccccaagaagaagaaccagcagcucaaggucggcauccuccaccucggcucccgccagaagaagauccgcauccagcuccgcucccagugcgccaccuggaaggucaucugcaaguccugcaucucccagacccccggcaucaaccucgaccucggcuccggcgucaaggucaagaucauccccaaggaggagcacugcaagaugcccgaggccggcgaggagcagccccaggucuga

SEQ ID NO: 2017 - RNA, 1098 nt, Artificial Sequence
  AAA59652 variant
auggccgugauggcucccagaacccugcuccuucuguugagcggcgcauuagcccugacacagacuugggcggggucccacucuaugagguacuucuuuacgucagucagucggccuggacgcggugagccacgauucaucgcuguuggcuauguggacgauacccaauuuguacguuucgacagcgaugccgcaucccagaagauggaaccgagagcccccuggauugagcaggaagggccugaguacugggaccaggaaacaaggaacaugaaagcucauucucaaacugaucgggcaaaucuaggaacccuccgcggcuauuacaaccagucggaggacgguucacacacaauacagaucauguaugggugcgaugugggaccagacggcagauuucugaggggcuaccggcaggaugccuaugacgggaaggauuacauugcucuuaaugaggaccugcgcagcuggaccgccgcggauauggcagcccaaaucacuaaacgaaagugggaagcuguccaugccgcagagcagagaaggguguacuuggaaggacgguguguugacggucuccgucgcuaucuggagaacggcaaagagacacugcagagaaccgaucccccuaagacgcacaugacucaucacccaauuagugaccacgaagcuacccucaggugcugggccuuaggguucuaccccgcggagaucacacugacuuggcagcgggacggagaagaucaaacccaggacacagagcuuguggaaacccgaccugccggcgaugguacguuucagaagugggcagcugucgugguaccauccggggaggagcaacgcuauacuugucauguucagcacgaaggauugccgaaaccccugacacuaagaugggagcucucuagccagccuaccauaccaaucgugggcauuaucgccggccugguccuucugggggcugugauuacuggagccguggucgcagccguuauguggaggcggaaguccucagaccgcaaagguggcaguuacacacaggcugcgagcucugauuccgcacaagggucagacgugagcuugaccgccugcaagguauga

SEQ ID NO: 2018 - RNA, 1098 nt, Artificial Sequence
  AAA59606 variant
auggccgugauggcucccagaacccugguccuccuucugagcggcgcauuggccuuaacacagacuugggcggggucccacucuaugagguacuucuuuacgucaguuagucggccuggacgcggugagccacgauucaucgcugugggcuauguagacgauacccaauuugugcguuucgacagcgaugccgcaucccagagaauggaaccgagggcccccuggauugagcaggaagggccugaguacugggacggagaaacacggaaggucaaagcucauucucagacucaccgcguggaucugggcacccuaagagguuauuacaaccaaucggaggcagggucacauacaguucagaggauguauggaugcgacgugggcagcgauuggcgguuucuccgcggcuaccaccaguaugccuacgacgggaaggauuacauagcucugaaagaggaccuucgaaguuggaccgccgcggauauggcagcccagacuacaaagcauaaaugggaagcugcccacgucgcagagcaacugagagcuuauuuggaaggaaccuguguggaguggcucaggcgguaccuggagaaugguaaggaaacgcugcagcguacugacgccccaaagacccacaugacacaucacgcgguauccgaucaugaggccacucuccgcugcugggcauuaucuuucuaucccgcugaaaucacccugacauggcagagagacggcgaggaccagacccaagauacggaacuuguugagacuaggccugccggggacggaacauuucagaaaugggcugccguggucgugccaagcggccaggagcaacgguacaccugucacgugcagcacgaagguuugcccaagccucugacucuacgaugggagccauccucacagccgacaauucccaucgucgggauuaucgcaggacucguucuguucggcgccgugauaaccggcgcuguaguggcggcagucauguggcgcagaaaaaguagcgauaggaaagggggaucuuauucccaggccgcuucaagcgacagugcccaagguucugaugugucccuuacggcaugcaagguuuga

SEQ ID NO: 2019 - RNA, 1263 nt, Artificial Sequence
  AAH37161 variant
augcccggcgggugcagcagaggaccugccgcuggugacggcaggcugcggcucgcacgccuugcccugguguuguuagggugggucuccucuucaaguccaaccagcuccgcgucuucguucucaagcagugcuccguuucuggccuccgcaguuucugcccagcccccucuaccagaucaaugucccgcucucugcgaguguagcgaagcagcccgaacagugaagugcguaaaccguaaucugacugaggugccuacggaccuuccagcuuacgucagaaaccuguucuugaccggaaaucagcucgccgugcugcccgcgggcgcauuugccaggcggccuccacuggcugaacucgccgcauuaaaccuguccgguucacgccuugaugagguuagagcuggggccuucgaacacuugccgagucugaggcagcuagaccucagccauaauccccuggcggaucuuucuccuuuugccuucuccggaucaaacgcaagcgugagugcuccaucuccccuggucgaguugauccucaaucacauugugccuccagaggacgaacggcagaaccgcuccuuugagggcaugguaguugccgcucuguuagccggccgagcacugcaagggcucagaaggcuugaacuggccagcaaucauuucuuguaucuaccccgggaugugcuggcucagcucccgucgcugcgucaccuugaccugucuaacaauuccuuggucucacucacauacgugaguuuucgcaaccugacucauuuagagagccugcaccuagaggauaaugcgcucaaagugcugcacaacggaacccuugcagaauugcagggucugccucauauaagagucuuccucgacaauaaccccuggguuugugauugccacauggccgacauggugacauggcugaaggagaccgaaguagugcagggcaaagauaggcuuacuugugcuuauccagagaagaugcggaaccgaguccuguuggaacucaauuccgccgaccuggacugcgauccuaucuuacccccaucucugcaaacaagcuacguguuucuagggauuguucucgcacugaucggagccauuuuccuuuuggugcuguaucucaaccgcaaaggcaucaagaaguggaugcauaauauaagagacgcuuguagggaucacauggaggguuaccacuaucgguacgagaucaacgccgacccccgccugaccaauuuaucaaguaacuccgaugucuga

SEQ ID NO: 2020 - RNA, 1632 nt, Artificial Sequence
  AAH33010 variant
augagaaagcccgccgcuggcuuccugccuagccuccuuaaagugcuguuguuaccacuggcaccggccgcggcucaggacuccacccaagccucuacacccgggucaccucuaaguccaacugaguacgaaagguuuuucgcacuccugacgcccaccuggaaggccgagacaacuugccggcuucgcgcuacccacggaugucgaaacccuacacugguccaguuggaucaguaugaaaaucauggucucguuccagacggcgcagugugcagcaaccugcccuacgccuccugguuugagucuuucugucaguuuacccacuaucguugcucgaaucauguauacuaugcuaaaagagugcuguguucacaaccugucagcauccucaguccaaacacuuuaaaggaaauugaggccuccgcggaggugucuccgacaaccaugacgagccccauauccccucacuucacuguuaccgaaaggcagacauuucagccauggcccgagcggcugucaaauaacguggaagaacuuuugcagaguagccugucucuagggggacaagagcaggcaccugaacauaaacaggagcagggcgucgaacaccgccaagagccaacucaggaacacaagcaggaggagggucaaaagcaggaggagcaggaagaggaacaggaggaggaagggaaacaagaggaaggacagggcaccaaggagggcagagaagccgugucccagcuccagacagauucagagcccaaauuccauagcgagagucugucuuccaauccgagcucguuugcuccuaggguacgggaaguugagucuacccccaugaucauggaaaacauucaagagcuuauccgcuccgcccaggagauugacgaaaugaaugagaucuacgaugaaaacucauauuggcgaaaucagaacccagggagucuguugcagcucccucacacggaggcacuguuagugcugugcuacagcauagucgaaaauacuuguaucauuacacccaccgcuaaggccuggaaauacauggaggaggaaauccucggauucgguaaguccgugugcgacucucuuggcagaaggcauaugagcacuugugcgcugugcgauuuuuguucauugaagcuagagcaaugccacagugaagccucccugcagcggcagcagugcgacacaagccacaaaaccccauucgugucuccccuccuggcaucacaaagucuuagcauugggaaccaggucggauccccugagucuggccguuuuuauggucuggauuuguacgggggacuccauauggacuucuggugugcucgccuggccacgaagggcugcgaagauguuagagugucgggcugguuacagaccgaguuccugagcuuucaagacggggauuucccaacaaaaaucugugacacugacuauauacaguacccgaauuauugcuccuuuaagucacagcagugucuaaugaggaaccggaaccgaaaaguaagucgcaugagaugccuccaaaaugagaccuacucugcucugagccccggaaaguccgaagaugugguccuuagguggucacaggaguucagcacauugacucugggucaguuuggcuga

SEQ ID NO: 2021 - RNA, 1830 nt, Artificial Sequence
  AAB58754 variant
augaaguggguggagagcaucuuccugauuuuucuccuuaacuucaccgaauccagaacacugcacaggaaugaguacggcauagccucuaucuuggacucauaucagugcacugcugaaauuaguuuagcagaucuggccacgaucuuuuucgcgcaauuuguccaggaggcuaccuacaaagaaguuagcaagauggugaaagacgcccuaacagcaauugagaagcccacuggggaugagcaguccucuggaugucucgaaaaccagcugccugccuuccuugaggaacugugccaugagaaagagaucuuggaaaaguauggucacucggacuguugcucacaaagcgaggaaggccggcauaauuguuuucucgcucacaagaaaccaaccccggcaaguauaccccuguuccagguaccugagccagugacauccugcgaagccuacgaggaggaucgcgaaaccuuuaugaacaaguucaucuaugagauugcucgacgucaucccuuucuguacgccccuacuauccucuuaugggcggcaagauaugacaaaauuaucccaucuuguugcaaggccgaaaaugcugucgaguguuuccagacaaaagccgcaaccgugacgaaggaacugagggagagcucccuuuugaaccagcacgcuugcgccguuaugaagaauuuugggacucggaccuuccaagcgauaacagugacuaaacugucacagaaguucaccaaagucaacuuuacagagauucagaagcuagugcucgauguagcccacguucaugaacacuguugccgcggagacgugcuggauugccuucaggacggcgagaaaaucaugaguuacauuuguagccaacaggauacccugucuaauaagaucacggaaugcuguaaauugacuacacucgagagaggucagugcaucauucaugcagaaaacgacgagaagcccgaggggcuguccccuaauuuaaacagguuccugggagaucgggacuuuaaucaauucucaagcggcgaaaagaacauauuucucgcuaguuucguccacgaguacucucgccgacacccacagcuugccguguccgugauccugagagucgcuaaaggcuaucaggaauugcuagagaaguguuuucagaccgagaauccgcuggaaugccaagacaaaggggaggaagaacuccagaaguacauucaggaaagccaggcccuggcaaaaaggucguguggacuuuuccaaaagcugggugaguauuacuugcagaacgccuuucucguugcuuauacuaagaaagcgccccagcugacaucuuccgaguuaauggcaaucacccggaagauggccgcuacggccgcaaccugcugucagcugucagaagauaaacuacucgccugcggcgagggggcugccgacauaauuaucggacaucuguguauccgucacgaaaugacaccugugaacccaggcguaggucaaugcugcaccaguagcuacgcaaaucgcagacccuguuucuccucucuuguggucgaugagacuuaugugccuccagcguuuagcgacgauaaguucauuuuucauaaagacuugugccaggcucaggggguugcccugcagacaaugaagcaagaguuccucaucaaccuggugaagcagaaaccccagauuacugaggagcaacuugaagcagucauagccgauuucucaggacuguuggagaaguguugccagggccaggaacaggagguguguuuugcugaagagggccaaaaacucaucaguaagaccagggccgcacuggggguauga

SEQ ID NO: 2022 - RNA, 2565 nt, Artificial Sequence
  AAI26251 variant
augauggccuacagcgacaccacaaugauguccgaugacaucgauuggcugagaucucacaggggcgugugcaaggucgaccucuauaaccccgaggggcagcaagaucaggaccggaaaguuauuuguuucguggauguaucaacucuuaauguggaagacaaggauuacaaagacgcugcaaguagcuccucugagggaaaccugaauuuggguucguuagaagagaaggaaauaaucgucauuaaagauacggagaagaaggaccagucaaaaaccgagggcagcgugugccuguuuaagcaggccccuagugauccaguuuccgugcuaaacuggcuccugucugaccuucaaaaauaugcgcugggguuccagcaugcuuugagcccguccacaucaacuuguaagcacaaagucggagacaccgaaggcgaguaccaucgcgccaguagcgaaaauugcuauucuguguacgcagaucagguaaacaucgacuaucucaugaaucgaccccagaaccugcgucuggagaugacagccgcuaagaauaccaacaauaaccaauccccuucagcaccacccgccaagccuccaagcacucagagagcuguuauuagucccgauggugaguguucuaucgacgaucucuccuuuuacgugaauagguuaagcucgcuggucauacagauggcccacaaagaaaucaaggagaaacuugaagggaagucuaaaugcuugcaucacuccauuuguccuucaccaggaaacaaggagcggaucaguccgcgcacacccgcgagcaaaauugcauccgaaauggccuacgaggcuguggagcugaccgccgcagaaaugagaggcacgggcgaggaaucuagggaagggggacaaaagagcuuccuauauucagaacucaguaauaaguccaaaagcggugacaagcagaugucucagcgggagucaaaagaguuugcugauaguaucagcaagggccugaugguguacgccaaccaggucgcguccgacaugaugguuucucuuaugaaaacucugaaggugcacucgagcgggaagccuauaccagccuccguaguguugaaacgcguccuccugcgacauaccaaggaaauugugucagauuuaaucgacaguugcaugaaaaaccugcacaauauuacaggaguucucaugacugauucugacuucgugagcgcagucaagagaaaccuuuuuaaucaauggaaacagaacgcuaccgacaucauggaggccaugcugaagagguugguguccgcucuaaucggcgaagagaaggaaacaaaaucacagagccugucuuaugccucccucaaggcagguagucaugaucccaaaugucggaaucagagccuggaguucucuaccaugaaggccgagaugaaagaacgugacaaggggaagaugaaauccgauccuugcaagucacuuacgagugcugagaaaguaggagaacacauucugaaggagggcuugacuauauggaaccaaaaacagggcaauagcuguaagguugcgacaaaagcaugcucgaacaaggacgagaagggggagaaaaucaaugccuccaccgauucucucgcuaaggaccugauugugagcgccuuaaaacugauccaguaccaccuaacucagcaaacaaagggaaaagauaccugcgaggaagacuguccagguucaacgaugggcuauauggcacagaguacccaguacgagaagugcgggggaggccaguccgccaaggcucucucugucaaacaacuggaaagccaucgcgcccccgguccguccacaugucagaaggagaaccagcaccuugauucacagaaaauggacaugagcaauauaguguugaugcugauucaaaagcuccugaacgagaauccuuuuaaaugcgaagaucccugugagggggaaaacaagugcagugagccaagagcaucuaaggcggcuuccaugagcaauaggucggacaaagccgaggaacagugucaggagcaucaagaacuugauugcacuucaggcaugaagcaggcaaacggacaguucaucgacaaacuggucgagucugugaugaaguugugucucaucauggccaaauauaguaacgacggcgcugcccuggcagaauuagaggaacaggcugccuccgcgaauaagccuaacuuucgggggacccgaugcauucacagcggagccaugccccaaaauuaccaggauucucugggucaugagguuaucgugaacaaucaguguagcacaaacucccuacagaagcaacuccaggcuguacugcaguggauugcagccucacaguucaaugucccaaugcuuuacuuuaugggcgacaaagaugggcaauuggagaagcugccccaggugagugcuaaagccgcagaaaagggauauagcguuggcggucuccugcaggaggugaugaaauucgcgaaggaacgccaaccugacgaggccgucgggaaaguggcuagaaagcaguuacuggauuggcuuuuggccaaccucuga

SEQ ID NO: 2023 - RNA, 1251 nt, Artificial Sequence
  BAG61782 variant
augguggacuaccacgccgcuaaccagagcuaucaauacggccccuccucugcagggaauggagccgguggcgggggaucaaugggcgauuauauggcgcaggaggacgauugggacagagaucugcuccuugacccugcuugggaaaagcagcagaggaaaaccuucacagccuggugcaacagucaucugcggaaggcagguacucaaaucgagaauauugaugaagacuuucgcgauggguugaaauuaaugcugcuacucgaggucauaagcggagaacgacugccaaagccggagcguggcaaaaugagaguucacaagaucaacaaugugaacaaggcccuugacuucauugcuuccaaaggcguaaagcuggugucuaucggggcagaggaaauugucgauggaaaugccaaaaugacguuggguaugaucuggaccauaauccucagguuugcuauucaggacaucucgguggaggaaacaucagccaaggagggccugcugcucuggugucagcggaaaacugcgcccuacaagaacguuaaugugcagaacuuccauauuagcuggaaggauggguuagcauuuaaugcccugauccaccgccauagaccugagcuuauagaauaugacaaauugaggaaggacgauccagucaccaaccugaauaacgcuuucgagguggccgaaaaauaccuagacauucccaagaugcucgaugcagaggacaucguaaauacagcucggccugaugaaaaagccauuaugaccuauguuaguuccuuuuaccacgcguucucuggagcccaaaaggcagagacugcugccaaccgcaucugcaaagugcuggcugucaaccaggagaaugaacaccuuauggaggacuacgaaaagcuggccagcgauuugcucgaguggauccgaagaacaauuccauggcuggaagacagggugccccagaagaccauacaggagaugcaacagaaauuagaggauuuucgggacuaucgucgcgugcauaagccuccaaaaguccaggaaaagugucaacuggagaucaacuucaauacgcuccagacuaaacuuagacuguccaacaggccggcauuuaugcccucauggcggagucgagccucuagcuccccuaccucaacaugcgcugcgagcaguccagcacgccccauguuguggggcccugguucuagaccaagguggcggcgcuccggggccagcccccuaagauga

SEQ ID NO: 2024 - RNA, 1689 nt, Artificial Sequence
  BAG65349 variant
augguggacuaccacgcugcuaaccagagcuaucaauacggccccuccucugcagggaauggagccgguggcgggggaucaaugggcgauuauauggcgcaggaggacgauugggacagagaucugcuccuugacccugcuugggaaaagcagcagaggaaaaccuucacagccuggugcaacagucaucugcggaaggcagguacucaaaucgagaauauugaugaagacuuucgcgauggguugaaauuaaugcugcuacucgaggucauaagcggagaacgacugccaaagccggagcguggcaaaaugagaguucacaagaucaacaaugugaacaaggcccuugacuucauugcuuccaaaggcguaaagcuggugucuaucggggcagaggaaauugucgauggaaaugccaaaaugacguuggguaugaucuggaccauaauccucagguuugcuauucaggacaucucgguggaggaaacaucagccaaggagggccugcugcucuggugucagcggaaaacugcgcccuacaagaacguuaaugugcagaacuuccauauuagcuggaaggauggguuagcauuuaaugcccugauccaccgccauagaccugagcuuauagaauaugacaaauugaggaaggacgauccagucaccaaccugaauaacgcuuucgagguggccgaaaaauaccuagacauucccaagaugcucgaugcagaggacaucguaaauacagcucggccugaugaaaaagccauuaugaccuauguuaguuccuuuuaccacgcguucucuggagcccaaaaggcagagacugcugccaaccgcaucugcaaagugcuggcugucaaccaggagaaugaacaccuuauggaggacuacgaaaagcuggccagcgauuugcucgaguggauccagcgaacaauuccauggcuggaagacagagugccccagaaggcaauacaagagaugcagcagaaauuagaggauuuuagggacuaucggcgugugcauaagccuccaaaaguccaagaaaagugucagcuggagaucaacuucaauacccuccagacgaaacuucgccuguccaacagaccggccuuuaugcccucagaaggcaagaugguuagugauauuaauaacgguuggcagcacuuggagcaagcugaaaagggguacgaggaguggcuacugaaugaaaucaggcggcucgagcgacuggaccaucuugcggaaaaauuccgccagaaggcaagcauacacgaggccuggacugacggaaaagaggcuaugcugaagcacagagauuaugaaaccgccacauugucugacauuaaagcacucaucaggaagcaugaggccuuugaauccgaucuggcugcccaccaggaccggguggagcagaucgcagcgauugcucaagaauuaaacgagcuggauuacuaugacucacauaauguaaacacuccugauggccuacaggagggcccagggcagccccacagcccuaucccaccccucugcauuuacgccaagcauagucugcagucuuccggaguggguggcugggcagggcgcggauggggcagacuuagcccguugucgcuguguggucucgccaggcguuucccucggcccggguggggcgaccugggaccagcccuucuggucugguga

SEQ ID NO: 2025 - RNA, 2736 nt, Artificial Sequence
  AAH05033 variant
augguggacuaccacgccgcuaaccagagcuaucaauacggccccuccucugcagggaauggagccgguggcgggggaucaaugggcgauuauauggcgcaggaggacgauugggacagagaucugcuccuugacccugcuugggaaaagcagcagaggaaaaccuucacagccuggugcaacagucaucugcggaaggcagguacucaaaucgagaauauugaugaagacuuucgcgauggguugaaauuaaugcugcuacucgaggucauaagcggagaacgacugccaaagccggagcguggcaaaaugagaguucacaagaucaacaaugugaacaaggcccuugacuucauugcuuccaaaggcguaaagcuggugucuaucggggcagaggaaauugucgauggaaaugccaaaaugacguuggguaugaucuggaccauaauccucagguuugcuauucaggacaucucgguggaggaaacaucagccaaggagggccugcugcucuggugucagcggaaaacugcgcccuacaagaacguuaaugugcagaacuuccauauuagcuggaaggauggguuagcauuuaaugcccugauccaccgccauagaccugagcuuauagaauaugacaaauugaggaaggacgauccagucaccaaccugaauaacgcuuucgagguggccgaaaaauaccuagacauucccaagaugcucgaugcagaggacaucguaaauacagcucggccugaugaaaaagccauuaugaccuauguuaguuccuuuuaccacgcguucucuggagcccaaaaggcagagacugcugccaaccgcaucugcaaagugcuggcugucaaccaggagaaugaacaccuuauggaggacuacgaaaagcuggccagcgauuugcucgaguggauccgaagaacaauuccauggcuggaagacagggugccccagaagaccauacaggagaugcaacagaaauuagaggauuuucgggacuaucgucgcgugcauaagccuccaaaaguccaggaaaagugucaacuggagaucaacuucaauacgcuccagacuaaacuuagacuguccaacaggccggcauuuaugcccucagaaggcaagaugguuagugauauuaauaacgguuggcagcacuuggagcaggccgaaaagggguacgaggaguggcuacugaaugaaauccggcgacucgagcgccuggaccaucuugcugaaaaauucagacaaaaggcgagcauacacgaggcauggaccgacggaaaagaggccaugcugaagcacagggauuaugaaacagcuacuuugucugacauuaaagcccucauccggaagcaugaggcauuugaauccgaucuggccgcucaccaggaccgcguggagcagaucgccgcaauugcgcaggaauuaaacgagcuggauuacuaugacucacauaauguaaacaccagaugccaaaagaucugugaucagugggacgcucuaggcagccucacacacaguaggcgugaggcccuggagaaaaccgagaagcagcuugaagcaauugaucaguugcaucuggaguacgccaaacgggcugccccuuucaauaacuggauggaaucugcaauggaggaccuccaagauauguucauagugcacacgaucgaggaaauugagggccugaucuccgcucacgaccaguuuaagagcacucuuccagaugccgaccgagaaagagaggcgauccuggccauucauaaagaagcucagaggauagcagagucgaaucacaucaaguugucuggguccaaccccuauacaaccgucacuccucagauuaucaauucaaagugggagaaagugcaacagcucguuccaaagcgcgaccaugcccuguuagaagaacagaguaaacaacagagcaacgaacaucugcggagacaguucgcuucccaggccaacguggucggacccuggauucaaacaaagauggaggagaucgguaggauaucuaucgaaaugaauggcacccuagaggaucagcucagccaccugaaacaguacgaacgcucaauuguggacuacaagccgaaccuugauuugcuggagcagcaacaccagcucauccaggaagcacugauuuuugacaauaaacacacgaacuauaccauggagcauauccgaguagggugggagcaguuacugacaacuauagcgcggaccauuaaugaaguugagaaccaaauccuuacacgugaugccaagggaauuagucaggaacagaugcaagaguucagagcuuccuuuaaucacuucgacaaggaucauggcggugccuuggggccugaagaguuuaaagcaugccucaucagccugggcuacgacguggagaacgauaggcagggagaagcugaguucaaucgcauaaugucucuagucgaccccaaccacucaggccuggugacuuuucaggccuucaucgauuuuaugagucgggaaaccacagacaccgauacugcagaccaggucauugccagcuucaaggugcucgcuggggacaaaaauuuuaucacggcggaggaacugagaagggagcuuccaccugaucaagccgaguauuguauugcacgaauggcucccuaccagggaccagacgccguucccggugccuuggauuauaaguccuucucuacagcucuguacggcgaaucggacuuauga

SEQ ID NO: 2026 - RNA, 597 nt, Artificial Sequence
  EAX10817 variant
auggcccugcagggcaucagcgugauggagcucuccgggcuugcucccggaccuuucugcgcaaugguccuggccgacuuuggugcgagaguugugaggguagaucggccaggcucucgcuacgacgugucacgauuggggcguggaaagagaaguuuaguccuggaucuaaaacaaccgaggggcgcugccgugcuccggcgccuguguaagagaagcgacguucuucuggaacccuucaggcggggugugauggagaaauugcagcucgggccugaaauucugcagcgcgagaacccacgacugauauaugcaagacucuccggauuuggccagucuggcucguucugcagguuagccgggcacgauaucaauuaccuggcucuuucaggaggucggaacagcauuuuuaaguucuuuagugucgaaaauuccgagaucgagucugugggcagcaccucccguacagaacauguagggugguggucaacuuucuuguaugaccugcaagauagucgcuggggcauucacggauguuggagcaacagaacgcccguucuaagggcagccgaccagcggaccuggacaaaaguguga

SEQ ID NO: 2027 - RNA, 597 nt, Artificial Sequence
  BAF85677 variant
auggcccugcagggcaucagcguggucgagcucuccgggcuugcucccggaccuuucugcgcaaugguucuggccgacuuuggugcgagagugguaaggguggaucggccaggcucucgcuacgacgucucacgauuggggcguggaaagagaaguuuagugcuggaucuaaaacaaccgaggggcgcugccguucuccggcgccuguguaagagaagcgacgugcuucuggaacccuucaggcggggugucauggagaaauugcagcucgggccugaaauucugcagcgcgagaacccacgacugauauaugcaagacucuccggauuuggccagucuggcucguucugcagguuagccgggcacgauaucaauuaccuggcucuuucaggaggucggaacagcauuuuuaaguucuuuaguguggaaaauuccgagaucgagucuguaggcagcaccucccguacagaacauguugggugguggucaacuuucuuguaugaccugcaagauagucgcuggggcauucacggauguuggagcaacagaacgcccuuucuaagggcagccgaccagcggaccuggacaaaaguguga

SEQ ID NO: 2028 - RNA, 2763 nt, Artificial Sequence
  EAX05380 variant
auggaggugcagcugggccucgggagagucuaccccaggccuccaagcaagaccuaucggggagccuuccaaaaccuuuuucaguccguucgcgaagugauccagaauccggguccccgacacccugaggcugcaucugccgcgccacccggcgcuucacuguuguuacugcagcaacagcagcagcaacagcagcagcaacagcagcaacagcagcagcaacagcagcagcaacagcaggaaacaaguccucgucagcaacagcagcagcaaggggaggacggaagcccacaggcccauagaaggggccccacugguuaccuaguacucgaugaggaacagcaaccuucccagccacagucugcacuggagugccacccggaacgggggugugugcccgagccuggagccgcugucgcagccucgaaaggccuuccacagcaacugcccgcuccuccagacgaagaugacucagccgcgcccagcacguugagucuccugggcccgaccuucccugggcuguccucuugcagcgcagaucucaaggacauuuuauccgaggccucaacaaugcagcugcuucagcagcaacagcaggaggcugugagugaaggaagcagcuccggucgcgccagagaggcaucaggcgcucccacuagcaguaaagauaacuaucuugggggaaccucuacaauauccgacaaugccaaggaacuguguaaagcgguuagcgugucgaugggccuaggugucgaggcccucgaacaucugucuccaggggagcagcuuaggggagauugcauguacgcaccucuguugggcgugcccccagcuguacggcccaccccuugugccccacucgcugagugcaagggcucccuguuagacgauucagccgggaagaguacugaagacacagcagaguauagcccguuuaaaggagguuacaccaagggccuggaaggggagucccucggauguucuggcagcgccgcugcggguucaagugggacgcuugaacugcccuccacuuugagccuauauaaaucuggcgcacuggaugaggccgcugccuaccaaucacgcgacuacuauaacuucccucucgcacuggccggaccacccccuccacccccgccuccacacccccaugcucgaaucaaguuggagaauccucuggacuacggcagugccugggcagcggcugccgcacagugcagauauggggauuuggccagccuccacggagcuggugccgcaggccccggguccggaucuccaucggcugccgcgagcuccucauggcacacccuguuuacagccgaagagggccaguuauacgguccuugugggggcggaggcgggggagguggcgggggaggcggugggggcggaggcgggggaggcggugggggaggcgaagcuggugcaguugcccccuauggcuacacuaggccaccgcaagggcuggcuggacaggagagugacuucaccgccccugaugugugguaucccggcgggauggucucucgggugccauaccccagcccuacaugcgugaaauccgaaaugggaccauggauggacucauacagcggccccuauggugauaugcgucuagagaccgcacgcgaccauguccucccuauugauuacuauuuuccgccacagaagacgugucugaucugcggggacgaggcgucuggaugccacuacggcgcccuuacuugugguuccugcaagguuuucuuuaaaagagcugccgaaggcaagcagaaauauuugugugcaaguaggaacgauugcacaauugacaaguuccggcgaaagaauugucccagcugccgccugagaaaguguuacgaggcugggaugacccucggagccaggaaacugaagaaacuuggcaaccugaaauugcaagaagagggggaggcaucuuccacuacaucaccuaccgaagagacgacccagaagcucacagugagucauaucgaaggauaugagugccagccaauauuucugaauguauuagaagccaucgagcccggcguggucugugcuggucacgauaacaaucagccugacagcuucgcggcccugcuaucgucccucaacgagcugggggaacggcaacuugugcacguugugaaaugggcaaaggcuuugccgggauuucgcaaucugcaugucgacgaucagauggccgugauucaguacucuuggaugggccucaugguauucgccauggguuggagaucuuucacuaacguuaauucaaggaugcuguacuuugcucccgacuuaguguucaacgaguaucguaugcacaaaagucggauguacucccagugcguccgaaugagacaucugucucaagaauuuggcuggcuucagaucaccccacaggaguucuuguguaugaaggcacuccugcuauuuagcauuaucccuguggaugggcugaagaaccagaaauucuuugacgaacucaggaugaauuauauaaaggagcuggaucgcauuaucgccugcaaacggaagaaccccacauccugcucaagaagguucuaccaacuuacuaaauugcuggacagcguccagccaauugcgcgcgaguuacaccaguuuaccuucgaucuccugaucaagagucauauggugucuguugacuuuccugaaaugauggcugagaucauuuccgugcaaguacccaagauacuuagcggaaaagucaagccaaucuauuuccacacacaguga

SEQ ID NO: 2029 - RNA, 1239 nt, Artificial Sequence
  AAH64630 variant
auggcccccguggagcacgucguugcugacgcaggcgccuuccugagacaugcggcucuccaggauaucgggaagaacauuuacaccauaagggaagugguaacagagauccgggacaaagccacucgccgacgucuugcagugcugccuuaugaauugagauuuaaggagccauuaccggaauacgucaggcuggugacggaguucagcaaaaagaccggagauuaucccucccuaucugccacagacauucaaguucucgcucugacuuaccagcuugaggcagaauuugugggugucucacaccugaaacaggagccucagaaggugaagguaaguagcuccauccaacauccagaaacccccuugcacauuucuggcuuccaucucccuuauaaaccaaagcccccucaggagacagagaaagggcacucggccugcgaaccagagaaucuggaauuuagcucauucauguuuuggcggaacccgcugcccaauaucgaucacgagcuccaggaauuacugauagaccgcggagaggauguuccuagugaggaagaggaagaggaagagaacggcuucgaggacagaaaggaugacuccgaugacgauggugggggauggaucaccccaucuaauauuaaacagauccaacaggaacuugagcagugugacgugcccgaagacgucagggugggcugcuugacuacagauuuugcuaugcagaacgugcugcuacaaaugggccuccauguccuggccguuaaugggaugcuuauucgggaggcgcgcagcuacauccugcgaugucacggaugcuucaagaccacguccgacaugucaagaguguuuuguagucauugcgguaacaagacuuugaaaaagguaagcgugaccgucucugaugacggcacacuccacaugcacuucuccaggaauccuaaagugcugaacccacggggguuacguuauucacugcccacuccgaagggaggcaaauacgcaauaaauccucaucucaccgaagaucagcgcuuuccccagcuuagacugagccaaaaggccaggcagaaaacaaacguuuucgcuccagacuacauugccggugugaguccuuucgucgagaaugauaucucuucccggagcgcaaccuugcagguacgagacucgacgcuaggggcuggacgcagaaggcugaaccccaaugccucucggaagaaguuugugaaaaagcgcuga

SEQ ID NO: 2030 - RNA, 984 nt, Artificial Sequence
  AAH69102 variant
augcagaugcccgccaugaugagccugcuccuuguguccgucggccugauggaggcuuugcaagcacagucucacccuaucaccagaagggacuuauucucacaggaaauucagcuggauauggcccuagcgaguuuugacgaucaauacgcugggugcgccgcagccaugacagcugcacucccagaccugaaccauacugaguuccaggccaaucagguuuaugcugauagcuggacgcuugccuccucucaguggcaagaacggcaggcgcgcuggccggaguggucgcugucacccacccgaccuagcccacccccuuugggauuucgugacgaacacgguguggcacuccuggccuacacagcuaacaguccacugcauaaggaguucaaugccgcaguaagagaggcuggcaggucccgggcccacuaucuccaucacuuuucuuucaaaacuuuacacuuucugcuuaccgaagcguugcagcugcuagggagcggacagagacccccucgcugucaucaaguguucaggggcguccacggucuccgguuucgcccagccgggccgcgagcaacagugagacugggaggcuucgcuuccgccucacuuaagcauguugcugcccagcaguuuggcgaggauaccuucuuugggauauggacuugccugggagcacccaucaaagguuacaguuucuucccuggcgaagaggagguguugauuccacccuuugaaacauuccaagucaucaacgccagcaggcucgcucaggggccugcgcggauuuaucugcgugcauuaggaaagcacucuaccuacaauugugaguauaucaaagacaagaagugcaaauccggcccaugucaccuggauaacucagccaugggucagagcccccucagugcuguguggucucuucuguugcuacugugguuucucguaguucgcgccuucccggacgggccuggacugcuuuga

SEQ ID NO: 2031 - RNA, 1035 nt, Artificial Sequence
  AAH09751 variant
auggcccagaaggagaacagcuaccccuggccuuauggcagacaaaccgcuccauccgggcugucuacacucccgcagagggugcuucggaaagaacccgucacuccuucagcacugguuuugaugagucgcagcaaugugcagccaacggccgcgcccggacagaagguaauggagaacuccucugguaccccugacaucuuaacacgacacuucacuauugaugacuuugaaauaggccguccacuggggaaaggaaaguucggcaauguguaccuagcuagagagaaaaagucgcauuuuaucgucgcccucaaggugcuguucaaaucacaaauugaaaaggaggguguugagcaccagcuuaggcgggaaaucgagauucaggcacaucugcaccaucccaacaucuugcgccucuauaauuacuuuuaugauagaaggcggauauaccugauccuggaauaugccccucgcggggagcucuacaaagaguuacagaaaagcugcaccuucgacgaacaacgaacagcuaccauuauggaggaacuggcagaugcccuuauguacugucacggaaagaaggugauccacagagacauuaagccagagaacuugcugcuaggccucaaaggcgaacugaagaucgcugauuuuggguggaguguccaugccccgucccuuaggcggaaaacuaugugcggaacacuggacuauuugcccccugagaugauagagggucguaugcacaaugaaaagguggaucucugguguauuggcguacugugcuacgaguuacugguugggaacccacccuucgaaucugcgagccauaaugagaccuaucgcagaaucgugaaagucgaccucaaguuuccugcauccgugccaaugggagcccaggaucuuauuucaaaacuguugaggcacaaccccagugaacggcuaccgcuggcucaggugagcgcccacccuuggguccgagcaaauucucgcagaguucugcccccauccgcucuccagucaguggccuga

SEQ ID NO: 2032 - RNA, 360 nt, Artificial Sequence
  AAD48083 variant
augagcagauccguggcccuggcuguccucgcacuucugucuuugucaggcuuagaggccauccagaggacccccaagauucaaguuuacagucggcacccugcggaaaacgggaaaagcaauuuccugaacugcuauguguccggauuucauccaucugacauagagguagaucuacucaagaauggugaacgcaucgagaaaguggaacacucggaccugucauucagcaaggauuggaguuuuuaccuucuguauuacacagaguucacuccgacggagaaagacgaauaugcuugucgagucaaccaugugaccuugucccagcccaagauuguuaagugggaucgugacauguga

SEQ ID NO: 2033 - RNA, 1137 nt, Artificial Sequence
  AAH28058 variant
augagaaugcuggugagcggcaggcgggucaagaaauggcagcucaucauucaacuuuucgcuaccugcuuucuggccuccuugauguucuuuugggagcccauagacaaccacaucguuucucauaugaagucauacaguuaucgcuacuuaauuaauagcuaugauuucgugaacgacacacugucccuaaaacacacuucugcagggccucgauaccaguaucucaucaaucauaaggaaaaaugucaggcccaggauguacugcuucuguuguuugugaagacggcgccagagaacuacgaccguagaucgggaauuaggcggaccugggguaaugaaaacuauguccgcucacaacucaaugcuaacaucaagacacuguucgcccugggcacuccgaauccccucgagggggaagaguuacagagaaaacuggcaugggaggaucagagguacaacgacauaauccagcaagauuuuguggacagcuucuacaaucuuaccuugaagcugcuaaugcaguuuaguugggccaacacauauugcccucacgcuaaauuccucaugaccgcagaugacgauauuuuuauccauaugccaaaucugauugaauaccuucagucccuggagcagaucggaguucaagacuucuggauaggccgggugcaccgcggugcucccccuauucgagauaagucuagcaaauauuacgucuccuaugaaauguaccaguggccagccuaucccgacuacacugccggggcggcauacgugaucucaggagacguagccgcuaagguuuaugaggccagucagacauugaacagcucucucuacauugaugacguguuuaugggccugugugcaaauaagaucggcaucgucccucaagaucacguguucuucuccggggagggaaaaaccccauaucauccgugcauuuacgaaaagaugaugacgucacacggucauuuagaggaccugcaggaucucuggaaaaacgcuacugaccccaaggugaaaaccauaagcaagggcuuuuucgggcagaucuauuguagacuuaugaaaauuauccuguugugcaagauaaguuacgucgauacauauccuuguagggccgcguuuauuuga

SEQ ID NO: 2034 - RNA, 1602 nt, Artificial Sequence
  AAA35516 variant
auguggcugggcagaagggcccucugcgcucuugugcuguuguuagcaugugccagccuggggcuacucuacgcguccacccgggacgcucccggacugcgccuuccucuggccccaugggcaccgccccagucuccucgacguccagaguugcccgaucucgccccugaaccaagauaugcucacauccccgucaggauuaaggagcaaguugugggucugcuggcauggaacaauugcucaugugaaaguagcggcgggggacucccuuuaccauuccagaaacagguacgggccauagaccugacaaaggcuuuugauccggccgagcuucgcgcggcauccgccacuagagaacaggaguuccaagcauuuuugucuaggucgcagucacccgccgaccagcugcuaaucgcuccugcuaacagcccacuccaguacccccugcaaggcguggagguccagccucuucggaguauucuggugccagguuugucccuccaggccgcgucugggcaggaaguuuaucaagugaaucugacggccagcuuaggaaccugggaugucgcaggcgaggugacaggcguaacucugaccggggaaggacaggcugaccucacacuuguuucccccggucuggaucaguugaaccgccaacuacagcuggugaccuacucaagucgaagcuaucagacuaauacagccgacaccgucagauucucuacggagggccaugaggcugccuuuacuaucaggauucggcacccgccuaacccccgucucuacccaccugggucccugccccagggagcacaauauaauaucucagcccuugugaccauagcuacaaaaacuuuccugcgcuacgauagauugagggcgcucaucaccagcauucggcgauuuuacccaacagugaccgucguuaucgcagacgauagugacaagcccgaacgcgugucuggcccuuauguagagcauuaccugaugccauucgguaaagggugguuugccggaagaaacuuagcugugucccaggucacgacuaaguaugugcuguggguugaugacgacuucguguuuacagccaggacccggcuagaacgccucgucgaugugcuggagagaacuccgcuugacuugguaggcggcgcaguuagggaaauuagcggguucgccacaaccuaccgucagcugcucucgguggagcccggagcuccuggucugggcaauugccuucggcagcgaagaggguuucaccaugagcuggucggauucccaggcuguguggucacggauggugugguuaacuucuuuuuggccaggaccgacaaggugcgcgaaguaggguucgauccccggcucucuagagucgcacaccuggaguuuuucuuagacggccugggaucccuaagggugggcucaugcagugauguuguggucgaccacgcgagcaaacucaagcugccuuggacaucccgcgaugcuggggccgaaacuuaugcacgauaccgguauccaggaucucuugacgagagccaaauggccaaacaucguuugcuguuuuucaagcacagacuccaguguaugaccucacaguga

SEQ ID NO: 2035 - RNA, 849 nt, Artificial Sequence
  AAH74729 variant
auggccagccugggccagauccucuucugguccauuauaucuaucauuaucauucuugcuggggcaaucgcccugauaaucggauuugguauuucaggcagacacaguaucaccgugacaacugucgcgagcgcugggaacauuggagaggacggcaucuuguccugcacguucgaacccgauauaaaguuaucugacauuguuauccaauggcugaaagagggugugcuagggcucguacaugaauuuaaggagggaaaagaugaacugucggagcaggacgagauguucaggggccggaccgccguguuugcagaucaggucauugugggcaaugccucacuucgccugaagaacguucaguugacagacgcugggacuuacaaauguuauaucaucaccagcaagggaaaggguaaugcaaaccucgaauacaaaacaggcgccuucaguaugccugaggugaaugucgauuauaacgcuuccucugaaacccugcgaugcgaggccccacguugguuuccgcaacccacugugguaugggcgagccagguugaccagggggcaaauuucuccgaggugucaaacacaaguuuugaacugaauagcgagaacgucaccaugaagguggugucuguccucuacaauguuacgauuaacaauacuuauuccuguaugauagaaaacgauaucgccaaagcuaccggagacauuaaggugacagagucagaaaucaaaagaaggagccacuuacagcugcuuaauaguaaggccucuuugugcguauccagcuucuuugcaauaucgugggcucugcuaccucucucuccauaccugaugcuuaaguga

SEQ ID NO: 2036 - RNA, 132 nt, Artificial Sequence
  AAC50123 variant
auggccgcuagagcaguguuccuggcccucagcgcgcagcuucugcaagcuagguugaugaaggaggaaucccccgucguuucuuggcgguuagagccugaagacggcaccgcccugugcuuuaucuucuga

SEQ ID NO: 2037 - RNA, 1158 nt, Artificial Sequence
  AAN40694 variant
auggccgccgcacuguucgugcuccuuggcuuugcccuguuggggacccacggagcgagcggugcugccggcuucguccaggcacccuuaucccaacagagauggguugggggaucuguggagcugcauugcgaagccguaggcucaccugugccagagauccaguggugguuugaaggucaggggccgaacgacacauguagucaacuaugggauggagcuaggcucgaccggguccacauucaugcaacuuaccaccagcaugccgcuagcacgauauccaucgauacccugguggaggaagacacaggcacuuaugagugccgcgccucuaaugaucccgaccgaaaccaccuuacccgugcgccuagaguuaagugggugagggcacaggccgucgugcugguauuggagccaggcacaguuuucaccacuguggaagaucucgggucgaaaauucugcugacauguucacucaaugacagcgcuaccgaggucacgggacaccggugguuaaaggguggcguggugcugaaagaagaugcccuucccgggcagaagacugaguuuaaagucgacagugaugaccaauggggagaguacuccugcguuuucuugccugaaccaaugggcaccgcaaacauccagcugcauggucccccucgcgugaaggcuguaaagucuagcgagcacauuaaugaaggggagacagccaugcuaguguguaaauccgaaucagucccaccggugacugauugggcgugguauaagaucaccgacagugaggacaaagcccucaugaacggaagcgagucuagauuuuucguuuccucaagccagggcaggagugaacugcauauagagaaucuuaacauggaagcagaucccggccaguaccggugcaaugggacaucuuccaagggaagcgaccaagcuaucauuacccugcgcgugcgaucgcacuuggccgcucucuggccuuuucuggguaucgucgccgagguguuaguacugguuacgauuaucuucauauaugagaaaagaaggaagccagaagaugugcucgacgaugacgaugcaggcucugcuccccuuaaguccucagggcagcaccagaacgacaaaggaaagaauguccggcaacguaacaguagcuga

SEQ ID NO: 2038 - RNA, 720 nt, Artificial Sequence
  ABX60202 variant
auggcccacgcuggcagaaccggguacgacaacagggagaucgugaugaaguauauucauuacaaacugagccagcggggauaugaaugggaugccggugacgucggcgcagcgcccccuggggcugccccagcaccgggaauauucuccucucaacccggccacacaccucauccagccgcuucacgcgaucccguugcacgaacgaguccucuccagacuccagccgcucccggugccgcggcagggccugcccuuagcccagugccgcccguagugcaccugaccuugcgucaggcuggagacgauuuuuccagaagguaccggcgcgacuucgccgagaugucuucgcaguuacaucugacaccuuuuacugcaagaggcagguucgcuaccgucguggaagaacuauuucgggauggcguuaauugggggcgcaucguggccuucuuugaguucggaggugucaugugcguggagucaguaaaccgagagaugagcccacucguugacaauauugcgcuguggaugacagaauaucuuaacagacaucugcacaccuggauccaagauaauggcgggugggacgccuuuguggaguuguacggacccaguaugaggccucucuucgauuuuuccuggcugucucugaagacucucuuaagccuggcacuugucggcgcuuguauuacauugggugccuaucugucccacaaauga

SEQ ID NO: 2039 - RNA, 1290 nt, Artificial Sequence
  ABX82700 variant
augguggaccccgucggcuucgccgaggcuuggaaggcacaguuuccugauagcgaaccaccgagaauggagcugagguccguuggggacaucgaacaagagcucgaacggugcaaagccucuauucgccgacuugagcaggaggugaaccaggaacguuucagaaugauauaccugcagaccuuguuagcgaaggagaaaaagucauaugauaggcaacgguggggauuucgcagagcugcccaggcacccgacggugccagugaaccuagggcuagcgcaucccggccacagcccgccccugcugauggcgccgacccacccccugcggaggagccagaagcacgcccggauggggagggaucucccggcaaagcccgaccugguacagcuagaaggccaggggccgcagcuucgggagaacgggacgaucgugggcccccugccucaguagcggcccugcgcagcaauuucgagagaaucaggaagggccacggccagccaggagcagacgcugaaaagcccuuuuacgugaacgucgaguuccaucacgagcggggucuagugaaaguuaaugauaaggaagugagugaccgaauuuccucucucggcagccaagccaugcagauggagcgcaaaaagucccagcauggggcuggaucaagugucggcgaugccagcagaccgccuuauaggggucggucuuccgaaucaagcugugggguggacggagacuacgaggaugcagaacugaacccccgcuuucuuaaagacaaucugaucgaugccaacggcggcaguagaccaccuuggcccccauuggaguaucagcccuaccaaucuauuuauguagggggaaugauggagggugaaggcaaggggccucuccugaggucccagagcacuucggagcaggaaaagcgucugacguggccacggcgaucuuacuccccgagaucauucgaggacugcggaggcgguuacacccccgauuguaguagcaaugaaaaccucacauccucugaggaggacuuuagcucagggcaaaguuccaggguuagcccuucuccaacuaccuaucgcauguuccgggauaaaucaagaagucccagccaaaauucccagcagucuuuugacucgagcuccccuccaacaccccagugccacaagaggcaucgccacuguccgguggucgugucagaagcuaccaucgugggcguccgaaaaacuggacagauauggccuaacgauggcgagggggcguuccacggagacgcagaugguggcuga

SEQ ID NO: 2040 - RNA, 1665 nt, Artificial Sequence
  ABX82703 variant
augguggaccccgucggcuucgccgaggcuuggaaggcacaguuuccugauagcgaaccaccgagaauggagcugagguccguuggggacaucgaacaagagcucgaacggugcaaagccucuauucgccgacuugagcaggaggugaaccaggaacguuucagaaugauauaccugcagaccuuguuagcgaaggagaaaaagucauaugauaggcaacgguggggauuucgcagagcugcccaggcacccgacggugccagugaaccuagggcuagcgcaucccggccacagcccgccccugcugauggcgccgacccacccccugcggaggagccagaagcacgcccggauggggagggaucucccggcaaagcccgaccugguacagcuagaaggccaggggccgcagcuucgggagaacgggacgaucgugggcccccugccucaguagcggcccugcgcagcaauuucgagagaaucaggaagggccacggccagccaggagcagacgcugaaaagcccuuuuacgugaacgucgaguuccaucacgagcggggucuagugaaaguuaaugauaaggaagugagugaccgaauuuccucucucggcagccaagccaugcagauggagcgcaaaaagucccagcauggggcuggaucaagugucggcgaugccagcagaccgccuuauaggggucggucuuccgaaucaagcugugggguggacggagacuacgaggaugcagaacugaacccccgcuuucuuaaagacaaucugaucgaugccaacggcggcaguagaccaccuuggcccccauuggaguaucagcccuaccaaucuauuuauguagggggaaugauggagggugaaggcaaggggccucuccugaggucccagagcacuucggagcaggaaaagcgucugacguggccacggcgaucuuacuccccgagaucauucgaggacugcggaggcgguuacacccccgauuguaguagcaaugaaaaccucacauccucugaggaggacuuuagcucagggcaaaguuccaggguuagcccuucuccaacuaccuaucgcauguuccgggauaaaucaagaagucccagccaaaauucccagcagucuuuugacucgagcuccccuccaacaccccagugccacaagaggcaucgccacuguccgguggucgugucagaagcuaccaucgugggcguccgaaaaacuggacagauauggccuaacgauggcgagggggcguuccacggagacgcagaugguaguuuuggcacaccacccggguacggaugcgccgcugaccgggccgaggaacagcguagacaucaggacggcuuaccuuauaucgaugacucucccagcuccucaccacaccugagcucuaaggguagggggucccgcgaugcacuuguuaguggcgccuuggagagcaccaaggcuucugaacuggaccuagagaaaggacucgaaaugcggaaaugggugcuguccggcauucuugccucagaggaaacguaccugagucauuuggaggcacuccuguuaccuaugaagccccugaaggcggcugccacuaccagccaaccaguacucacaucgcagcagaucgagacuauuuucuucaaagugccggaucuucuguga

SEQ ID NO: 2041 - RNA, 1545 nt, Artificial Sequence
  ABX82704 variant
augguggaccccgucggcuucgccgaggcuuggaaggcacaguuuccugauagcgaaccaccgagaauggagcugagguccguuggggacaucgaacaagagcucgaacggugcaaagccucuauucgccgacuugagcaggaggugaaccaggaacguuucagaaugauauaccugcagaccuuguuagcgaaggagaaaaagucauaugauaggcaacgguggggauuucgcagagcugcccaggcacccgacggugccagugaaccuagggcuagcgcaucccggccacagcccgccccugcugauggcgccgacccacccccugcggaggagccagaagcacgcccggauggggagggaucucccggcaaagcccgaccugguacagcuagaaggccaggggccgcagcuucgggagaacgggacgaucgugggcccccugccucaguagcggcccugcgcagcaauuucgagagaaucaggaagggccacggccagccaggagcagacgcugaaaagcccuuuuacgugaacgucgaguuccaucacgagcggggucuagugaaaguuaaugauaaggaagugagugaccgaauuuccucucucggcagccaagccaugcagauggagcgcaaaaagucccagcauggggcuggaucaagugucggcgaugccagcagaccgccuuauaggggucggucuuccgaaucaagcugugggguggacggagacuacgaggaugcagaacugaacccccgcuuucuuaaagacaaucugaucgaugccaacggcggcaguagaccaccuuggcccccauuggaguaucagcccuaccaaucuauuuauguagggggaaugauggagggugaaggcaaggggccucuccugaggucccagagcacuucggagcaggaaaagcgucugacguggccacggcgaucuuacuccccgagaucauucgaggacugcggaggcgguuacacccccgauuguaguagcaaugaaaaccucacauccucugaggaggacuuuagcucagggcaaaguuccaggguuagcccuucuccaacuaccuaucgcauguuccgggauaaaucaagaagucccagccaaaauucccagcagucuuuugacucgagcuccccuccaacaccccagugccacaagaggcaucgccacuguccgguggucgugucagaagcuaccaucgugggcguccgaaaaacuggacagauauggccuaacgauggcgagggggcguuccacggagacgcagaugguaguuuuggcacaccacccggguacggaugcgccgcugaccgggccgaggaacagcguagacaucaggacggcuuaccuuauaucgaugacucucccagcuccucaccacaccugagcucuaaggguagggggucccgcgaugcacuuguuaguggcgccuuggagagcaccaaggcuucugaacuggaccuagagaaaggacucgaaaugcggaaaugggugcuguccggcauucuugccucagaggaaaucacgcuguga

SEQ ID NO: 2042 - RNA, 1326 nt, Artificial Sequence
  ABX82705 variant
augguggaccccgucggcuucgccgaggcuuggaaggcacaguuuccugauagcgaaccaccgagaauggagcugagguccguuggggacaucgaacaagagcucgaacggugcaaagccucuauucgccgacuugagcaggaggugaaccaggaacguuucagaaugauauaccugcagaccuuguuagcgaaggagaaaaagucauaugauaggcaacgguggggauuucgcagagcugcccaggcacccgacggugccagugaaccuagggcuagcgcaucccggccacagcccgccccugcugauggcgccgacccacccccugcggaggagccagaagcacgcccggauggggagggaucucccggcaaagcccgaccugguacagcuagaaggccaggggccgcagcuucgggagaacgggacgaucgugggcccccugccucaguagcggcccugcgcagcaauuucgagagaaucaggaagggccacggccagccaggagcagacgcugaaaagcccuuuuacgugaacgucgaguuccaucacgagcggggucuagugaaaguuaaugauaaggaagugagugaccgaauuuccucucucggcagccaagccaugcagauggagcgcaaaaagucccagcauggggcuggaucaagugucggcgaugccagcagaccgccuuauaggggucggucuuccgaaucaagcugugggguggacggagacuacgaggaugcagaacugaacccccgcuuucuuaaagacaaucugaucgaugccaacggcggcaguagaccaccuuggcccccauuggaguaucagcccuaccaaucuauuuauguagggggaaugauggagggugaaggcaaggggccucuccugaggucccagagcacuucggagcaggaaaagcgucugacguggccacggcgaucuuacuccccgagaucauucgaggacugcggaggcgguuacacccccgauuguaguagcaaugaaaaccucacauccucugaggaggacuuuagcucagggcaaaguuccaggguuagcccuucuccaacuaccuaucgcauguuccgggauaaaucaagaagucccagccaaaauucccagcagucuuuugacucgagcuccccuccaacaccccagugccacaagaggcaucgccacuguccgguggucgugucagaagcuaccaucgugggcguccgaaaaacuggacagauauggccuaacgauggcgagggggcguuccacggagacgcagaugguaguuuagaacugcagggcaagccaucucgguggacacaguga

SEQ ID NO: 2043 - RNA, 1575 nt, Artificial Sequence
  ABX82706 variant
augguggaccccgucggcuucgccgaggcuuggaaggcacaguuuccugauagcgaaccaccgagaauggagcugagguccguuggggacaucgaacaagagcucgaacggugcaaagccucuauucgccgacuugagcaggaggugaaccaggaacguuucagaaugauauaccugcagaccuuguuagcgaaggagaaaaagucauaugauaggcaacgguggggauuucgcagagcugcccaggcacccgacggugccagugaaccuagggcuagcgcaucccggccacagcccgccccugcugauggcgccgacccacccccugcggaggagccagaagcacgcccggauggggagggaucucccggcaaagcccgaccugguacagcuagaaggccaggggccgcagcuucgggagaacgggacgaucgugggcccccugccucaguagcggcccugcgcagcaauuucgagagaaucaggaagggccacggccagccaggagcagacgcugaaaagcccuuuuacgugaacgucgaguuccaucacgagcggggucuagugaaaguuaaugauaaggaagugagugaccgaauuuccucucucggcagccaagccaugcagauggagcgcaaaaagucccagcauggggcuggaucaagugucggcgaugccagcagaccgccuuauaggggucggucuuccgaaucaagcugugggguggacggagacuacgaggaugcagaacugaacccccgcuuucuuaaagacaaucugaucgaugccaacggcggcaguagaccaccuuggcccccauuggaguaucagcccuaccaaucuauuuauguagggggaaugauggagggugaaggcaaggggccucuccugaggucccagagcacuucggagcaggaaaagcgucugacguggccacggcgaucuuacuccccgagaucauucgaggacugcggaggcgguuacacccccgauuguaguagcaaugaaaaccucacauccucugaggaggacuuuagcucagggcaaaguuccaggguuagcccuucuccaacuaccuaucgcauguuccgggauaaaucaagaagucccagccaaaauucccagcagucuuuugacucgagcuccccuccaacaccccagugccacaagaggcaucgccacuguccgguggucgugucagaagcuaccaucgugggcguccgaaaaacuggacagauauggccuaacgauggcgagggggcguuccacggagacgcagaugguaguuuuggcacaccacccggguacggaugcgccgcugaccgggccgaggaacagcguagacaucaggacggcuuaccuuauaucgaugacucucccagcuccucaccacaccugagcucuaaggguagggggucccgcgaugcacuuguuaguggcgccuuggagagcaccaaggcuucugaacuggaccuagagaaaggacucgaaaugcggaaaugggauccugugaagaugacgcccacuuucucccugcauuguaugauucuuuggccaguagagaucacccuguga

SEQ ID NO: 2044 - RNA, 1398 nt, Artificial Sequence
  ABX82707 variant
augguggaccccgucggcuucgccgaggcuuggaaggcacaguuuccugauagcgaaccaccgagaauggagcugagguccguuggggacaucgaacaagagcucgaacggugcaaagccucuauucgccgacuugagcaggaggugaaccaggaacguuucagaaugauauaccugcagaccuuguuagcgaaggagaaaaagucauaugauaggcaacgguggggauuucgcagagcugcccaggcacccgacggugccagugaaccuagggcuagcgcaucccggccacagcccgccccugcugauggcgccgacccacccccugcggaggagccagaagcacgcccggauggggagggaucucccggcaaagcccgaccugguacagcuagaaggccaggggccgcagcuucgggagaacgggacgaucgugggcccccugccucaguagcggcccugcgcagcaauuucgagagaaucaggaagggccacggccagccaggagcagacgcugaaaagcccuuuuacgugaacgucgaguuccaucacgagcggggucuagugaaaguuaaugauaaggaagugagugaccgaauuuccucucucggcagccaagccaugcagauggagcgcaaaaagucccagcauggggcuggaucaagugucggcgaugccagcagaccgccuuauaggggucggucuuccgaaucaagcugugggguggacggagacuacgaggaugcagaacugaacccccgcuuucuuaaagacaaucugaucgaugccaacggcggcaguagaccaccuuggcccccauuggaguaucagcccuaccaaucuauuuauguagggggaaugauggagggugaaggcaaggggccucuccugaggucccagagcacuucggagcaggaaaagcgucugacguggccacggcgaucuuacuccccgagaucauucgaggacugcggaggcgguuacacccccgauuguaguagcaaugaaaaccucacauccucugaggaggacuuuagcucagggcaaaguuccaggguuagcccuucuccaacuaccuaucgcauguuccgggauaaaucaagaagucccagccaaaauucccagcagucuuuugacucgagcuccccuccaacaccccagugccacaagaggcaucgccacuguccgguggucgugucagaagcuaccaucgugggcguccgaaaaacuggacagauauggccuaacgauggcgagggggcguuccacggagaacauccaggugcagccgaggagguuuuucagaaguuacugcccgacauccggggcgcugccgaugcagaccagcuugugugcgaaacaccugacuguccccaacacagugccgaucaucaguga

SEQ ID NO: 2045 - RNA, 1377 nt, Artificial Sequence
  ABX82709 variant
augguggaccccgucggcuucgccgaggcuuggaaggcacaguuuccugauagcgaaccaccgagaauggagcugagguccguuggggacaucgaacaagagcucgaacggugcaaagccucuauucgccgacuugagcaggaggugaaccaggaacguuucagaaugauauaccugcagaccuuguuagcgaaggagaaaaagucauaugauaggcaacgguggggauuucgcagagcugcccaggcacccgacggugccagugaaccuagggcuagcgcaucccggccacagcccgccccugcugauggcgccgacccacccccugcggaggagccagaagcacgcccggauggggagggaucucccggcaaagcccgaccugguacagcuagaaggccaggggccgcagcuucgggagaacgggacgaucgugggcccccugccucaguagcggcccugcgcagcaauuucgagagaaucaggaagggccacggccagccaggagcagacgcugaaaagcccuuuuacgugaacgucgaguuccaucacgagcggggucuagugaaaguuaaugauaaggaagugagugaccgaauuuccucucucggcagccaagccaugcagauggagcgcaaaaagucccagcauggggcuggaucaagugucggcgaugccagcagaccgccuuauaggggucggucuuccgaaucaagcugugggguggacggagacuacgaggaugcagaacugaacccccgcuuucuuaaagacaaucugaucgaugccaacggcggcaguagaccaccuuggcccccauuggaguaucagcccuaccaaucuauuuauguagggggaaugauggagggugaaggcaaggggccucuccugaggucccagagcacuucggagcaggaaaagcgucugacguggccacggcgaucuuacuccccgagaucauucgaggacugcggaggcgguuacacccccgauuguaguagcaaugaaaaccucacauccucugaggaggacuuuagcucagggcaaaguuccaggguuagcccuucuccaacuaccuaucgcauguuccgggauaaaucaagaagucccagccaaaauucccagcagucuuuugacucgagcuccccuccaacaccccagugccacaagaggcaucgccacuguccgguggucgugucagaagcuaccaucgugggcguccgaaaaacuggacagauauggccuaacgauggcgagggggcguuccacggagacgcagaugguaguuuuggcacaccacccggguacugcuguuuaugccugccugccuggcccucuggauguaccgcugccacggcacggguuacucguagcuga

SEQ ID NO: 2046 - RNA, 1365 nt, Artificial Sequence
  ABX82710 variant
augguggaccccgucggcuucgccgaggcuuggaaggcacaguuuccugauagcgaaccaccgagaauggagcugagguccguuggggacaucgaacaagagcucgaacggugcaaagccucuauucgccgacuugagcaggaggugaaccaggaacguuucagaaugauauaccugcagaccuuguuagcgaaggagaaaaagucauaugauaggcaacgguggggauuucgcagagcugcccaggcacccgacggugccagugaaccuagggcuagcgcaucccggccacagcccgccccugcugauggcgccgacccacccccugcggaggagccagaagcacgcccggauggggagggaucucccggcaaagcccgaccugguacagcuagaaggccaggggccgcagcuucgggagaacgggacgaucgugggcccccugccucaguagcggcccugcgcagcaauuucgagagaaucaggaagggccacggccagccaggagcagacgcugaaaagcccuuuuacgugaacgucgaguuccaucacgagcggggucuagugaaaguuaaugauaaggaagugagugaccgaauuuccucucucggcagccaagccaugcagauggagcgcaaaaagucccagcauggggcuggaucaagugucggcgaugccagcagaccgccuuauaggggucggucuuccgaaucaagcugugggguggacggagacuacgaggaugcagaacugaacccccgcuuucuuaaagacaaucugaucgaugccaacggcggcaguagaccaccuuggcccccauuggaguaucagcccuaccaaucuauuuauguagggggaaugauggagggugaaggcaaggggccucuccugaggucccagagcacuucggagcaggaaaagcgucugacguggccacggcgaucuuacuccccgagaucauucgaggacugcggaggcgguuacacccccgauuguaguagcaaugaaaaccucacauccucugaggaggacuuuagcucagggcaaaguuccaggguuagcccuucuccaacuaccuaucgcauguuccgggauaaaucaagaagucccagccaaaauucccagcagucuuuugacucgagcuccccuccaacaccccagugccacaagaggcaucgccacuguccgguggucgugucagaagcuaccaucgugggcguccgaaaaacuggacagauauggccuaacgauggcgagggggcguuccacggagacgcagaugguaguuuuggcacaccacccggguacggaugcgccgcuggccggccuccccauuuaaccgaacugccaguucagcaccaguga

SEQ ID NO: 2047 - RNA, 1404 nt, Artificial Sequence
  ABX82711 variant
augguggaccccgucggcuucgccgaggcuuggaaggcacaguuuccugauagcgaaccaccgagaauggagcugagguccguuggggacaucgaacaagagcucgaacggugcaaagccucuauucgccgacuugagcaggaggugaaccaggaacguuucagaaugauauaccugcagaccuuguuagcgaaggagaaaaagucauaugauaggcaacgguggggauuucgcagagcugcccaggcacccgacggugccagugaaccuagggcuagcgcaucccggccacagcccgccccugcugauggcgccgacccacccccugcggaggagccagaagcacgcccggauggggagggaucucccggcaaagcccgaccugguacagcuagaaggccaggggccgcagcuucgggagaacgggacgaucgugggcccccugccucaguagcggcccugcgcagcaauuucgagagaaucaggaagggccacggccagccaggagcagacgcugaaaagcccuuuuacgugaacgucgaguuccaucacgagcggggucuagugaaaguuaaugauaaggaagugagugaccgaauuuccucucucggcagccaagccaugcagauggagcgcaaaaagucccagcauggggcuggaucaagugucggcgaugccagcagaccgccuuauaggggucggucuuccgaaucaagcugugggguggacggagacuacgaggaugcagaacugaacccccgcuuucuuaaagacaaucugaucgaugccaacggcggcaguagaccaccuuggcccccauuggaguaucagcccuaccaaucuauuuauguagggggaaugauggagggugaaggcaaggggccucuccugaggucccagagcacuucggagcaggaaaagcgucugacguggccacggcgaucuuacuccccgagaucauucgaggacugcggaggcgguuacacccccgauuguaguagcaaugaaaaccucacauccucugaggaggacuuuagcucagggcaaaguuccaggguuagcccuucuccaacuaccuaucgcauguuccgggauaaaucaagaagucccagccaaaauucccagcagucuuuugacucgagcuccccuccaacaccccagugccacaagaggcaucgccacuguccgguggucgugucagaagcuaccaucgugggcguccgaaaaacuggacagauauggccuaacgauggcgagggggcguuccacggagacgcaguuuuaaagacagaagugccacaucaggguguacggcgugccagacugagucuugaggcuuugggcgaggaucccucuuuucuguucccugccagcgacgggcccaggcacuccucaaccugguga

SEQ ID NO: 2048 - RNA, 1542 nt, Artificial Sequence
  ABX82712 variant
augguggaccccgucggcuucgccgaggcuuggaaggcacaguuuccugauagcgaaccaccgagaauggagcugagguccguuggggacaucgaacaagagcucgaacggugcaaagccucuauucgccgacuugagcaggaggugaaccaggaacguuucagaaugauauaccugcagaccuuguuagcgaaggagaaaaagucauaugauaggcaacgguggggauuucgcagagcugcccaggcacccgacggugccagugaaccuagggcuagcgcaucccggccacagcccgccccugcugauggcgccgacccacccccugcggaggagccagaagcacgcccggauggggagggaucucccggcaaagcccgaccugguacagcuagaaggccaggggccgcagcuucgggagaacgggacgaucgugggcccccugccucaguagcggcccugcgcagcaauuucgagagaaucaggaagggccacggccagccaggagcagacgcugaaaagcccuuuuacgugaacgucgaguuccaucacgagcggggucuagugaaaguuaaugauaaggaagugagugaccgaauuuccucucucggcagccaagccaugcagauggagcgcaaaaagucccagcauggggcuggaucaagugucggcgaugccagcagaccgccuuauaggggucggucuuccgaaucaagcugugggguggacggagacuacgaggaugcagaacugaacccccgcuuucuuaaagacaaucugaucgaugccaacggcggcaguagaccaccuuggcccccauuggaguaucagcccuaccaaucuauuuauguagggggaaugauggagggugaaggcaaggggccucuccugaggucccagagcacuucggagcaggaaaagcgucugacguggccacggcgaucuuacuccccgagaucauucgaggacugcggaggcgguuacacccccgauuguaguagcaaugaaaaccucacauccucugaggaggacuuuagcucagggcaaaguuccaggguuagcccuucuccaacuaccuaucgcauguuccgggauaaaucaagaagucccagccaaaauucccagcagucuuuugacucgagcuccccuccaacaccccagugccacaagaggcaucgccacuguccgguggucgugucagaagcuaccaucgugggcguccgaaaaacuggacagauauggccuaacgauggcgagggggcguuccacggagacgcagaugguaguuuuggcacaccacccggguacggaugcgccgcugaccgggccgaggaacagcguagacaucaggacggcuuaccuuauaucgaugacucucccagcuccucaccacaccugagcucuaaggguagggggucccgcgaugcacuuguuaguggcgccuuggagagcaccaaggcuucugaacuggacccugugaaaaugacgcccacuuucucccuacauuguaugauucucuggccaguagagaucacccuguga

SEQ ID NO: 2049 - RNA, 1221 nt, Artificial Sequence
  ABX82714 variant
augguggaccccgucggcuucgccgaggcuuggaaggcacaguuuccugauagcgaaccaccgagaauggagcugagguccguuggggacaucgaacaagagcucgaacggugcaaagccucuauucgccgacuugagcaggaggugaaccaggaacguuucagaaugauauaccugcagaccuuguuagcgaaggagaaaaagucauaugauaggcaacgguggggauuucgcagagcugcccaggcacccgacggugccagugaaccuagggcuagcgcaucccggccacagcccgccccugcugauggcgccgacccacccccugcggaggagccagaagcacgcccggauggggagggaucucccggcaaagcccgaccugguacagcuagaaggccaggggccgcagcuucgggagaacgggacgaucgugggcccccugccucaguagcggcccugcgcagcaauuucgagagaaucaggaagggccacggccagccaggagcagacgcugaaaagcccuuuuacgugaacgucgaguuccaucacgagcggggucuagugaaaguuaaugauaaggaagugagugaccgaauuuccucucucggcagccaagccaugcagauggagcgcaaaaagucccagcauggggcuggaucaagugucggcgaugccagcagaccgccuuauaggggucggucuuccgaaucaagcugugggguggacggagacuacgaggaugcagaacugaacccccgcuuucuuaaagacaaucugaucgaugccaacggcggcaguagaccaccuuggcccccauuggaguaucagcccuaccaaucuauuuauguagggggaaugauggagggugaaggcaaggggccucuccugaggucccagagcacuucggagcaggaaaagcgucugacguggccacggcgaucuuacuccccgagaucauucgaggacugcggaggcgguuacacccccgauuguaguagcaaugaaaaccucacauccucugaggaggacuuuagcucagggcaaaguuccaggguuagcccuucuccaacuaccuaucgcauguuccgggauaaaucaagaagucccagccaaaauucccagcagucuuuugacucgagcuccccuccaacaccccagugccacaagaggcaucgccacuguccgguggucgugucagaagcuaccaguggccaguga

SEQ ID NO: 2050 - RNA, 2346 nt, Artificial Sequence
  AAH58926 variant
auggccacccaggcugaccugauggagcucgauauggcaauggaacccgacagaaaggccgcggugagccacuggcaacagcaguccuaccuugauucuggcauccauucaggggcuacaacuacggccccuagucugagcggaaaagguaacccagaggaagaggacgucgauaccucccagguuuuguaugaaugggagcaaggcuucucucagucguuuacacaggaacagguggcagacauugaugggcaauacgccaugacuagggcucagcggguacgcgcagccauguucccggagaccuuagacgagggaaugcagauacccucaacacaguuugaugcugcccacccuaccaaugugcaacgacuggcggaaccaagccagaugcuaaagcaugcagucgugaaccucaucaauuaucaggacgaugccgagcuggcuacucgugccauucccgagcuuacaaaacuguugaacgacgaagaucaaguuguggucaauaaggcagcugugaugguacaccagcucaguaaaaaggaggccuccagacaugcgaucaugaggucuccucagaugguuagcgccauugugcggaccaugcagaacacgaaugacgucgaaacugcacgcugcaccgcuggcacacugcacaaccugucccaccauagagagggucucuuagccaucuucaagucagggggaauaccagcucuggugaaaaugcuuggcagucccguggacagcgucuuguuuuacgccaucacuacccugcacaaucuacuccugcaucaagaaggcgcaaagauggccguuaggcuugcugggggacugcagaaaaugguggcguugcucaacaagacaaauguaaaauuccuggcaauuaccacggauuguuuacagauccuggccuaugguaaccaggagucuaagcucauuauccuugcuuccggcgggccucaagcccuggugaauauaaugcggacuuacacauaugagaaguugcuauggaccacuucacgcguccugaaagugcucagcguuugcaguucuaacaagccagcaauuguggaagccggaggcaugcaggcucugggucuucaccugacagacccgucccagcgauugguccagaauugucucuggacccugagaaacuuaagcgaugccgcaacgaaacaagaggggauggaaggacugcuaggcacccucgugcagcugcuuggcucggacgauaucaacguaguuacaugcgcggcugggauuuugucuaaucugacuuguaacaauuacaagaacaaaaugauggugugccaggucggagguaucgaggcccucgugaggaccguccugcgggcaggcgaccgugaagauaucacagagcccgccauuugugcucuuagacaccugacuuccagacaucaggaggccgaaauggcacaaaaugcugugagguugcacuacgggcucccuguugugguaaagcuguuacauccacccucacacuggccucugauaaaagccaccgucggacuaauccggaaccucgcgcugugcccagccaaucaugcuccccuucgagagcagggcgcaauuccgcgcuuggugcagcugcucguuagagcccaccaagacacacagaggcggaccaguaugggugggacucagcagcaauuuguggaaggcguccgcauggaggaaaucguggagggauguacgggcgcucugcacauauuagccagagauguacauaacaggauugugauccgugggcugaauacaaucccucuuuucguucaguugcucuauagccccauugagaacauccagcgggucgcagcgggagugcugugcgaacuagcccaggacaaggaggcugccgaagcaauugaggcugagggugccaccgcaccacugacugaacuccugcacucccgaaaugagggcguggccaccuacgcugcggccguccuuuuuagaaugucugaagauaagccucaagacuauaaaaagagguugagcguugagcugacaucaaguuuauuccgcaccgaacccauggcauggaacgagacugcugaccucgggcuggauauaggagcccagggcgagccacuugguuaccggcaggacgaucccuccuaucgcagcuuucauucugggggcuacggacaggacgcccugggcauggauccuaugauggaacacgagaugggagggcaccauccaggugcugacuauccgguggauggcuugcccgaccucgggcacgcacaagaucugauggacggacuaccuccaggcgauucaaaucagcuggccugguucgacacagaucucuga

SEQ ID NO: 2051 - RNA, 1692 nt, Artificial Sequence
  AAI21007 variant
auggacgugggcgagcugcucagcuaccagcccaacagagggaccaagaggccucgggaugacgaagaggaagaacagaaaaugcgccgaaagcaaacaggaacucgugaaagagguagguaucgggaggaggaaaugacggucguugaggaagccgaugacgauaaaaagcgccuucugcagaucauugacagagauggcgaggaggaagaggaagaggaggagccauuggacgaguccucugugaaaaagaugauauuaaccuucgaaaagaggucauacaaaaaucaggagcugcggaucaaguuuccggauaaccccgaaaaauucauggagagugaacuagaccucaaugauauuauccaagagaugcacguaguggcuacaaugccugaccuguaucaucuucuggucgaguugaacgcagugcagagccuccuggggcugcucggacacgauaauacugacguuuccauugccguggucgacuuacugcaggaacuuaccgauaucgacacauugcaugagucugaagagggcgcggaagugcugauagaugcucuaguagacggucagguuguggcccuccugguccaaaaccuugagcgccuggaugagucggugaaggaagaggcagacggggugcacaauaccuuggccaucgucgaaaacauggcugaguuucgaccagagaugugcacugaaggagcacagcagggccuccugcagugguuacugaaaagacucaaggccaagaugcccuucgaugcuaauaaacuuuacuguucagagguucuggccauuuugcuacaagacaacgaugaaaauagggagcugcucggcgaacuggacgggaucgaugugcuucugcagcaguugagcguauuuaagcggcauaacccuaguacagcggaggagcaagaaaugauggagaaucucuucgacucccugugcucuuguuuaaugcugagcuccaaccgugaacgcuuucuaaaaggagagggucuccagcugaugaaucuuauguugagagaaaagaaaauuucaaggaguagcgcacugaaggugcucgaccacgccaugaucggcccagaggggaccgauaacugccacaaauucgucgacauacugggacuucggacgauuuuuccccuguucaugaagucuccucgaaagaucaaaaaggugggcacuaccgagaaagaacaugaggaacacguuuguuccauuuuggcuucacuccugcgcaacuuaagaggucagcagaggacacggcugcuaaauaaguuuacugagaacgauagcgaaaaaguggaccgccucauggagcugcauuucaaguaucuuggggccaugcaagucgcagauaagaaaaucgagggagaaaagcacgacauggugagaaggggcgagaucauugauaaugacaccgaagaggaguuuuacuugcgucggcuggaugcuggccucuucguacugcagcacauaugcuauaucauggccgaaauuuguaacgcgaauguuccacagauccgacagagagugcaucaaauauuaaacaugagggggaguucuauuaaaaucguccgccacaucauuaaggaguacgccgaaaauaucggagacggucgguccccggaguucagagaaaacgagcagaaaaggauucugggccuuuuggagaauuuuuga

SEQ ID NO: 2052 - RNA, 1833 nt, Artificial Sequence
  CCDS4772.1 variant
auggagaccgcccccaagccuggcaaagacgugccaccgaagaaagauaagcugcagacaaaaagaaagaagcccaggcgguacugggaagaggaaacugucccuacgaccgcuggggcaagcccaggacccccucgcaacaaaaagaaucgagagcuccguccacaaagacccaaaaacgccuauauccuuaagaaauccaggauuucuaagaagccucagguuccgaaaaagccacgggaauggaaaaaucccgagucacagcgcggucugaguggcacacaggacccuuucccagggcccgcgccugugccaguagaggugguccaaaaguuuugcagaauagauaaaagcaggaaguugccccacuccaaagcuaagacucggucucgcuuagaaguggccgaggcagaagaggaggaaaccucgaucaaggccgcucgaucagagcugcuacucgcagaggaaccgggauuccuggaaggcgaggacggugaggauacagccaaaauuugucaggcugacaucguugaagccguggauauugcgagcgcagccaagcauuuugaccuuaaccugagacaguucgggccuuacagguugaauuauagucggaccggacgucaccucgcuuuuggcggccgcagagggcaugucgccgcacuggauugggugacuaaaaagcugaugugcgagaucaacguaauggaagcuguuagggacauacgguuccuccacuccgaggccuuacuggcgguggcccagaaucgauggcuucauaucuacgauaaccaaggaauugaauugcacuguauccgcagaugcgacagggucacacggcuggaguuucuacccuuccacuuucuccuggcaaccgcuucugagacggguuuccuuacuuaucuggaugugagcgugggcaaaauugucgccgcuuugaaugcccgcgcagggagacucgacguuaugucccagaacccauacaaugccgugauccaucugggacacucaaacggcaccguaaguuuauggagcccugcuaugaaggaaccccuggcgaagauacucugucauagggguggggugcgugcagucgccguggacucuacaggaacuuauauggcuaccuccggccuugaucaccagcugaaaauuuuugacuugcggggcacauaccagccacuaucaacccgaacgcugccccacggggccggacaucucgcauucagccaaagaggucugcuuguugccggcaugggggauguggucaauaucugggcuggacagggcaaggccaguccuccaucucuggagcagccguacuugacucacaggcucuccggucccgugcaugggcugcaauuuugcccuuucgaagacguauuaggcguuggacacacaggcgggauuaccagcaugcuggugccaggagcgggugagcccaacuucgauggccuagaaucgaauccuuaucgcucucggaaacagagacaggagugggaggucaaggcacuccuggaaaaagugccagcugagcuuaucuguuuggaccccagggcccuggcagaagucgaugugaucucccucgagcaggggaagaaggagcaaauugaacgccugggauacgacccgcaggccaaagcuccuuuucagccaaagcccaaacagaagggccgaucaaguacugccagccuuguuaaacggaagcguaaggugauggaugaggaacauagagacaaaguaaggcaaucccugcagcagcagcaccacaaggaggcaaaagcuaagccuacaggugcccgccccucugcguuggaucgguucgucagauga

SEQ ID NO: 2053 - RNA, 897 nt, Artificial Sequence
  AAG37878 variant
augggccccaaggacagcgccaaaugccugcacagagggccucagccaucccauugggcugcaggagaugguccgacccaagagagguguggcccccggucucucgggucaccugugcuuggacuggacacaugccgcgccugggaucacgucgacggccagaucuugggucaguuacgaccacugacugaagaggaagaggaagagggggcgggagcuacgcuaagucguggccccgccuucccuggcauggggagcgaggaacucagacuggcauccuuuuacgauuggccacuuaccgccgagguucccccugaacuguuggcugcagccggauucuuucauacaggucaccaggacaaggugagguguuucuuuugcuauggcgggcuccaaucuuggaaacggggagaugacccauggacugagcaugcuaagugguucccgucgugucaguuucugcugcgcucaaaaggcagagauuucguacacagcgugcaggagacccacagucagcucuuagguuccugggaccccugggaggaaccugaagaugccgcgccagucgcacccucugugccugccagcggguacccagagcugcccacaccgaggcgggaaguucaauccgagucagcucaggagccuggaggcgugagucccgccgaagcacagcgcgcuugguggguccuugagccaccuggcgcccgagacguggaagcgcaguugagaaggcugcaagaggaacggaccugcaagguaugucuagaucgugccguuagcauuguguuuguccccugcgggcaucucgugugugcagagugcgcuccaggacugcagcuuugucccauaugccgcgccccugugagaucuaggguccggacuuuccuguccuga

SEQ ID NO: 2054 - RNA, 2280 nt, Artificial Sequence
  EAW60925 variant
auggaccugagcgcccucagaguggaggaaguccagaacguuaucaaugcuaugcaaaagauucuugagugccccauaugucuggaauugaucaaagagccuguguccaccaagugcgaucacauuuucuguaaauuuugcauguuaaagcugcuaaaccagaaaaagggcccaucucaguguccgcucugcaagaaugacaucacaaaaaggucacugcaggaaaguacucgguucagccaacuuguagaggagcuguugaagauuaucugugcauuucagcucgauacggggcuggaauacgccaacuccuauaauuucgcgaaaaaggagaacaauucucccgaacaucugaaagacgaggugucgauaauccagucaaugggauaccgcaaccgagcuaagcgucucuuacagagcgagccugaaaauccaagucugcaagagaccucccuuucuguccaguugagcaaccuggguacagugagaacucuaaggaccaagcagcggauucagccccagaaaacauccguuuauaucgaacucggcucagauaguagcgaggacaccgugaauaaggccacuuacugcucugucggggaucaagaacugcuucagauuacaccucaaggaacccgcgacgagaucucccuggauucagcgaaaaaggccgcuugugaguuuagcgaaacggacgugacuaacaccgagcaccaucagccaaguaauaacgauuugaauacaacugagaaaagagcagccgagaggcaccccgaaaaguaucagggcgaggcugccucugguugcgaguccgaaaccagcguaucggaggacuguucugggcucuccucacagagugauauacugacaacccaacagcgggacacgaugcagcauaacuuaauuaaacugcagcaagaaauggcggagcucgaagcaguucuugagcagcacggaagccagccuuccaacucuuacccaagcaucauuucagacaguuccgcccuggaggauuugcgcaauccggaacagagcacuucugagaaggugcuaacaucacaaaagaguagcgaauaucccaucucccagaacccugagggccugucugcugacaaauucgaggucucggccgauagcuccaccucaaagaauaaagaaccaggcguggagcgaaguucucccagcaagugcccuucccucgacgauagaugguacaugcacucaugcagcgggucucugcagaacaggaauuacccaucccaggaagaacuuaucaaaguggucgacguugaagaacaacagcuggaggaaaguggaccccaugauuugacugagacaagcuaucucccgcggcaggaccuggaagguaccccuuacuuagagucuggcauuucccuguuuucagaugaccccgaaagugauccaagcgaggaccgugcaccugagucggcucgcguggggaacauacccuccucuacgagcgcccuaaagguaccacaacucaagguggcggaaucagcccagagucccgcagcugcccacaccacagacacugcuggauauaaugccauggaggaauccgucucuagagagaaaccugaacugaccgcaagcacagagagggugaacaagcggauguccaugguugugucaggccuuacuccagaggaguucauguuggucuacaaauuugcccgaaagcaucacaucacccugacaaaucucauuaccgaggaaacuacgcacgugguaaugaaaacagaugcugaguucguuugugagcgcacccugaaguauuuucuugguaucgcagggggaaaguggguggucagcuacuucugggugacucagaguauaaaagaaagaaagaugcugaacgagcaugacuuugaagucaggggcgaugugguuaauggccggaaccaccaggggccgaaacgcgcaagagagucucaagacaggaagauuuuccguggauuggaaaucugcuguuauggucccuucaccaauaugccuacagaucagcucgaguggauggugcagcugugcggcgccuccguagucaaagaguuaagcucguuuacccuggggacuggagugcauccaaucguugugguccagcccgacgcuuggacagaagauaacggcuuccacgccauuggucaaaugugugaggcaccugugguaacgcgggaaugggugcuagacucaguugcccucuaccagugccaggagcuggauaccuaccuuaucccacagauuccccauucucacuauuga

SEQ ID NO: 2055 - RNA, 2160 nt, Artificial Sequence
  EAW60922 variant
auggaccugagcgcccucagaguggaggaaguccagaacguuaucaaugcuaugcaaaagauucuugagugccccauaugucuggaauugaucaaagagccuguguccaccaagugcgaucacauuuucuguaaauuuugcauguuaaagcugcuaaaccagaaaaagggcccaucucaguguccgcucugcaagaaugacaucacaaaaaggucacugcaggaaaguacucgguucagccaacuuguagaggagcuguugaagauuaucugugcauuucagcucgauacggggcuggaauacgccaacuccuauaauuucgcgaaaaaggagaacaauucucccgaacaucugaaagacgaggugucgauaauccagucaaugggauaccgcaaccgagcuaagcgucucuuacagagcgagccugaaaauccaagucugcaagagaccucccuuucuguccaguugagcaaccuggguacagugagaacucuaaggaccaagcagcggauucagccccagaaaacauccguuuauaucgaacucgccgcaugcgaguuuucagaaaccgaugugacuaauacagagcaccaucaaccuaguaacaaugaccugaacaccacggagaagcgcgccgcugaaagacacccagagaaauaccagggcgaagcagccagcgggugugagucugaaacuuccgucucagaggauugcagcggacuuaguucucaauccgacauucugaccacacagcagagggauacuaugcagcauaauuugaucaagcuccaacaggagauggcugaacuggaggccguguuagaacagcacggcagccagcccucgaacucuuauccuuccauaauuucagacaguagcgcgcuggaggaucuccggaacccagaacaauccaccucugagaaagcaguacuuacaagccagaagucaagugaguacccgaucucccagaaucccgaaggucugagcgccgacaaauucgagguuucugcugauucaaguaccagcaagaacaaggaaccugggguggagcgcuccucuccaucgaaaugucccagcuuggacgaccgaugguauaugcacuccugcucaggaagucuacagaauagaaacuacccuucucaagaggaacugauuaaggucguggauguggaggaacagcagcucgaggaaagcggcccacaugaccugacggagacuuccuaccuucccaggcaggaucuggagggcacaccguauuuggaaucagggaucagccucuuuucugacgauccugaguccgaccccagugaagaucgggccccagagagcgcacgugucggaaauaucccuucuuccaccucagcucugaaaguuccccaauuaaagguggccgaaagugcgcagagcccagccgcagcucacacuacagacaccgccgguuacaacgcuauggaggagucgguaucccgcgaaaaacccgagcugacggccucuaccgaaagagugaauaagaggaugagcauggucgugucaggccuaacaccugaggaguucaugcucguuuauaaguuugcacggaaacaucacauuacucugaccaaccuuauaacagaagagacuacccacguggucaugaagacagaugccgaguucgugugcgaacgaaccuugaaauacuuucuggggaucgcuggaggcaaguggguaguuaguuauuucugggugacucaguccauuaaagaacgcaagaugcucaaugagcaugacuuugaggucagaggugauguggucaacgggaggaaucaccaaggaccaaagcgggcgcgcgaaucucaggacagaaaaaucuucaggggccuggagauauguugcuacggcccguucacgaacaugcccacagaccagcuugaauggauggugcagcuguguggggcaagcguugugaaggaguuguccucauuuacccucggaacugguguacauccuauugucgugguucaaccagaugccuggaccgaagacaauggcuuccacgcuaucgggcagaugugcgaggcccccguggucacacgugagugggugcuggauagcguagcauuauaucagugucaggaacuggacaccuaccuaaucccucaaauuccacauagucacuacuga

SEQ ID NO: 2056 - RNA, 2166 nt, Artificial Sequence
  EAW60923 variant
auggaccugagcgcccucagaguggaggaaguccagaacguuaucaaugcuaugcaaaagauucuugagugccccauaugucuggaauugaucaaagagccuguguccaccaagugcgaucacauuuucuguaaauuuugcauguuaaagcugcuaaaccagaaaaagggcccaucucaguguccgcucugcaagaaugacaucacaaaaaggucacugcaggaaaguacucgguucagccaacuuguagaggagcuguugaagauuaucugugcauuucagcucgauacggggcuggaauacgccaacuccuauaauuucgcgaaaaaggagaacaauucucccgaacaucugaaagacgaggugucgauaauccagucaaugggauaccgcaaccgagcuaagcgucucuuacagagcgagccugaaaauccaagucugcaagagaccucccuuucuguccaguugagcaaccuggguacagugagaacucuaaggaccaagcagcggauucagccccagaaaacauccguuuauaucgaacucggcucagauaguagcgaggacaccgugaauaaggccacuuacugcucugucggggaucaagaacugcuucagauuacaccucaaggaacccgcgacgagaucucccuggauucagccaaaaagggcgaggcagcuagcgguugugaaagugagacgucuguguccgaagacugcagcggguugucgucucaguccgauauacucacuacccagcagagagacacaaugcaacacaaccugauuaaauuacagcaggagauggcagaacuggaggccguacucgagcagcauggaucacaaccaaguaauagcuaucccuccaucauuucugauagcucagcucuugaagaccugaggaacccugagcagaguacuuccgaaaaggccguuuugaccagccagaaaucuucagaguacccaaucagucagaauccggaaggccuaagcgcggacaaguuugagguguccgcagauucuucgacaagcaagaacaaagagcccggcgucgaacgguccucaccuaguaaguguccaucucuggacgaucgcugguauaugcacagcugcuccgggucacuccaaaaccgaaauuaccccagccaggaggaacugaucaaagugguggacgucgaggagcagcagcuugaagagucuggaccucaugaucugaccgaaacguccuacuugccaagacaagaccucgaggguacucccuaucuggaaaguggcauuagcuuauucucugaugacccggaguccgauccuucagaggacagggcccccgaaagugcucggguugggaacauaccaagcucgacauccgcccugaaggugccucagcuaaaaguagcagagucugcucagagccccgccgcggcccacaccacugauacagcaggauacaaugcuauggaagagucagugagucgugaaaagccagagcucaccgccuccacggagcgcgucaacaagagaaugucuauggugguuagcggccugacccccgaagaguuuaugcuuguguauaaauucgcuaggaagcaccauaucacauugacuaaucugauuaccgaagagacaacucacgucgugaugaaaaccgacgccgaauuuguaugcgagcggacacucaaguacuuccuggguaucgcagggggaaaauggguuguguccuauuuuugggucacccaaucaauaaaggagcgaaagaugcuuaacgaacaugacuucgaggugcgcggcgaugucgugaauggcagaaaccaccaggggccuaaaagggcccgggaaagccaggaccgcaagauuuuuagaggacuggagaucuguugcuacgguccauucacuaauaugccgacggaucaguuggaguggaugguucaacucuguggcgcuagugugguaaaagaacugucuuccuucacauuagggaccggaguccaccccaucgugguugugcagccugacgcguggacugaggauaacggcuuucaugcaauuggucagaugugcgaagccccagucgugaccagggaguggguacuggacagcguggcucuauaucagugucaagaacucgauacauaccugaucccccagauuccucacucgcauuacuga

SEQ ID NO: 2057 - RNA, 36 nt, Artificial Sequence
  AIC83575 variant
auggaccugagcgcccucagaguggaggaagucuga

SEQ ID NO: 2058 - RNA, 522 nt, Artificial Sequence
  ABC59810 variant
auggacgccgaguucgugugcgaaagaacccugaaguacuuucucggcaucgcugggggaaaaugggucguuagcuauuucugggugacacaguccauuaaggagaggaaaaugcuuaacgaacacgauuuugagguacggggugacguggucaauggccgcaaccaucaagggcccaagcgagcacgugaaucucaggauagaaaaauauucaggggacuggagaucuguugcuacggcccuuuuacuaauaugccaacggaccaguuggaguggauggugcaguuauguggugccucaguugugaaggaacugaguagcuucacccuagggacaggaguccacccgauugugguaguucaacccgaugcguggacugaggacaacggcuuucaugcuaucggccagaugugcgaagccccuguggucacccgggagugggugcucgauuccguggcacuguaucagugucaggagcuugacacauaccugauuccacaaaucccccacucucauuauuga

SEQ ID NO: 2059 - RNA, 1065 nt, Artificial Sequence
  ABC88652 variant
augcacagcugcuccggcucucugcagaacagaaauuaccccucacaagaggaacucaucaagguggucgacguugaggaacagcagcuugaggaaagugggccucaugaucugaccgagacaagcuauuugccaaggcaggacuuagagggaacuccguaccuggaauccgguauuucucuauucucggaugaccccgagucagauccuagcgaagaccgggccccagagagugcucgcgugggcaacauacccuccucuacgagcgcacucaaaguaccucaacugaagguggccgaguccgcgcaggggccagcugccgcacacaccacagauacugccggauauaaugcuauggaagagucagucagucgagaaaaacccgagcuuaccgcaagcacagaacgugugaacaagagaaugucuaugguuguguccggccugaccccugaggaguuuauguuggucuacaaauucgccaggaagcaucacaucacucucacaaaucugauuaccgaagagacgacucaugugguaaugaagaccgacgcugaauuuguuugugagcggacacugaaauauuuccucgguaucgccgggggaaaguggguggucucauacuuuugggugacucagagcauuaaagaacgcaagauguuaaacgagcacgauuucgaggugagaggcgacgucguuaauggcaggaaccaccaggggccaaaacgggcgcgcgaaagucaagaucgaaagaucuuuagaggacuggagauaugcuguuaugguccguucaccaauaugcccacagaccagcuugaauggauggugcaguugugcggcgcaucuguagugaaggagcuguccagcuuuacccuagggacgggaguccauccuaucgugguugugcagccagaugccuggacugaagacaacggcuuccacgcuauuggucaaaugugugagacacccgucgugaccagggaguggguacucgacucgguugcccuguaccagugccaggaacuugauacuuaccugaucccucaaauuccacauucucacuauuga

SEQ ID NO: 2060 - RNA, 2043 nt, Artificial Sequence
  EAW60939 variant
auggaccugagcgcccucagaguggaggaaguccagaacguuaucaaugcuaugcaaaagauucuugagugccccauaugucuggaauugaucaaagagccuguguccaccaagugcgaucacauuuucuguaaauuuugcauguuaaagcugcuaaaccagaaaaagggcccaucucaguguccgcucugcaagaaugacaucacaaaaaggucacugcaggaaaguacucgguucagccaacuuguagaggagcuguugaagauuaucugugcauuucagcucgauacggggcuggaauacgccaacuccuauaauuucgcgaaaaaggagaacaauucucccgaacaucugaaagacgaggugucgauaauccagucaaugggauaccgcaaccgagcuaagcgucucuuacagagcgagccugaaaauccaagucugcaagagaccucccuuucuguccaguugagcaaccuggguacagugagaacucuaaggaccaagcagcggauucagccccagaaaacauccguuuauaucgaacucggcgaggccgcaucagggugcgaaagugagaccagcgugucugaggauuguuccggacugucaagccaaagugacauucuuacuacacagcaacgcgauaccaugcagcacaaucugaucaaguugcagcaggaaauggccgagcucgaagcuguccuggagcaacauggcucucagccuuccaacagcuacccaucgauaauuucugacuccucagcauuagaagaucugagaaaucccgagcagaguacgagcgagaaagccgugcucacuucccagaagucuagcgaauauccuaucucacaaaacccagagggucuuagugcugacaaauuugaaguauccgccgauagcucuaccucaaagaauaaagagccggggguugaaaggaguagccccuccaagugcccuucucuggacgaucggugguacaugcacucguguagcggauccuugcagaaccgcaacuauccaucacaggaggagcuaauuaagguggucgacguggaggaacagcaacuggaagagaguggcccccaugaccucacagagacuucuuaccugccucgacaggaucuugaaggcaccccauaccuggagagcgggaucuccuuguucucagacgaucccgaaagcgacccgucugaggauagagcgccugaauccgcaagggugggaaauauccccaguagcacaucugcccucaaagucccacagcugaagguugcugaguccgcccagaguccugcagcugcccacaccacggacacugcggguuauaacgccauggaggaaucagugagccgggagaaacccgaauuaacagcaucgaccgagcguguaaauaagcgcauguccaugguggucucuggccugacuccagaagaguuuaugcuaguguacaaauucgcuagaaagcaccauauuacacucaccaaccugauaacggaggaaaccacacacguugugaugaagacugaugccgaguuugucugcgaaaggacccuuaaauauuucuuggggaucgcuggaggcaagugggugguaagcuacuuuuggguuacacaaucaauuaaagagcggaagaugcugaaugaacaugacuucgaggugcgaggugaugucgugaacgggcgcaaucaccagggacccaaaagagccagggagagucaggaccggaagaucuuucgcggccucgaaauaugcuguuauggcccuuucacuaacaugccaaccgaucaacuggaguggaugguccagcuuugcggggcauccgugguuaaggaacugucuagcuucacauugggaaccggugugcacccgauuguagucgugcagcccgacgccuggacugaggacaauggcuuucaugcuaucgggcagaugugugaggcgccuguugugacgagagaauggguccucgauuccguggcacuguaccaaugccaggaguuagacacauaucugaucccacagauuccccacucacauuacuga

SEQ ID NO: 2061 - RNA, 546 nt, Artificial Sequence
  AAC72302 variant
augcugcucgagcccggcagagggugcugugcccuugcuauccuguuggcaauuguggacauacagagcggagguugcaucaacauuaccuccucugccucacaagaaggcacaagguuaaaucugaucuguacugucuggcacaagaaagaggaagcggagggguucguuguguuucuaugcaaggaucggaguggagacuguagcccugaaacgucccucaaacagcugcgccuuaagcgagauccaggcauugacgguguaggggagaucucuucgcagcugauguucaccauaucacaggugacaccguugcauagcggaacuuaccaaugcugugcucguagucagaaauccggcaucagacuccagggccacuuuuucucuauucuguuuaccgagacagggaacuauaccgucacuggacugaagcagaggcaacaucucgaguucagccacaaugaagguacauuauccucaggcuuucugcaggaaaagguguggguuaugcuugugaccaguuuggucgcccugcaggcacuauga

SEQ ID NO: 2062 - RNA, 639 nt, Artificial Sequence
  BAG58223 variant
augcugcucagcguguacuucaaggagcaguuucuugacggcgauggguggaccuccagauggaucgaaucuaaacacaagucagacuucggaaaauuuguccugaguagcgguaaguucuauggcgaugaggaaaaagacaagggguugcaaacaucccaggaugccagguuuuacgcuuuaucugcaucguucgagcccuuuucaaacaagggacagacucugguugugcaguucacgguaaaacaugaacaaaauauugacugcggcgguggguaugugaagcuauuuccuaacagccucgaucagaccgacaugcacggagauagugaguacaauauaauguucggcccagacaucuguggcccggggacuaaaaagguccaugugauuuuuaacuauaaaggaaagaauguucugaucaacaaggauauucggugcaaagacgaugaguucacacaccuuuacacccugaucgugcgccccgacaauacauaugaagucaagauagacaacucccagguggagucugguagcuuggaagaugacugggauuuucucccucccaaaaagaucaaagacccagaugccuccaagccugaggacugggaugagcgagcgaaaauugacgauccauga

SEQ ID NO: 2063 - RNA, 891 nt, Artificial Sequence
  BAG65301 variant
augcacggcgacagcgaguacaacaucauguucgggcccgauauuugcggaccugguaccaagaaagugcaugucauauuuaauuauaagggcaaaaacguucugaucaauaaggacauuagauguaaagaugacgaauuuacacaccucuacacucuuaucgugaggccagauaacacguaugagguaaagauugacaauucccagguggaaucugggucacuggaggaugacugggauuucuugccgcccaagaaaaucaaggacccugaugccaguaaaccagaagacugggaugagcgggcuaagauagacgaccccaccgauagcaaaccugaggacugggauaagccagaacauauccccgacccugaugcaaagaaaccagaggacugggaugaagagauggacggagagugggaaccgcccgucauucaaaacccugaguacaagggcgaauggaaaccacgccagaucgauaaucccgacuauaaggguacauggauucacccugagaucgauaacccagaauacucccccgacccgucuauauaugccuacgacaauuucgggguguuaggacuggaucuauggcagguuaaaucgggcacuauuuuugacaacuuccucaucaccaaugaugaggcguacgcugaggaauuuggcaacgagacauggggagugaccaaggccgcagaaaaacagaugaaggacaagcaagaugaggaacagcgacugaaagaggaggaagaggacaagaaacguaaggaagaggaagaggccgaggauaaagaagacgaugaggacaaggaugaagacgaggaggaugaagaggacaaggaagaggacgaagaggaggaugucccugggcaggcuaaagacgaacuuuga

SEQ ID NO: 2064 - RNA, 1254 nt, Artificial Sequence
  AAA36582 variant
augcugcucagcgugccccuucuguugggcuuacuggggcuagccgucgcugagccugcaguuuacuucaaggaacaguuucucgacggagaugguuggaccuccagauggaucgagucuaaacacaagucagacuucggcaaauuugugcugaguagcgggaaguucuauggagaugaagagaaagacaagggccuucaaacaucccaggaugccagguuuuacgcgcugucugcuucguucgaaccauuuucaaacaagggucagacuuugguagugcaguucacggucaaacaugagcaaaauauugacugcgggggaggcuaugugaagcucuuuccgaacagccuggaucagaccgacaugcacggcgauagugaguacaauauaauguucgggcccgacaucuguggaccugguacuaaaaagguucaugugauuuuuaacuauaaaggcaagaauguccugaucaacaaggauauucggugcaaagacgaugaguucacacaccucuacaccuuaaucgugcgcccagacaauacauaugaaguaaagauagacaacucccagguugaaucugggagccuggaggaugacugggauuuucuucccccuaaaaagaucaaagacccagaugccuccaagcccgaggacugggaugaacgagcaaaaauugacgauccuaccgacucaaagccagaggauugggacaagccggaacauauccccgacccugaugccaaaaagccagaggacugggaugaagagauggacggagagugggaacccccugugauucagaauccagaguacaaaggcgaauggaagccccgucaaaucgauaacccggacuacaaagguacuuggauacacccugagauugauaaucccgaauauaguccagacccuagcaucuacgcuuaugauaacuucggggucuugggacuggaccuauggcaagugaagucuggcacaauuuucgauaauuuucucaucaccaacgacgaggcauacgccgaggaguucggcaaugaaacguggggagugacuaaggcugccgaaaaacagaugaaggauaaacaggacgaggaacagagacugaaggaggaggaagaggacaaaaagaggaaggaagaggaggaagcggaggauaaagaagacgaugaggacaaggaugaagacgaggaggaugaagaggacaaagaagaggaugaagaggaggacguccccgggcaggcaaaggaugaacuuuga

SEQ ID NO: 2065 - RNA, 1155 nt, Artificial Sequence
  BAB71655 variant
auggccagagcucuggugcagcucugggcaaucugcaugcuuagggucgcccuggcgaccguuuacuuccaagaggaauuuuuggacggcgagcacuggcggaaccgcugguuacagagcacaaaugauucccgauucgggcauuuucgucugucuucaggaaaguucuauggucacaaagaaaaggacaaaggccuacagacuacgcagaacgggagauuuuacgcuauuagugccagguucaagcccuuuagcaauaaaggaaagacccucgugauacaauauacaguaaagcaugagcagaaaauggauuguggcgguggguacaucaagguguucccugcagacauugaucagaaaaaccugaauggaaagucccaguauuacaucauguuuggcccagacauuugcggcuucgauaucaaaaagguccacgugauacuucauuuuaagaacaaauaucacgaaaauaagaaacugauccgguguaagguugacggguucacucacuuguacacccucauucugcgcccggaucugucuuacgacgugaaaaucgauggacaaucgauugagucagguagcaucgaguaugacuggaaccucacaaguuuaaagaaagaaaccucccccgccgagucuaaggauugggaacagacuaaggacaauaaagcucaggacugggagaagcauuuucuggaugcaagcacauccaaacagucagacuggaacggcgaucuugacggggauuggccugccccaauguugcaaaagcccccuuaccaggacggacugaaaccagagggcauacacaaggaugucuggcuacauagaaagaugaaaaauaccgacuaucucacgcaguacgaucugagugaauuugagaacauuggugcuaucgggcuugaacuguggcaagugaggagcggaacuauuuucgacaauuucuugaucaccgaugacgaggaauaugccgacaacuucggcaaggcgacauggggcgagacuaaagggcccgagcgggaaauggaugcaauccaggccaaggaggaaaugaaaaaggcucgcgaggaagaggaggaggaacuccugucuggaaagauuaaucgacacgaacacuacuuuaaccaguuccauagaaggaacgaguuauga

SEQ ID NO: 2066 - RNA, 330 nt, Artificial Sequence
  CAA10193 variant
augcugauggcccaggaggcucucgcauuccuuauggcccaaggcgcgaugcuggcugcccaggaaagaagggugccccgggcagccgaggucccuggggcucagggacagcaagguccacgcggccgagaagaggcaccgcgugggguuagaauggccgugcccuuguuaaggcggauggaaggagcuccugccggcccaggugggcgcaccgcggcaugcuuuagcuguacauccagaugccugucuaggcggcccuggaagcgcucauggagugccggaagcuguccuggcaugccacaccuaucccccgaccagggccgauucuga

SEQ ID NO: 2067 - RNA, 1440 nt, Artificial Sequence
  CAA66853 variant
auggacuucagcagaaaccuguacgauaucggcgagcagcucgacuccgaagaucuugccucucugaaguuuuugucauuagacuauauuccccaaaggaaacaggagccuauaaaggaugcucugaugcuauuccagcggcuccaggaaaaacgcaugcuggaggaaaguaaucuuagcuuucugaaggagcuccucuuccgaaucaaccgucuggaccugcucauuaccuacuuaaauacaagaaaagaggaaauggagagggaacugcaaacuccagggcgggcacagaucuccgccuaucgcgugaugcuuuaccagauuucugaggaggucucgagaucagaauugaggagcuuuaaguuccugcuacaggaggaaaucaguaagugcaaacucgaugacgauaugaaccugcuugacauauuuaucgagauggaaaagcggguuauucugggagaggguaaauuggauauccucaagcgcgugugugcgcaaauuaauaaaucccuguuaaagaucauaaacgacuaugaggaguucucuaaggagcgaagcuccucacuggaaggcaguccggaugaguuuagcaauggggaagaguugugcggaguaaugacgauuucugacucccccagagagcaggacucagaaagccagacccuugauaaaguguaccagaugaagaguaaaccuaggggcuauugucugaucauuaacaaucacaacuucgcuaaggcccgggagaaagucccaaaguugcauucuauccgugaccgcaaugguacacaccuagaugcaggggcccugacuaccacauuugaagaacuccauuucgaaaucaaaccccacgacgauugcaccguggagcaaauuuacgagauacugaagaucuaccagcuuauggaccauuccaacauggauuguuuuauuugcuguauccugagccacggagacaagggcauaauuuauggcacugaugggcaggaagcuccuaucuacgaguugacaucgcaauucaccggacucaaaugcccaucucuggcagguaagcccaaaguuuucuuuauccaggccugucagggcgacaauuaucagaaggggauuccuguggaaacggauuccgaggagcaaccauacuuagaaauggaccugucaaguccgcagacuagauauauccccgacgaggcugauuuccuacucggaauggccaccgucaacaauugcgugagcuacaggaacccugcggaaggcacaugguauauucagucccugugucagucucuucgggagcgaugcccacgcggugacgauauauugacuauccugaccgaaguaaacuacgagguuagcaauaaagacgauaagaagaacauggggaaacaaaugccccagccuacauuuacccucagaaagaaacugguguucccaucagacuga

SEQ ID NO: 2068 - RNA, 1569 nt, Artificial Sequence
  CCDS2340.1 variant
augaaaagccagggccaacacugguacuccucuucagacaagaacugcaaggugaguuucagagagaaacugcucaucauugauagcaaucuugggguccaggacguugaaaaccugaaguuuuuguguauaggauuagugcccaauaaaaagcuggagaaguccucuucggccucagauguauucgaacaucuacucgcugaggaccugcuuagcgaagaggauccauuuuuccuggcagaguugcucuauaucauuaggcagaaaaagcugcugcagcaccucaacugcaccaaagaagagguggaacgguuacugccuacacgccaacgagucagucuuuuucguaauuugcuguacgagcuauccgaggguaucgacucugaaaaccucaaggauaugauuuuccugcuuaaagacagccugccgaagacugagaugacguccuugucauuucucgccuuccuggaaaagcagggcaaaaucgaugaggacaauuuaaccugucuggaagaucucugcaagacagugguucccaaacuucugagaaacauagagaaguauaaaagggagaaggcgauccagauugugacuccuccagucgacaaagaagcugagaguuaccagggggaagaggaauuggugagccaaaccgauguaaagacauuucuagaggcccugccccaggagucuuggcagaauaagcaugcaggauccaacggcaaucgggccaccaacggugcuccuucacucguuagccgcgggaugcagggagcaagugccaauacucugaacucugaaacauccaccaaaagagcugccguguauaggaugaaucggaaccaccgcggccuuugugucaucgugaacaaucauagcuucacgucgcugaaggaccgacaaggcacucacaaagacgcggagauuuugucucacguguuucaguggcucggguucaccguccauauccacaacaauguuacaaagguggaaauggagaugguacugcagaaacaaaagugcaacccagcacaugccgauggagacuguuuuguguucugcauauuaacucacgguagauucggcgcugucuacuccucagaugaagcccugauucccaucagggagauuaugagucacuuuaccgcacuacaguguccucggcucgcugagaagccaaaacuguucuuuauccaggccugccagggggaagagauccaaccgagcguguccauugaagcggacgcccuuaaucccgagcaggcaccuacaucuuugcaggauagcauaccagcugaggccgacuuccugcucggacuggcuaccguucccggcuaugugucauuucgucaugucgaagaggguaguugguacauccagucccuuuguaaccaccugaagaaauuggugccucgccaugaagauauucucagcauccugacggccguaaaugacgauguuucuagaaggguggacaagcaagggacuaaaaagcagaugccacagcccgcauucacauuacggaagaaacuggucuuuccggugccucuagaugcccucucacuguga

SEQ ID NO: 2069 - RNA, 1020 nt, Artificial Sequence
  EAW65632 variant
auguggcagcugugggccagccucugcugucuucugguguuggcuaacgcaagauccaggcccucuuuccacccuuuaucagacgagcuggucaauuacguuaacaagcggaauaccacauggcaagccggccauaacuuuuauaauguggauaugaguuaccuaaaacgccucugcgggacuuuccugggagguccaaagccgccccagcgaguaauguuuacggaagaccuuaaacugccugcgagcuucgaugcucgugagcaguggccacagugucccaccaucaaggaaauuagagaccaaggcuccugcgggucuuguugggccuuuggagcaguggaggccauaucggauaggaucugcauucacacaaacgcucaugucucaguggaaguuagcgcagaggacuugcucacuuguugcggcaguauguguggugaugggugcaauggaggcuauccugccgaggcuuggaacuucuggacccggaaaggccugguguccgggggacuguacgaaucucacgucgguugucgcccauauagcauucccccuugcgagcaucacgugaauggcuccagaccaccgugcacaggggaaggagacacccccaaguguucaaagaucugcgagccuggcuacaguccaacuuauaaacaggauaagcacuacgguuacaacagcuauucuguauccaauucagagaaagacaucauggccgaaauauacaagaacgggcccguugagggagcguuuagcguguauagugauuuccucuuauacaaaucuggcgucuaucagcaugugacaggcgaaaugaugggagggcacgcaaucaggauucuggguuggggcguggagaaugggaccccuuacuggcuugucgccaacuccuggaauacggacuggggagauaacggcuuuuucaagaucuugcggggucaggaccauugugggauugaaagcgagguuguggcuggcaucccacgcacugaccaauauugggagaagauauga

SEQ ID NO: 2070 - RNA, 1020 nt, Artificial Sequence; identical to SEQ ID NO: 2069
  AAC37547 variant

SEQ ID NO: 2071 - RNA, 1002 nt, Artificial Sequence
  EAW62731 variant
augaaccccacccugauccucgccgcuuucugccuuggcauugcaagcgccacacugacuuuugaccacuccuuggaggcgcaguggacgaaguggaaagcuaugcauaauagauuauacgggaugaacgaagagggauggaggcgggccgugugggaaaagaauaugaaaaugauagagcugcacaaccaagaauaucgcgaggguaagcauucuuucaccauggcaaugaaugccuuuggcgauaugacaucagaggaguuccgacaggucaugaacggguuucagaaucguaaaccuagaaagggaaagguuuuccaggaaccacuauuuuacgaagcuccgaggaguguggacuggcgggagaaaggcuauguaacucccgugaagaaccaaggucagugugggagcugcugggcauucuccgccaccggagcucucgagggccagauguuucgcaaaacaggcagacugaucucucuuucggaacagaaucuggucgauuguucagggccucaaggaaacgaggguugcaauggcggguugauggacuacgccuuccaguaugugcaggauaacggaggccucgacagcgaagagaguuacccauaugaagcgaccgaggaguccuguaaguacaaucccaaauacucuguugcaaacgauacugguuuuguggacauuccuaagcaggaaaaggcccugaugaaagcugucgccacaguggggccaaucagcguagcaauugaugcuggacacgaguccuuccuguuuuauaaggaaggcaucuacuucgagcccgacugcucaagugaagauauggaccauggcguucucguggucggguauggauucgagagcaccgagucugauaauaacaaauacugguuagugaagaacuccuggggugaagaguggggcaugggaggguaugugaaaauggccaaggacaggcggaaucacuguggcauagcgucagccgcaagcuacccuacggucuga

SEQ ID NO: 2072 - RNA, 1002 nt, Artificial Sequence; identical to SEQ ID NO: 2071
  AAA66974 variant

SEQ ID NO: 2073 - RNA, 456 nt, Artificial Sequence
  AAG17239 variant
auggacuacgccuuccaguaugugcaagauaacggcgggcuggacagcgaggaauccuaccccuaugaggcuaccgaagagucuugcaaguacaauccuaaauauucagucgcaaacgauacaggauuuguugacaucccaaagcaggaaaaagcccucaugaaggcgguggcuacuguagguccgauuaguguggccauagaugcaggccacgagagcuuccuguuuuacaaagaggggaucuauuucgaacccgacuguuccucugaggauauggaccauggaguccuugugguuggcuacgguuuugaaucgacggagucagauaauaacaaguacugguuggugaagaauagcuggggagaggaaugggggaugggcggcuaugucaaaauggccaaggacagaaggaaccacugcgggauugcuagugcagccuccuacccuaccguguga

SEQ ID NO: 2074 - RNA, 984 nt, Artificial Sequence
  AAA51932 variant
augcuguuccuccuucugcccuuguuagccgugcugccuggcgacgggaacgcugauggacuaaaggagccacucagcuuucacgucaccuggaucgcauccuucuacaaucauucuuggaaacagaaccugguuucagguuggcuuagugaccugcaaacacacacuugggauagcaauuccucuacgauuguguuuuugugcccguggucgagaggcaacuucucaaaugaagaguggaaggaacucgagacccuguuuaggauacggacaauccgcagcuucgaagggauucgacguuaugcccaugagcugcaguuugaguaccccuucgaaauccagguaacuggaggcugugagcuccacagugguaaaguguccgggagcuuuuuacagcuggcguaucaaggaucugacuucgucuccuuucagaacaauucauggcuuccuuacccaguggcuggcaacauggccaagcauuucugcaaaguuuugaaucagaaccagcacgaaaaugauauuacccacaaccugcuaagugacacaugucccagauuuauccucggccugcuugaugcagggaaggcccaucugcaaaggcaagugaagccugaggcuugguugagccacggaccaucucccgguccuggccaucuccagcuggucugccacguguccggguucuauccaaaaccgguauggguuauguggaugcggggagagcaggaacagcagggcacccagcgcggugacauauuacccucagcagaugggacuugguaccugagagccacacucgagguggcugccggagaagcggcagaccuuagcuguagggucaagcacaguucucuggagggccaagauaucguguuguauugggaacaucacuccagcgugggcuucauuauccuagccgucauuguuccucugcuccugcuuaucgggcuggcuuugugguuucggaaacgcugcuucuguuga

SEQ ID NO: 2075 - RNA, 1002 nt, Artificial Sequence
  AAA51939 variant
augcugcuccuucccuuccagcuguuggccguguuauuuccuggcgggaacagcgagcacgcuuuccaaggaccaaccuccuuucaugucauccagacaucuucauucacuaauaguacgugggcacagacccaggguagcggcuggcuggacgaucuacaaauucacgggugggacuccgauucuggaacagccauauuucucaagccguggucgaaaggcaacuucucagacaaggaaguugcggagcuggaagagaucuuuagaguguacauuuucgguuuugcuagggaaguacaggauuucgccggggacuuucagaugaaauaucccuucgagauccagggaauugcaggcugcgagcuucauagcggcggggccaucgugaguuuucugcggggagcuuuggguggccucgauuuccuguccgucaagaaugcaucuugugugccuagcccagaagggggaucccgcgcccaaaaauucugcgcucugauaauccaguaccagggcauuauggagacuguucgaauccucuuauaugaaaccuguccccguuaccugcuugguguguugaacgccgggaaggcggaccugcagagacaagucaagccugaggcauggcuaucaaguggaccaagccccggcccuggcaggcuccagcuggugugccacguaucuggguuuuauccaaaaccgguuugggugauguggaugcggggagagcaggaacaacaggguacacagcuuggcgauauucugcccaaugccaacuggaccugguacuugcgcgcuacucucgacgucgccgauggggaggcagcuggacuguccuguagagugaagcauagcucauuagaaggccaggacaucauacuguauuggaggaauccuacaaguauugguucuaucgugcucgccauuaucgucccaucccuucuguugcuacugugccucgcgcugugguacaugcggcgccgaagcuaccaaaacauccccuga

SEQ ID NO: 2076 - RNA, 1002 nt, Artificial Sequence
  AAI26466 variant
augcuguuccuccaguuucuucuguuggccuuacugcuacccggcggggacaacgcugaugcaagccaagagcacguguccuuccaugucauccagauauuuucuuucguuaaucagucaugggccagaggacaggguaguggcuggcucgacgaacugcaaacccacgggugggauagcgaguccggaacaauuaucuuucuucauaacuggucuaagggcaauuucucgaacgaggaacugucagacuuggaacuccuguuuagguucuaccuguuuggucucacucgggagauucaggaucacgcgagccaggacuauaguaaauacccuuucgaggugcagguaaaggcugggugcgaauuacauuccggaaaaucuccagagggcuuuuuccaaguggccuuuaauggccuggaucuuuugagcuuccagaacacgaccugggucccgucccccggguguggaucacuggcacagagugugugccaccuacucaaucaccaguaugaagguguuacagagacuguguacaaccugauccgcagcaccuguccucgauuccuucugggcuugcucgacgccgggaagauguauguccaucgucaagugagaccagaggcuuggcugucuuccaggcccucauuaggaagcggccagcugcuccuuguaugccacgcaagugguuuuuacccuaaaccaguuugggugacauggaugcggaaugaacaggagcaacuggggaccaagcauggagauauuuugcccaacgccgacggcacuugguaucuacaggucauccuggaaguggcuucugaggaaccugccggccucuccugucgcgugagacacagcucgcuugggggacaggauauaauccuguacuggggucaccauuucucuaugaauuggauugcgcuggucguuaucgugccauugguaauucucaucgugcuggucuuaugguuuaagaaacacugcuccuaccaggacauacuguga

SEQ ID NO: 2077 - RNA, 1008 nt, Artificial Sequence
  AAA59672 variant
augggcugccuccuguuccuucuguugugggccuuacugcaggcuugggggagcgcagaggugccccaaagacuauuuccucucaggugucugcagaucuccucuuucgccaacucaaguuggacccggacagacggacuugcguggcugggugaauugcagacucacagcugguccaaugauucugacacgguccgcucgcucaagccauggucacagggcaccuuuagcgaucaacagugggagacacugcagcauauuuuccgaguuuaccguaguuccuuuacuagagacgugaaagaguucgcuaagaugcugaggcucucuuauccguuagaacugcagguaagcgccgggugcgaagugcaccccggaaacgcauccaauaacuuuuuccaugucgccuuucaaggcaaagauauacuuucauuccaggguaccaguugggagccuacacaggaggcuccauugugggugaaucuggcaauccagguucuaaaccaagacaaguggacccgggaaacugugcaguggcuccugaaugggacauguccccaguuugucagcggacuucuggagucuggcaaauccgaauugaagaagcaagugaaaccuaaggccuggcucucacgcggcccaagccccgggccuggaagacuguuacugguaugccacguuagugguuucuacccaaaaccggugugggucaaguggaugaggggcgagcaggagcagcaggggacccaacccggagauauucucccuaacgcugacgaaacgugguaucuucgggccacucuggaugugguggcgggcgaggcagccgguuugucuugucgcgucaaacauuccagccuagaagggcaggacaucguucuguacuggggaggcucguauaccucuaugggccucauugcucuggccgugcuugcaugccuguuguuucuccugaucguaggguucacaucccgauucaagagacagacuucauaccagggaguguuauga

SEQ ID NO: 2078 - RNA, 1167 nt, Artificial Sequence
  EAW52830 variant
augcugcuccuuuuccuguuguuugagggcuuaugcugucccggggaaaacaccgccgcuccucaggcacugcaaagcuaccaccuagccgcggaggaacagcucuccuucagaaugcugcagacaucuucauuugcuaaucauaguugggcccacagcgagggauccgguuggcuuggcgaccugcagacucaugggugggauacgguguugggaaccaucagguuccucaagccauggucucacggcaacuuuucgaaacaagaacugaagaaucugcagucacucuuccaguuauauuuucauagcuucauucagauaguccaagcaagugccggucaguuucagcuggaguacccguucgagauccagauucuugcugggugccggaugaacgcaccccaaaucuuuuugaauauggccuaucagggauccgacuuccugucuuuucagggcauuagcugggaaccuuccccaggcgcugggauccgcgcccaaaacauauguaaaguucuaaaucgauaccucgauaucaaggagauucugcagucacuucugggacacacaugcccccguuucuuggcgggucucauggaagcaggcgagagugagcugaaaagaaaggugaagccugaagccugguuaagcugugggccaucucccggaccuggcaggcugcagcucguaugccacguguccgguuucuauccaaaaccggucugggugauguggaugcgcggggagcaggaacaacggggaacucagagaggcgacguucuucccaacgcugaugagaccugguaccugagggccacauuggacguggcagcuggcgaagccgcggggcuaucaugucgggucaagcauagcagucugggaggucacgaucucaucauucauuggggcggguauucuaucuuucugauacuuauuugccugaccgugaucguaacuuugguuauucucguggucguggacucccgccugaaaaagcagagcucgaauaaaaacaucuuaucuccucacacaccaucccccguguuccugaugggagccaauacccaggauacgaagaacucacgacaccaauuuugucuagcacaggucaguuggaucaagaauagaguucucaaaaaguggaaaacuaggcugaaccagcuuugguga

SEQ ID NO: 2079 - RNA, 894 nt, Artificial Sequence
  AAA35581 variant
augaccacacccagaaacagcgugaauggcacuuucccugccgagccaaugaaggggccgaucgcuaugcaguccggacccaaaccucuguuuaggcggaugucuucacucgucgguccaacgcaaaguuucuuuaugcgcgaaagcaagacccuuggcgcaguucagauuaugaacgggcuguuccacauagccuugggaggcuuacugaugauccccgcggguauuuacgcuccuaucugcgugacaguaugguauccacuauggggaggaauuauguacaucauauccggcucucuccuggccgcaacugagaaaaauucgcgaaagugucuugugaaaggcaagaugaucaugaacucacugagcuuguuugccgcuauuagugggaugauccucuccauuauggacauccugaauauaaagauuucucauuuccugaaaauggaaagccucaacuuuauccgugcacacacccccuauauuaauaucuacaacugcgagccugccaauccauccgaaaagaacucaccgaguacacaguauuguuacagcauccagucuuuauuccuggggauucuuuccgucauguugauauuugcuuucuuucaagagcuggugaucgccgguauuguugagaaugaauggaaaagaaccugcucaaggcccaagagcaacaucgugcuacucagugcggaggagaaaaaggaacagacuauagagauuaaggaagaggucgugggccugacagaaaccucuucccagccuaaaaaugaggaagauaucgagaucauuccaauccaggaggaagaggaagaggaaacggagacuaacuuccccgagccuccacaagaccaggaaagcucgcccauugagaaugauucuuccccguga

SEQ ID NO: 2080 - RNA, 1989 nt, Artificial Sequence
  AAC18956 variant
auggagagcaagaccgaaaaauggauggagagaauccaccugaacguguccgaaaggcccuucccuccacauauucagcucccgcccgagauacaagaaucucaggaggucacacuuacuugccuguugaauuuuucauguuacggcuauccuauccaguuacaguggcugcuagaggggguuccaaugcggcaagccgcugugacgaguaccagccucacaauuaaguccguauucacucgcucugaacugaaauuuucgccccaguggucacaccauggaaagaucgugaccugccagcuucaggacgcagaugguaaauuccugagcaacgacacaguccaauugaaugugaagcacaccccuaagcucgagauuaaaguuacuccaagugaugccaucgugcgagaaggcgacuccgucacaaugaccugugaggugucuagcacgaaccccgaguacacuaccguauccuggcugaaggaugggacaucacugaaaaagcagaauacuuuuacccucaacuuacgugaaguuacaaaagaccagaguggaaaguauugcugucaggugagcaaugaugucggcccugguagaucugaggaaguguuccugcaagugcaguacgcgccagagccguccaccguccagauacuucauucacccgcuguugaagggagccaaguggaguuuuugugcaugagucuggccaacccucuaccaacgaauuauacuugguaccacaacggaaaggagaugcagggcaggacagaagagaaaguacacauccccaagauucucccuuggcaugcaggcaccuauucuuguguggccgaaaauauccuggggacuggacagcgggguccaggcgcugagcuugacguccaguaucccccgaaaaaggugacaaccguuauucaaaacccuaugcccauccgcgaaggggauacggugacccuguccugcaauuacaacagcucgaauccaucugucacaagauacgaguggaaaccucacggagcaugggaggaacccuccuugggcgugcucaagauacagaaaguagguugggacaacacuaccauugccugugcuaggugcaacucaugguguaguugggccagcccaguugcgcugaaugugcaguacgcaccccgggauguccgcgugcgaaagaucaagccuuuauccgagauucauucugggaacagcgucucacugcagugcgacuucaguuccagccacccaaaagaagugcaauuuuucugggagaagaauggaagacuccuuggcaaagaaucucagcugaacuuugauucaaucaguccggaggacgccggcagcuauuccugcuggguuaauaacucuaucgggcagacagcuucgaaggccuggacuuuggaggugcuauacgcacccaggcggcugcguguaagcauguccccuggagaccaggucauggaagguaaaucagcuacccuccgcugugagagugaugccaauccacccgugucucacuauacaugguucgacuggaacaaucaaagccugccuuaccauucccagaaacuuagacuggaaccaguuaaggugcagcacucaggcgcguauuggugccaggggaccaacagcgucggaaagggcaggucucccuuguccacucucacgguguacuacaguccggagacaauuggucggcgaguagccguggggcugggcagcuguuuagcaauacugauccuagcuauuugcggacucaagcugcaacgcagagaugccgagucuuccgaaaugcagaggccuccacggaccugugacgauacuguuaccuauucagcccuucauaaacgccaggucggcgacuacgagaaugugauccccgauuuuccugaagacgaggggauacacuauagugaauugauucaauucggagugggugagagaccccaggcucaggagaacgucgauuacguuauccugaagcauuga

SEQ ID NO: 2081 - RNA, 2544 nt, Artificial Sequence
  AAB06448 variant
augcaucugcucggccccuggcuucuguuguuagugcuggaguaccuagccuucagcgacuccucuaagugggucuuugaacacccugagacccucuaugcuugggaaggggcaugcguuuggaucccauguacauacagagcccuggauggagaccuugagucauucauucuguuucacaacccggaauauaauaaaaacacuucuaaguucgaugguacgagguuguacgagagcaccaaagacggcaaggugcccuccgagcagaaacggguacaauuucucggggauaagaauaagaacugcacacugucuauacauccugugcaccugaaugacucgggacagcucggcuuacgcauggaaucaaaaacugagaaguggauggaacgaauccaucugaacgucagcgagcguccauuucccccucacauucagcuuccacccgagauccaggaaagucaagaggugaccuugacaugucugcuaaauuucuccugcuaugguuacccuauucagcuccaguggcugcuugaagggguuccaaugagacaggcggcugugaccucuacuagccugacaaucaaauccgucuucaccaggucagaguugaaguuuaguccgcaauggagccaccauggaaaaauagugacgugucagcuccaggaugccgacggcaaguuccugucuaacgauacuguacaguuaaauguuaagcacacccccaaacuggaaaucaaggugacaccuuccgacgcaauuguccgggagggcgauucagugacuaugaccugcgaggugagcaguucuaacccagaauauacaaccgucuccuggcucaaagacgggacgagccuuaagaaacaaaauacuuuuacacugaacuugcgcgagguuaccaaggaucagucgggaaaauacuguugccaggugucuaaugacguaggucccggcagauccgaagagguguuccuacaaguccaguacgccccugaaccaucaacugugcagauccugcauagucccgcuguugaggggagccagguggaguuucucuguaugucccuggcaaacccgcuuccuacaaauuauaccugguaccacaacggaaaggaaaugcaaggcaggacggaggaaaagguccacauucccaaaauccugccauggcaugccgguaccuauucuugcguggcugagaacauauuggggacaggacagcggggcccuggcgccgaacucgacguacaguaucccccaaagaaaguuacuaccgugauucagaaucccaugccuauccgcgagggggauacagucacucugagcuguaacuacaauucaaguaacccauccgugacccgauacgaguggaagccgcacggagcgugggaggaacccagcuuagguguccugaaaauucaaaaugugggcugggacaacacaaccaucgcaugcgccgcuugcaauucuugguguucaugggccaguccuguugcacuaaacgugcaguaugcuccaagagauguaaggguccggaagaucaagccccucagcgaaauucauuccgggaauagugugucgcugcagugcgacuucagcuccucacacccuaaagagguucaguucuuuugggagaagaacggacgucuuuugggcaaagaaagucaacugaauuucgauucuauaagcccagaggacgccgguuccuacucauguugggugaacaauagcaucgggcagacugcgucuaaggccuggacgcucgaaguccuguacgcaccccgcagacuuaggguguccaugaguccgggcgaucagguaauggagggaaaaagcgcuacacugaccugcgaaucugacgccaacccuccagugucccauuauacuugguuugauuggaauaaccagucauugcccuaccacagucaaaagcuccggcuggagccuguuaagguccagcacagcggcgcuuauuggugucaggggaccaacucggugggaaaaggucgaucccccuuaucuacacugaccguguacuauagcccagagacuauuggccgcagagucgccguugggcuaggaucaugccucgcaauccugauacuugccauuuguggcuugaagcugcaaaggcgguggaaacgcacacagagucagcagggucuccaagaaaauuccucugggcagagcuucuuugugagaaacaagaaagugaggcgugcuccucuguccgagggcccccauucauuaggaugcuacaauccaaugauggaagacggcaucagcuauacgacccugcgguucccggagaugaacaucccucgaacuggggaugcggaaaguucugagaugcagagacccccacccgacugugacgauacaguaaccuacuccgcacuucacaagaggcaggucggagacuacgagaaugugauuccugauuuuccagaagacgaggguauccauuauagcgaauugauucaauucggcguuggggagcgcccccaggcccaggaaaacguggauuacgucauacucaagcacuga

SEQ ID NO: 2082 - RNA, 2544 nt, Artificial Sequence; identical to SEQ ID NO: 2081
  ABK41939 variant

SEQ ID NO: 2083 - RNA, 1605 nt, Artificial Sequence
  CAE47548 variant
augcugagaaggcggggcagccccgggaugggagugcacgucggugccgcucucggcgcacuuugguucugccugaccggggccuuggagguucaggugccugaagacccaguaguggcguuagucggaacagaugcuacucuguguugcuccuuuucuccggagcccggcuucucacuagcccaacucaaccugaucuggcagcuuacggacaccaagcagcuggugcauaguuuugcagaaggucaggaucaagggagcgccuacgcuaaucgcacagcauuguucccugaccuccuggcccagggaaacgcuucccugcgacuccagcguguuagaguggccgaugagggcucuuuuacuuguuucgucucgauuagggacuuuggcucagcggcagugagcuuacagguagccgcuccauauaguaaacccuccaugacccuggaaccuaauaaggaucuucggccaggggacacaguuaccauaacuugcucuagcuaccaaggauaucccgaggccgagguguucuggcaggauggucagggcgucccuuugacagggaacgugaccacgucccagauggcaaaugaacaaggacuguuugacgugcacucaauccuacgcgucguucucggcgcuaacgguacuuacaguugucuggugagaaauccaguacuucagcaggaugcccauagcucugugaccauuacaccgcaaaggucccccacuggggcggucgaggugcagguuccugaagacccaguggucgcccuggugggaaccgaugcaacauugcggugcucauucagccccgagccuggcuuuagucucgcucagcugaacuuaaucuggcagcugaccgacacgaaacaacucguacacucuuucacugagggccgcgaccagggguccgccuaugcuaaucgaacagcccuuuuuccagaucuguuggcacagggaaacgccagccuaagacugcagaggguucggguggcugacgaagguucguucaccuguuucgucucuauucgugauuuuggcuccgcggcagugucacuccaagucgccgcucccuacaguaagccgagcaugacucuggagccuaauaaagaccuucgccccggggauacagugaccaucacgugcuccucuuauagaggauacccagaagccgagguuuucuggcaggacggccagggugugccucugaccgggaacguaacaacuagccagauggcaaaugaacaaggcuuguuugauguccauucagugcucaggguugugcugggagccaacggcaccuacaguuguuuaguccggaaucccgugcugcagcaggacgcucacggguccguaacaauaacuggacagccaaugaccuuucccccugaggcccuaugggugacaguuggucucagcgucugccugaucgcacuuuugguggcgcuggcuuucguguguuggcgaaagauuaagcaaucuugcgaggaagagaacgccggcgcagaagaucaggacggggagggagaaggcucaaaaaccgcccuccagccacugaagcacagugauagcaaagaggacgacggucaagagaucgcuuga

SEQ ID NO: 2084 - RNA, 639 nt, Artificial Sequence
  BAG57312 variant
augccccugcuccuucuguugccuuuacugugggccgaccuaacccacagaccaaagauccucauuccgggcacacuggagcccgggcauagcaaaaaccuuacuugcuccgugucuugggcuugugaacagggaacgccuccaauauucucauggcugagugcagcccccaccagcuuggguccuaggacaacucacuccucuguccucaucauuaccccacggccccaagaucauggcacaaaucugaccugccagguuaaguuugcgggggcuggagugacuacagagcgcaccauccagcugaacguaacguacgugccucagaauccaacuaccggcauuuucccgggugacgggucgggaaaacaagaaacacgagccggcgucgugcacggcgcaaucgggggagccgguguuacugcucucuuagcacugugucuuugcuugauauuuuucaucgugaagacccaucguagaaaagccgcuaggacagccgucggccggaacgauacccaccccacgacugggucagcgagcccugugagugacggagcauccuggcacccaguaugucccgccgauacaucuagccagugcggcccuccauccugucccauucagcauuuucagaauuga

SEQ ID NO: 2085 - RNA, 1095 nt, Artificial Sequence
  AAK83654 variant
augccccugcuccuucuguugccuuuacugugggccggcgcucuagcaauggacccaaacuucuggcuccaggugcaagagagcgucaccguucaggaagggcugugcgugcuuguaccguguacauuuuuccaccccaucccuuacuaugauaaaaauuccccagugcauggauacugguuuagagagggugccauuauaucuagggacucacccgucgcgacuaacaagcuggaucaggaagugcaggaggaaacgcaaggccgguuccgcuugcucggggacccuagucgaaauaacugcagccuguccaucguugaugcucguagaagggacaauggaucuuacuuuuuccggauggagcgcggcucgaccaaguauucauauaaaagcccacagcugagugugcacgucacagaucucacucauagacccaagauuuuaaucccugguacccuggagccagggcacuccaaaaaccuuacauguucugugagcugggccugcgaacagggaaccccgcccauuuuuaguugguugucagcagccccuacuucccugggcccaaggacaacccauagcucuguacuaaucauaacgccccggccucaggaccacggcacuaaucucaccugucaaguuaaguucgcuggggcaggagugacaacugagcgcaccauccagcugaacgucacauacgugccacagaaucccaccacggguauuuuuccgggcgauggguccggaaagcaggaaacucgagccggcgugguccacggugcuaucgggggagccggcguuacagcgcuucuggcauugugccucugucugauuuucuuuaucgugaaaacccauagaaggaaggccgcucggacugccguaggccguaacgacacacacccuaccacggggucagcaagccccaaacaucaaaagaaaaguaaguuacacggaccaaccgagacaucuuccugcagcggugcugccccuacuguggagauggaugaggaacugcacuaugcgucgcucaauuuccauggcaugaaccccucuaaggacaccuccacagaauacucagagguccgcacucaguga

SEQ ID NO: 2086 - RNA, 1095 nt, Artificial Sequence; identical to SEQ ID NO: 2085
  CAD36509 variant

SEQ ID NO: 2087 - RNA, 624 nt, Artificial Sequence
  AAA52295 variant
augcagagcggcacccacuggagagugcuggggcucugccuucuguccgucggaguuuggggucaagacggcaacgaggaaaugggagggaucacacagacucccuacaaggugucuauuucaggcacgaccguaauauugacauguccucaguauccagguagugagaucuuauggcagcauaaugauaaaaacauugggggagacgaagaugacaagaauaucggcagcgaugaggaccaccugucccuaaaagaguucucugaacucgagcaaucgggcuacuaugugugcuacccgagggggucaaagcccgaagaugccaacuuuuaucuguaccuucgggcucgcgucugugagaauugcauggaaauggacgugaugagcguugcaacuauugugaucgucgauauauguaucaccggaggucuguugcuccugguguauuacuggaguaaaaaccgaaaggccaaggcgaaaccuguaacacguggcgcuggggccggaggcagacagaggggucagaauaaggagcggccacccccuguuccaaaccccgacuacgagccuauucgcaaagggcagagagaucuguauuccggacucaaucaaaggcggaucuga

SEQ ID NO: 2088 - RNA, 495 nt, Artificial Sequence
  AAH25703 variant
augaaguggaaagcccuguucaccgcugcaauccuccaggcccaacuucccauuacagaggcgcagagcuuuggccuguuggacccuaaguuaugcuaccugcuagaugggauacucuucaucuauggagugauucugacugcucuuuuucugagagucaaauucuccaggucugccgacgcaccagccuaccagcagggucaaaaccaguuguauaaugaacucaaccugggccggcgcgaggaauacgauguucuggacaagcgacgugggagagauccggagaugggaggcaaaccccagaggcggaagaauccucaggaaggucucuauaacgaguuacaaaaggacaaaauggcugaggcauacucagaaaucgggaugaagggagagcgcagaaggggcaaaggccacgaugggcuguaucagggacuuaguacggccaccaaggacacauacgaugcuuugcauaugcaggcccugccaccccgguga

SEQ ID NO: 2089 - RNA, 2229 nt, Artificial Sequence
  CCDS7897.1 variant
auggacaaguucugguggcacgccgcuuggggccugugccucgugccccuuagccuggcacagaucgauuugaacauuaccuguagauuugccggggucuuccauguugagaaaaauggaagguacuccauaucucggacagaagcggcugacuuaugcaaggccuuuaacucaacucugccuacgauggcacaaauggagaaagcccuaaguaucgguuucgaaaccugucgcuauggcuuuauugaggggcacgugguaaucccacguauucauccgaauagcaucugcgcugcaaacaauacaggaguguacauacucacuuccaacaccucucaguaugauacauacuguuucaaugccucggcucccccugaagaggacugcaccucagucacugaucugccaaacgccuuugacggccccaucacaauuaccaucgugaaucgagaugguacgagauauguucagaagggggaguacaggacuaacccugaagacauuuauccaagcaaucccaccgaugacgaugugaguuccggaucuagcuccgagcggucaaguacaagcggcggcuacaucuucuacacuuuuucuaccguccacccuauaccagacgaagauuccccguggauuacagacucaaccgaccgcauccccgcgacgacucuuaugagcacaagugcaaccgccacugagacagcuaccaaaagacaggagacgugggauugguucucuuggcuguuuuugccuuccgaaagcaagaaccaucuccacaccacaacucaaauggccgggaccucgucuaauacaauuuccgcaggaugggagccaaacgaagagaaugaagacgagagggaucggcaccugucauucagugguagcggcaucgacgaugacgaggauuuuaucuccucuacuauuagcaccacaccccgcgcuuucgaccauaccaagcagaaccaggauuggacucaguggaacccuucacacaguaauccagaagugcugcuccaaacgacaacccgaaugacugacguagauagaaacgggaccacagccuaugagggaaauuggaaccccgaagcgcauccgccuuuaauacaccacgagcaucacgaagaggaggaaacuccccauuccacuagcacaauccaggccacgccaucuucaaccacugaggaaacagcaacccagaaagagcagugguucggcaauagguggcacgaagguuaccggcaaacaccuaaggaggacagucauagcacuaccgggacggcugccgcuuccgcccacaccucucaccccaugcagggacguacaacuccaucgcccgaggacagcuccuggaccgacuuuuucaacccuauuucacauccaaugggccgcggccaccaggcagggagaaggauggauauggauaguucucauagcaucacacugcaaccgacugccaaucccaacaccggacuuguugaagacuuggaucggacggguccucuguccaugacaacccagcagucaaauagccagucuuuuuccaccagucacgagggccuagaagaggacaaagaucacccaacaaccagcacucucaccucuuccaaccgaaaugacgugacagggggacgcagagaucccaaccauucagagggcaguacgacccugcuugaagguuauacuagccacuacccucauacaaaggagucgaggaccuucauaccagucacauccgcuaaaacugggucuuuuggcgugaccgcggugacggucggagacagcaauucaaacguuaaucggagucuguccggcgaucaagacacauuccaccccucugggggaagccauaccacucacgguuccgaaucagauggccacagccaugggagucaggagggaggcgcaaacaccacaucugguccgauucgcacuccucagaucccagaaugguugaucauucucgccucccuguuagcucuggcccucauccuugcaguguguauugccguaaacagcagaaggcguugcgggcagaagaagaaacuggugauaaauucgggcaacggagcugucgaggaccggaagcccucaggcuugaauggggaggccucuaaaagucaagaaauggugcaccuaguuaacaaggaguccagcgaaaccccugaccaguuuaugacagcagaugagacgcgaaaucugcagaacguggacaugaaaaucggagucuga

SEQ ID NO: 2090 - RNA, 2100 nt, Artificial Sequence
  XM_006718388.1 variant
auggacaaguucugguggcacgccgcuuggggccugugccucgugccccuuagccuggcacagaucgauuugaacauuaccuguagauuugccggggucuuccauguugagaaaaauggaagguacuccauaucucggacagaagcggcugacuuaugcaaggccuuuaacucaacucugccuacgauggcacaaauggagaaagcccuaaguaucgguuucgaaaccugucgcuauggcuuuauugaggggcacgugguaaucccacguauucauccgaauagcaucugcgcugcaaacaauacaggaguguacauacucacuuccaacaccucucaguaugauacauacuguuucaaugccucggcucccccugaagaggacugcaccucagucacugaucugccaaacgccuuugacggccccaucacaauuaccaucgugaaucgagaugguacgagauauguucagaagggggaguacaggacuaacccugaagacauuuauccaagcaaucccaccgaugacgaugugaguuccggaucuagcuccgagcggucaaguacaagcggcggcuacaucuucuacacuuuuucuaccguccacccuauaccagacgaagauuccccguggauuacagacucaaccgaccgcauccccgcgacgacucuuaugagcacaagugcaaccgccacugagacagcuaccaaaagacaggagacgugggauugguucucuuggcuguuuuugccuuccgaaagcaagaaccaucuccacaccacaacucaaauggccgggaccucgucuaauacaauuuccgcaggaugggagccaaacgaagagaaugaagacgagagggaucggcaccugucauucagugguagcggcaucgacgaugacgaggauuuuaucuccucuacuauuagcaccacaccccgcgcuuucgaccauaccaagcagaaccaggauuggacucaguggaacccuucacacaguaauccagaagugcugcuccaaacgacaacccgaaugacugacguagauagaaacgggaccacagccuaugagggaaauuggaaccccgaagcgcauccgccuuuaauacaccacgagcaucacgaagaggaggaaacuccccauuccaccagcacaacggccucugcacacaccucacauccaaugcagggcaggacuacaccuagucccgaggacagcuccuggaccgacuucuuuaauccaaucucucaccccaugggucgggggcaccaggcuggacgucgcauggauauggacucgagccauuccauuacacugcagccuacugccaacccaaauaccggccuuguugaagauuuggacagaacgggcccgcugucaaugaccacacaacagaguaacucucagagcuucuccacuucacacgaggggcuagaagaggauaaagaccaucccaccacaagcacucucaccucuuccaauaggaacgaugugacgggaggucggcgagacccuaaucacagugagggcagcacaacccugcuugaaggguacacuucucacuauccacauacaaaggagucccgcaccuuuauccccgucacuucagcuaaaaccggaaguuucggcgugacagccgugacggucggugauagcaacucgaauguuaacagaucccugucuggggaccaagauaccuuucacccuagcggcggaucacauacuacacacggcagugaauccgacgggcauucucacggaagccaggaggguggcgcaaauaccacauccgggccaauaaggacuccccagauuccggagugguugaucauccucgccucacuguuagcucuggcgcucauucuugcaguguguaucgccguaaacagccggcgcagaugcggacagaagaaaaagcuggugauuaacaguggcaauggugcugucgaagauaggaagccuucuggguugaacggcgaggccuccaaaagccaagaaauggugcaccuaguuaauaaggagucgucagaaaccccagaccaguucaugacggcagacgagacacguaaccugcagaauguggauaugaaaauaggagucuga

SEQ ID NO: 2091 - RNA, 1377 nt, Artificial Sequence
  AAA35572 variant
augaacagaggcgugcccuucaggcaucugcuccuuguccugcaguuggccuuacugccugcugcaacccaagggaagaaaguugugcuaggaaagaaaggugacacaguagagcucacuugcacggccagccagaagaaauccauccaguuucacuggaaaaauucuaaccagauuaagauacugggcaaucaagggucauuccuuaccaaaggaccaaguaagcugaacgaucgggcggacagccgccgauccuugugggaucagggcaauuuuccgcucaucauuaaaaaccugaagaucgaagacucugauacauacauuugugagguggaagaccagaaagaggaaguccagcugcucguguucgguuuaacugcuaauucggauacccaucugcuucaagggcagucauugacacugacccuagagagucccccuggaagcuccccaucuguucagugccguagccccagaggcaagaacauccagggcgggaagacucucuccgugucacaacuggagcuucaggacaguggaacauggaccuguacgguccugcagaaucaaaagaagguggaauuuaaaauagauaucguaguuuuggccuuccagaaggcaagcucuauuguguauaaaaaggagggugaacaggucgaguuuuccuucccucucgccuuuacuguggagaaacugaccggcucaggggaauuaugguggcaggcugagagggcaagcaguucuaaguccuggaucacauucgaccugaagaacaaagaagugagcgucaagcggguuacucaagauccaaaacuccagaugggaaagaaacuuccccugcacuugacccuaccucaggcccugccacaguacgcuggcucggguaaucucacacuggcccuugaggcgaagaccgggaagcugcaccaagaagugaacuugguagugaugcgcgcaacgcagcuccagaaaaaucugacuugcgaggucuggggaccgacaucucccaaguuaaugcugucccuaaaacucgagaacaaggaagccaaagugucaaagagagagaaggcuguuugggugcugaauccugaagccggcauguggcagugucuuuugagugacagcggccaaguccugcucgaguccaacauuaaagugcugccaaccuggucuacucccguacagccuauggcacuuaucguucugggagggguggcugguuugcuccuguuuauaggcuuagggauuuucuuuugcgucaggugucggcaucgccgaagacaggccgaaaggaugagccagaucaagcggcugcuaucagagaaaaagacaugccaauguccacaccguuuccagaaaaccugcagucccauuuga

SEQ ID NO: 2092 - RNA, 186 nt, Artificial Sequence
  CAA44323 variant
augaagagauuccuguuucuccuucugaccaucagcuuguuagugaugguccagauucaaacaggccuguccgggcagaacgacacuucucagacgucaagucccagcgccuccucuaauauaucgggagguaucuuccuauuuuucguugcuaacgcaauuauccaccucuuuugcuucucauga

SEQ ID NO: 2093 - RNA, 186 nt, Artificial Sequence
  AAP35780 variant
augaagagauuccuguuucuccuucugaccaucagcuuguuagugaugguccagauucaaacaggccuguccgggcagaacgacacuucucagacgucaagucccagcgccuccucuucgaugucaggagguauauuccuauuuuucguugcuaaugcaaucauucaccucuuuugcuucagcuga

SEQ ID NO: 2094 - RNA, 186 nt, Artificial Sequence; identical to SEQ ID NO: 2092
  ACS44650 variant

SEQ ID NO: 2095 - RNA, 954 nt, Artificial Sequence
  EAW93489 variant
augaccguggccagacccagcgucccugcugcacugccacuccuuggcgagcugccgagguuguuacugcuaguucuccugugccuucccgccguguggggagacugugggcugccuccagauguacccaacgcgcagccugcuuuggaaggucggacauccuucccagaggacacugugaucacguacaagugcgaagagucuuuugucaaaauucccggcgaaaaggauucagugauaugucucaaagggagucaauggagcgacaucgaggaguucugcaaucagaaguccuguccuaacccaggagaaauucgcaauggccagaucgauguuccgggugggauucuguuuggagccaccaucucuuucucgugcaacacaggcuauaaacuguuuggcucaacuagcaguuucugucucauauccgggucuagcgugcagugguccgaccccuuaccugagugccgagaaaucuacuguccagcacccccucaaauugauaauggaaucauucagggugagcgugaccacuauggcuacagacagucagucaccuaugccugcaacaagggguuuacaaugaucggagagcauaguauauacuguaccgugaauaacgaugaaggcgaguggagcgguccacccccggaaugcagggggaagucucugacuuccaaaguaccucccacaguucagaagccaaccacggugaaugucccuacuaccgaggugucacccacaagccagaaaacuaccacaaagaccacgacuccaaacgcucaagcaacacggaguacccccgugucucgcacuacaaaacacuuccaugaaaccacgccuaauaagggauccggcaccacaagcggcacuaccagacuuuugucggggcacacaugcuuuacucugaccggacuacucgguacacuggucaccaugggccuucugacuuga

SEQ ID NO: 2096 - RNA, 882 nt, Artificial Sequence
  EAW93497 variant
augaucggcgagcacagcauuuacugcaccgugaacaaugacgaaggggagugguccggacccccuccagaauguagagguaagucucugacaucaaaagucccgcccacuguucagaagccuacgaccgugaacguaccaacaacugaggugagucccaccagccagaaaacaaccacuaagacaaccacgccuaaugcccaaggcacugaaaccccauccguccuccagaaacauacaacugagaacgugucugcuaccaggacacccccuaccccacagaagccgacgacuguuaaugugcccgcaacaauagucaccccuacuccacaaaagcccacaaccaucaacgugccugccacggggguaucgucaaccccacagcggcacacaauuguuaaugugagcgcgacuggaacccuucccacacugcagaaaccgacucgcgcuaacgauagugccaccaaguccccugcagccgcucagacaucuuucaucagcaaaaccuuguccacuaagacgcccucagcagcccaaaauccaaugaugacaaacgcuagugccacccaggcgacuuuaaccgcacagaaauuuacaaccgccaaggucgcuuucacucagagcccuucugccgcacgaaaguccacaaaugugcauucacccgugacgaacggccugaaaagcacccaacguuuuccaagugcucacauuacugccacaagaucuacccccgucuccaggacaacuaagcauuuccacgagaccacgccuaauaaagguagcgggaccacaucgggaacuacccggcuacucucuggccacacaugcuuuacucugaccggccuucuggggacguugguuacaaugggacuccugaccuga

SEQ ID NO: 2097 - RNA, 804 nt, Artificial Sequence
  EAW93493 variant
augaucggcgagcacagcauuuacugcaccgugaacaaugacgaaggggagugguccggacccccuccagaauguagagguaagucucugacaucaaaagucccgcccacuguucagaagccuacgaccgugaacguaccaacaacugaggugagucccaccagccagaaaacaaccacuaagacaaccacgccuaaugcccaaggcacugaaaccccauccguccuccagaaacauacaacugagaacgugucugcuaccaggacacccccuaccccacagaagccgacgacuguuaaugugcccgcaacaauagucaccccuacuccacaaaagcccacaaccaucaacgugccugccacggggguaucgucaaccccacagcggcacacaauuguuaaugugagcgcgacuggaacccuucccacacugcagaaaccgacucgcgcuaacgauagugccaccaaguccccugcagccgcucagacaucuuucaucagcaaaaccuuguccacuaagacgcccucagcagcccaaaauccaaugaugacaaacgcuagugccacccaggcgacuuuaaccgcacagaaauuuacaaccgccaaggucgcuuucacucagagcccuucugccgcacccacacgauccacgccagugucacguaccacuaagcauuuucacgagacaacccccaauaaaggcagcgguacaaccagugggacuacgagacugcuaucuggacauaccugcuucacacucacuggccugcuuggcacccuggugacaaugggguugcucacuuga

SEQ ID NO: 2098 - RNA, 1146 nt, Artificial Sequence
  AAA52168 variant
augaccguggccagacccagcgucccugcugcacugccacuccuuggcgagcugccgagguuguuacugcuaguucuccugugccuucccgccguguggggagacugugggcugccuccagauguacccaacgcgcagccugcuuuggaaggucggacauccuucccagaggacacugugaucacguacaagugcgaagagucuuuugucaaaauucccggcgaaaaggauucagugauaugucucaaagggagucaauggagcgacaucgaggaguucugcaaucgcuccugugaaguuccuacccgacugaacucugccucgcugaagcagccauauauuacacagaauuacuuuccggugggaacugucguggaguaugaaugccgucccggcuacagaagggagccuucacucagcccaaaauuaaccugucugcagaaccuuaaguggaguacagcaguagaguucugcaagaaaaaguccugucccaauccuggugaaauccggaacgggcaaauugauguuccaggaggcaucuuguuuggcgccaccauaucuuucagcugcaauacuggguauaaacuguuuggauccacaucaaguuucugucuaaucagcgguucuuccgugcaguggucagacccccucccggagugccgcgaaauuuacugcccugcucccccacagaucgauaacggcauuauccagggggagagagaccacuauggauacaggcaaagcgucaccuacgcauguaauaagggcuuuacgaugauaggugaacauaguauuuauugcacugugaacaaugaugagggggaguggucuggaccucccccagaaugucggggcaaaucccugaccagcaaggugcccccuacaguccagaagccaacuaccguuaacgugccgacaaccgagguaucgcccacgucucagaaaacuacaaccaagacuacaaccccuaaugcccaggcuacgcgcuccaccccagugucacgaacaacuaaacacuuccaugaaaccacacccaacaagggcagugggacuaccagcggaacaaccagacuucuguccggucacacuugcuuuacguugacaggccuccuggggaccuuagucacuaugggacugcucaccuga

SEQ ID NO: 2099 - RNA, 2577 nt, Artificial Sequence
  CCDS73385.1 variant
augcugcagaccaaggaccucaucuggacacuuuucuuucugggcacugccgugagcuugcaagucgauauuguucccucccagggggagauaucugugggagaaucaaaauucuuuuuaugccagguagcuggugacgcaaaggauaaagacaucaguugguucagcccuaacggcgagaagcugacgccaaaucagcaaagaauuuccguggucuggaacgaugacucuucgucaacccuaacaaucuacaaugccaacauugaugacgcggggaucuauaaaugugugguuacuggagaagauggcagcgagagugaagcuaccgugaaugucaagauauuucagaagcucauguucaaaaacgccccgacaccccaggaguuuagggagggugaagacgcagugaucguaugcgauguuguguccucucugccuccaaccauuaucuggaagcacaaagggcgggacgucauucuuaagaaagaugugcgcuucaucgugcugagcaauaacuacuugcagauacgaggaauuaagaagacugacgagggcacauaucguugugaaggcagaauccucgcccgcggggagauuaauuuuaaagacauccaagucaucguuaacgugcccccuaccauucaggcucggcagaauauaguaaacgcaacggccaaucugggacaguccgugacucuggucugcgaugcugaggguuucccagaacccaccaugucauggacaaaggacggcgagcaaaucgaacaggaggaagaugacgagaaauacauuuuuagugaugacagcucucagcucacuaucaagaaaguggauaagaacgacgaggccgaauauauauguauugcggagaauaaagcaggggaacaagaugccaccauccauuuaaagguuuucgcuaagccuaaaaucacauacguggagaaccagaccgccauggaacuggaggagcaggucacgcuuacuugcgaagcauccggagacccaauuccgucaaucacauggcgcaccagcacuagaaacauuaguucugaggaaaaggcuuccuggacaaggcccgagaaacaggaaaccuuggauggccacauggugguacggagccaugcccgcguuucgucucugacgcuaaaguccauacaauauaccgacgcgggugaguacaucuguacagccucaaauacuauugggcaggacagucagagcauguaccucgaggugcaguaugcaccuaaacugcaaggaccagucgcuguguacaccugggaaggcaaccaggucaauaucacaugcgagguguuugccuaucccuccgcuacuaucucuugguuccgagauggccagcuucugccuagcucaaacuacaguaauauuaagauauauaacaccccauccgccagcuacuuggaaguuacacccgacucugagaaugauuucgggaacuauaauuguaccgcagugaacagaaucggacaggagucacucgaauuuauucugguacaagccgacacuccgaguagcccuuccaucgaucaggucgagcccuacucuucgacggcucaggugcaguucgacgaaccagaggcgacagguggcguuccuauuuuaaaguacaaagcagaauggagggccgugggggaggaggucuggcacagcaagugguaugaugcuaaagaagccuccauggagggaaucgugaccauaguaggccugaagcccgaaacuaccuacgcagugcggcucgccgcucuuaaugguaaagggcugggcgagaucucagccgcaagugaauuuaagacacaaccaguucagggagagcccucugcgccuaaguuggagggccagaugggggaagacggaaacagcauuaaagucaaucuaaucaagcaagaugacgguggcuccccaauucgucauuaucuggugcgcuacagagcucucucaagcgaguggaaaccggaaaucaggcugcccucuggguccgaucacgugaugcuuaagagucuggacuggaacgccgaguaugaagucuacguuguggcagagaaucagcagggaaaaagcaaggccgcucacuucguguuucggaccucugcccagccuacugcaauaccagcuaacggcucccccacaucagguuugaguacgggggccauuguaggcauccucauugucaucuucgugcuguuacugguuguggucgauauaaccugcuauuuucuaaacaaguguggacucuucaugugcaucgcggugaaucugugcggcaaagccgggccuggagcuaaggguaaagacauggaggaaggcaaggcagccuuuagcaaagacgagucgaaggaaccaauuguugaggugcgaacugaggaagagaggacacccaaccaugaugggggaaaacacaccgaaccgaaugagacaacuccucuuaccgaaccagagaagggccccguagaggcuaagccugaaugucaagagacggaaaccaaacccgccccagcagaggucaagacagugccuaacgacgcgacucagaccaaagaaaaugaguccaaggccuga

SEQ ID NO: 2100 - RNA, 867 nt, Artificial Sequence
  ABK41933 variant
augggccacaccagaaggcaggggacaagccccuccaagugcccuuaccugaacuucuuucaacuccuugugcuggccggauugucucauuucuguucaggugucauccacguuacuaaagaggugaaggaaguagcuacguuaaguugcggccauaaugugagcgucgaggaacuggcacagacccggauuuauuggcagaaagagaagaaaauggugcuaacaaugauguccggggacaugaacauauggccagaauacaagaaucgcacuaucuuugauauuaccaacaaucucucuaucguuauucuggcccuucgaccgucggacgagggaacauaugagugugugguccugaaguacgaaaaagaugcguucaagcgugagcacuuggcugaagugacccucucaguaaaagccgacuuucccacuccuagcaucagugauuucgagauaccaacauccaacaucagaaggauuaucugcucuaccagcggcgguuuucccgagccucaucuguccuggcuggaaaauggggaggaacucaacgcaauuaauacgacuguuucacaggacccagagaccgaauuauaugccgugaguagcaagcuggauuucaacaugacaacuaaucacucuuuuaugugucuuaucaaauacggacacuugcgggucaaccaaaccuucaauuggaacacaaccaagcaggagcauuuucccgacaaucugcuaccuuccugggcuauaacgcucauuucagugaacggcaucuucgugauuugcugucugacuuauugcuuugcaccacgcuguagagagaggcggcgcaacgaacgacuuagaagggagagcguccggccgguuuga

SEQ ID NO: 2101 - RNA, 867 nt, Artificial Sequence; identical to SEQ ID NO: 2100
  AAA36045 variant

SEQ ID NO: 2102 - RNA, 990 nt, Artificial Sequence
  CCDS3009.1 variant
auggacccccagugcaccaugggccugagcaacauccucuucgugauggccuuucuucuguccggggcugcaccuuugaagauucaagccuacuucaaugagacagcggauuuaccaugucaguuugcuaacucucagaaucagucacugagugagcuagucguuuucuggcaagaccaggaaaaccucgugcugaaugaaguauaucuuggaaaagagaaguuugauagcgugcacuccaaauacauggguagaacuucuuucgacucggauucauggacgcugagguugcauaaccuccagauaaaggacaaaggccuguaucagugcaucauucaccauaagaagccgaccgggaugauccggauucaccaaaugaauagcgaacugaguguccucgccaacuuuucccagcccgagaucgugccuauaucuaauaucacagagaacguuuacauuaauuuaacuuguagcuccauccauggauauccagaacccaaaaagaugucagugcugcuucgcaccaaaaacaguacaauugaguacgauggcgucaugcagaagagucaggacaaugugaccgaauuguaugauguaucuaucucccugucaguuagcuucccugacgugacuagcaacaugacaauauuuugcauucuagagaccgauaaaacgcgacuccugucuuccccauucagcaucgagcuugaagacccccaaccuccaccggaucacauucccuggaucacugcaguccugccuaccgugaucauuugugugauggucuuuugcuugauacucuggaaguggaagaaaaagaaacguccaagaaauucguacaagugugguacaaacacuauggagagggaagagucugaacagaccaaaaagcgggagaaaauccacauucccgagcgcuccgacgaagcccagagaguuuucaagucaaguaagacaagcuccugcgacaaaucugauaccuguuuuuga

SEQ ID NO: 2103 - RNA, 708 nt, Artificial Sequence
  AAA59674 variant
auggcccugcccgugaccgcucuccuucugccuuuggcauuacugcuacacgccgcgagaccaagccaguucagggucuccccgcucgaccggacauggaaccugggcgagacuguugaacuuaagugccaagugcuguugucuaaucccacgucaggguguaguuggcucuuucagccucgcggagcugccgcaagcccaaccuuccugcuguaccucucccagaacaaacccaaggccgcugaggguuuagauacacagcgauuuucuggcaaacgucugggggacacuuucguacuuaccuugucggauuuuagaagggaaaaugagggauauuacuucugcucagcacugagcaacaguaucauguauuuuucccauuucgugccugucuuucuaccagccaagcccacaaccacuccugcuccacggccgcccaccccugccccaacaauugcgucucaaccccucagccugcgcccugaagcauguagaccagccgcuggcggugccgugcacacgagggggcuugacuucgcaugcgauauauacaucugggcuccccuggccggaacuuguggcguuuugcuccuguccuuagugauuacccuguauugcaaucaucggaaccgccgaagagucuguaaaugcccgaggccugugguaaagucaggcgacaagcccagucucagcgcgcgguacguuuga

SEQ ID NO: 2104 - RNA, 2472 nt, Artificial Sequence
  EAW57688 variant
augaccgugcugcaggagcccguccaagccgcuaucuggcaggcacucaaccacuacgccuauagagacgcgguuuuccuugcugaaaggcuguacgccgaggugcauagcgaagaggcauuguuuuuacuggccacaugcuauuaccgguccggcaaggcuuauaaagcauaccgccuacucaaggggcacucuuguacuacgccucagugcaaauaucugcuugccaaguguugcguagaucugucaaaauuggcugaaggagagcagauucucagugguggcguguucaauaagcaaaagagccaugacgauauagucaccgaguuuggggacuccgccuguuucacacugucucugcucggacacguguacugcaaaacugaucgauuagcgaagggcucggaauguuaccagaaaucacugagccuuaacccauuuuuguggaguccguucgagucccugugcgaaaucggugagaagcccgacccugaucagaccuuuaaauucacaucucuacagaauuuuagcaacugucucccaaauuccugcaccacucaaguucccaaccauucacugagucaccgucagccugagacagugcuuaccgaaacgccacaggacacuauugagcugaauagauugaaccucgaaagcucuaauuccaaguauucacugaacaccgauagcagugucucuuacaucgacuccgcagugauuagccccgauacaguaccuuuagggacuggaaccucgauccugucuaagcagguucaaaauaaaccaaagacaggcaggucccuccuuggcgggccggccgcucugucacccuugaccccuaguuucggaauacuaccacuggagacgcccagcccuggugacggcuccuaucuccagaacuacacuaauacaccacccgugaucgaugucccgucuaccggggccccuagcaaaaagucaguggcacggauuggacagacuggcacaaaaaguguguuuucccaaagcgguaacucucgcgaagucacccccauccuggcucagacgcagucaagugggccacagaccagcacaacuccucaaguucuuucccccaccauuacaucuccacccaaugcccugccuagaaggucgagccgguuguucacuuccgacucaaguaccacaaaggagaacucuaaaaagcucaagaugaaauuuccaccgaagauccccaaccgcaaaaccaagagcaaaacuaauaagggaggcauaacgcagccuaacauuaaugacucccuggagaucacaaaguuagauucaagcauuaucucugaaggcaaaaucuccaccauuacuccacagauacaggcguucaaccugcaaaaggccgcagcugggcuaaugagucuccugcgagagaugggaaaagguuaucuugccuuguguagcuacaauugcaaggaagcuaucaacauucugucucaccuccccucccaucacuauaauaccggcugggugcugugccagaucgggagagccuacuucgagcuuucagaauacaugcaggcagagaggauauuuagugagguacggcguauugaaaacuaucgcguggagggaauggaaaucuacagcacaacccuguggcauuugcagaaagacgucgcccucucggugcuguccaaggauuuaacugacauggauaaaaauucuccugaggcuuggugugcggcaggcaacugcuucagccugcaaagagaacacgacaucgccauuaaguuuuuccagagggcuauccagguugauccaaauuaugccuacgcauauacacuacucggucacgaguuugugcugacggaggaacuugacaaggccuuggcuuguuuccggaacgccauucgagucaauccccgccauuacaacgcaugguaugggcugggcaugauauacuacaaacaggagaaguuuucacucgcggaaaugcacuuccaaaaagcucuggauaucaauccgcagaguuccguguuacugugccauauuggaguaguucagcacgcccuuaagaagucugagaaagcauuggacacccucaacaaggccaucgugaucgauccuaaaaacccacuguguaaguuucauagagcuagcguccuauucgccaaugagaaauauaaguccgcacugcaagaacucgaggaacugaaacagauugugcccaaggagucacuugucuacuuuuugauaggcaagguguauaaaaagcuggggcagacucacuuagcucucaugaacuucagcugggccauggaccuggacccuaaaggagcgaauaaccagaucaaggaagccauugauaaaagguaccuucccgacgaugaggagccaaucacacaagaggaacagauuauggguaccgacgaaagucaggagucuuccaugacagaugcugacgauacucagcugcacgcagccgaaagcgacgaguuuuga

SEQ ID NO: 2105 - RNA, 2475 nt, Artificial Sequence
  AAB34378 variant
augaccgugcugcaggagcccguccaagccgcuaucuggcaggcacucaaccacuacgccuauagagacgcgguuuuccuugcugaaaggcuguacgccgaggugcauagcgaagaggcauuguuuuuacuggccacaugcuauuaccgguccggcaaggcuuauaaagcauaccgccuacucaaggggcacucuuguacuacgccucagugcaaauaucugcuugccaaguguugcguagaucugucaaaauuggcugaaggagagcagauucucagugguggcguguucaauaagcaaaagagccaugacgauauagucaccgaguuuggggacuccgccuguuucacacugucucugcucggacacguguacugcaaaacugaucgauuagcgaagggcucggaauguuaccagaaaucacugagccuuaacccauuuuuguggaguccguucgagucccugugcgaaaucggugagaagcccgacccugaucagaccuuuaaauucacaucucuacagaauuuuagcaacugucucccaaauuccugcaccacucaaguucccaaccauucacugagucaccgucagccugagacagugcuuaccgaaacgccacaggacacuauugagcugaauagauugaaccucgaaagcucuaauuccaaguauucacugaacaccgauagcagugucucuuacaucgacuccgcagugauuagccccgauacaguaccuuuagggacuggaaccucgauccugucuaagcagguucaaaauaaaccaaagacaggcaggucccuccuuggcgggccggccgcucugucacccuugaccccuaguuucggaauacuaccacuggagacgcccagcccuggugacggcuccuaucuccagaacuacacuaauacaccacccgugaucgaugucccgucuaccggggccccuagcaaaaagucaguggcacggauuggacagacuggcacaaaaaguguguuuucccaaagcgguaacucucgcgaagucacccccauccuggcucagacgcagucaagugggccacagaccagcacaacuccucaaguucuuucccccaccauuacaucuccacccaaugcccugccuagaaggucgagccgguuguucacuuccgacucaaguaccacaaaggagaacucuaaaaagcucaagaugaaauuuccaccgaagauccccaaccgcaaaaccaagagcaaaacuaauaagggaggcauaacgcagccuaacauuaaugacucccuggagaucacaaaguuagauucaagcauuaucucugaaggcaaaaucuccaccauuacuccacagauacaggcguucaaccugcaaaaggccgcagcugaggggcuaaugagucuccugcgagaaaugggaaaagguuaucuugccuuguguagcuacaauugcaaggaggcuaucaacauucugucucaccuccccucccaucacuauaauaccggcugggugcugugccagaucgggagagccuacuucgaacuuucagaguacaugcaggcagagaggauauuuagugaaguacggcguauugagaacuaucgcguggaaggaauggagaucuacagcacaacccuguggcauuugcagaaagacgucgcccucucggugcuguccaaggauuuaacugacauggauaaaaauucuccugaggcuuggugugcggcaggcaacugcuucagccugcaaagagagcacgacaucgccauuaaguuuuuccagagggcuauccagguugauccaaauuaugccuacgcauauacacuacucggucacgaguuugugcugacggaagaacuugacaaggccuuggcuuguuuccggaacgccauucgagucaauccccgccauuacaacgcaugguaugggcugggcaugauauacuacaaacaggaaaaguuuucacucgcggagaugcacuuccaaaaagcucuggauaucaauccgcagaguuccguguuacugugccauauuggaguaguucagcacgcccuuaagaagucugagaaagcauuggacacccucaacaaggccaucgugaucgauccuaaaaacccacuguguaaguuucauagagcuagcguccuauucgccaaugaaaaauauaaguccgcacugcaagagcucgaggaacugaaacagauugugcccaaggaaucacuugucuacuuuuugauaggcaagguguauaaaaagcuggggcagacucacuuagcucucaugaacuucagcugggccauggaccuggacccuaaaggagcgaauaaccagaucaaggaggccauugauaaaagguaccuucccgacgaugaggaaccaaucacacaagaggaacagauuauggguaccgacgagagucaggaaucuuccaugacagaugcugacgauacucagcugcacgcagccgagagcgacgaguuuuga

SEQ ID NO: 2106 - RNA, 1788 nt, Artificial Sequence
  AAA51947 variant
augagagugcugcucgccgcucuuggccuguuguucuuaggggcacugagggccuuuccccaggaccggccuuucgaggauaccugccacggaaacccaagccauuacuaugacaaggcgguccgccgauguugcuaccguuguccgaugggucuauuucccacacaacagugcccucagagaccaacugauuguaggaaacagugcgaacccgacuauuaccucgaugaggcugaccgguguacggccugcguuaccuguucccgcgaugaccugguggaaaagacaccuugcgcauggaacucuucaagaguaugugagugcaggccaggcauguucugcaguacuagcgccgucaauuccugugcucggugcuuuuuccacucugugugucccgcagggaugaucgugaaauuuccuggaaccgcccaaaagaauacaguuugcgaaccagcuucgccgggcgugucacccgccugugcgagcccugagaacugcaaagagccaaguuccgguaccauuccccaggcaaagccuacuccagucucucccgccacaagcuccgcuucaaccaugccggugcgcgggggaacgcgacuugcccaggaagcagcuaguaagcugacuagagccccugauagccccucuuccguaggcaggccaucaagcgacccuggcuugagucccacccagccaugucccgaggggucuggagauugccggaaacaaugugaaccugacuauuaccucgaugaggcgggucguugcacagccuguguuuccugcagccgcgacgaccugguggagaagacuccaugcgcauggaacucgucuagaaccugugaaugcaggccgggcaugauaugugcuacauccgccaccaauucaugcgcucgguguguccccuauccuaucugcgccgcagagacggugacuaaaccacaggauauggccgaaaaggacacaaccuucgaggcucccccucuggggacucagccagauuguaaucccacaccggaaaacggagaggcgccugcaaguaccagcccaacgcagucccucuuaguggacucucaagccagcaaaacccugcccauuccuacaucagcucccgucgcccuuaguuccacuggcaagccaguuuuggaugcagguccugugcuguuuuggguaauccuagugcucgucgugguuguggggagcucugccuuccugcuuugccaucgacgcgcuuguagaaagaggauucggcagaaacugcacuugugcuaccccguccagaccucacaaccaaagcucgagcugguggacagucgcccgagaaggagcuccacacaguuacguucuggagccucgguaacugaaccuguugcagaggaacggggccugaugagccagccccucauggagaccugucauuccgugggcgcggcuuaccuugaaucacugccauugcaggaugccagucccgcagggggaccuucuagcccacgagaccuacccgagccuagagucuccacagagcacaccaauaacaaaaucgaaaagauauauaucaugaaagccgauacugugauugucgguacggugaaggcugagcugccggaaggcagggggcucgccggaccagcagagcccgaacuggaggaggaacuugaggcugaccacacaccucauuacccagaacaagagaccgagcccccucugggcucaugcagcgauguuauguugucuguggaagaggaagguaaagaggacccgcuccccacugccgcguccgggaaguga

SEQ ID NO: 2107 - RNA, 912 nt, Artificial Sequence
  EAW97060 variant
auggccaccagcagauacgagcccguggcugaaaucggcgucggggcauauggaacaguuuacaaggccagggacccucacuccggucauuucguggcgcugaaaucuguacgggugccaaacggcgggggaggcggugggggacucccgauuucaacuguccgcgagguggcucugcuucgacguuuggaagccuuugagcaccccaauguugugagauuaauggaugucugcgcaacgaguaggaccgaccgggaaauaaaggugacacugguauucgagcauguugaucaggaccuacgcacuuaucucgauaaagccccuccacccggccugccugcugagaccaucaaggaccuuaugagacaauuucugaggggcuuggauuuccuccacgcaaacuguauugugcaucgggaccugaaaccagaaaauauccuggucacaagcgggggaaccgugaagcucgccgauuuugguuuagcucgcauuuacuccuaucagauggcccugacucccguggucguuacacuuugguaccgagcgccugagguguugcugcagucuaccuaugcaacgccaguagacauguggucggugggcugcaucuucgccgaaauguuuagaaggaagccgcuauucugugggaacucagaggcugaucagcucggaaaaauauuugaccugaucggccuucccccugaggaugacuggccacgggacgucagccugccccguggugccuucccuccacgcgggcccagaccggugcaaaguguugugccugaaauggaggaauccggagcacaguugcuccuggagauguuaacuuuuaauccccacaagaggauuucugcuuuccgggcccugcagcacagcuaccuccauaaagaugaaggcaacccagaguga

SEQ ID NO: 2108 - RNA, 912 nt, Artificial Sequence; identical to SEQ ID NO: 2107
  AAA35673 variant

SEQ ID NO: 2109 - RNA, 690 nt, Artificial Sequence
  AAB50213 variant
auggacgugugcgccaccagcagaacagauagggagaucaaggucacucugguuuucgaacacguggaccaggaucuccggacguaccuugacaaagcucccccuccaggccugccggcagagaccauuaaggauuugaugcgccaauuuuuacgagggcuggacuuccuacaugccaacuguauaguacaccgugaucucaaacccgaaaauauccuggugacauccggagguacugucaaacuugcggacuuuggccuggcuagaauuuauucuuaccagauggccuugaccccugugguugugacacucugguauagggcaccagagguccugcugcagucaaccuacgccacucccguggauauguggaguguagggugcaucuucgcugaaauguuucggcgcaagccucucuucuguggaaacagcgaggcagaccaguuaggcaagauuuuugaucugaucggucuuccacccgaggacgauuggccuagagacguuuccuugccaaggggagccuucccgccccgggggccucgcccagugcaaucugucgugcccgaaauggaggaaucgggcgcucagcugcuacucgagaugcugacauuuaauccucauaagcgaauaucagccuucagagcgcuucagcacagcuaucugcauaaagacgagggcaacccagaauga

SEQ ID NO: 2110 - RNA, 336 nt, Artificial Sequence
  AAH15669 variant
auggccaccagcagauacgagcccguggcugaaaucggcgucggggcauauggaacaguuuacaaggccagggacccucacuccggucauuucguggcgcugaaaucuguacgggugccaaacggcgggggaggcggugggggacucccgauuucaacuguccgcgagguggcucugcuucgacguuuggaagccuuugagcaccccaauguugugagauuaauggaugucugcgcaacgaguaggaccgaccgggaaauaaagcgcuguuucguggagagccuguccucuguagagacacuaaaaccuacuucgugggccaagucacucaccuga

SEQ ID NO: 2111 - RNA, 429 nt, Artificial Sequence
  ACY78326 variant
auggagcccgccgcuggcagcuccauggaaccuucugcagacuggcuggccaccgcggcugccagagggaggguggaggaaguccgggcacuccuugaggccggagcucugccaaacgcacccaauucauacggucgccgaccgauccagguuaugaugaugggcagugcccguguggcugaauuguuacugcuacacggggccgagccuaacugcgcggauccagcaacacucacuagacccguacaugacgccgcuagggagggauuccuggauacgcuugugguccugcaccgggccggcgcaccuugugcuaugccaggugccgugugccccuggaccugguugcgcagcugggcgauugccaugucccaugggacaugugcaagacucaggggagcuccugaagccguuacuaugccagcuuga

SEQ ID NO: 2112 - RNA, 351 nt, Artificial Sequence
  EAW58598 variant
auggagcccgccgcuggcagcuccauggaaccuucugcagacuggcuggccaccgcggcugccagagggaggguggaggaaguccgggcacuccuugaggccggagcucugccaaacgcacccaauucauacggucgccgaccgauccagguuggccgugggagugccgcuggagccggcgauggugggagauuguggaggacaaaguucgcgggagaauuagagagcggcuccgcaucuauucugcggaaaaagggccgccuaccuggggaguuuucggaaggagugugcaaccacagaccacccccuggugacgcccucggcgcuugggaggccaaagaagaggaguga

SEQ ID NO: 2113 - RNA, 471 nt, Artificial Sequence
  AFN61598 variant
auggagcccgccgcuggcagcuccauggaaccuucugcagacuggcuggccaccgcggcugccagagggaggguggaggaaguccgggcacuccuugaggccggagcucugccaaacgcacccaauucauacggucgccgaccgauccagguuaugaugaugggcagugcccguguggcugaauuguuacugcuacacggggccgagccuaacugcgcggauccagcaacacucacuagacccguacaugacgccgcuagggagggauuccuggauacgcuugugguccugcaccgggccggcgcacgcuuggacgugagagaugcuugggguaggcucccuguugaccuggccgaggaacuggggcaucgggauguggcgcgcuaucuccgagccgcagcuggaggcaccagaggcagcaaucacgccaggauugacgcugccgaagggccauccgauauacccgacuga

SEQ ID NO: 2114 - RNA, 327 nt, Artificial Sequence
  CCQ43815 variant
auggaggugaugaugaugggcagcgccagagucgcugaacugcuccuucugcacggggcagagcccaacugcgccgacccugcgaccuugacaaggccaguucaugaugcugcccgggaaggauucuuagacacucuggugguacuacaccgcgccggugcacgacucgaugugcgugacgcuuggggcagacugccggucgaucuugcagaggaacuggggcauagggacguggcccgguacuugcgcgcugccgcgggaggcacgagagguuccaaucacgcaaggaucgaugccgcugaggggcccucugacauuccugauuga

SEQ ID NO: 2115 - RNA, 399 nt, Artificial Sequence
  AAA82236 variant
auggugagaagguuccuggucacccuccggauccgccgagccugcgggcccccucguguuagaguguuuguagugcacauuccaaggcuuacaggcgagugggcugcaccgggagcccccgcggcugucgcccugguguugauguuacugcggagccagcgccuaggucaacagccucucccaagaaggcccggccaugacgaugggcagcggccuuccggaggcgcagccgcugcaccacgccgaggugcccagcugagaaggccccggcacucucauccuacucgugcucgcagauguccagggggacuuccgggccacgccggcggggcggcacccggaaggggugccgcuggccgggcccgaugccuggggccuucagcacgcggaccaggcuga

SEQ ID NO: 2116 - RNA, 2109 nt, Artificial Sequence
  CCDS12584.1 variant
auggagagccccuccgccccuccacacagauggugcaucccguggcagaggcugcuccuuaccgcuucucuguugacauucuggaaucccccuacuacggcaaaguuaaccauugaaucaacaccauuuaauguggccgagggcaaagaaguccugcuacucguucauaaccugccccaacaccuuuucggguacaguugguauaagggagagcggguggacgguaaucgccagauaaucggcuacguaauugggacucagcaggcgaccccuggaccagcuuauagcggccgagaaaucauuuaccccaacgccucccuguugauccaaaauauaauccagaacgauacagguuuuuauacccuccaugugauuaaaucugaccuggucaaugaggaggcaacugggcaguuccguguguacccugaacugccaaagccgucgaucucaagcaacaauaguaaacccguugaggauaaggacgccguggcuuuuacaugugaaccugagacccaggaugcaacguaucucuggugggucaacaaucaauccuuaccagugucucccagacugcagcuuagcaacggaaauaggacuuugacccuguucaacguaacacggaaugacacugccuccuacaagugcgagacccagaacccuguuucagcucgcagaagugauagcgugauucuaaacguccucuacggcccagacgcccccacaaucucuccgcugaauaccuccuauaggucaggcgaaaaccuuaaucugagcugucacgcggcaaguaacccucccgcccaguacucuugguuugugaaugggacguuccaacaguccacucaggaguuguuuauaccaaacauuacagugaauaacagcggaucguauaccugccaagcucauaauucugauacuggucucaaccggacaaccgucacgaccaucacaguuuacgccgaaccucccaaaccauucauuacuuccaauaacucaaaucccguggaggacgaagaugcaguagcucugaccugugagccugagauccagaacacaacuuauuuauggugggugaauaaccagagucugccagucagcccgcgccuccagcuuuccaacgacaaucgaacccugacauugcuaucugugaccagaaacgauguuggccccuacgaaugcgggauccaaaaugagcugagcguggaccacucagacccugucauucucaacgugcuguauggaccagaugaccccacuauaaguccuuccuacacguacuauaggccaggcguaaaucuuagccugucuugucacgccgcgucaaaucccccggcccaguacaguugguugaucgaugguaauauucagcagcauacacaagaacucuuuaucagcaacauaaccgagaagaacuccgggcuguauacuugccaggcaaacaauucugcuucgggacacagccggaccacaguuaaaaccauuacuguguccgccgaauuaccuaagccaucaaucaguucuaacaauagcaaacccgucgaggacaaggaugcuguggccuucacaugugagccugaagcacagaacacgaccuaccuguggugggucaauggccagucccuacccgugucaccacgucuccaacugagcaacggcaaccgcacucuuacauuguuuaauguuaccagaaacgacgccagggcuuaugugugcgggauccagaacucuguauccgcgaaccggagugauccugucacacuggacgugcucuacggacccgauacuccaauuaucagcccgccugacucuuccuaucugucaggugcaaaucuuaaccugaguugucauagcgccucgaaucccuccccacaguacucuuggcgaauuaacggcauaccccagcaacacacccagguuuuguucaucgcuaagauuacgccuaauaacaaugggaccuacgccugcuucgugagcaaccucgcaacaggacgcaauaacucaaucgucaaaaguaucacuguguccgccucuggcaccagcccaggucuguccgcuggggccacaguaggcauuaugauaggaguguuaguuggcgucgcacugaucuga

SEQ ID NO: 2117 - RNA, 1035 nt, Artificial Sequence
  AAA51739 variant
auggggcccccuagcgccccaccgugcagacugcacgugcccuggaaggagguccuccuuaccgcuucccuguugacauucuggaacccuccaacuacggcaaaauuaaccaucgaaucuacacccuuuaauguugccgagggcaaggaagugcugcuacucgcgcauaaccugccucagaauaggauuggauacucaugguauaaaggugagcggguagacggcaacagucuuauagugggguacgucaucggaacucaacaggcuaccccaggccccgccuauagcggucgcgaaacaauuuacccuaaugcaucccuguugauccagaacgugacccagaaugauacuggguucuauacacuccaaguuauuaagucugaccuggugaacgaggaggccaccggacaguuucacgucuacccagaacugccgaaacccucgaucucaagcaauaacaguaauccuguggaggauaaggacgcuguagcauucacgugugaaccagagguucagaacacuaccuaucucuggugggugaauggccaguccuuacccgucucuccucgacugcaacuuagcaacggcaauaugacauugacucugcuauccgugaagcguaacgaugccgggucauacgagugcgaaauacagaacccagcuagugccaauagaagcgaccccgugacccucaacguccuguacggaccggaugguccuacaaucucucccuccaaagcgaauuauaggccaggcgagaaccuuaaucugucaugucaugcagccagcaacccucccgcucaguacaguugguuuauuaaugggaccuuccagcaaucuacgcaggaauuguuuaucccaaacauuacuguuaauaacuccggaagcuauaugugccaggcccacaauucggcaacaggccucaaccggaccacugugacaaugaucaccguaucugguuccgcucccgugcugucagccgucgcgacgguggggauaaccauuggaguuuuagcccgcguggcacugaucuga

SEQ ID NO: 2118 - RNA, 1173 nt, Artificial Sequence
  AAB04533 variant
augggcgccaccacaauggaccaaaagagccugugggcugggguggucguucuccuucuguugcagggagguuccgcauacaaauuagugugcuauuucacuaacuggucucaggauagacaggagcccggcaaguuuacgccugaaaauaucgacccauuccuguguucacaccuaauuuacaguuuugccagcauagagaacaauaaaguaaucauuaaggauaaauccgaagugaugcucuaucagaccaucaacucucugaagacaaagaauccgaaacuuaagauucuguugucgaucgggggauaccucuucggcucaaaagguuuucaucccauggucgacagcaguacuuccaggcuggaguucauaaacucuaucauucuguuucuccggaaucacaacuucgauggguuagacgugagcuggaucuauccugaucaaaaggaaaauacccauuuuacaguucugauucacgagcuugcggaggcuuuccagaaagacuuuaccaaguccacuaaggaacgcuugcugcuaacagccggagugucagcaggccgacagaugaucgauaacaguuaccaggucgagaaacucgccaaggaccuggauuucauaaaucuucugagcuuugacuuccauggcucuugggaaaaaccauugauuaccgggcacaacuccccacucucaaagggauggcaagaucgugguccuagcaguuauuacaauguggaguacgcuguaggcuauuggauccacaaagggaugccaucugagaagguugugaugggcauucccacguacggacauuccuucacucuggcaagcgccgaaaccacagucggugcuccugccucggggccaggagcggcaggcccgaucacugagucuuccggcuuuuuagccuauuacgaaaucugccaguuccugaaaggggcuaagauuaccagacuccaggaccagcaagugcccuaugccgugaagggaaaccagugggucgguuacgacgauguuaaaucaauggagacaaaggugcaguuucuuaaaaaucugaacuugggcggggcaaugauauggaguaucgacauggaugacuucaccggaaagagcuguaaccaaggcccuuauccccuaguacaggcugugaaaaggucccuggguucucucuga

SEQ ID NO: 2119 - RNA, 2832 nt, Artificial Sequence
  AAD40367 variant
augacccagagaagcaucgccggccccauuugcaaccugaaguucgugacacuccuugucgcucuguccucugaguugccauuuuuaggggcaggaguucaacugcaggacaaugguuacaacggccuacucauagccaucaauccucaggugccggaaaaccagaaucugauuucaaacaucaaagagaugauuacugaagcgaguuucuaucuuuuuaaugcuacgaagaggcggguauucuuucgcaacaucaaaauacugauccccgccaccuggaaggcaaauaacaauagcaaaauuaagcaagaguccuacgaaaaggccaacgugaucgucacagauugguauggggcucacggagacgauccuuacacuuugcaguaucgaggcugugguaaagaggggaaguacauucauuucaccccaaauuuucuccugaacgacaaucugacagcaggauauggcucucguggcagaguguucguucacgagugggcccaucucagguggggaguguuugaugaauacaacaacgacaaacccuucuacaucaaugggcagaaccagauaaaggucacccggugcucgucagauauuacugguaucuuugugugugagaaaggcccuugcccacaagaaaauuguauuaucagcaaguuauucaaggaggggugcacauuuaucuauaacaguacccagaaugcuacggccuccauuauguucaugcagucucugagcuccguaguugaguucuguaacgcgucaacucacaaucaggaagcacccaaccuucaaaaucagaugugcaguuugcgcagcgccugggacgugauaaccgauucugcugacuuucaucacuccuucccuaugaacggaacagagcugccaccgcccccuacuuuuagucuaguccaggccggcgauaaaguggugugucucguccuggacguuagcaguaagauggcagaagcugauagacuucugcaauugcagcaggccgcggaguucuaccucaugcagaucguggaaauucacaccuuuguagguaucgccucuuucgacuccaaaggggagauaagggcacaacugcaucagauuaauagcaacgacgaucggaaguuacuggugucguaucucccaacaaccgucucugcuaaaacggacaucuccaucugcucaggacuuaagaaaggcuuugaggugguugaaaagcugaauggcaaggccuacgggagugugaugauuuuggucacuagcggagaugacaaacuacuggguaacugucuccccacagugcuguccucuggcagcaccauccacucaauugcucuugggaguuccgccgcaccuaaucuggaggaauugagccgccucacuggaggccugaaguucuuuguaccagauauaucuaacucaaacaguaugaucgacgccuucagccgaauuuccucugguacaggggauaucuuucagcagcauauccaauuagagucgaccggcgaaaauguuaaaccccaccaccagcugaagaacacggugaccgucgacaauacagugggaaacgauacuauguuccuagucaccuggcaggcuagcggcccgccugagauuauacucuuugaccccgaugggagaaaauauuacacaaauaacuucaucacuaaucugaccuucaggacagcgucccuuuggauuccaggaaccgcaaagccuggucauuggacuuauacguugaacaauacacaccauucacugcaggcccucaaggugaccguuacuucacgggcuucuaacagcgccgugcccccagcaaccguagaggccuuugucgaacgugacucccugcacuucccccauccugugaugaucuacgcuaauguuaaacaaggcuuuuacccaauucuuaacgccacagugaccgcaacugucgagccggaaacaggggaccccgugacgcugcgcuugcucgaugacggagcgggcgcugauguaaucaagaaugacgguauauauucaagauacuucuuuagcuucgccgcaaacgggagguauucucugaaagugcacguuaaucacuccccuaguaucagcaccccagcccauucuauucccggcucccacgcuauguacgucccuggauauacugccaacggcaacauccagaugaaugcaccacggaagucaguggggcgaaacgaggaggaacgcaaauggggauuuaguagagugagcucggguggcuccuucucugucuuagggguucccgcuggaccgcauccugauguguuuccacccugcaagauuaucgaccuggaggccgugaagguagaagaggaacuaacacucagcuggaccgcgccuggcgaggauuucgaccagggucaggccacaucauacgagauaaggaugaguaaaucccugcaaaauauucaggaugacuuuaacaaugcuauccuugucaacacuucuaagcggaauccccagcaagcagggauucgcgaaaucuucaccuuuagcccacagauauccacgaacggcccugagcaccagcccaauggagaaacccacgagucacauagaaucuauguggccauuagggcuauggaucguaacagcuugcagagugccguuucuaauaucgcacaagcgccacuguucauuccgccuaacuccgaccccgugccagcccgggauuaccucauccugaaaggcgucuuaacagcuauggggcugauaggaauuaucugccuuaucauugugguuacucaccauaccuugagccgaaagaaaagagccgacaagaaggaaaauggcacaaaacuccuguga

SEQ ID NO: 2120 - RNA, 708 nt, Artificial Sequence
  AAF82135 variant
auggaggaagagacccacacagacgccaagaucagagcugaaaacggcacugggagcucccccaggggaccugguugcucucugcggcauuucgcaugugagcagaaucuccuuucacgcccagauggcagugccagcuuucugcaaggggacacguccguguuggcgggagucuacggcccggcugaaguuaaagugucuaaggagauuuucaacaaagccaccuuagagguaauacugcgacccaagaucggucuaccugggguggcagaaaaaucgcgugagagacucauuaggaauacaugcgaagccgucgugcugggaacucuucacccacggaccucaaucacaguugugcugcaggucgugagcgaugcuggcaguuugcucgcauguugccugaacgccgcuuguauggcccugguagacgcgggcguucccaugcgcgcacucuuuugcgggguggccugugcuuuagauuccgacggaacccugguccuugauccuacuucuaagcaggagaaggaggccagagcaguguugacauucgcucuggacagcguggaaaggaaacuacucauguccucaaccaagggucuguauagugauacggagcuucagcaaugccuggccgcggcccaggcagcuagccagcaugucuuucgguucuaccgcgaaucuuugcagcgaagauauuccaaaucauga

SEQ ID NO: 2121 - RNA, 1752 nt, Artificial Sequence
  CCDS6312.1 variant
auggagguggccgcuaacugcagccugagagucaagaggccccuccuugacccucgguucgaaggcuacaaacuguccuuggagccauuaccguguuaucagcuggaacuagaugcagccguugcggaggugaagcuccgcgacgaucaauacacccuggaacacaugcaugcuuuugggauguauaauuaccuucacugcgacucuugguaucaggauucaguauacuauaucgacacacugggacgaauuaugaacuugacugugaugcucgauacggcccuggguaaaccccgugaggucuucagacugccuaccgaccucacagcaugugauaauagguuaugcgccaguauacauuuuagcuccucuacuugggugacccugucggacggcacagggcggcuuuacguuaucggaaccggcgagcgcgguaacucagcuagcgaaaagugggagauuauguucaaugaagaguugggggauccauuuaucauuauccacaguauaucccugcuaaacgcagaggaacauucuaucgccacucuccugcuuagaauugagaaagaagaacuggacaugaagggaagcggcuucuacguguccuuggaaugggucacaaucucaaagaaaaaucaggauaacaagaaauaugagauuaucaagagggacauacuccggggcaaaagugugccccacuacgcugccauugagccugacgggaauggacugaugaucguaagcuauaagucuuuaaccuuuguucaggcgggucaagaucuggaagagaacauggacgaagauauuuccgagaagaucaaagaaccacucuacuauuggcagcagacggaggacgaucuuacugugaccauccgccugcccgaggacucaacaaaggaagauauucagauacaauucuugccugaccacaucaauauuguccuaaaagaucaucaguuucuggagggcaagcucuacagcaguaucgaccacgaaucuuccacuuggauaauuaaagagagcaacucgcuggaaaucucucuuaucaagaaaaaugaggggcugaccuggccagaguuggugauuggagauaagcagggcgaacucauccgagacuccgcacagugugccgcuauugccgagagacugaugcauuuaacaucagaggagcugaacccgaaucccgacaaggagaaaccuccaugcaacgcacaagaacuagaggaaugugauauauucuuugaggaaaguagcucccucugcagguucgacgguaacacccugaagacgacucacguggucaaucuugggucuaaccaguauuuguuuagcguuaucguggaucccaaagagaugccuuguuucugccugcggcacgacguagaugcucuccuguggcagccacauucaaguaagcaagacgauaugugggagcacauugccacauucaaugcgcuuggauacgugcaggccuccaaacgugacaagaaguuuuucgcaugugcucccaacuacagcuaugccgcucugugcgaaugcuugcgcagagucuuuaucuacaggcagccggccccuaugucuaccgugcucuauaaucggaaagagggccgacagguuggccaaguggcaaagcagcaggucgccucacuggaaacuaacgaucccaucuuaggguuccaggcuacaaaugagcgccuguuugugcuaaccacgaaaaaccucuuccugauuaagguaaauaccgaaaacuga

SEQ ID NO: 2122 - RNA, 1563 nt, Artificial Sequence
  CCDS41288.1 variant
augagcuccccucuggccucucucucaaagaccagaaaagugccucuuccaagugagccgaugaaccccggcaggcgggggauccgcauuuacggagacgaagaugaggucgacaugcugagcgaugguugcggcuccgaagagaagauaucuguuccuucguguuaugggggaaucggcgcuccagugucacgacagguacccgcaagccacgacagugaauugauggccuucaugacacguaaauuaugggaucuggagcaacaggugaaggcgcagacugacgagauucuauccaaagaucagaagaucgcugcccucgaagaccugguccaaacgcuuagaccucauccagcagaggccacccugcagaggcaggaagaguuggagacaaugugcgugcagcuccaacggcagguucgcgaaauggagagauuucugucugauuacggucugcagugggugggggaacccauggaccaggaggauagcgaauccaagacugucucagagcacggagagagggacuggaugaccgcuaaaaaguucuggaaaccuggcgauagucucgcaccaccggaaguggacuuugaccgguuacuggccagccuucaagauuugucugagcugguaguugaaggcgacacacaggugacccccgucccugggggagcucgccuacgaacucucgagccaauuccccugaaacuuuauagaaaugguaucaugauguucgauggcccuuuucagccauucuacgaccccuccacacaaaggugucugcgggauauauuggacggguuuuucccgucagaacuccagcgucuguauccuaacggagugcccuuuaaggugagcgauuuacgcaaucaggucuaccuggaggacggccucgauccauucccuggugaggggagaguugugggaaggcagcuuaugcauaaggcccuggaccggguagaggaacaccccggcagucgaaugaccgcggaaaaguuuuugaaccgccuaccaaaauucgugaucagacaaggcgaggucauugauaucagggggcccauucgggacacgcugcagaauugcuguccucucccagcacgcauccaggaaauagugguugagacuccgacccuggccgcugagagagaaaggucucaggagucccccaacacacccgccccaccccuuagcaugcugcguauuaagucggaaaauggagagcaagcauuuuugcucaugaugcagccugacaacacuaucggugaugugcgggcucuguuagcccaggcgcgagucauggacgccucugcauucgagauuuucuccaccuuuccacccacacuguaucaggaugacacccuaacgcuccaagcugccggccuggugccgaaagcugcccuuuugcugagagcaaggcgcgccccuaagucaagucucaaauucagcccagggcccugcccuggacccggcccagguccuucccccgggccaggcccgggaccuucucccggcccagggcccggaccuagcccaugucccgguccuucaccgaguccacaguga

SEQ ID NO: 2123 - RNA, 429 nt, Artificial Sequence
  AAA88022 variant
auggccaccaagaucgacaaagaggcuugcagagcagccuacaaccuggugagggaugacggcagcgcggucauuuggguuacauucaaguaugauggguccacuauagugcccggagaacagggugcugaguaccaacacuuuauccagcaguguacggacgauguacgccucuucgccuuugugcgguucaccacaggcgacgcaaugucuaaacgaucaaaguuugcccuuauuacuuggaucggggaaaaugucaguggacugcagcgugcuaaaaccggcacagauaagaccuuggugaaggagguugugcaaaacuucgcaaaagaauuugucauuagcgacagaaaggaguuagaggaagauuucaucaaauccgagcugaagaaagccgguggggcuaauuaugacgcccagacugaauga

SEQ ID NO: 2124 - RNA, 495 nt, Artificial Sequence
  CCQ43891 variant
auggccaccagagaccccuggguguggauggcuagcccugauuuccaggcaaggaagggcaaacggguccaccaagagacacuggccccaggggaaacuaaggacaaaauggagcuccuuggacugcgcgguccguuggauuuacugggccccggggcgcuacucgcuacgcugggaaagauggccccuggcgaacauaaagcacagcgagccccaaaggagucccccgacaagaccgcucguugggcacagagagauccucaggguccaaggguuucucuugaauaccuggagcggcgcgccacaauggggcaccaggcuucauuggaccaucaaggacccagagccagucagggcgcguggggccucggggagaggacuguguggaccguaccucaggaucggcgcggaagccuggcaacagaagcccgaauggagcugcaagguccaggcgugccgcaggcuuccagagccucuagggaaacccagugguga

SEQ ID NO: 2125 - RNA, 1623 nt, Artificial Sequence
  AAO18361 variant
augggccccggggagagagccggagguggcggggacgcuggaaagggcaacgcagccggugggggaggcggcgggaggagcgcgaccacagcuggaucccgggccgugucugcacugugccuccuucugucagucgguagugccgcugcauguuuguuacugggcguucaggccgcugcccuacaagggcgcguggcggcacucgaagaggaacgagagcugcuucguagagccggaccuccaggcgcucuggaugccugggcagaaccgcacuuggagaggcuccugcgggagaaacuggacggucucgcuaagauccgcacugccagagaagcgcccagcgagugcguauguccuccagggcccccuggaaggcggggcaaaccaggccgccgaggggaucccggaccuccaggucaguccggcagagacggguacccgggacccuuaggccuggaugguaagccugggcuuccaggccccaaaggagaaaagggcgccccuggggacuucggaccaaggggugaucagggccaggacggggcagcuggacccccgggcccucccgguccaccuggggcccggggacccccaggcgauacgggcaaggacgggccccguggagcucaagguccugccggcccaaaaggggagccgggacaggauggcgagaugggucccaaggggccuccaggccccaaaggagaaccuggcgugccagggaagaaaggagacgauggcacccccucucagccggguccuccagggcccaagggagagccuggcucgauggguccccgcggcgaaaauggggucgacggagcaccaggcccuaagggggagcccggacauagaggcacagacggugccgcugggccaaggggagcgccgggcuugaaaggugaacagggcgauacugugguuauugacuaugaugggcggauacuggacgcacuaaagggaccucccggcccacaagggcccccuggaccacccggcaucccuggugccaaaggggagcucggacugccgggcgcuccagguauugauggcgagaaggggcccaaaggacagaagggcgacccuggggaaccaggacccgccggccuuaaaggugaggcaggggaaaugggacugucaggcuugccuggcgccgaugggcucaagggagagaagggugaaagcgcuagugacucccugcaggagucuuuagcccagcugaucguggagccggggcccccaggcccucccggaccaccuggccccaugggucuccaagggauucagggaccaaaaggccuugauggcgcaaagggggaaaaaggagcgagcggugagcgaggcccguccgggcugccuggacccgucggcccacccgguuugaucgggcuaccuggaaccaagggcgaaaaaggccgcccaggggagcccggacuggacgguuuuccuggcccgagaggggaaaagggagauaggucagagcggggcgagaagggugaacgcggggugccaggaagaaaaggcguaaagggccagaaaggggagcccggaccucccggucucgaccaaccaugcccuguuggccccgacgggcugccagugccuggauguuggcacaaguga

SEQ ID NO: 2126 - RNA, 492 nt, Artificial Sequence
  CAG25548 variant
augcuggccagagcucuccuucugugcgcaguguuggccuuaagccacaccgcgaaccccuguugcucccauccuugucagaauaggggcgucugcaugucuguuggguucgaccaauacaagugugauugcacacggacuggauuuuauggugagaacuguucaacgccagaguuccugacccgcaucaaacuauuucucaagccgacacccaauacugugcacuacauucugacccauuucaaaggcuuuuggaacguagugaauaacauaccuuuccuucgaaaugcuaucaugaguuauguccugacaagccguucccacuugauugacucuccacccaccuacaacgccgauuauggguacaagucgugggaagcauuuucaaaucucagcuauuacacuagagcccugccuccagugcccgacgauugcccuacaccacugggaguuaaagcucuccaugcaaguguguuccaggacagguccuga

SEQ ID NO: 2127 - RNA, 1632 nt, Artificial Sequence
  AAC50809 variant
augggcaccagccugucccccaacgacccuuggccacucaauccgcuuucuauccagcaaacaacucuguuguuacugcuaucagugcucgccacgguccacguugggcagagacugcuuaggcagcggcgccgacagcugcguagugcucccccuggaccauucgcauggcccuugauugguaacgccgcggcugugggccaagccgcacaucucagcuuugccagacuggcuaggcgguacggggauguauuccagauacgccugggauccugcccuaucgugguccucaauggcgagagagcaauucaccaggccuuagugcagcaagguucugcuuuugccgacaggccagcguucgcaucguuucggguugugucagggggacgcagcauggccuucggccauuauagugaacacuggaagguccagagacgagcugcccauuccaugaugaggaacuuuuucacccggcagccccguucucgccaggugcuggagggccacguacuuagcgaagcaagagaguugguugcucugcuagugaggggguccgccgauggagcguuucucgacccucggccacugacagucguggccguggcaaaugucaugucagcuguuuguuucgguugccgauacagucacgaugacccggaauuucgcgagcuucugagccauaacgaggaguucggcagaacugugggggccggaucuuugguagaugugaugcccuggcuccaauauuuuccuaauccagucaggaccguguuccgggaguucgaacagcugaaccgcaauuuuuccaacuucaucuuagacaaauuucugagacacugugagucacucaggcccggcgcugccccucgugauaugauggacgcauucauucuuagcgccgagaagaaagcugcgggugauagucaugggggaggcgcacggcuggacuuggaaaauguuccagccacaaucaccgauauauuuggcgcuucucaggacacucuauccacagcccugcaauggcuccugcuucuguucacccgauaccccgacgugcagacgagaguccaggcagaguuggaucaggugguagggagggaccgccucccgugcaugggagaucaaccuaaccugcccuauguuuuagccuuucuguacgaagcuaugcgguucagcucguuugugccagucacuaucccucacgccaccacagcaaauacuucugugcuagguuaucacauucccaaggacaccgucguguucguuaaccagugguccgugaaucaugauccacucaaauggcccaacccugagaacuuugacccagcgagauuccuggauaaggacggccuuaucaauaaggauuugacaucaaggguaaugauuuuuagugucgggaaacgccgauguaucggagaagaacugagcaagaugcaacucuuccuguucauauccauucuugcucaccagugcgacuuucgggccaacccgaaugagcccgcaaaaaugaacuucucuuacggccugaccaucaagccuaagagcuuuaaagugaauguuacguugcgugaaucaauggagcuccuggauagugccgugcagaacuuacaggcuaaggaaacuugucaguga

SEQ ID NO: 2128 - RNA, 333 nt, Artificial Sequence
  NM_001129828 variant
auguggaugggccugauccagcucguggagggggucaagagaaaagaccaaggauuccuugaaaaggaguuuuaccacaaaaccaacauuaagaugaggugcgaguuccuggccuguuggcccgcuuuuacaguuuugggugaagcauggcgggaucagguggacuggagccgcuuacugcgagaugccggccuaguaaaaaugucccguaagccuagagcgucuucaccacucaguaauaaccauccgcccacuccuaagagguucccacggcagcccgggcgcgaaaaaggaccuauaaaggaggugccaggcacgaaagguagccccuga

SEQ ID NO: 2129 - RNA, 384 nt, Artificial Sequence
  NM_001129826 variant
auguggaugggccugauccagcucguggagggggucaagagaaaagaccaaggauuccuugaaaaggaguuuuaccacaaaaccaacauuaagaugaggugcgaguuccuggccuguuggcccgcuuuuacaguuuugggugaagcauggcgggaucagguggacuggagccgcuuacugcgagaugccggccuaguaaaaaugucccguaagccuagagcgucuucaccacucaguaauaaccauccgcccacuccuaagaggcgggggagcggacgccacccacugaaucccggcccugaagcucuuuccaaauucccaagacagcccgguagggagaaggggccuauaaaagaggugccaggaacgaagggcucuccguga

SEQ ID NO: 2130 - RNA, 570 nt, Artificial Sequence
  AAI40914 variant
augaccgacaagacagagaaaguggccgucgaucccgaaacuguuuucaagagaccuagggagugcgacagcccauccuaccagaaacggcaacgcauggcucugcucgcacgaaagcagggcgccggggauucucuuaucgcgggaucagcuaugaguaaagccaagaagcugaugacgggucacgcaauuccgcccagccaguuggacucccagauagaugacuuuaccggcuucucuaaagaucguaugaugcaaaagccugggucgaacgccccagugggaggcaauguaacaagcucauuuaguggugacgauuuagaauguagagagacugcuuccucucccaaaagccagagggaaaucaacgcagacauuaagcggaaacuggugaaggagcuacgcugcgucgggcagaaguaugagaaaaucuucgaaaugcucgagggagugcagggcccuaccgccguuagaaagagguuuuucgaauccauuaucaaagaggcugcccgguguaugcgccgagauuuugugaagcaucugaaaaagaaacuuaagagaaugauauga

SEQ ID NO: 2131 - RNA, 795 nt, Artificial Sequence
  AAH20662 variant
augcugagacuccuuaggcuggccuuggcuuucuacggccggaccgcagaccccgccgagcgccaggggccucaacagcagggauuaccacagggugauacacaacugacuacggugcagggcgucguuaccagcuuuugcggggacuauggaaugaucgaugaauccauuuacuucucuucagacgugguaacaggcaacgugccgcuaaaggucggucagaaagugaauguuguggucgaggaagauaagccccacuaugggcuccgagcgauaaaaguggacguaguuccucgucaucuguacggagcuggcccaagugauagcggcacuagagugcuuaucgggugugucaccuccauuaacgaggacaauaucuauauuucuaacucgaucuacuuuucaauagccaucgugagcgaagauuucgugcccuauaagggagaccuguuggaggucgaguacaguacagaaccugguauuuccaauaucaaagcaaccucuguuaagccaauuaggugcauccacacugaggaaguguguauaacaagcguacauggccggaacggggugauugauuacaccaucuuuuucacgcucgacuccgucaagcugcccgauggauaugugccucagguugacgacauugugaaugucgugaugguagagucaauccaauuuugcuucaucuggcgcgccauuaguauaacuccaguucacaaaucuagcuccggcuuucaggaugacggugggcugggaagaccgaagagggagcggcgcucacagagcaucuga

SEQ ID NO: 2132 - RNA, 2844 nt, Artificial Sequence
  CCDS735.1 variant
augagccugcccuccagacagaccgccaucauugugaacccuccaccgcccgaguacauaaauacaaagaaaaacggcaggcucacuaaucaacuucaguaucugcagaaggucguuuugaaagacuuauggaagcacucuuucucauggccuuuucagcggccaguggaugcuguaaaacugcaacuacccgacuacuauacgaucauuaagaacccuauggaucucaauaccaucaagaaacgccuggaaaacaaguacuaugcaaaagccagugagugcauugaagacuucaauacaauguuuagcaacuguuaccuuuauaauaagccaggggaugacaucgugcugauggcgcaggcuuuggagaaacucuucaugcagaagcugucccagaugccccaagaagaacaggucgugggaguuaaggagcgaaucaaaaaggguacucagcagaacauagccgugucuucggcaaaagaaaagucaagcccuagugccaccgagaaagucuuuaagcaacaggaaauuccauccguguucccgaaaacaucuaucagcccccugaauguaguucagggcgcuuccgugaacucaaguagccaaaccgcagcccaggucacuaagggggugaagcguaaagcugauacaaccacgccugccacuucugcggugaaggcauccucagaguuuagcccaaccuucacagagaaaagugucgcccucccaccuauuaaggaaaauaugcccaaaaacguuuuacccgacucucagcagcaauacaaugugguaaagacugugaaggucaccgagcagcugagacauugcuccgaaauccuuaaagagauguuggcuaagaaacacuuuagcuacgccuggccguucuauaacccuguggauguuaacgcacugggacuacauaauuacuaugacguggucaagaaccccauggaucucggcacaauaaaagaaaagauggacaaucaggaguacaaggaugcuuauaaauuugccgcggacgugaggcugauguucaugaacuguuacaaguauaauccaccugaccacgagguaguuaccauggcccggaugcuucaggauguguuugaaacgcauuucucgaaaauucccaucgagccagucgaaucuaugccccugugcuacauuaagacugacaucacagagaccacuggucgcgaaaacacaaaugaggcauccucagaggggaacaguagcgaugacuccgaagaugagagagugaaaagguuggcuaagcuccaagaacagcugaaggccguccaccagcaguuacaagugcugucucagguuccuuuccggaaacucaauaagaaaaaggagaaaagcaagaaagaaaagaagaaagagaaggugaacaauucaaacgagaauccacgcaaaaugugugaacagaugcgacuuaaggagaaaaguaagagaaaccagccgaagaaaaggaagcaacaguuuaucggacugaaauccgaagacgaggauaaugcuaagcccaugaacuacgacgagaaacggcaguugagccuaaacauuaauaagcugccuggcgauaagcucggccguguaguccacauaauccaaucucgcgaaccaucacugaguaacagcaaucccgacgagauugaaaucgauuucgagacccuuaaagccuccacgcugagagaauuggagaaguaugugucugcaugccucaggaaacggccucugaagccacccgccaaaaagauaaugaugucgaaggaggaauuacauagccagaaaaagcaggagcuggaaaaacgacuacucgacguuaacaaucagcugaacucccgcaagagacaaaccaaaucagacaagacacagccgaguaaagcuguggagaaugucucuaggcuuagcgaauccucaagcagcuccaguucuucuuccgagucagagaguagcucguccgauuugucuagcucagacaguuccgauucugaaagcgagauguuuccuaaguucacugaagugaagccaaacgacucccccucaaaagagaauguaaagaaaaugaagaacgaauguauuccucccgaggggcggaccggagugacacagaucgguuacugcguucaggauacuaccagcgcgaauacaacccugguccaccaaacuacgccaagucaugugaugccucccaaccaccaccagcucgcauuuaauuaucaggagcuggaacaucuucagacagugaaaaacaucucuccacugcaaauuuugccgccuuccggcgacagcgagcagcucucgaaugggaucaccgucaugcaccccucaggagauucugacacuaccaugcuggaaagugagugucaggccccaguucaaaaggauauuaagaucaaaaacgcugacuccuggaagucuuuaggcaaacccgugaagccuagcggugugaugaaaagcuccgaugagcuguucaaccaguuucgcaaggccgcaauagaaaaggagguaaaagccagaacacaggaacuaauuaggaagcaucucgagcagaauaccaaagaacugaaggcuucacaagagaaccagcgugaccuugggaauggauugacugucgagaguuucagcaacaaaauccagaauaagugcucuggcgaggagcagaaggaacaccaacaguccucagaggcccaggauaaaaguaagcuguggcuccugaaagaccgggacuuagcacgacagaaggaacaagagagaaggcgccgggaggcgauggugggcacaaucgauaugacgcugcagagcgacauuaugaccauguuugaaaacaauuucgauuga

SEQ ID NO: 2133 - RNA, 543 nt, Artificial Sequence
  CCDS35455.1 variant
augcaggccgagggcagagggaccggagguagcacaggcgacgcugaugggcccggaggcccugguaucccagacgggccgggaggcaacgcaggcgggcccggagaagccggugcgacuggcgggaggggaccucggggcgcuggugccgcacgcgccuccgggccacgaggaggcgcuccccguggcccucacgggggagcagccucugcucaagaugguagaugcccauguggcgccaggcggcccgacucacgccugcucgagcuucauauuacgaugccuuucaguagcccaauggaagcggagcuggugagaaggauauugucccgggaugcagccccguuaccccgcccuggggcuguccugaaggacuuuaccguuucuggaaaucuacucuucauccgacugacagccgcagaucacagacagcuucagcugucgauuucaagcugcuugcagcaacucagucugcugauguggaucacucaguguuuucucccaguguucuuagcucaggcccccuccggccagaggcgguga

SEQ ID NO: 2134 - RNA, 633 nt, Artificial Sequence
  CAA10196 variant
augcaggccgagggccaagggaccggagguagcacaggcgacgcugaugggcccggaggcccugguaucccagacgggccgggaggcaacgcaggcgggcccggagaagccggugcgacuggcgggagaggaccuaggggcgcuggugccgcacgggccuccgggccacgcggaggcgcuccccgaggcccucacgggggagcagccucugcucaggauggucguugcccauguggcgccagaaggcccgacucacggcugcuccagcuucauauuacgaugccuuucaguagcccaauggaggcggaacuggugcgcagaauauuguccagggaugcagccccguuaccccggccuggggcuguccugaaggacuuuaccguuucuggaaaucuacucuucaugucggugcgcgaucaggaccgagagggcgccgguagaaugaggguagugggguggggccugggaucagcaagcccagaaggccaaaaagcucgggaucuucguacacccaagcacaaagucagugagcagcgcccugggacuccaggacccccgccucccgagggugcccagggcgacgggugcagaggaguggcguuuaacguuauguucuccgccccacauaucuga

SEQ ID NO: 2135 - RNA, 1992 nt, Artificial Sequence
  CCDS13459.1 variant
auggccgcuaccgagaucagcgugcuguccgaacaguucacaaagauuaaagagcucgaacuuaugcccgagaagggccugaaagaagaggagaaggacggggucugcagagaaaaagaucacaggucuccuucagaguuggaagcagagcggacgaguggagccuuucaagacagcguuuuagaggaagagguggaacugguacuagcgccauccgaggaaucugagaaguacauacucacucugcagaccgugcauuucacaucggaggcugucgaacuucaggauaugucacuguugagcauccagcaacaggagggugugcagguugugguccagcaaccgggccccgggcuccuguggcuggaagagggaccucgccagagucuccagcaguguguggccauuuccauccaacaggaauuauauucuccacaggagauggagguacugcaauuucacgcacuugaagagaacguuaugguggccagcgaagacuccaaguuggcugucucacuggcagagacuaccggccuaauuaaacucgaagaggagcaggaaaagaaucagcugcuugccgagcgaacaaaagaacagcuguucuuuguggagaccaugaguggugaugagcguagcgacgaaaucguguugacugucucuaacuccaauguugaggaacaagaggaucagcccacagcugggcaggccgacgcggaaaaggcaaaaucaaccaagaaccagagaaagacgaaaggagccaagggcacuuuccauugcgauguguguauguuuaccagcaguaggaugucuuccuucaaucggcacaugaaaacacauacuagcgagaagccucaccucugccaccuguguuuaaaaaccuuucgcacaguaacccugcucagaaaccaugugaauacgcacacuggcacaaggccauacaagugcaacgacuguaauauggcuuucgucaccucgggggagcuugugcggcaucgccgauauaaacacacucacgaaaagcccuuuaagugcucuauguguaaauacgccuccguugaggcaucaaagcugaaaagacaugugaggagucacacaggagaacggccuuuccaaugcugucagugcagcuaugcuucccgugauaccuacaaguugaaacgccauaugagaacgcacucuggugagaagccauaugaaugccauauaugucacaccagguuuacacagagcggcacuaugaagauccacauucuacagaaacauggggagaacgucccgaaguaccaaugcccccacugugccaccaucauugcgcggaaaucagaccugcgagugcauaugcgcaaucuccacgccuacagugcagcugagcugaagugcagauauuguuccgccguauuccacgaaagguacgcucuuauccagcaucagaaaacacacaagaacgagaagcgguucaaaugcaagcauuguagcuaugccugcaaacaggaacgccacaugacugcacauauaagaacccacacaggagagaagccuuuuaccugucugucuugcaauaaauguuucaggcaaaagcaguugcucaacgcccacuuucguaaguaccaugaugcuaauuucauuccaacuguuuauaaaugcucaaagugcggcaaagguuuuagucgguggaucaaccugcaccgacauagcgaaaaguguggguccggagaggcgaaaucugcagccucgggcaagggcagaaggacgcgcaaacggaagcagacaauuuuaaaggaggcuaccaaagggcaaaaggaagccgcaaaaggauggaaggaggccgcuaacggugacgaagccgcagcggaggaggcuagcacuaccaaaggcgaacaguuccccggggagauguuuccuguggccugcagagaaacaaccgcaagggucaaggaggaaguggacgagggagucacuugugagaugcugcuaaauacaauggauaaguga

SEQ ID NO: 2136 - RNA, 2148 nt, Artificial Sequence
  CCDS11368.1 variant
augagccaggugauguccucuccccugcucgccggcgggcacgcugucucacuugcaccuugcgacgagccaagaaggacccugcauccggcccccaguccuagcuugccaccccaauguuccuacuauacaacugaaggauggggugcgcaggcuuuaauggccccuguuccaugcauggggcccccuggccggcugcagcaggcaccacaaguggaggccaaggcuacguguuuccuaccgucucccggagaaaaagcacucggcaccccugaggaucuggacucguacaucgauuuuucacuugaaagccugaaccagaugauuuuggagcucgacccaacauuccagcugcugcccccugguacugggggaagucaggccgagcucgcucaauccaccaugucuaugcgcaagaaagaagagagcgaagccuuagauauaaaguauaucgagguaacauccgcgcgaucacguugccacgacggcccacagcauuguaguagccccucugugaccccgccuuuuggcucccugagaucagggggacuuuugcugagcagggaugucccccgggagacucgcaguucuuccgaaagccuaauuuucucggguaaucagggcagagggcaccagaggccacucccucccucugagggacuguccccacggcccccuaacucaccaaguaucagcauuccgugcaugggcuccaaagcaucuagcccccauggucuugggucaccucugguggccaguccacgcuuggaaaagcgacucggaggccuggcuccccaaagaggcuccaggaucagcguuuuaucugccucaccugugagugacgucagcuacauguuuggguccucucagucgcugcuccacagcuccaauucaagucaccagucuagcucccggucacuugagagcccagcaaacucuuccaguagccugcauucuuugggauccgugucacuauguacacgucccagugauuuccaagcuccgcgcaauccuacccugacgaugggucagccaagaacuccccacagcccuccccucgccaaggaacaugcgucguccugcccaccuucuauaaccaacagcaugguagacauccccauuguucugaucaauggcuguccagagccggggucaaguccuccccagaggacaccaggacaccagaacuccgugcaacccggcgccgcaucuccuagcaauccaugccccgcuacucgguccaacucacagacccuuagcgaugccccuuuuacaaccuguccggaggguccagcucgagacaugcagcccacgaugaaauucgucauggauacaaguaaguauugguuuaaaccuaauauuacucgcgaacaggccaucgagcuguugagaaaggaagaaccaggggcauucgugauaagggacucuuccagcuaccggggcucguuuggacucgcccugaaagugcaagaaguccccgcuucagcgcagucucgcccuggcgaggacaguaacgauuuaauuagacacuuccugaucgaguccagcgcaaaggggguucaucuaaagggagccgacgaggagccguauuuugguucucucagcgcuuucgugugccagcacuccauuauggcccuggcacuucccugcaaauugaccaucccacagagggaacugggcggggccgauggagcuucagacaguacugauagcccugccucuugucaaaagaaauccgcaggcugccauacacucuaccugucaaguguaagcguggagacccuuacgggugcgcuggcuguccagaaggccaucuccaccacauucgaacgugacauuuugcccacuccaaccgugguucacuuuaaagugacagagcaggggauaacucucaccgauguccagcggaagguguucuuucgaagacauuacccucugacaaccuuaagguucuguggcauggaccccgagcaacgcaaauggcagaaguauugcaagccaucuuggaucuuuggauucguagcaaaaucgcagacugaaccgcaagagaauguuugucaccuguuugccgaauacgauauggugcagccugcuagccaggucauuggccuagugacggcccuccugcaggacgcagagcggauguga

SEQ ID NO: 2137 - RNA, 1302 nt, Artificial Sequence
  AAH06510 variant
auggcccugagagugaccaggaacagcaagaucaaugcugagaacaaagcaaagauuaauauggccggcgcgaaacggguccccacagcuccugccgcaacuuccaagccagggcuccgcccgcgaacggcccuuggagacauagguaacaaaguuucugaacagcugcaagcuaagaugcccaugaagaaagaggcaaagccuucagccaccggcaaagugaucgauaagaaauugccaaagcccuuagaaaagguaccuaugcuggugccaguccccgugagugagccuguuccagaaccggagcccgagccugaaccagagcccgugaaagaagagaagcuaagcccugagccaauucucgucgacacagcuucccccucuccgauggaaacuucggggugcgccccugcggaggaagaucugugucaggcauucucagacgugauccuugccguaaaugauguugacgcugaggauggagccgaccccaaccugugcagcgaauacgugaaagauauuuaugcauacuugcgucagcucgaggaggaacaggcugucagaccaaaguaucugcugggcagggaggugaccgguaauaugcgggccauccucauagacugguuagugcaaguccagaugaaauuucgccugcuucaggaaacaauguacaugaccguuaguaucauugauagauucaugcagaacaauugugugccuaagaaaauguugcaacugguaggggugacugcgauguuuaucgccuccaaguaugaggaaauguaucccccagagauuggagacuucgcauuugucacagauaacaccuacacgaagcaccagaucaggcagauggagaugaaaauacuacgggcucucaauuucggccugggccgcccccuuccucugcacuuuuugagacgagccucuaagauuggggaaguggacguugagcagcauacucucgcuaaauaccugauggaauuaaccaugcuggacuacgauauggugcauuucccaccgagccaaaucgccgcaggagccuuuugccucgcucuuaagauucuggacaacggugaguggacacccacuuugcagcacuaucuauccuacaccgaagagucacugcucccugucaugcagcaucuggcgaaaaaugugguaaugguuaaccaaggccuuacaaagcacaugaccgugaagaauaaauaugcaacgaguaagcacgccaaaaucagcacucugccacaguugaacucugcucucguccaggaucuggccaaggcaguggccaaagucuga

SEQ ID NO: 2138 - RNA, 888 nt, Artificial Sequence
  AAA58392 variant
auggagcaccagcugcucugcugugaaguggagaccaucagaagggccuaccccgacgcuaaccuucugaaugaucgggucuugcgcgcaauguuaaaggccgaagagacaugcgcgccuagcguuuccuauuucaaaugugugcaaaaggaaguacugccaucuaugcgaaaaauuguggcuacuuggaugcuagaggucugcgaggaacagaagugugaggaagagguguuuccgcucgccaugaacuaccuggaccguuuccuuucacuggagcccguuaaaaagaguagauugcagcuccugggcgcaacgugcauguuuguggccagcaagaugaaagaaaccauaccucugacagcugagaagcucuguaucuauacugauaauuccauuaggccagaagaguuacugcagauggaacuuuugcuggucaacaaacuaaaguggaaucucgcagccaugacaccccaugacuucaucgagcacuuucugucuaaaaugccugaggcugaagagaacaagcaaauuauccggaagcaugcccagaccuucguggcgcuuugcgcaaccgauguaaaauuuauaucgaauccacccucaaugguugccgcugggagcguggucgccgcagugcagggacugaacuugcgcaguccuaauaacuuccucuccuacuauagacugacuagguuuuuaucucgggugaucaagugugacccagauugccugcgcgcuugucaggaacaaauugaggcccuccuugaaagcucccugcgacaggcgcagcagaauauggacccgaaagccgcagaggaggaagaggaagaggaagaggaggucgauuuggcuugcacacccaccgacguuagagauguggacaucuga

SEQ ID NO: 2139 - RNA, 651 nt, Artificial Sequence
  AAA36601 variant
augcugagacucagcgagaggaacaugaaggugcuucuggccgcugcauugaucgccggcuccgucuucuuuuuacugcuacccgggccuucugcggcugacgagaaaaagaaaggaccaaagguuaccgugaaaguauacuucgaucuccggauuggugacgaagaugugggccgcgucauauuugggcuguucggaaagacagugccgaagacuguugacaauuuuguggcccuugcaacgggcgaaaaagguuucggguauaagaacucaaaauuucaccgagucaucaaggauuucaugauucagggaggcgacuuuacccguggcgaugggacaggagguaaaaguaucuacggcgagagauuccccgacgaaaauuuuaagcugaagcauuaugggccuggaugggugagcauggccaacgcuggcaaagauacuaaugguucccaauucuuuauuaccacaguaaagaccgcaugguuggacgggaaacacguuguguucggaaagguccucgagggcauggagguggugaggaaagucgaaucuacuaagacagauucgcgggacaaaccacugaaggauguuaucauagccgacugcggcaagaucgagguggaaaaacccuucgcuauugccaaggaguga

SEQ ID NO: 2140 - RNA, 1044 nt, Artificial Sequence
  AAD10634 variant
augcccagaggccaaaagagcaaacugagggcccgggagaagcgccgaaaagcucgugaagagacccaggggcucaagguggcacacgccacagcggcugaaaaagaggaaugcccuuccucuucaccaguccuuggagacacuccgacgaguagccccgccgcagguaucccucagaagccacagggcgcucccccuaccacaacugccgcagccgcuguuuccuguaccgagucugaugagggggccaagugccagggagaagagaacgcgucguucucacaagcaacaaccagcacugaaaguuccgugaaagacccaguagccugggaggcuggcaugcugaugcauuuuauuuugagaaaguacaaaaugagggagcccauaaugaaggccgauauguuaaaaguggucgacgaaaaguauaaggaucacuucacagagauccugaauggugcaucucggcgccuagaacucguguuugggcuggaccuuaaagaggauaacccuagcggacauaccuacacgcugguuuccaaguugaaucucacuaacgacggcaaucugucaaacgauugggacuucccaagaaauggccugcucaugccguuacugggggugauuuuucuuaaaggaaacagugcuaccgaagaggagaucuggaaguucaugaaugucuugggugccuaugauggcgaggaacaccugauuuacggggaacccaggaaauuuaucacacaggaccuagugcaggagaaguaucucaaauacgaacagguaccuaacagcgauccaccccgguaucaauuccuguggggaccucgcgcguacgccgagacuaccaagaugaagguucuugaguuucuggcaaaaaugaauggcgcuacaccacgagacuuccccucucauuacgaagaggccuugagagacgaagaggaaagggcucaggugcgguccucaguccgugcccgcagaaggaccacggcaacuacauuucgggcccgaagccgcgcuccguucaguagaucuucccacccuauguga

SEQ ID NO: 2141 - RNA, 2436 nt, Artificial Sequence
  BAF91373 variant
auggagagccagggcgugcccccugggccauacagagccaccaagcuguggaacgaagucacaacuuccuucagggcuggaaugccgcuccggaaacaccgccaacauuuuaagaaauaugguaauugcuucacggcaggcgaggccguugacuggcuuuacgaucuguugcgaaacaauucuaacuuugggcccgaagugacccgucagcagacaauccaguuacugagaaaguuccugaaaaaucacguaauugaggacauaaagggaagguggggcucagaaaacguggaugacaauaaccaacucuuucgguucccugcgaccaguccacugaagacucuuccccgcagauauccugagcugaggaaaaauaacaucgagaauuuuagcaaggauaaagacuccauuuucaaguugcggaaccucucucgccgaacaccaaaaagacauggucugcaccugucgcaggaaaauggggagaagaucaagcaugaaauuaucaacgaggaucaggagaaugcuauagacaacagggaacucucacaggaggaugucgaagagguguggcgguacguuaucuuaauuuaucugcaaaccauccuuggagugcccagcuuggaagaggucauuaacccuaaacaggugaucccacaguacauaauguauaauauggccaacacaaguaagcguggcguaguuauucugcagaauaaauccgacgaucuaccgcacugggugcucucugcaaugaagugucuggccaacuggccccgcagcaaugacaugaacaauccuacuuacgucggcuuugagagagauguguucaggaccaucgcugacuacuuucuugaccugccagaacccuugcucacguucgaguauuacgaacuguuugugaacauuuuagucguuugcggguauaucacuguguccgaucggucaaguggaauccacaaaauucaagacgauccucagagcucuaaguuccugcaucucaauaaccuuaauuccuucaaaucaaccgagugucuguugcuaagccugcuccaccgagaaaagaacaaggaggagagugacucuacagaacgccugcagauauccaauccagguuuucaagagagaugcgccaaaaagaugcagcuuguaaaccugaggaaucggcgcgugagcgcaaacgauaucaugggcgggucgugucauaacuugauuggacucucuaauaugcacgaccuguccucaaacaguaaacccagaugcuguagcuuagaaggcaucgucgaugugccggguaauuccucuaaggaggcuagcucaguuuuccaccagaguuuuccuaacauagaagggcagaauaacaaacuguuccuagaguccaagcccaagcaagaguuucuccugaaucuucauagcgaagagaacauucagaaaccauucucugccggauuuaagaggacuucaaccuugacagugcaggaccaggaggaacugugcaauggcaaauguaagaguaaacaacucugccguagccagucccugcuucugcggucuucgacccgaagaaacagcuacaucaauacgccugucgcggagaucauuaugaagcccaacgugggccagggguccacuucaguacagacagcaauggaaagugaguugggagaaucuagcgccaccaucaauaagaggcucuguaaauccacuauugagcugucagaaaacagcuuacugccagcuucuuccaugcuaacagguacccaaagucuccugcagccccaccuugagcgcguugccauagaugcauugcagcugugcugccuccuguuaccuccaccgaaucggagaaagcugcagcuuuugaugaggaugaucagccgcaugucucaaaacguggacaugcccaaacuccaugaugcuaugggcacgcgaucccugaugauucacaccuucucacgguguguccuaugcugugccgaggaaguggaccuggacgagcuccuggcggggcgucuugucagcuuuuugauggaucaucaccaggaaauccuacaggugccuaguuauuuacaaacagccguugagaagcaccucgacuaccugaaaaagggacauaucgaaaacccaggcgauggucuuuucgcaccccugccuacuuauucguacugcaagcagauuuccgcucaggaguuugacgagcagaaagugucuaccagccaagccgcuauagccgaauugcucgagaauaucauuaagaacagaucacugccacuaaaagaaaagaggaaaaagcugaaacaguuccagaaggaguacccccucaucuaucagaagcgcuuuccgacaacugaaagugaggcagcccuguucggggauaaaccuaccauuaagcaaccaaugcuuaucuugcggaaacccaaguucagaucccugagguga

SEQ ID NO: 2142 - RNA, 297 nt, Artificial Sequence
  AAA46940 variant
augcacggcgacacccccacacugcaugaguacaugcucgaucuucagccugaaacuacggaccuguauugcuacgagcaauugaacgauagcuccgaagaggaagacgagaucgaugggccagccggacaggcugagccggacagagcacacuauaauauugugaccuucuguugcaagugugauucuacauuaaggcugugcguccagucaacucauguugacauacggacccuagaagaucuccugauggguacacuuggcaucgugugucccauuugcagucagaaaccuuga

SEQ ID NO: 2143 - RNA, 318 nt, Artificial Sequence
  AAA46947 variant
augcacggccccaaggccacccugcaggacaucgugcuccaucuugagccucaaaacgaaauuccagucgaucuguugugccacgagcaguuaagcgacuccgaagaggaaaaugaugagauagacgggguuaaccaucagcaucugccggcuagaagggcagagccccagcggcacacaaugcuauguaugugcuguaaaugcgaagcccgcaucaagcucgugguagagucuucagcggaugaccugcgagcuuuccaacagcuuuuucugaauacuuugaguuucguguguccuuggugcgccagccagcaguga

SEQ ID NO: 2144 - RNA, 297 nt, Artificial Sequence
  AAA46951 variant
augagaggcgagacccccacacugcaggacuacgugcucgaucuucaaccugaagccacugaccugcacugcuaugagcaguugccagauagcuccgacgaagaggaugucaucgacucuccggcugggcaggcagaacccgauacgucaaacuacaauauuguuaccuucuguugccaguguaagaguacauuaaggcugugcgugcaaagcacucagguagacauacggauccuacaggagcuccugaugggauccuuugguauuguguguccuaacugcucuacccgccuuuga

SEQ ID NO: 2145 - RNA, 294 nt, Artificial Sequence
  AAA46959 variant
augagaggccacaagcccacccugaaagaguacgugcucgaccuuuauccugaaccaacagaucuguacugcuaugagcaguugagcgacuccucugaugaagacgagggguuagauaggccggacggacaagcccagcccgcuacugcagauuacuauaucgucacguguugccauaccuguaacacaacuguucggcugugcguaaauucaaccgccagugaccuacgcacaauucagcagcuccugauggguaccgugaacauaguguguccuacuugcgcgcaacaguga

SEQ ID NO: 2146 - RNA, 300 nt, Artificial Sequence
  AAA46967 variant
augcacggcgagaucaccacacugcaggacuacgugcucgaucuugaacccgaggccacugaccuguauugcuacgaacaauugugugauagcuccgaggaagaggaggacacgauugaugggccugcuggacaggcaaagccagacaccucuaacuauaauauagucacaucaugcuguaaaugcgaagccacuuuaagacuguguguucagaguacccauaucgauauuaggaagcuagaggaccuccugauggguacauucggcaucgugugcccgggguguagccagcgggcguga

SEQ ID NO: 2147 - RNA, 330 nt, Artificial Sequence
  AAA47051 variant
augagaggccccaagccuacccugcaggagaucgugcucgaccuuugcccauacaacgaaauucaaccggucgaucugguuugucacgagcaguugggggaaagcgaggacgaaauagaugagcccgaccaugccgugaaucaccagcaucaguuacuggcuaggcgggaugagccucaacgccacacaauccagugcuccuguugcaaauguaacaauacucuacagcucguaguggaagcaucucgagacacgcugcgucagcuucaacagcuguucauggauucauugggauuugucugcccauggugugccaccgcgaaccaguga

SEQ ID NO: 2148 - RNA, 321 nt, Artificial Sequence
  CAA52574 variant
augcacggccccagagagacccugcaggaaaucgugcuccaucuugagccucaaaacgaacuggacccagucgauuuguuaugcuacgagcagcugagcgaauccgaggaggaaaaugacgaggccgaugggguuucucacgcucagcuaccggcaaggcgggccgaaccccagcgccauaagauucucugugugugcuguaaaugcgacggacgaauagagcugacaguagagucaagugcggaagaucuucguacucugcaacaguuguuccucagcacgcuguccuuuguguguccuuggugcgcuaccaaccaguga

SEQ ID NO: 2149 - RNA, 306 nt, Artificial Sequence
  M62877.1 variant
augagaggcaacgugccccagcugaaggacgucguucuccaccuuaccccucaaacagagaucgaucugcagugcuacgaacaguucgacagcuccgaggaagaggaugaaguggacaauaugagggaucaguugccagagcggcgcgccgggcaagcuacuuguuaucgaauugaggcaccgugcugucguuguucuucaguagugcaguuagccgucgaaaguagcggagacacgcugagagugguucagcagaugcuaaugggugagcucucccuggugugccccugcugugcgaacaauuga

SEQ ID NO: 2150 - RNA, 300 nt, Artificial Sequence
  CAA52586 variant
augagaggcgacaaggccaccaucaaagauuacauucuggaccuccagcccgagacaacugaucuucacugcuaugaacaacugggggacagcuccgaugaggaagacacggauggaguggacaggccugauggucaggcugagcaggcaaccucuaacuacuauauagucacauacugucauucaugcgacaguacuuugcgguuauguauccacagcaccgccacagaucugcgcacccuacagcaaaugcuccugggcacucuucagguugugugcccagggugugcgcgacuguga

SEQ ID NO: 2151 - RNA, 318 nt, Artificial Sequence
  CAA52597 variant
augcacggcaaggugcccacccugcaggacgucguucucgagcuuacaccucaaacugaaaucgaucugcagugcaacgagcaguuggacagcuccgaagaugaggacgaagaugagguggaccauuuacaggagagaccacaacaggccaggcaggcuaaacagcacacguguuaccugauucauguaccgugcugugaaugcaaguucgugguccaacuagauauacagucuaccaaagaggaccuccgggugguucagcagcugcuuaugggggcacugacagugacuugucccuugugcgccucaaguaauuga

SEQ ID NO: 2152 - RNA, 297 nt, Artificial Sequence
  AAF13691 variant
augagaggcaacaaucccacccugagggaguacauccucgaccuucacccugaaccaacagaucuguucugcuacgagcaguugugugacagcuccgaugaagacgagauuggguuagaucggccggacggacaagcccagcccgcuacugcaaacuacuauauagugacgugcuguuauaccugcgauacaacuguccgccuguguaucaauucuaccacaaccgacguucgaacucuacagcagcuccugauggguacaugcaccauuguguguccuucaugcgcccaacaguga

SEQ ID NO: 2153 - RNA, 324 nt, Artificial Sequence
  ACL12335 variant
augcacggccccaaggccacccugugcgacaucgugcucgaucuugagccucagaacuacgaagaggucgaccugguuuguuaugaacaauugccagauagcgacuccgagaaugaaaaagaugagccggacggggugaaccaucccuuacugcuagcuagaagggcagagccucagcggcacaauauuguaugcguguguugcaaguguaacaaucagcuccagcuggucguggaaacaucucaagauggacuucgcgcccugcagcaguuguucauggacacucucucauuuguuugcccacugugugcggcuaaccaguga

SEQ ID NO: 2154 - RNA, 318 nt, Artificial Sequence
  AAA79500 variant
augcacggcaaggugcccacccugcaggaggucauccucgaacuugccccucaaacagagauugaccugcagugcaacgaacaguuggauagcuccgaggacgaagaugaggacgagauagaucauuuacuggaaagaccacagcaagcuaggcaggcagagcagcacaaauguuaccuaauccauguuccgugcuguaagugcgaacucgugguacagcuggacauucaaucuacuaaagaggagcuucgggugguccagcagcuguugaugggggcccucacggugaccuguccccugugcgcgucaaguaaguga

SEQ ID NO: 2155 - RNA, 1392 nt, Artificial Sequence
  AAF80488 variant
augggcaaggagaaaacccacaucaacauuguggucauagggcauguugacagcggaaaguccacaacuacgggucaccugaucuacaaaugcggcgggauugauaagagaaccaucgaaaaauucgagaaggaagccgcugagaugggaaagggcucuuuuaaauaugcaugggugcucgacaaacuuaaagccgaaagggagcgggguauuacaaucgauauaucacuguggaaguucgagacuaccaaauacuauaucacaauuaucgacgcgcccgggcaucgcgauuuuauuaagaauaugaucaccggaacaagucaggcugacugugccguauugauaguggcagccggcgucggcgaguucgaagcugggauuagcaagaacggacaaacucgagaacacgcauuacuggccuacacccuaggugugaaacagcucaucguuggcgugaauaagauggauuccacggagccugcuuauucugagaaacguuacgacgaaauugucaaggaggugucggccuauaucaaaaagaucggguacaacccagcgacuguaccguuuguucccauuucaggauggcauggcgauaauaugcuggaaccuagcccaaacaugcccugguucaaagguuggaagguggagagaaaggaagggaaugcaaguggagucucccuucuggaggccuuggacaccauacucccuccaacaaggcccacugauaaaccucugcggcugccacuccaggacguguacaagaucggcggcauugggaccgugccggucggacgcguugagacagguaucuuaagacccggcauggugguaaccuuugcuccugugaacauaacgacugaagucaaaucuguggagaugcaccacgaagcccugagcgaggcacuuccaggggauaauguuggauucaacgugaagaaugucuccgugaaagacauuaggcggggcaacguaugcggugacucaaagagugaucccccucaggaagcugcccaauuuacaagccagguuaucaucuugaaucauccagggcagauuucugcgggcuauucccccgugaucgacugucacaccgcccauauugcaugcaaguucgcugagcugaaagagaagauagaucgccgaucaggaaagaagcuagaagacaacccgaaaagccucaagaguggcgaugccgcuaucgucgagauggugccugggaagcccaugugugucgaaucuuuuucccaguacccaccucugggaagauucgccgugagggacaugcggcaaacuguugcaguggguguaauuaaaaaugucgagaagaaaagcggcggggccggaaaggugacaaaaucggcucagaaggcgcagaaggcaggcaaauga

SEQ ID NO: 2156 - RNA, 2919 nt, Artificial Sequence
  EAW51573 variant
auggacaccgaucuguacgacgaguucggcaacuauaucgggcccgaacucgauagcgacgaggaugacgaugaacuuggaagagagacaaaggaccuggaugaaauggacgaugacgaugacgacgaugacgugggugaucacgacgaugaccauccuggcauggaggucguuuugcacgaggauaaaaaguacuauccaacugccgaagagguguacgggccggaaguagagacgauugugcaggaggaagacacccaacccuuaacagagccuauaaucaaaccagucaagacuaaaaaguuuacccugauggaacagacacuacccgugaccguuuaugagauggauuuccucgcugaccugauggauaauuccgaacuuauuaggaacgugacucugugcggacauuugcaccauggcaagacauguuuugucgacugccucaucgagcagacccacccugagauucggaaacgcuacgaccaggaucuguguuauacggacauccuguucacugaacaagagcgagguguggggauaaagucuaccccaguaacaguugugcuccccgauacuaaaggaaagucauacuuauuuaauaucauggacaccccuggccacgucaacuucagugaugaagugacagcaggccugcguauuagcgacggggugguccuuuuuaucgaugccgcggagggaguuauguugaauaccgaaagacugauuaaacaugcugugcaggagaggcuagccguaacggugugcaucaacaagauagaccggcucauucuggagcuuaagcugccaccgacugaugcauacuauaaauugcgccacaucgucgacgaagugaauggucucauuuccauguacucuacagaugagaaccugaucuuaucgccccugcucggcaauguuuguuucucaagcagucaguauuccaucugcuuuacccuugggucuuucgccaagauuuacgcugacacuuuuggagauauaaacuaucaggaguucgcaaaaagacuguggggcgacaucuacuuuaauccuaagacaaggaaauucaccaagaaagccccaacgagcuccucacaacggaguuucguggaauuuauuuuggaaccccuauauaagauccuggcucaggucgugggugacguagauaccagccucccucgcacacuggacgagcuugggauacaucugacuaaggaggaauugaaacucaacauucgaccacuguuaagacugguuuguaagaaauucuuuggagaguucaccggcuuuguggauaugugcguccagcacauccccucuccgaaggugggcgccaaaccuaagaucgaacacacauacacugggggagucgacuccgaucuaggugaggcgaugucagacugugaucccgacggcccacucaugugccauaccacaaagauguacagcaccgaugacggggugcaguuccacgcauuuggaaggguucugaguggcacuauucaugccggucaaccugugaaaguacuuggggagaauuauacguuggaagaugaggaagacucucagaucuguacagucggccggcuguggauuuccguggcucguuaccacauagagguuaaccgcgugcccgccggaaauuggguccucaucgaaggcguggaucagccaauuguaaagaccgcaacuaucaccgagcccagagggaacgaggaagcucaaaucuucaggccucugaaauuuaacacaaccagcgugauuaagauagccguugagccagucaauccgucggaacuucccaaaaugcuggacggauugcggaaggugaacaagucuuauccuucccucacuacaaaaguggaggaaucaggugagcaugucauccugggcacgggggaguuauaccuggacugcguuaugcacgaucuacgaaagauguauagugaaauugacaucaaaguggcggauccagugguaaccuucugcgagacugucguggaaacaagcucccucaaguguuuugccgagacccccaauaaaaagaacaagauuacaaugaucgcagaaccucuggagaaaggacuugcugaggacauagaaaaugagguugugcagaucacuuggaaccgcaagaaauugggcgaguucuuucagaccaaguacgauugggaccugcucgccgcuagaucuauuugggccuucgguccagaugcaacggggcccaauauccuggucgacgauaccuuaccgagcgaaguggacaaagcccugcuuggcucaguuaaggauaguauugugcagggauuccaauggggcacaagggaggggccuuugugcgacgaacucauccggaacguaaaauuuaagauacuggacgcugucguggcgcaggagccacuacaccgcggagguggccagauuauccccacugcaagaaggguggucuauuccgccuuccugauggcuaccccucgucucauggaacccuacuacuuuguugaggugcaggccccagcagauuguguaagcgccguguauacaguccuggcucggcgaagagggcaugugacucaagacgccccuauucccggaucuccacuuuacaccaucaaggcauucauaccggcgaucgauucauuuggcuucgaaacggacuugaggacacacacccagggucaggcuuuuagucugagcguuuuccaucacuggcagauugugccuggggaucccuuagacaaauccaucgucauucgcccacucgagccccaaccugccccacaccuggcacgggaguuuaugaucaagacuagaaggcgcaaaggccuuucugaagaugugucgauaagcaaguucuuugacgaucccaugcuguuggagcucgccaaacaggacguugugcugaauuauccuauguga

SEQ ID NO: 2157 - RNA, 1971 nt, Artificial Sequence
  EAW50963 variant
augagacccagcggcaccgccggggcugcacugcucgcccuucuggcggcuuugugcccugccuccagggcauuagaggaaaagaaagugugucagggaacaucuaacaagcugacucaacuagguacguucgaggaccacuuucucucacugcagcggauguucaauaacugcgaagucguucuuggcaaucuggagaucaccuacgugcagcgcaacuaugauuugaguuuucucaaaacaauucaggaaguagccggguacgugcugauagcucugaauacugucgagcgaaucccacucgagaacuuacaaauuauccguggaaauauguauuacgaaaacagcuaugcacuggccgugcuuuccaauuacgacgcuaacaagaccggcuugaaagagcugccgaugagaaaucuacaggaaauucuccauggugccguuagguucucuaacaaucccgcgcuguguaacguggagucgauccaguggcgggauauagucucaagcgacuuucuuaguaauauguccauggauuuccagaaccaccuggggucuugccaaaagugugacccuagcugcccaaacggauccuguuggggcgcaggcgaggaaaauugccagaaguugacaaaaaucauuugugcccagcagugcucagggcgcuguagaggaaagagucccagcgauugcugccauaaccaaugugcugccgguugcaccggcccuagggagucugacugucucgugugccggaaauuucgcgaugaagcaacuuguaaggacacaugcccaccccugauguuauauaauccuaccacguaccagauggauguaaacccagaggggaaauacuccuucggagcuacuuguguuaagaagugcccgcgaaauuauguggucaccgaccacggcucaugugugagagccugcggugcggauagcuacgaaauggaggaggacggggugaggaaauguaagaaaugcgaaggacccugccggaaggucuguaacggcaucggcauuggggaguuuaaagacagucugucuaucaaugccacaaacauaaagcauuucaaaaauugcacuuccauuagcggagaucuccacauccuuccuguugcauuucguggugacucguucacccacacaccaccccuggauccucaggaauuggacauucuaaagaccgugaaggagaucacgggcuuucugcucauccaggcuuggccagaaaaccgcacugaucugcaugccuucgagaaucuugagauuauaagagggaggacaaaacaacacggacaguucucucuggcuguaguguccuugaacaucaccucacucggccugcggaguuuaaaggaaauuagcgacggugaugucaucauauccgggaauaaaaaccuguguuaugccaauacuauuaacuggaagaaacuauuuggcacaucuggacagaagaccaagaucaucagcaaccgaggcgaaaauucaugcaaagcaacggggcaagugugucaugcccucugcagucccgaaggauguugggguccggagccucgcgacugcguuuccuguagaaacgugagcaggggccgggaaugcgucgauaaguguaaucugcuugagggggagccccgcgaguucguggagaacucugaaugcauucagugccacccagaguguuugccucaggcuaugaauauuaccugcacaggaagaggccccgacaacuguauccagugcgcgcacuacauagaugguccacauuguguaaaaacuugccccgcagggguuaugggcgagaauaacacccugguguggaaguaugccgacgcuggacacgucugucaucucugccacccuaauuguacauacggcugcacugggccaggacuggaagguuguccgaccaacggcucauauaucgugagucauuuucccaggagcuucuacaaaauguccguccac

SEQ ID NO: 2158 - RNA, 3411 nt, Artificial Sequence
  ADL28125 variant
augagacccagcggcaccgccggggcugcacugcucgcccuucuggcggcuuugugcccugccuccagggcauuagaggaaaagaaagugugucagggaacaucuaacaagcugacucaacuagguacguucgaggaccacuuucucucacugcagcggauguucaauaacugcgaagucguucuuggcaaucuggagaucaccuacgugcagcgcaacuaugauuugaguuuucucaaaacaauucaggaaguagccggguacgugcugauagcucugaauacugucgagcgaaucccacucgagaacuuacaaauuauccguggaaauauguauuacgaaaacagcuaugcacuggccgugcuuuccaauuacgacgcuaacaagaccggcuugaaagagcugccgaugagaaaucuacaggaaauucuccauggugccguuagguucucuaacaaucccgcgcuguguaacguggagucgauccaguggcgggauauagucucaagcgacuuucuuaguaauauguccauggauuuccagaaccaccuggggucuugccaaaagugugacccuagcugcccaaacggauccuguuggggcgcaggcgaggaaaauugccagaaguugacaaaaaucauuugugcccagcagugcucagggcgcuguagaggaaagagucccagcgauugcugccauaaccaaugugcugccgguugcaccggcccuagggagucugacugucucgugugccggaaauuucgcgaugaagcaacuuguaaggacacaugcccaccccugauguuauauaauccuaccacguaccagauggauguaaacccagaggggaaauacuccuucggagcuacuuguguuaagaagugcccgcgaaauuauguggucaccgaccacggcucaugugugagagccugcggugcggauagcuacgaaauggaggaggacggggugaggaaauguaagaaaugcgaaggacccugccggaaggucuguaacggcaucggcauuggggaguuuaaagacagucugucuaucaaugccacaaacauaaagcauuucaaaaauugcacuuccauuagcggagaucuccacauccuuccuguugcauuucguggugacucguucacccacacaccaccccuggauccucaggaauuggacauucuaaagaccgugaaggagaucacgggcuuucugcucauccaggcuuggccagaaaaccgcacugaucugcaugccuucgagaaucuugagauuauaagagggaggacaaaacaacacggacaguucucucuggcuguaguguccuugaacaucaccucacucggccugcggaguuuaaaggaaauuagcgacggugaugucaucauauccgggaauaaaaaccuguguuaugccaauacuauuaacuggaagaaacuauuuggcacaucuggacagaagaccaagaucaucagcaaccgaggcgaaaauucaugcaaagcaacggggcaagugugucaugcccucugcagucccgaaggauguugggguccggagccucgcgacugcguuuccuguagaaacgugagcaggggccgggaaugcgucgauaaguguaaucugcuugagggggagccccgcgaguucguggagaacucugaaugcauucagugccacccagaguguuugccucaggcuaugaauauuaccugcacaggaagaggccccgacaacuguauucagugcgcgcacuacauagaugguccacauuguguaaaaacuugccccgcagggguuaugggcgagaauaacacccugguguggaaguaugccgacgcuggacacgucugucaucucugccacccuaauuguacauacggcugcacugggccaggacuggaagguuguccgaccaacggccccaaaaucccuucaauugccacagggauggugggagcacuucuguugcuccuggucguggccuuaggcaucggucuguuuaugaggcgucggcauaucguucgaaagagaacccuaaggcgccuccugcaagagcgggaacuuguggagccauugacucccaguggggaagcuccuaaucaggcccugcucagaauccugaaggagacggaguucaaaaagauaaaaguauuaggcagcggagcauuuggcacagucuauaaggggcuguggaucccagaaggagagaaagugaagauucccguugcgaucaaggaacuuagggaggcuaccuccccgaaagccaacaaggaaauuuuggacgaggcauacgugauggccucugucgauaauccucacgugugccgccuccugggcaucugccuaacuucgaccguacagcugauaacacagcucaugccauucgguugucugcuugacuacgugcgagagcacaaagauaacaucgggagccaauauuugcugaauuggugcguucagauugcuaagggaaugaacuacuuagaagaccggcgucucguccauagagaucuggccgcaaggaacgugcuugugaaaacuccccagcacgucaagaucaccgacuuuggccuggcuaaauugcucggugccgaggaaaaggaguaucaugcggaaggcgggaagguuccuauuaaauggauggcccuggaguccauccuacaccgcauauacacacaccagucagauguguggaguuauggagugacgguaugggagcugaugaccuucggcucuaagcccuacgacgggauuccagcuagcgaaaucuccucaauucucgagaaaggagaacggcugccucaacccccaaucuguacuauagaugucuauaugaucauggugaagugcuggaugauugacgcagauagcagaccgaaauuuagggagcuuaucauugaguucucuaagauggcccgagacccucagcgcuacuugguuauccagggcgaugaacggaugcaucugcccuccccaacagacaguaauuuuuacagagcuuuaauggacgaggaagauauggacgauguggucgacgccgaugaguaucucauaccccaacaggguuucuuuagcucuccuuccaccucaaggacaccacugcuuaguagccugucggcaacuuccaacaauucuaccguggcguguauugaccguaacgggcuacagagcugccccaucaaggaagauucauuccuccagcgcuacaguuccgacccuacgggagcccugaccgaggauucuaucgacgauacauucuugccgguuccaggcgaguggcugguguggaaacaaagcuguuccucaacuagcaguacccacucugcugccgcauccuuacagugccccagccagguacucccuccagcuucgcccgaaggugagacagucgccgaccugcagacucaauga

SEQ ID NO: 2159 - RNA, 150 nt, Artificial Sequence
  CCO13722 variant
augugcgccaccugugcuauccagacagcacccacuggcccuaacaagagcucccugucugacuucucacucccacuuaaacugcacuuuuugaguacgauuagcauauccccguucgccucuaauaagguguuaacccuguuuaucuga

SEQ ID NO: 2160 - RNA, 1218 nt, Artificial Sequence
  CCDS47587.1 variant
augagacccagcggcaccgccggggcugcacugcucgcccuucuggcggcuuugugcccugccuccagggcauuagaggaaaagaaagugugucagggaacaucuaacaagcugacucaacuagguacguucgaggaccacuuucucucacugcagcggauguucaauaacugcgaagucguucuuggcaaucuggagaucaccuacgugcagcgcaacuaugauuugaguuuucucaaaacaauucaggaaguagccggguacgugcugauagcucugaauacugucgagcgaaucccacucgagaacuuacaaauuauccguggaaauauguauuacgaaaacagcuaugcacuggccgugcuuuccaauuacgacgcuaacaagaccggcuugaaagagcugccgaugagaaaucuacaggaaauucuccauggugccguuagguucucuaacaaucccgcgcuguguaacguggagucgauccaguggcgggauauagucucaagcgacuuucuuaguaauauguccauggauuuccagaaccaccuggggucuugccaaaagugugacccuagcugcccaaacggauccuguuggggcgcaggcgaggaaaauugccagaaguugacaaaaaucauuugugcccagcagugcucagggcgcuguagaggaaagagucccagcgauugcugccauaaccaaugugcugccgguugcaccggcccuagggagucugacugucucgugugccggaaauuucgcgaugaagcaacuuguaaggacacaugcccaccccugauguuauauaauccuaccacguaccagauggauguaaacccagaggggaaauacuccuucggagcuacuuguguuaagaagugcccgcgaaauuauguggucaccgaccacggcucaugugugagagccugcggugcggauagcuacgaaauggaggaggacggggugaggaaauguaagaaaugcgaaggacccugccggaaggucuguaacggcaucggcauuggggaguuuaaagacagucugucuaucaaugccacaaacauaaagcauuucaaaaauugcacuuccauuagcggagaucuccacauccuuccuguugcauuucguggugacucguucacccacacaccaccccuggauccucaggaauuggacauucuaaagaccgugaaggagaucacgggccugucuuga

SEQ ID NO: 2161 - RNA, 3633 nt, Artificial Sequence
  AAG35789 variant
augagacccagcggcaccgccggggcugcacugcucgcccuucuggcggcuuugugcccugccuccagggcauuagaggaaaagaaagugugucagggaacaucuaacaagcugacucaacuagguacguucgaggaccacuuucucucacugcagcggauguucaauaacugcgaagucguucuuggcaaucuggagaucaccuacgugcagcgcaacuaugauuugaguuuucucaaaacaauucaggaaguagccggguacgugcugauagcucugaauacugucgagcgaaucccacucgagaacuuacaaauuauccguggaaauauguauuacgaaaacagcuaugcacuggccgugcuuuccaauuacgacgcuaacaagaccggcuugaaagagcugccgaugagaaaucuacaggaaauucuccauggugccguuagguucucuaacaaucccgcgcuguguaacguggagucgauccaguggcgggauauagucucaagcgacuuucuuaguaauauguccauggauuuccagaaccaccuggggucuugccaaaagugugacccuagcugcccaaacggauccuguuggggcgcaggcgaggaaaauugccagaaguugacaaaaaucauuugugcccagcagugcucagggcgcuguagaggaaagagucccagcgauugcugccauaaccaaugugcugccgguugcaccggcccuagggagucugacugucucgugugccggaaauuucgcgaugaagcaacuuguaaggacacaugcccaccccugauguuauauaauccuaccacguaccagauggauguaaacccagaggggaaauacuccuucggagcuacuuguguuaagaagugcccgcgaaauuauguggucaccgaccacggcucaugugugagagccugcggugcggauagcuacgaaauggaggaggacggggugaggaaauguaagaaaugcgaaggacccugccggaaggucuguaacggcaucggcauuggggaguuuaaagacagucugucuaucaaugccacaaacauaaagcauuucaaaaauugcacuuccauuagcggagaucuccacauccuuccuguugcauuucguggugacucguucacccacacaccaccccuggauccucaggaauuggacauucuaaagaccgugaaggagaucacgggcuuucugcucauccaggcuuggccagaaaaccgcacugaucugcaugccuucgagaaucuugagauuauaagagggaggacaaaacaacacggacaguucucucuggcuguaguguccuugaacaucaccucacucggccugcggaguuuaaaggaaauuagcgacggugaugucaucauauccgggaauaaaaaccuguguuaugccaauacuauuaacuggaagaaacuauuuggcacaucuggacagaagaccaagaucaucagcaaccgaggcgaaaauucaugcaaagcaacggggcaagugugucaugcccucugcagucccgaaggauguugggguccggagccucgcgacugcguuuccuguagaaacgugagcaggggccgggaaugcgucgauaaguguaaucugcuugagggggagccccgcgaguucguggagaacucugaaugcauucagugccacccagaguguuugccucaggcuaugaauauuaccugcacaggaagaggccccgacaacuguauucagugcgcgcacuacauagaugguccacauuguguaaaaacuugccccgcagggguuaugggcgagaauaacacccugguguggaaguaugccgacgcuggacacgucugucaucucugccacccuaauuguacauacggcugcacugggccaggacuggaagguuguccgaccaacggccccaaaaucccuucaauugccacagggauggugggagcacuucuguugcuccuggucguggccuuaggcaucggucuguuuaugaggcgucggcauaucguucgaaagagaacccuaaggcgccuccugcaagagcgggaacuuguggagccauugacucccaguggggaagcuccuaaucaggcccugcucagaauccugaaggagacggaguucaaaaagauaaaaguauuaggcagcggagcauuuggcacagucuauaaggggcuguggaucccagaaggagagaaagugaagauucccguugcgaucaaggaacuuagggaggcuaccuccccgaaagccaacaaggaaauuuuggacgaggcauacgugauggccucugucgauaauccucacgugugccgccuccugggcaucugccuaacuucgaccguacagcugauaacacagcucaugccauucgguugucugcuugacuacgugcgagagcacaaagauaacaucgggagccaauauuugcugaauuggugcguucagauugcuaagggaaugaacuacuuagaagaccggcgucucguccauagagaucuggccgcaaggaacgugcuugugaaaacuccccagcacgucaagaucaccgacuuuggccuggcuaaauugcucggugccgaggaaaaggaguaucaugcggaaggcgggaagguuccuauuaaauggauggcccuggaguccauccuacaccgcauauacacacaccagucagauguguggaguuauggagugacgguaugggagcugaugaccuucggcucuaagcccuacgacgggauuccagcuagcgaaaucuccucaauucucgagaaaggagaacggcugccucaacccccaaucuguacuauagaugucuauaugaucauggugaagugcuggaugauugacgcagauagcagaccgaaauuuagggagcuuaucauugaguucucuaagauggcccgagacccucagcgcuacuugguuauccagggcgaugaacggaugcaucugcccuccccaacagacaguaauuuuuacagagcuuuaauggacgaggaagauauggacgauguggucgacgccgaugaguaucucauaccccaacaggguuucuuuagcucuccuuccaccucaaggacaccacugcuuaguagccugucggcaacuuccaacaauucuaccguggcguguauugaccguaacgggcuacagagcugccccaucaaggaagauucauuccuccagcgcuacaguuccgacccuacgggagcccugaccgaggauucuaucgacgauacauucuugccgguuccagaguauauuaaucaaagcgugcccaaacggccugcuggcuccguacagaacccagucuaccacaaucagccccugaacccugccccgucaagagacccccauuaucaggauccacacagcacugcaguggguaauccugaauacuuaaacaccgugcaacccacaugugucaauaguacuuuugacucuccagcucauugggcccagaagggcucccaccagaucagccucgacaacccugauuaucagcaagacuucuuucccaaagaggcaaagccaaaugggauuuucaaaggaucgaccgccgaaaacgcugaguaccugaggguugcgccgcagucaucugaauuuauaggcgccuga

SEQ ID NO: 2162 - RNA, 1395 nt, Artificial Sequence
  AAI18666 variant
auggccgcugaggacgugaucauuugcgcacagcaauguagcggcagaugcagggggaagucccccucugauuguugccacaaccagugugccgcgggaugcaccgguccucgggaaucagacugucuggucugccgcaaauuccgagaugaggcuacauguaaggacacuugcccaccgcucaugcuuuacaaucccacgaccuaucagauggauguuaacccugaaggcaaauacaguuuuggggccacaugugugaagaaaugcccacguaauuauguagugacugaccauggaagcugcgucagagcauguggcgccgauuccuacgagauggaagaggacggugugaggaagugcaagaaaugugaggggcccugccggaagguuuguaacggaauaggcaucggcgaguucaaagauucucugucgauuaaugcuaccaacaucaagcacuuuaaaaauugcacaucaauuagcggggacuugcauaucuuaccuguggcauuccgcggagauaguuuuacccacacuccaccccuggacccucaggaacuagauauacucaagacagucaaggaaaucaccgguuuccugcuuauucaagccuggccagagaacagaacggaccugcaugcuuuugagaauuuggaaaucauuaggggccggacuaaacagcacgggcaguucucccucgccgugguaucucugaacaucaccagccugggacuccgcuccuuaaaggagauaucagacggcgauguuauuaucagugguaauaaaaaccuguguuaugcgaauacaauuaacuggaagaaacuuuuugggacuagcggacagaagaccaaaaucaucucuaaucgaggcgaaaacuccugcaaggcaacaggccaagugugucacgccuugugcucaccggagggguguuggggacccgaaccuagagacugcgucagcugcaggaacgugagucggggucgugaguguguggauaagugcaaucugcuagagggcgaaccacgcgaguucgucgaaaacucugaguguauucagugccaucccgaaugucucccucaggcuaugaauauaaccugcacggggagaggaccagacaacuguauccagugcgcccacuacauugauggcccccauuguguuaaaacuugcccggcuggugugaugggggagaauaacacacugguauggaaguaugcagacgccggccacgugugucaccuuugccauccuaauugcaccuacggauguacuggccccgggcuggagggaugcccaacaaacgguccuaaaauccccuccauagcgaccggcauggucggggccuugcuccuguuacuggugguugcacucggaauuggcccacuucacgguagguga

SEQ ID NO: 2163 - RNA, 3276 nt, Artificial Sequence
  AAH94761 variant
augagacccagcggcaccgccggggcugcacugcucgcccuucuggcggcuuugugcccugccuccagggcauuagaggaaaagaaagugugucagggaacaucuaacaagcugacucaacuagguacguucgaggaccacuuucucucacugcagcggauguucaauaacugcgaagucguucuuggcaaucuggagaucaccuacgugcagcgcaacuaugauuugaguuuucucaaaacaauucaggaaguagccggguacgugcugauagcucugaauacugucgagcgaaucccacucgagaacuuacaaauuauccguggaaauauguauuacgaaaacagcuaugcacuggccgugcuuuccaauuacgacgcuaacaagaccggcuugaaagagcugccgaugagaaaucuacagggucagaagugugaucccucuugcccuaacgggucguguuggggagccggcgaagagaauugccagaagcucacaaaaauuaucugugcgcaacagugcucagggaggugucggggcaagagcccaagugacugcugucauaaccagugcgcagccggaugcaccgguccccgcgaguccgauugucugguuugcagaaaauucagggacgaagcuacuuguaaggauacaugcccuccacuuaugcuguauaaucccaccacguaccagauggacgugaacccugagggcaaauacucuuuuggggccacuugugucaagaagugcccacggaacuaugugguaaccgaucacggaagcuguguucgcgcaugcggcgcugacuccuacgaaauggaggaagauggugugcgaaaauguaagaaaugcgaggggccguguagaaaggucugcaauggaauaggcaucggcgaguucaaagacucauugaguauuaacgccacaaauaucaagcauuuuaaaaacugcacuagcauuucuggggaucuccacauccugcccguggcguucaggggagacuccuuuacccauacaccuccauuagacccccaagaacuggauauacucaagaccgugaaggagauuacggguuuccuucugauccaggccuggccugaaaaucggacugacuugcacgcauuugagaaccuagaaauuauccguggccgcacaaaacagcacgggcaauucucacuggcugucguuagccucaauaucaccagucugggacuuagaucucugaaggagauuuccgauggcgacgugauaaucagcgguaacaaaaauuuguguuaugccaacacuauuaauuggaagaaacucuuugggacaucgggccagaagaccaagaucauaucuaacaggggagaaaauuccugcaaagcuacgggccagguaugucaugcccugugcucaccagagggguguuggggacccgagccgcgggauugcgugaguugucgaaacgucagccgcgguagagaaugcguggacaaguguaauuuacuggagggcgaaccuagggaguucguugagaacuccgaaugcauucagugucaccccgagugccuaccacaagcaaugaacauuaccugcacagggcggggaccugauaauuguauccagugcgcccauuacaucgacggcccccacugugugaaaacuugcccagcuggugucaugggggaaaacaauacccucguguggaaguaugcggaugcaggccacguaugucaucugugccaccccaacuguacauacggaugcacuggcccugggcuugagggauguccaaccaaugguccgaaaauccccucuauugccacaggcaugguuggggcuuugcugcuccugcuuguggucgcccugggaauaggcuuguucaugcgcagaaggcauaucgugcguaagcggacccuccgaagacuguuacaggagagggaacuggucgagccucuaacuccaagcggugaagcacccaaccaggcccuccugcgcauucuuaaggagacggaauuuaaaaagaucaaaguguuggggucaggcgcuuucggaacaguuuauaagggccuguggaucccugagggggagaaagugaagauuccaguagccauaaaggaacuccgggaggcaaccagucccaaagcgaauaaggaaauccuggacgaggcuuacgucauggccuccguggauaacccgcacguuugcagauuacugggaauuugucuuacuagcaccgugcaauugaucacacagcucaugccuuuuggcugccugcuagacuacgucagggaacauaaagacaauauugguucucaguaucugcucaacuggugcgugcagaucgcaaaggggaugaauuaccuggaggaucgccgacuuguacaccgggacuuggccgcucguaacgugcugguuaaaaccccacaacacgucaagauaacugauuucggauuagccaaacuccugggcgcagaggaaaaggaguaucaugcugaagguggcaaggugcccaucaaauggauggcccuugagucaauucugcacagaaucuacacacaucagagugacguguggagcuauggggucacgguuugggaauugaugaccuuuggauccaagccuuacgauggcauucccgcgucugagaucucgagcauacucgagaaaggggaaaggcugccacagccucccauuuguacuaucgacguguauaugauuauggugaagugcuggaugaucgaugccgacucccgcccaaaauuccgggagcuaauaaucgaauuuucaaagauggcuagagauccgcagagguaccugguaauucaaggagacgagcgaaugcaccucccuagucccacagauucuaauuucuaccgcgcacugauggacgaggaagauauggacgacgucguggaugccgacgaguaucuuaucccacagcagggcuuuuucagcucccccucaaccagccggacaccuuugcugucuuccuuaagugcuacuagcaacaauucuaccguugccuguauugauagaaacggucuccaauccugcccaaucaaggaagacucauuucugcagagguacaguagcgaucccacgggggcacuuaccgaggacucgauagaugacacauuccugccugugccgggagaauggcuagucuggaaacaguccuguucuagcacuucaaguacccacuccgcggccgcuucucuccagugcccaagccaagugcugcccccugccuccccagagggcgagacaguugcagauuugcagacucaguga

SEQ ID NO: 2164 - RNA, 216 nt, Artificial Sequence
  CAA34902 variant
augagacccagcggcaccgccggggcugcacugcucgcccuucuggcggcuuugugcccugccuccagggcauuagaggaaaagaaaggaaagggugugucucggcgccugccacgacguccgagaaucgcccccaggacaccucagccagcucaaccccggacuggcgccccugcacgcgcuagagccccagcgaggcccuuccuauuuccuuga

SEQ ID NO: 2165 - RNA, 720 nt, Artificial Sequence
  AAH10992 variant
augccccugggccacaucaugagacucgaccuugagaagauugcccuggaauacauagugccuugcuugcaugaggucggguucuguuauuuagauaacuuucugggagaaguugugggugacugcguacuagagagggugaaacagcuccacuguaccggcgcucugcgggaugggcaacuugcaggaccacgcgccggcgucagcaagcgacaucugcguggugaccagaucacauggauugggggaaaugaagagggcugcgaggcgaucuccuucuugcucucucugauugauagacuggugcucuacuguggcucaagguuagggaaauauuacguuaaggaacggaguaaagcuaugguggccugcuauccgggaaacgguacuggcuacguccgccacguggacaaucccaacggggauggaagauguaucacgugcauauauuaccugaauaagaacugggacgcaaaacuucauggcgguaucuugaggauuuuuccugaggggaaguccuucaucgccgauguagaaccaauuuuugaccggcugcuauucuuuuggagcgaucgccgaaauccccacgagguucagccuucuuacgcuaccagauaugcaaugacagugugguacuucgacgccgaggaaagggcugaggccaagaaaaaguuucggaaccucacucguaaaaccgaaucggcgcugacagaggauuga

SEQ ID NO: 2166 - RNA, 1566 nt, Artificial Sequence
  BAH13456 variant
auggccaccagccugcacgagggccccacaaaccagcucgaccuucugaucagagcuguggaagcauccguccauucuucaaaugcccacugcacugauaagacgauugaggcggcugaagccuuguuacauauggagaguccuaccugucugagggacagccgguccccagaguucauacacgcagccaugcgcccggauguuaucacagaaacugugguagaggugucuaccgaagagucggaacccauggacacaucaccuauuccaaccagccccgauagucaugagccuaugaaaaagaaaaaggucgggcgaaaaccaaagacucaacagucccccaucucuaacggaagcccugagcuagguauuaagaaaaagccacgugaaggcaaagggaauacaaccuaccucugggaguuucugcuugaccuguugcaggauaagaacacgugcccgagauauaucaaauggacucagagggaaaagggaauauucaagcucguggacuccaaagcuguuucaaagcuguggggcaaacacaagaauaaacccgauaugaacuacgagaccaugggucgggcacugcgcuauuacuaucaaagagggauccucgccaagguggaaggacagagguuagucuaccaguuuaaagacaugccuaagaauauugugguaaucgaugacgauaagagugagacauguaacgaggaccuggcuggcacuaccgacgagaaaagccuugaacggguuucuuuguccgccgaaucacugcuaaaggcggcaagcagugugcgcucuggcaaaaauuccagcccaauuaacugcucgcgagccgagaagggggucgcuagaguggugaauaucacaucucccggacacgaugccuccucaaggaguccuaccacgacugcaagcgucuccgcuacagccgcgccacggaccguucguguggccaugcagguacccguggucaugacuucucucggucagaaaauaagcacaguggcaguucaaucagugaacgcuggcgccccgcugauuaccaguacguccccuaccacagcuacuagccccaaggucgugauccagaccauuccaacaguaaugccugccucuacugaaaauggggacaagaucaccaugcagcccgcaaaaaucauuacaauaccagccacccaacuugcucagugucagcugcaaacuaagucaaacuugacgggaaguggcagcaucaauauuguugguacaccccucgcggugcgcgcacugaccccugucuccaucgcccaugggacuccagugaugagauuaucuaugccgacccagcaggcuucgggacagacacccccuagggucauaagcgccgugauuaaaggcccagagguuaaguccgaggcaguggccaaaaagcaagaacacgauguaaagacccugcagcucgucgaggaaaaacccgcugacggcaacaagacugugacacauguuguggucgugucagccccuagugcaaucgcgcuuccaguaacgaugaaaaccgaggggcuggugacuugcgaaaaguga

SEQ ID NO: 2167 - RNA, 810 nt, Artificial Sequence
  BAC67168 variant
auggccgcugcacuguucgugcuccuuggauuugcccuguuggggacccacggagcgagcggugcugccggcacagucuucacuacgguugaggacuuaggguccaagauccugcuaaccugcucucucaacgauucagcaacagaagugacuggacauagauggcugaaaggcgguguagugcuuaaggaggacgcccugcccgggcagaaaaccgaauuuaaggucgauagugacgaucaauggggagaguacagcuguguguucuugccugaaccaaugggcacagcuaauauucagcuccacggcccgcccaggguuaaagcagugaaguccucugagcauauaaacgagggggaaaccgccaugcuggucugcaagucggagucagugccuccaguaacugacugggcuugguauaaaaucacagauagcgaagacaaggcccugaugaauggaagugagucccgguuuuucguuucuagcucccagggucgcucagagcuccacauugaaaacuuaaauauggaggcggaucccggccaguaccgauguaacgggaccaguagcaaaggaucugaccaagcaaucauuacgcugcgugugagaucccaucuugccgcuuuguggccuuuucugggcaucgucgccgaagugcuagugcucgucacuauaaucuucauuuaugagaagaggcggaaaccagaagauguucuggacgaugacgacgcagguucagcuccccuuaagagcagugggcagcaccagaaugauaagggcaaaaacgugcgccagagaaauucuuccuga

SEQ ID NO: 2168 - RNA, 945 nt, Artificial Sequence
  AAA35723 variant
auggcucccccucaggugcuggccuucggccuccuucuggcagccgcgaccgcuacauuugccgcagcccaagaggaaugcgucugugagaacuacaaguuggcuguuaauugcuucgugaacaauaacagacagugucagugcacuagcguaggggcacagaauacggugaucuguuccaaauuagccgcuaagugccuggucaugaaagccgaaaugaacggaucuaagcuagguaggcgggcgaaaccagagggcgcacuccaaaauaacgacgggcuguaugauccggacugugaugaaucaggacuuuuuaaggccaagcagugcaauggcaccaguauguguuggugcgugaacacagcugguguucgccgaacugacaaagauaccgagauuacauguagcgagcgugugagaaccuacuggauaaucauugaacugaagcacaaagccagggagaagcccuaugacuccaaaucuuugcggacugcacuccagaaggaaaucacaacccgcuaccagcuggauccuaaguucauuacgucgauccuguaugagaauaacgucauaacuaucgaccucgugcaaaauucaagccagaaaacccagaacgauguagacauugcugauguugccuacuauuuugagaaggacgugaaaggggaaaguuuauuccauuccaagaaaauggaucugacagucaauggagagcagcuugacuuggacccaggccaaacucugaucuacuacguggaugaaaaggcgcccgaguuuucuaugcagggccuaaaagccggggugauugcagucaucguugugguagugauagcugucguggccggaauuguugugcucgucaucagcagaaagaagaggauggcuaaauaugaaaaggccgagauuaaagagaugggugaaaugcaccgggagcugaacgcauga

SEQ ID NO: 2169 - RNA, 2931 nt, Artificial Sequence
  CCDS169.1 variant
auggagcugcaggccgcuagagcaugcuucgcccuccuuuggggcugugcgcuggcugccgcagccgcugcacaagggaaggaaguggucuuguuagacuuugccgcugccggaggugagcugggcuggcuaacccaccccuacgggaaaggaugggaucucaugcagaacaucaugaaugacaugccuauuuauauguacagcguuugcaacgugauguccggcgaucaggacaauuggcugaggacaaacuggguauaucggggugaagcggagcgcauauucaucgaacuuaaguuuacugugcgagauuguaauucuuucccagggggagcaucaaguugcaaagagacguuuaaccuguacuaugccgagagcgacuuggauuacggcaccaauuuccagaagcgucucuuuacaaaaauugacacuaucgcuccggaugaaauuaccgucuccucugacuucgaggccagacaugugaagcugaacguugaagagaggucggugggcccccugacacggaagggguuuuaucucgcauuccaagauaucggagcuugugucgccuuacugucagugcgcguauacuacaaaaagugcccugagcuuuugcagggucuggcgcacuuuccagaaaccauagccggcagcgacgcacccagucuagcuacuguugccgggacauguguggaucaugcugucgugccuccaggaggcgaggaacccagaaugcacugcgccguggacggugaguggcucgucccuaucgggcagugucugugccaggcaggauaugaaaaaguugaggacgccugucaagccugcuccccaggcuucuuuaaguucgaggcgucugaaagcccgugccuugagugucccgaacauacccugccuuccccagagggcgcaacgucaugcgaaugugaggagggguucuuuagggcuccccaggauccugcuaguaugccaugcacucggcccccgagcgccccucacuacuugaccgcagugggaaugggugccaaaguagaacuccgcuggacacccccacaggacucuggcgggcgagaggauauuguguauuccgucacuugugaacagugcuggccugagucaggagaauguggccccugcgaggcuagcgugagauacagugagccaccccacggucugaccaggacaucuguuaccguguccgacuuagaaccucauaugaauuauacguucacugucgaggcccggaacggggugagcggccugguaacaucgcguucuuuucgcaccgcauccguuucaaucaaucaaacugaaccaccgaaggugagacucgagggaaggaguacaaccagccuuuccgucucuuggagcauucccccuccacagcagucacggguguggaaguacgaggucacguaucgcaaaaagggcgauaguaacuccuacaaugugcgaagaaccgaaggguucagcguuacacuggacgauuuggcgcccgacacuaccuaccuagugcaaguacaggcucugacacaggagggacagggugccggcucuaaaguccacgaauuucaaacucucucaccugaggggaguggaaaccuggcagugaucggcgguguugccgugggggucgugcuucuguugguacucgcuggcgugggauucuuuauacauaggcggcgcaagaaucagagagccaggcagagcccagaagauguuuauuucuccaaaucugagcagcugaagcccuuaaaaaccuacgucgacccgcacacauaugaggauccuaaccaagcagugcugaaguuuaccacugaaauucacccaucgugugugacgcgucagaaggucaucggcgcuggggaguucggagaaguuuacaaagguaugcuaaagacaagcuccggcaaaaaggaggugcccguggccauuaaaacccucaaggcgggguauacugaaaagcagcggguagacuuucugggagaggccggcaucaugggucaguucucacaucacaacaucauucgacuugagggggucauaaguaaauacaagccuaugaugaucauuaccgaauauauggagaauggcgcuuuggacaaauuucugagagaaaaggauggagaguucucugugcuccaacugguuggcaugcuuagggggaucgcagccggaaugaaauaccuggcuaacaugaauuacgugcaucgcgacuuggccgcacggaacauacucgucaauagcaaccuggugugcaagguuuccgauuucggcuuaucaagagugcuggaagacgaucccgaggcgacauauaccacuagcggugggaagauuccaaucagguggacagccccugaggcuaucucuuaccgcaaauuuacguccgccagugacguauggagcuucggaauugucaugugggaagugaugaccuauggcgagcgacccuacugggaacuaucuaaucacgaggugaugaaggcaaucaacgaugguuuucggcucccaacuccgauggacuguccuuccgcuauuuaucagcugaugaugcagugcuggcagcaagagcgugccagaaggcccaaauucgcagauauagucucaauccuugacaaguugauucgcgccccagauagucugaaaacacucgcugacuuugauccccggguuagcaucagacugccuucgaccuccggcucugaaggggugccauucaggacaguaagcgagugguuagaaucaaucaagaugcagcaguacacugagcauuuuauggcggccggauauaccgcaauugaaaaggugguccaaaugacgaaugacgacauaaaacgaaucggcgugcgccugcccgggcaccagaagcggauugcuuacagucuuuugggacucaaagaucagguuaacaccgugggcaucccuauuuga

SEQ ID NO: 2170 - RNA, 2952 nt, Artificial Sequence
  AAG43576 variant
auggacugccagcugagcauccuccuucuguuguccuguucuguguuagauucauucggcgagcugauuccccaaccuaguaacgaagucaaucuacucgacagcaagaccauacagggggagcugggauggaucuccuacccaucucacgguugggaagagauuucgggcguugaugaacauuauacaccgaucagaacuuaccaggugugcaacguaauggaccacucacagaauaacuggcuuaggacgaauugggugccccggaacagcgcccagaaaauuuaugucgagcugaaguuuaccuugcgcgauuguaauaguaucccucucgugcuggggacaugcaaagagacuuucaaccuguacuauauggaauccgacgaugaccauggaguuaaguuucgagagcaccaauucaccaaaauagauacaaucgcugcagacgaaucuuuuacccagauggaucucggcgaccguauuuuaaagcugaauacugagaucagagagguggguccagucaacaagaaaggguucuaccuugccuuucaggaugugggagcguguguagcuuugguuagcgugagggucuauuucaagaaaugccccuuuacagugaagaaucuggccauguucccugacaccgugccaauggacucccaaagucuagucgaaguucggggcucaugugugaacaauagcaaagaggaagaucccccucgcauguacugcucuacggagggcgaauggcucguaccaauugggaaguguuccugcaacgcaggauacgaggagagagguuuuaugugucaggccugcaggccgggcuucuauaaggcucuggacgggaauaugaaaugcgcaaagugucccccucauucaagcacucaggaagauggaaguaugaacugccggugugagaacaauuacuuucgcgccgacaaagauccacccucuauggcuugcacccgaccuccauccagccccagaaacgugaucucgaauauaaacgaaacaucugucauucuugacugguccuggccgcuggauacuggcgguaggaaggacgugaccuucaauaucauuuguaaaaagugcggguggaacaucaaacagugugagccuugcucacccaauguucgguucuugccacgucaauuuggacucacaaacaccacggugacugucacagaucuguuagcccacaccaauuauacuuucgaaaucgacgcggugaacggcguaagugagcugagcuccccuccccgccaguuugcagccguuucuauuacaaccaaucaggcugccccaagccccgugcucacgauaaagaaggauagaaccucaaggaacaguaucucccuuagcuggcaagagccugaacacccaaauggcauuauccuggacuacgaggucaaauauuacgaaaagcaggagcaggaaacaucuuauacuauauugcgggcacgagggaccaacgugacaauuucaagucuaaaaccggacacuaucuacgucuuccagauccgcgcuagaaccgccgcgggauacgguacaaauagcaggaaguuugaguucgagaccucccccgauucuuuuucgauuagcggcgaauccucacaagugguuaugaucgccauuagugcagcuguggccauaauccugcucacuguagucauuuaugugcugaucgggcgguucuguggauacaaaucuaagcauggcgcugacgagaagcgccuucacuuugguaacgggcaucugaaauugccuggccucagaacguauguugauccacacacauacgaagaccccacccaggccgugcacgaguucgcaaaggagcuggaugccacuaacaucagcauugacaaagucgugggagcuggcgaauuuggggagguaugcuccggaagguuaaagcugccuagcaaaaaggaaauaucaguggcgaucaagacccuaaaaguugguuauacagagaagcagcgucgggauuuccucggcgaagcaucuauuauggggcaguuugaccauccaaauaucauucgacuggagggagucgugaccaaauccaagcccgugaugaucgucacugaguacauggaaaacggcagucuugauagcuucuugagaaaacacgacgcccaauucacaguuauacagcugguggguaugcucagggggaucgcuucuggcaugaaguaucuguccgauaugggauacgugcaucgcgaccuugccgcacggaauauucugaucaacucaaauuugguauguaaggucagugauuuuggccucagcagagugcuggaggacgacccggaagccgcuuacacgacccgcgggggaaaaauuccuaucagguggacuucgccagaggccauagcauaucgaaaguucacauccgcgucugauguuuggagcuacgguauuguguuaugggaagucaugucauauggcgagcggcccuacugggagaugaguaaccaggacgugaucaaagcuguugaugaaggguaucgucugccucccccaauggacugcccugccgcacuauaccagcucaugcuggauugcuggcaaaaggacagaaauaacaggcccaaauuugagcagauuguguccauccuugauaaguugauacgcaauccaggaucucugaaaaucauuaccagcgccgcugcccggccguccaaccuccuguuagaccagucaaauguagauaucacaacuuucagaaccacgggcgacuggcugaacggugucuggaccgcacacuguaaggaaauuuuuacagggguggaguauagcaguugcgauacuaucgcuaagauaucuaccgacgauaugaaaaaggugggcgucacaguugugggaccucagaaaaagauuaucuccagcaucaaagcccuugaaacucaaucgaagaauggccccguaccaguguga

SEQ ID NO: 2171 - RNA, 2952 nt, Artificial Sequence
  AAH63282 variant
auggacugccagcugagcauccuccuucuguuguccuguucuguguuagauucauucggcgagcugauuccccaaccuaguaacgaagucaaucuacucgacagcaagaccauacagggggagcugggauggaucuccuacccaucucacgguugggaagagauuucgggcguugaugaacauuauacaccgaucagaacuuaccaggugugcaacguaauggaccacucacagaauaacuggcuuaggacgaauugggugccccggaacagcgcccagaaaauuuaugucgagcugaaguuuaccuugcgcgauuguaauaguaucccucucgugcuggggacaugcaaagagacuuucaaccuguacuauauggaauccgacgaugaccauggaguuaaguuucgagagcaccaauucaccaaaauagauacaaucgcugcagacgaaucuuuuacccagauggaucucggcgaccguauuuuaaagcugaauacugagaucagagagguggguccagucaacaagaaaggguucuaccuugccuuucaggaugugggagcguguguagcuuugguuagcgugagggucuauuucaagaaaugccccuuuacagugaagaaucuggccauguucccugacaccgugccaauggacucccaaagucuagucgaaguucggggcucaugugugaacaauagcaaagaggaagaucccccucgcauguacugcucuacggagggcgaauggcucguaccaauugggaaguguuccugcaacgcaggauacgaggagagagguuuuaugugucaggccugcaggccgggcuucuauaaggcucuggacgggaauaugaaaugcgcaaagugucccccucauucaagcacucaggaagauggaaguaugaacugccggugugagaacaauuacuuucgcgccgacaaagauccacccucuauggcuugcacccgaccuccauccagccccagaaacgugaucucgaauauaaacgaaacaucugucauucuugacugguccuggccgcuggauacuggcgguaggaaggacgugaccuucaauaucauuuguaaaaagugcggguggaacaucaaacagugugagccuugcucacccaauguucgguucuugccacgucaauuuggacucacaaacaccacggugacugucacagaucuguuagcccacaccaauuauacuuucgaaaucgacgcggugaacggcguaagugagcugagcuccccuccccgccaguuugcagccguuucuauuacaaccaaucaggcugccccaagccccgugcucacgauaaagaaggauagaaccucaaggaacaguaucucccuuagcuggcaagagccugaacacccaaauggcauuauccuggacuacgaggucaaauauuacgaaaagcaggagcaggaaacaucuuauacuauauugcgggcacgagggaccaacgugacaauuucaagucuaaaaccggacacuaucuacgucuuccagauccgcgcuagaaccgccgcgggauacgguacaaauagcaggaaguuugaguucgagaccucccccgauucuuuuucgauuagcggcgaauccucacaagugguuaugaucgccauuagugcagcuguggccauaauccugcucacuguagucauuuaugugcugaucgggcgguucuguggauacaaaucuaagcauggcgcugacgagaagcgccuucacuuugguaacgggcaucugaaauugccuggccucagaacguauguugauccacacacauacgaagaccccacccagacugugcacgaguucgccaaggagcuggaugcaaccaacaucagcauugacaaagucgugggagccggcgaauuuggggagguaugcuccggaagguuaaagcugccuagcaaaaaggaaauaucaguggcuaucaagacacuaaaaguugguuauaccgagaagcagcgucgggauuuccucggcgaagcgucuauuauggggcaguuugaccauccaaauaucauucgacuggagggagucgugacuaaauccaagcccgugaugaucgucacagaguacauggaaaacggcagucuugauagcuucuugagaaaacacgacgcacaauucacgguuauacagcugguggguaugcucagggggaucgccucuggcaugaaguaucuguccgauaugggauacgugcaucgcgaccuugcugcccggaauauucugaucaacucaaauuugguauguaaggucagugauuuuggccucagcagagugcuggaggacgacccggaagcagccuacaccacucgcgggggaaaaauuccuaucagguggacaucgccagaggcuauagccuaucgaaaguucaccuccgcaucugauguuuggagcuacgguauuguguuaugggaagucaugucauauggcgagcggcccuacugggagaugaguaaccaggacgugaucaaagcgguugaugaaggguaucgucugccucccccaauggacugcccugcugcccuauaccagcucaugcuggauugcuggcaaaaggacagaaauaacaggcccaaauuugagcagauuguguccauccuugauaaguugauacgcaauccaggaucucugaaaaucauuacaagcgcagccgcucggccguccaaccuccuguuagaccagucaaauguagauaucacuaccuucagaacgaccggcgacuggcugaacggugucuggacagcccacuguaaggaaauuuuuacugggguggaguauagcaguugcgauaccaucgcaaagauaucuacagacgauaugaaaaaggugggcgucacuguugugggaccucagaaaaagauuaucuccagcaucaaagcucuugaaacccaaucgaagaauggccccguaccaguguga

SEQ ID NO: 2172 - RNA, 1389 nt, Artificial Sequence
  BAG54127 variant
augcccaugagcaccauccugccugugacauccccaugccucccggccacuggcgucacgguuugggagcuuaugaccuucggggcugaacccuacgcaggacugagauuggccgaggugccugacuuacuggaaaagggugagaggcuagcgcagccacaaauuuguacaauagauguauauauggugauggucaaaugcuggaugaucgacgaaaacauucggcccacuuuuaaggagcucgcuaaugaguucacccgcauggcccgagauccuccacguuaccuggugaucaaaagagaaucuggccccgggauugcaccuggaccagagccgcacggccuuacaaacaagaaacuggaagagguugaguuggaacccgagcucgaccuggaucuggaccucgaagccgaggaagauaauuuagcuaccacuacacuggguucagcacuuaguuugccuguggggacccugaacaggccacggggaagccagucccuacucucucccucgucaggcuauaugccuaugaaucagggcaaccugggggagagcugucaggagagugccgucuccggaucuagcgaacgcugcccaagacccgugucccuucauccgaugccuagggguugucuggcuucagagaguagcgaaggccacguaacggggucugaggccgaauugcaagagaagguuuccaugugccggucacgcagccgaaguagaucucccaggccacggggagacuccgcguaccauagccagcgucacucgcuccugacuccugugacccccuuaucuccacccggccuggaggaagaggaugucaaugguuaugugaugccugacacacaucucaaggggacuccauccucacgcgaaggaacccuuaguagcgugggccuguccucugucuugggcacagaggaagaggaugaggacgaagaguacgaauauaugaacagaaggcggcgacacagcccgccccacccuccacgccccucaagucuagaggagcugggguacgaauacauggauguuggauccgaccucagcgcaucucuggguucaacccagaguuguccucuucauccagugcccaucaugccgacggccggcacuacaccugacgaggauuaugaauacaugaauagacagagggacgggggaggcccagguggggauuaugcugccaugggcgcaugccccgcuagcgagcaaggauacgaagagaugcgggccuuucagggcccugggcaccaggcgccccauguacacuaugcccgccugaaaaccuugagaucccucgaggcaacugacucugcuuucgauaacccagacuacuggcacucgaggcuguuuccuaaggccaaugcucagcguacauga

SEQ ID NO: 2173 - RNA, 2766 nt, Artificial Sequence
  BAG57868 variant
augagagccaacgacgcucuccaggugcugggccuucuguucagcuuggcaaggggguccgaggucggaaauucucaagccguuugccccgguaccuuaaacggccugucagugacaggggaugcggaaaaucaguaccagacucuauauaagcucuacgagcggugugaaguagugaugggaaaccuggagaucguccuuacgggccacaaugcugaccugucguuuuugcaguggauucgcgaagugaccgguuauguucucguggccaugaacgaguucagcacacugccucugccaaaucuccgagucgugcgugggacucaaguauacgauggaaaauuugcaauauucguuauguuaaacuauaauaccaacuccucucaugcccugagacagcuuagguugacacagcugaccgagauccuaucgggcggcguguacauugaaaagaaugacaaacucugccacauggauacuaucgacuggcgggauauuguccgcgacagagaugcugagaucguggugaaggacaacgggaggucauguccgcccugccaugaagucuguaaaggacggugcugggguccuggcagcgaggauugucagacacugaccaagacgauaugcgcaccacaauguaaugggcacugcuuuggacccaacccuaaucaguguugccaugacgagugcgccggcgguuguagugggccacaggauacugacugcuucgcuugucgccacuuuaacgacuccggagccugcguuccccgauguccucagccacuuguguauaacaagcugaccuuccaauuggaaccgaauccccacacaaaauaccaguacggcggcguaugcguggcgucuuguccucauaacuuugucguggaucagacuagcugcguuagagcauguccacccgacaagauggagguggauaaaaaugggcucaagaugugcgaaccuuguggaggucugugcccaaaagccugcgagggcaccggguccggaucaagguuccaaacagucgacaguagcaacaucgauggcuuugugaauuguaccaagauuuuagguaaccuggacuuccucaucacggggcuuaauggcgaucccuggcacaagauuccggcucuggacccugaaaaauugaacguauuucggacuguucgugagaucacaggauaucuaaauauacagucuuggcccccacauaugcacaacuucuccguguucucaaaucugaccacuauuggcgggcgcagccucuacaacagaggauuuagucugcuuaucaugaagaaucugaacgucacaucuuuggguuucaggucccucaaagagauuagcgccggccggaucuauaucucggcaaaucgacagcugugcuaccaccauucuuuaaacuggaccaaggugcugcgcgggccuacggaagagagacuagauauuaaacacaacaggccccggcgcgacugugucgcugaaggaaaggugugcgauccacucuguuccucaggcgguugcugggggcccggcccuggacagugucugaguugcagaaauuauagcaggggcgggguuugugugacccauugcaacuuucuuaauggagagccacgugaguucgcccacgaggcggaguguuuuuccugccauccggaaugccaacccauggaggguacagccacuuguaacggcucugggagcgauaccugcgcacagugugcucacuuccgggacggaccucacugcguaucaaguuguccacauggcgucuugggugccaaagggcccauauacaaguauccugacgugcagaaugaaugccgaccaugucacgagaacugcacacagggcuguaagggacccgaacugcaagacugccucggccagacucugguucuuaucgggaaaacccaucugacaauggcuuugaccgugauugccggacucgucgugaucuuuaugaugcugggcgguacuuucuuauacuggagagggaggcgcauacagaauaagcgggcaaugagaagguaccuggagcgcggagaguccauugaaccgcuagauccuagcgagaaagccaacaagguacucgcucgaaucuuuaaagaaacggagcugcggaaacuuaagguguugggcucugguguuuucggcacaguccacaaggggguguggaucccagagggagaaucaauuaagauccccguguguauuaaagucauagaggacaagaguggccgucagagcuuucaagcgguuaccgaucacaugcuggcaaucgggucccucgaccaugcccacauugugagacuguuaggacugugcccuggcucuagucuucaguuggugacucaguaucucccccuggguagccuacuggaucauguaaggcagcaccgcggggcucucggaccacaacugcuuuugaauuggggcguccagaucgccaaagguauguacuaucuggaagaacauggcauggugcaccggaacuuagcagccagaaauguucuccugaaguccccuucacaggugcaagucgcugacuucgggguggccgaucuucugcccccagacgauaagcaguugcucuacagugaagcaaaaaccccgaucaaguggauggcgcuggagucuauucacuuuggaaaauauacacaucagagcgacguuugguccuacggccagugcauauggaugccuucacuacccagccuggcuccagugucuaaccuccccuucgagaccccuuccuga

SEQ ID NO: 2174 - RNA, 3927 nt, Artificial Sequence
  AAB59446 variant
augaagcccgccaccggccugugggugugggucagccuccuuguugcugcagggacagugcagccuuccgacucucaaucaguaugcgccggaacugaaaacaaacugaguagcuuguccgauuuagaacagcaguacagagcgcugaggaaguauuacgagaauugugaaguggucauggguaaccuagagaucacgucuauugaacacaaucgggaccucucguuccugcgcucagugcgagagguuaccggcuaugugcuugucgcucugaaccaguuucguuacuugccacucgagaaucugagaauaaucagggggacaaaacuguaugaagaucgguacgcccucgcaauuuucuuaaacuaucgcaaggacggaaauuuuggccugcaagagcuugguuugaaaaaccugacugaaauccuaaaugggggaguguacguagaucagaacaaguuccucugcuacgccgacaccauucauuggcaggauaucguuagaaauccguggcccagcaaccugacacuugugaguaccaauggcuccucuggcugugggaggugccacaagagcuguacuggacggugcugggguccuacagagaaccauugucagacccugacgcgcacugucugcgcugagcaaugugacggccgaugcuaugggccauacguguccgauuguugccacagagaaugcgcaggaggcuguucaggucccaaagacaccgauugcuuugccuguaugaauuucaacgacaguggggcuugcgugacacaguguccucagacuuuugucuauaacccaaccacauuccaguuggagcauaauuuuaacgccaaguacaccuauggagcguucugcguuaaaaaguguccccacaauuuugugguagauucuagcuccugcgugagggcauguccuucaagcaaaauggaagucgaggaaaacggcauaaagaugugcaagccauguacggacaucugcccgaaagccugcgacggcauugggacuggaagucucaugucugcucaaacaguggauuccagcaauaucgacaaguucauuaacuguaccaaaaucaaugguaaccugauauuuuuaguuacuggcauucacggggaucccuacaaugccaucgaggcaauugacccugagaagcugaacguguuccggacaguccgugaaaucaccggauuccucaauauccagucguggccacccaacaugacggauuuuucuguguucuccaaucuuguaaccauuggcggucgcguucuguauucaggguugagucuacugauacucaaacagcaaggcaucacaagccugcaguuucagucccuuaaggagauuucugcuggaaacaucuacauaacugacaauagcaaccugugcuacuaucauaccauuaacuggacaacuuuguucucaaccaucaaucagagaaucgugauuagggauaaccggaaagccgaaaauuguacagcggagggcauggucugcaaccaccucuguaguuccgacgggugcuggggaccugguccagaucaaugucugagcugccgacgcuuuucuagaggcaggaucuguauugaaucaugcaauuuauacgacggggaguuccgggaguuugaaaacggaaguauauguguggagugcgauccccagugcgaaaagauggaggacggccugcuaaccugucaugguccggggccugacaauugcacuaaguguagccacuucaaagauggccccaacugcgucgaaaaguguccagacggacuccagggcgccaauuccuuuaucuucaaauaugcagauccugaccgcgagugccaccccugucauccaaacugcacgcagggguguaauggacccacaucucacgauugcauuuacuauccuuggaccggucauucgacucugccacaacacgcuagaaccccgcuuaucgccgcuggcgugaucgggggauuguuuauucugguuauagugggccucacauucgccguauacgucaggcguaagagcaucaaaaagaagcgggcacugcgaagauuucuugagaccgaacugguggagcccuugacuccuuccgguacagccccaaaccaggcucagcucaggauucugaaagaaacggaguuaaagcgcguuaaagugcuggggucaggcgcguucggaaccgucuauaagggcaucugggugcccgagggggaaacuguaaaaauuccuguggcaaucaagauacuaaaugagacaaccggaccaaaggccaacguugaguucauggacgaagcucucaucauggccaguauggaucauccccaccugguccggcuuuugggcgugugucugucuccgacaauucagcucgugacucaacugaugccucacgguugcuuacuggaauacguccaugagcacaaagacaauaucgggagccagcuuuugcucaacuggugcguucagauugcaaagggaaugauguaccuggaggaaagaaggcuagugcaucgcgaucuggccgcucgaaacgugcucguaaaauccccaaaucacgucaagaucaccgacuuuggccuggcccggcuuuuggagggugaugaaaaagaguauaacgcagacggcgggaagaugcccauaaaguggauggcgcuggaauguauucacuaccguaaauucacgcaucagucagauguguggagcuauggaguuaccaucugggaguuaaugacauuuggcgggaagccuuacgacggcauucccacuagagagaucccagaccuccuggaaaaaggagagaggcuuccucaacccccaauaugcaccaucgauguguauauggucauggugaaguguuggaugauugacgcugauucucgcccgaaauucaaggaacuggccgcagaguuuucccggauggccagagacccucagagguacuugguuauccagggugaugaccgaaugaaacuccccaguccaaaugauagcaaguucuuucaaaaccugcuagacgaagaggaucuggaggacaugauggaugcugaagaguaucucgugccccaggccuucaauauuccuccacccaucuacacaucucgcgcacggauagacuccaacagaucagaaauugggcacaguccuccgccagcuuacacucccaugagcggaaaucaguuuguauauagggauggcgguuucgccgcggagcagggcgucucggugccuuaccgugccccaaccuccacgauccccgaggcuccuguggcacaaggggccacagcugaaaucuuugacgacucuugcuguaacggaacccugcgcaagccggucgcaccccauguucaggaggauagcucaacucagcgguauagugccgacccaacaguguucgcgccugaaagaucccccaggggcgagcuugaugaagagggguacaugaccccaaugcgagacaaaccuaagcaggaguauuugaaucccguagaagagaacccauuugugucucggcgcaaaaauggagaucugcaagccuuagacaacccggaauaccacaaugcuagcaacggcccucccaaggccgaggaugaauaugucaaugagccacucuaccugaacacuuucgcaaacacccuugguaaagcugaguaccugaagaauaacauucuauccaugcccgaaaaggccaaaaaggcauucgacaauccugauuauuggaaccauucacucccacccagaagcacacugcagcacccugacuacuugcaggaguauaguacgaaauacuuuuauaagcagaaugggaggauccggccgauuguggccgaaaacccagaguaccugucugaguucuccuuaaaacccggaaccguucucccucccccaccuuaucgacacagaaauacuguggucuga

SEQ ID NO: 2175 - RNA, 1461 nt, Artificial Sequence
  CCDS46648.1 variant
augauccagaccgugcccgacccugccgcucacauuaaggaggcacugagcgucguuuccgaagaucaaucucucuucgagugcgccuacggcacaccacaucuugcgaaaacugaaaugacggcuucaaguagcuccgacuaugggcagaccucuaagaugucgccgagagugccccagcaggauuggcugucacaaccuccagccaggguaacaauaaaaauggaguguaaccccagccaggugaauggaagucggaacuccccugacgaaugcucugucgcaaaggguggcaaaaugguggggagcccagauacuguuggaaugaauuacggcuccuauauggaggagaagcacaugcccccuccaaacaugaccacaaaugaacgccgagugaucgucccggccgaccccaccuuguggucaacugaucaugugcgucagugguuagagugggcuguaaaggaauacggucugccugacguuaacauucuacucuuucagaauaucgaugggaaagagcuguguaagaugacaaaagacgauuuccaaagacuuaccccaaguuauaacgcagacauucuguugagccaccuccauuaccugagggagacgccccugccucaccucacuucugaugacguggacaaggccuuacaaaauuccccacggcugaugcacgcucgcaacaccggaggcgccgcguuuaucuuccccaauacaucagucuauccggaagcaacucagagaauaaccacaaggccugaucuucccuacgagccaccucggcgcagcgccuggaccggccaugggcaccccacgccacagaguaaagcugcccagcccucuccuuccacugugccaaagacagaagaccagcgaccgcaguuggaucccuaccaaauccugggaccuaccagcucgagacuagcaaacccagguucuggccagauucagcucuggcaguuucugcuugagcuguuguccgacucaaguaauagcuccugcaucacuugggaagggacaaacggagaguucaagaugaccgaucccgacgagguggcuaggcgguggggcgaacguaaaucuaagccuaauaugaacuaugauaaacucagccgcgcccugagauacuauuacgacaagaacauuaugacgaaaguccaugguaagagguaugcguacaaauuugauuuccacgggaucgcccaagcauuacagccacaucccccggagucaagucuguauaaguacccuuccgaccucccauacaugggaagcuaucacgcucacccccagaagaugaauuuuguugccccucaucccccagcccuuccugugaccucuucaaguuucuuugcugcacccaacccauacuggaauagcccgacaggcggcauauauccuaacacucggcugcccaccucccacaugccaucucauuuggggacauacuauuga

SEQ ID NO: 2176 - RNA, 1359 nt, Artificial Sequence
  AAA19786 variant
augagcgagacccccgcccagugcuccaucaagcaagaaagaauuucuuacacaccuccagagucaccggugcccaguuaugcuagcuccacuccucugcacgucccaguucccagggcacuccggauggaagaggacucuauacgccuuccugcccaucugcgauugcagccaaucuacuggucgcgugaugacguggcgcagugguuaaaaugggcugaaaacgaguucucacugagacccauugauagcaauacguuugagaugaacggcaaggcccuacuccugcuuaccaaagaagacuucagguaucggaguccucacuccggggauguacuguacgaguugcuccagcauauccugaagcaacgcaaaccaaggauucuguuuucuccguucuuucaccccggaaauagcauccauacacagccugaagugauacuccaccagaaccacgaggaggacaauuguguccagagaacuccacggcccuccguggauaacguucaucacaauccuccaaccaucgaauuacugcaucgcucacgaagucccauuacaaccaaccacagaccgagcccugaccccgagcaaaggccacuucggucuccuuuggauaauaugauccgucgccugucccccgcagaaagagcccaggguccaaggccccaccaggagaacaaucaucaggaaucauauccucuaagcgugaguccaauggagaacaaucacugcccggcuucuuccgagagccaucccaagccuucgucuccacggcaagaauccacucgagucauucagcucaugcccucaccuaucaugcacccacugauacuuaacccccgccauaguguggacuucaagcagagcagacuguccgaggauggcuugcacagggaagggaaaccgauuaaucucucucaccgggaggaccuggcauacaugaaccauaucaugguaagcguuucaccuccagaagaacacgccaugcccauuggacgcaucgcugauuguagauuacugugggacuauguguaccaacuccuuagugacuccagguacgagaacuuuauccguugggaagauaaggagagcaaaauuuuccggauagucgacccuaauggccuggcccgauugugggguaaccauaagaauagaacaaacaugaccuaugagaaaaugucuagggcgcuacgccacuacuauaagcugaauaucauucggaaggagcccgggcagagacuccuguuuagguucaugaaaacgccagaugaaaucaugucaggacgcacugaccgacuugagcaccuggagagucaggaauuggaugagcagauauaccaagaagacgagugcuga

SEQ ID NO: 2177 - RNA, 1971 nt, Artificial Sequence
  AAH04817 variant
auggccagcaccgacuacuccacauauucucaggcugcagcccaacagggcuacucagcguauacugcucagcccacgcagggguacgcccaaaccacacaggcauauggacagcagaguuacgguacuuauggccaaccuaccgaugugagcuacacacaggcccagaccacugcuacauacgggcagaccgcauaugccacguccuacggacaaccaccgacuggcuauaccacacccacugcuccucaggccuacucucagccaguccaagguuaugggaccggagcguacgacacaaccacggcaacuguuacaaccacucaggccucguaugcugcccagucagcauacggcacacagcccgcuuacccugccuauggccaacagccagcggccaccgcacccacgagaccucaggaugggaacaagccaaccgagacaagccagccgcaaaguuccacuggagguuacaaucagcccucucugggcuaugggcagagcaacuacuccuauccucaggugccaggaucauaccccaugcaaccuguaaccgcuccacccaguuauccgccuacaagcuacucuuccacucagcccaccucauacgaccagagcaguuauucucagcaaaauacauacggccagccauccagcuauggucagcaaucgucuuacgggcagcaguccucauauggacagcaaccucccaccaguuacccaccccagacuggcagcuauucccaggccccuucucaguacagccaacagucaaguuccuacggccagcagagcucuuucaggcaagaucacccaucaaguauggggguguauggacaggaaagcgguggcuuuuccgggccgggagagaaccggucuaugucgggccccgacaaucgcggucgagggcguggcggauucgauagaggcgggaugagcaggggaggucggggcgggggacgcggcgguaugggguccgcuggcgaaagaggaggcuuuaacaaaccugggggaccaauggacgagggucccgaucucgaccuuggcccuccagucgaucccgacgaagauucagacaauagugccaucuacgugcaggggcugaacgacucuguuacguuggaugacuuagcagauuucuuuaagcaaugcggaguggucaaaaugaauaagaggacaggccagccgaugauucauauauaucuggacaaagagaccgguaagccuaagggggaugccacugugagcuacgaggacccacccaccgcuaaagcggcaguagaaugguucgauggcaaggacuuucagggauccaaacuaaagguuucacucgcccggaaaaagccucccaugaacagcaugcgcggcgggcugccaccucgagagggaagaggcaugcccccaccgcuuaggggugggccuggaggccccgguggcccagggggacccaugggccggaugggagggcguggcggugaucgcgggggauucccuccaagaggccccagggguucucggggcaauccuuccgggggaggcaacgugcagcaccgagcuggggacuggcaauguccgaauccaggaugcggcaaccagaauuuugccuggcgcacagaauguaaccagugcaaggcacccaaaccugaggguuuccugccacccccuuuuccgcccccagggggagauagaggcagggguggcccugggggaaugcggggcgggcgcggaggcuugauggacagaggugggcccggaggcauguucaggggcgggcguggaggugaccggggcggguuucgaggaggcagagguauggaucgcgggggauucggcggcgggaggcggggagguccaggcgggccucccggaccacucauggagcagaugggcgguagacgcgggggaaggggcggcccggggaagauggacaaaggagaacaucgacaagagcggcgugauagaccuuauuga

SEQ ID NO: 2178 - RNA, 1998 nt, Artificial Sequence
  AEA07595 variant
augggccagaccgggaagaaaagcgagaagggacccgugugcuggagaaaaagggucaaguccgaauacaugcggcugcgccaacucaaacgauuccguagagccgacgagguuaagucuauguuuucaaguaacaggcagaagauccuugaacggacagagauucugaaucaggaauggaaacagcgcagaauacaaccugugcacaucuugacuagcguauccucuuuaagggguacgcgggagguggaggaugaaaccguccugcauaacauuccauauaugggcgacgaggugcuagaucaggacgggacauucaucgaagaacucauuaagaauuacgauggaaaaguucacggcgaccgcgagugugguuuuaucaacgaugaaauauucguggagcuggucaaugcucuugggcaguauaacgacgaugacgaugacgaugacggagacgauccggaggagcgagaagagaagcagaaagaccuggaggaucauagagacgauaaggaaucgaggcccccucggaaguuuccaucagacaaaaucuucgaggcaauuagcaguauguuucccgauaagggcacugccgaagaguugaaagaaaaguacaaagagcucaccgagcaacagcugccuggcgcgcugccacccgaaugcacaccuaauaucgacgggccaaacgcuaaguccgugcagcgugagcagucucuccacagcuuccauaccuuauuuugucgcagaugcuucaaauaugauuguuuucugcacccguuccacgccacucccaauacauacaagaggaagaacaccgaaacggcacuugacaauaaaccuugcggaccacaauguuaucagcauuuggagggugccaaggaauuugcugcagcccugacugcugagcggauuaaaacacccccuaagcgaccaggcgggcgcagaaggggacggcuacccaacaauuccucacgcccgaguaccccuacuaucaacguacucgagagcaaagauaccgacucugacagagaagccggcacagagaccgguggggaaaauaacgauaaggaggaggaagagaagaaagacgaaacguccucaagcagugaggcgaacucuaggugccagacucccauaaagaugaaaccaaauauugaaccucccgagaacguugagugguccggagcagaagccagcauguuccgugugcugaucggcacauacuacgauaauuucugugcuauugcccggcuuaucggcaccaagacuugccgacaagucuaugaguuuagagugaaagaaucgucuaucauugcaccagcucccgccgaggacguggauacaccuccaaggaagaagaaacgcaagcaccggcugugggcggcccauuguagaaaaauacaguugaagaaagggcagaacagguucccgggaugccgcugcaaggcacaguguaauaccaagcaaugccccuguuaccucgcuguccgagaaugcgacccugaucuguguuuaacgugcggugccgcugaccacugggauuccaaaaacguuucauguaagaauugcaguauccagcggggcagcaaaaagcaucugcuccuugccccauccgacguggcaggguggggaauuuuuaucaaagaucccguacagaagaacgaguucauaucugaguauuguggcgaaauuaucagccaggacgaggccgaucguagagguaaaguguacgacaaguauaugugcucauuucuguucaauuugaacaaugacuuugucguggaugcuaccaggaaggggaacaaaauccgcuucgcgaaucacaguguuaacccuaauuguuacgcaaaggugaugauggucaacggcgaccaccggauuggaaucuuugccaaaagagcuauucaaacaggcgaggaacuauucuuugauuauagguacucccaggccgacgcacugaaguacguggggauagaacgagagauggagaucccauga

SEQ ID NO: 2179 - RNA, 1005 nt, Artificial Sequence
  EAW80068 variant
augggccagaccgggaagaaaagcgagaagggacccgugugcuggagaaaaagggucaaguccgaauacaugcggcugcgccaacucaaacgauuccguagagccgacgagguuaagucuauguuuucaaguaacaggcagaagauccuugaacggacagagauucugaaucaggaauggaaacagcgcagaauacaaccugugcacaucuugacuagcguauccucuuuaagggguacgcgggaguguucggugaccucagaucuggacuucccaacacaggucauuccgcuaaagacucucaacgcuguggcaagcguucccaucauguauaguugguccccucugcagcagaauuuuaugguggaggaugaaaccguccuucauaacauuccauacaugggcgacgaggugcuggaucaagacgggacauucaucgaagaguugaucaaaaauuaugauggaaagguacacggcgaccgcgagugcgguuuuauaaacgaugaaauuuucguugagcucgugaaugcccuggggcaguacaacgacgaugacgaugacgacgauggagacgaucccgaagaacgagaagagaaacagaaggaccuggaggaucauagagacgauaaggaaucuaggccuccacggaaauuucccagcgacaagaucuucgaggcgauuuccucaauguuuccugauaaaggcaccgcugaggagcucaaggaaaaauauaaggaguuaacugagcagcaacugccaggcgcccuuccgcccgaauguacaccuaauaucgacgggccaaacgcaaaaaguguccagcgugagcagagcuugcacucuuuccauacccuguuuugccgcagauguuucaaguacgauugcuuucuacaccccuuccacgccacgccuaauacuuauaagaggaaaaacaccgaaacagcucucgacaauaagccauguggaccccaaugcuaccagcaucugccgcuucugccucggaacuga

SEQ ID NO: 2180 - RNA, 195 nt, Artificial Sequence
  CCO13726 variant
augccccuggugaacaucaugaugaugaccaugaugaugauggagacaauucucaagaaagaaaagaaaagcagaaagauauggaggaucacugagaugauuaaaaaggccgcucaccuuggcaauuuccuguugaucaaguuuuuaaaaccuuucccacagugcuuucaaauucgggcacagcagaagaacuga

SEQ ID NO: 2181 - RNA, 2241 nt, Artificial Sequence
  AAC51520 variant
augggccagaccgggaagaaaagcgagaagggacccgugugcuggagaaaaagggucaaguccgaauacaugcggcugcgccaacucaaacgauuccguagagccgacgagguuaagucuauguuuucaaguaacaggcagaagauccuugaacggacagagauucugaaucaggaauggaaacagcgcagaauacaaccugugcacaucuugacuagcguauccucuuuaagggguacgcgggaguguucggugaccucagaucuggacuucccaacacaggucauuccgcuaaagacucucaacgcuguggcaagcguucccaucauguauaguugguccccucugcagcagaauuuuaugguggaggaugaaaccguccuucauaacauuccauacaugggcgacgaggugcuggaucaagacgggacauucaucgaagaguugaucaaaaauuaugauggaaagguacacggcgaccgcgagugcgguuuuauaaacgaugaaauuuucguugagcucgugaaugcccuggggcaguacaacgacgaugacgaugacgacgauggagacgaucccgaagaacgagaagagaaacagaaggaccuggaggaucauagagacgauaaggaaucuaggccuccacggaaauuucccagcgacaagaucuucgaggcgauuuccucaauguuuccugauaaaggcaccgcugaagaacucaaggaaaaauauaaggaguuaacugagcagcaacugccaggcgcccuuccgcccgaauguacaccuaauaucgacgggccaaacgcaaaaaguguccagcgugagcagagcuugcacucuuuccauacccuguuuugccgcagauguuucaaguacgauugcuuucuacaccccuuccacgccacgccuaauacuuauaagaggaaaaacaccgaaacagcucucgacaauaagccauguggaccccaaugcuaccagcaucuggagggugcaaaagaguucgccgcugcccuuacugcggagcggauaaagaccccgccuaaacgacccggcgggcgcagaaggggacggcugccaaacaauuccucacgcccuagcacacccaccauuaacguguuggagaguaaggacacggauucugacagagaagcaggcacugagacagguggggaaaacaaugauaaggaggaggaagagaaaaaggacgaaaccuccagcucgucugaggccaacuccaggugucagacuccaaucaaaaugaagcccaauauugaaccuccagagaacguggaguggucaggagcugaagccaguauguuucguguccucaucggcacauacuaugauaauuucugcgcaaucgcucggcugauuggcaccaaaacgugucgacagguuuacgaguuuagagugaaggaaagcuccauaaucgccccggcgcccgccgaggacguagauaccccuccaaggaagaaaaagcgcaaacaccgguuaugggcagcucauugcagaaagauucaacugaaaaaggacgggucuagcaaccacguguauaauuaccagcccugcgaucacccuaggcagccaugugacucaaguugccccugugucaucgcccagaacuucugcgaaaaguuuugucaaugcuccagcgagugucagaaucgcuucccgggaugccgauguaaagcucagugcaacacaaagcaguguccuugcuaucucgccgugcgggagugcgauccagaccuuugucugacuugcggugcagccgaucauugggacucuaaaaauguuucauguaagaacugcaguauacaacguggcagcaaaaagcacuugcuacuggcucccuccgacguggcgggguggggaauuuuuaucaaagauccuguccagaagaaugaguucaucucugaguacuguggcgaaauuaucucgcaggacgaggcagauagaagggguaagguguaugacaaauacaugugcagcuuucucuucaaccugaauaacgauuuuguaguugacgccacccgcaaggggaacaaaauucgguucgcuaaucauuccgugaaccccaauuguuacgccaaggucaugauggugaacggcgaucacagaauaggaaucuuugcaaaaagggccauucagacaggcgaggaacuuuucuucgacuaucgauacucacaagcugaugcccugaaguaugucgggaucgagcgcgaaauggagaucccauga

SEQ ID NO: 2182 - RNA, 2124 nt, Artificial Sequence
  AEN79481 variant
augggccagaccgggaagaaaagcgagaagggacccgugugcuggagaaaaagggucaaguccgaauacaugcggcugcgccaacucaaacgauuccguagagccgacgagguuaagucuauguuuucaaguaacaggcagaagauccuugaacggacagagauucugaaucaggaauggaaacagcgcagaauacaaccugugcacaucuugacuagcguauccucuuuaagggguacgcgggagguggaggaugaaaccguccugcauaacauuccauauaugggcgacgaggugcuagaucaggacgggacauucaucgaagaacucauuaagaauuacgauggaaaaguucacggcgaccgcgagugugguuuuaucaacgaugaaauauucguggagcuggucaaugcucuugggcaguauaacgacgaugacgaugacgaugacggagacgauccggaagaacgagaagagaagcagaaagaccuggaggaucauagagacgauaaggaaucgaggcccccucggaaguuuccaucagacaaaaucuucgaggcaauuagcaguauguuucccgauaagggcacugccgaagaguugaaagaaaaguacaaagagcucaccgagcaacagcugccuggcgcgcugccacccgaaugcacaccuaauaucgacgggccaaacgcuaaguccgugcagcgugagcagucucuccacagcuuccauaccuuauuuugucgcagaugcuucaaauaugauuguuuucugcacccguuccacgccacucccaauacauacaagaggaagaacaccgaaacggcacuugacaauaaaccuugcggaccacaauguuaucagcauuuggagggugccaaggaauuugcugcagcccugacugcugagcggauuaaaacacccccuaagcgaccaggcgggcgcagaaggggacggcuacccaacaauuccucacgcccgaguaccccuacuaucaacguacucgagagcaaagauaccgacucugacagagaagccggcacagagaccgguggggaaaauaacgauaaggaggaggaagagaagaaagacgaaacguccucaagcagugaggcgaacucuaggugccagacucccauaaagaugaaaccaaauauugaaccucccgagaacguugagugguccggagcagaagccagcauguuccgugugcugaucggcacauacuacgauaauuucugugcuauugcccggcuuaucggcaccaagacuugccgacaagucuaugaguuuagagugaaagaaucgucuaucauugcaccagcucccgccgaggacguggauacaccuccaaggaagaagaaacgcaagcaccggcugugggcggcccauuguagaaaaauacaguugaagaaagacggguccucaaaccacgucuacaauuaucagccgugcgaucaccccaggcagccuugcgacaguagcuguccaugcguuaucgcacaaaacuucugugaaaaguuuugccaguguuccucugagugccagaaucgcuuccccggaugucgaugcaaggcucaguguaacaccaaacaaugcccuuguuaccucgccgugcgggagugcgauccagaccugugcuuaacguguggugcugccgaucauugggacagcaagaauguaucaugcaaaaacuguaguauucagcguggcuccaagaaacaucugcuccuugcacccagcgauguggccggguggggaaucuuuauaaaggacccgguccagaaaaaugaguucauuucugaguauugcggcgaaaucaucucacaggacgaggcugauagaagggguaagguguacgacaaguauauguguaguuuucuguucaacuugaauaacgauuuuguuguggacgcgacccgcaaagggaauaagauucgguucgcaaaccacagcgucaacccuaauugcuacgccaaagugaugaugguaaacggcgaucacagaaucggaauuuuugcuaagagggccauacaaacaggcgaggagcuauucuuugacuaccgauauucccaggcagaugcccugaaauacguugggaucgagcgcgaaauggagauuccauga

SEQ ID NO: 2183 - RNA, 399 nt, Artificial Sequence
  AAB87141 variant
augguggaggccuucugcgcuaccuggaagcugacaaacagccagaauuuugacgaauacaugaaagcacucggcgucggguucgccacuagacaaguuggaaacgugacgaagcccaccguaaucauuucccaggagggugauaaaguggucauaaggacacuuucuacuuuuaagaauaccgaaaucucauuccagcugggcgaggaauuugacgagacaaccgcggaugaccggaacuguaaaagugugguuagcuuggauggggacaaguuagugcacauucagaagugggauggaaaagagacuaauuucguccgcgaaaucaaggacggcaaaauggugaugacacugaccuuuggugauguaguugcugugcgacauuaugagaaggccuga

SEQ ID NO: 2184 - RNA, 765 nt, Artificial Sequence
  CAA36870 variant
auguggcagcugcuccuucccaccgcccuguuguuacuggugagcgcuggcaugagaacagaggaccuaccuaaggcagucguuuuccucgaaccacaaugguacagggugcuggagaaagauuccguaacucuuaagugccagggggccuauucuccggaagacaacucaacgcagugguuucacaaugagagucugaucagcucccaggcgucuucguacuucauugaugcugccaccguggacgauucaggagaauaucggugucaaacaaacuugagcacucucagugaccccguccagcuggaggugcauauagguuggcugcucuuacaggcaccucgcuggguuuuuaaagaggaagauccaauccaucugcgaugccacuccuggaagaauaccgcccuucacaaagugacauacuugcagaacggcaaggggcguaaguauuuccaucacaauucugacuuuuacauucccaaagcuacccugaaggauagcggauccuauuucuguagaggccuauuugguaguaaaaacgucucaagcgagacugugaauaucacaauuacccaagggcucgcaguaucuacgaucuccucauucuuuccuccaggauaccagguuagcuucugccuggugaugguccuucuguuugccguggacacuggcuuguacuucagugugaagaccaacauaaggucuuccacacgggauuggaaagaccacaaguuuaaguggcgcaaagauccccaggacaaguga

SEQ ID NO: 2185 - RNA, 873 nt, Artificial Sequence
  CCDS1232.1 variant
augggcgggggagccggugagagacuguucaccagcuccugccucgugggccuugucccccugggguugaggaucucuuuaguuacauguccucugcagugcggaauuauguggcaacuacuccugccaacugcccuucuguugcucgugucagcaggcaugcggacggaagaccugccgaaggccguaguguuucuggagccccagugguaccgcguccucgaaaaagauagugugaccuuaaagugucagggugcguauagcccugaggacaacuccacacagugguuccacaaugaaucucugauaucgucacaagcuagcaguuacuuuaucgaugccgcaacuguugacgauuccggggaguaucgaugccagaccaaccuuucuacauugagcgacccagugcagcuggagguccauauuggauggcuacuccugcaggcuccccguuggguguucaaagaagaggauccuauccaccuuagaugucauuccuggaagaauaccgcucugcacaaaguaacuuacuugcaaaacggcaagggcaggaaguauuuucaucacaauucagacuucuacauuccaaaagcaacacucaaggauagugggagcuauuuuugccggggacuguucgguucuaaaaacguuuccucagaaaccgugaauaucacgauaacucagggcuuagccgucagcaccaucaguucuuucuuucccccuggguaccagguguccuuuugucuggugaugguccuccuuuucgcuguugacacaggacuguacuuuagcgugaagacuaacauucgcucgucuaccagagauuggaaagaccacaaguucaaguggaggaaagauccacaggacaaguga

SEQ ID NO: 2186 - RNA, 807 nt, Artificial Sequence
  AAH74858 variant
augagccuguccuuccuccuucuguuguuuuucucucacuuaauccugucagccugggcucauggcgaaaagagacuagcacccaaagggcagccuggaccagccgcgaccgacaggaacccgcgggguaguagcucccgccaaucuucgucaagcgcuaugaguuccucuagcgccuccucaagucccgcagccagccucggcucucagggguccggacuggaacagagcucauuucaguggaguccuucuggccgacguacagguucccuuuacugcagaguggggauuggauuccaucugcaaauauauccagauggcaaggucaauggcagccacgaggcuaacauguugucgguucucgaaaucuuugcagugucucaggggauuguaggaaucagggguguguucuccaauaaauuucuggccaugucaaagaaaggcaagcugcacgcuagugccaaguucacugacgauuguaaauuucgggagcgcuuccaggaaaacagcuacaauacguaugcguccgcaauucauagaaccgagaagacagggagggagugguacgucgcccucaacaaacggggaaaggcuaaacgcggcugcucuccccgagugaagccucagcacaucagcacucacuuuuuaccaagauucaagcaaucagaacagcccgagcugaguuuuaccguuacagugccugagaaaaagaaaccaccgucccccauaaagccuaaaaucccacuuagcgcccccaggaagaauaccaacucugucaaauaucgguugaaguuccguuucgguuga

SEQ ID NO: 2187 - RNA, 117 nt, Artificial Sequence
  AAB06462 variant
augagcaccagaugcggcgaggccgggagggcucggggaacacagccccaccgcgguuaccgagcacaaaaccagccuuauaagaugcaucugggcccaccgcgucucgaagaguga

SEQ ID NO: 2188 - RNA, 2466 nt, Artificial Sequence
  AAA59470 variant
auggugagcuggggcagauucaucugccuggucguugugaccauggccacacucucccuugcuaggcccucuuuuucacugguagaggacacuacguuggaaccugaggaaccaccgaccaaguaccagauuagucaacccgagguguaugucgcagccccuggggaauccuuagaggugcggugucugcuaaaagaugcggcuguuauauccuggacaaaggacggagugcaccucgguccaaacaaucgcacuguccugaucggcgaguaccuucagauuaaaggggccacaccccgagauucuggacuguaugcaugcaccgccucgcguaccguggacucagaaacuugguacuucaugguaaacguuacagaugcuaucagcaguggcgacgaugaggacgauaccgacggugcagaagauuuuguguccgaaaauucuaacaauaagagagccccuuauuggacgaacacugagaaaauggaaaagagguugcaugcugucccagccgcgaauaccgugaaguuccggugucccgcagggggaaacccuaugccaacaaugcgcuggcucaaaaauggcaaggaguuuaaacaggaacacagaauuggcggguacaaggugaggaaccagcauuggagccugaucauggaguccgucguuccgucagacaaaggaaauuauacuugcgugguagaaaacgaguacgguaguauaaaucacaccuaccaucuggauguggucgagcggagcccccaccgcccuauccuccaagccggcuuaccagcuaacgccucuacagugguugggggagacguggaguucgucuguaagguguauuccgacgcacagccccacauucaguggaucaagcauguagagaaaaauggcucaaaguacgguccugaugggcugccauaucuuaaaguuuugaaggcugccggagugaacaccacggacaaagaaauugagguccuguacauccgaaacgugacuuuugaagaugcgggcgaguauacaugccuagccggcaauagcauagggauuaguuuccacucugcauggcucaccguccugcccgcuccgggaagagagaaggaaaucacugccuccccugacuaccuugagauugcuaucuauuguaucgguguguuucugauugccugcaugguugugacaguaauauuguguaggaugaaaaacaccacgaagaagcccgauuucagcucgcagccagcaguccauaaacucaccaagcggaucccucugcgucgccaagugacaguuucugccgaauccucaaguagcaugaauagcaacacucccuuagugagaauuaccacaaggcugucuagcacugcugacaccccaaugcucgcgggcgucucagaguacgaacuucccgaggauccuaaaugggaguuuccacgggacaagcugacauuggggaaaccgcuaggagaaggcugcuucggucaggugguaauggcagaggccguggggaucgauaaggacaagcccaaagaagcuguuaccgucgccgugaagaugcugaaagaugacgcaacugagaaggaccucagugaucugguguccgagauggaaaugaugaaaaugauaggcaagcacaagaauauuaucaaccuucugggagccuguacgcaggacggcccuuuguacgucaucguugaguaugcuagcaaagggaaucuccgagaauaccugcgcgccagaaggccacccggaauggaguauucuuacgauauuaaccgggugccugaggaacagaugacauuuaaggacuuagugucaugcaccuaucaacuggcacgcgguauggaguaccuagcgagucagaaaugcauccacagagaucucgcugccaggaauguacuggucacugaaaacaaugugaugaagauugcagacuucggccuugcccgugauauaaacaauaucgacuauuacaaaaagaccacaaacgggcgguugccaguuaaguggauggcucccgaggcccuguucgaucgaguguacacccaucagagcgacgucugguccuuuggagugcucaugugggaaauuuucacucugggcgguucuccguauccugggaucccaguugaggaacuuuuuaaacuguugaaggagggccacagaauggauaaacccgcaaauuguacaaacgagcucuacaugaugaugagggacugcuggcaugcugugccuucgcaacgccccacguucaagcagcugguagaagauuuagaccggauccugacccuaacuacaaacgaggaauaucucgaccugagccagccacuugagcaguacuccccuucauaucccgauaccagaaguucuuguagcuccggagacgauucagucuuuagcccagacccgaugccuuacgaacccugcuugccacaauauccccacauuaauggcucugugaaaacauga

SEQ ID NO: 2189 - RNA, 1908 nt, Artificial Sequence
  EAW74574 variant
auggcacccccucugcuccuucuguuguuagcuagcggcgcagccgcgugcccacugccgugugugugccagaaccuauccgagucucucucaacccugugugcucacagagggcuucuguucguucccccuaaugucgacaggcggacaguggaauugcgccucgccgauaacuuuauccaagcacugggaccacccgacuuccgaaauaugacuggucugguagaucucacguuaagucguaacgccauuaccagaauaggcgcuagggcauuuggggaccuggagagccuucgguccuugcaucuggauggaaaucgccuaguggaacucggcacagguucucugagagggccugucaaccuucagcaccugaucuugucgggaaaucagcucggcaggauugccccaggcgcuuucgacgauuuucuggagucauuagaagaccuggaucucagcuacaacaaucuucgccaggugcccugggccgggaucggagcgaugccugcacugcauacuuugaaccuagaccacaaucugauugaugcccucccaccgggugcuuucgcccaacugggccagcuuagucggcuggacuugaccuccaaccgacucgcaacacuggcucccgauccuuuauuuucuagagggagggacgccgaggcgagcccagcaccccugguucuauccuucucaggaaauccucuccauugcaacugugagcugcuuugguugcggcgucuggcccgcccagacgaucucgaaaccugcgcuagucccccgggccuggccgguagauauuuuugggcugugccugagggggaguucagcugugaacccccacuuaucgccaggcacacucagcggcugugggucuuggagggacagcgagcaacacuccgcugcagagcccugggcgacccugcucccaccaugcacugggugggcccagaugacagguuaguaggaaauucuucccgggcgcgcgcauuucccaacgggacgcuggaaauagguguuacuggcgccggggaugcuggaggcuacaccuguaucgccacaaacccugccggugaggccacugcuagaguggaacuaaggguccucgcccugccacaugggggcaauucaagcgcagagggaggccguccggggcccagugacauugcggcuucugcccggaccgcagccgaaggagaggguacacuugaguccgaaccugcugugcaagugaccgaggucacggccacuagcggcuugguuucgugggggccaggacgacccgcagauccuguguggauguuccagauccaguauaacucuuccgaagacgagacacugauuuacagaaucguaccagcuucaagucaccauuuucuccugaagcacuuagugcccggcgccgauuaugaccugugccuuuuggcgcucagcccggccgcugguccuuccgaucugaccgcaacuaggcuacuggggugugcccacuucucuacacucccagcuagcccccugugccaugcccuucaggcacacgucuugggcggaacccugacgguggcgguuggcgggguguuagucgccgcucuccugguguucaccguagcccuucugguucgcggacggggugcaggcaaugggagauugccucucaaacugucacaugugcaaagucagacaaacggaggccccuccccaacuccuaaggcucaucccccaaggagcccgccuccccgcccacagcgaucuugcucacuagaccugggugacgccggguguuacggcuaugcacggcgucucggaggcgccugggcuagaaggagucacagcguccacgggggacugcuuggcgcggguugccgcggggugggaggcuccgccgaacgguuggaggagucugucguguga

SEQ ID NO: 2190 - RNA, 3297 nt, Artificial Sequence
  EAW96782 variant
augcccccuagacagccaccgaggcaagccggcgggggacugagccgggaguucgguaagcuccuucccgcucugucccacucuccuuugggcggguuaggaucaggcagugguagcguggcaccagggcagggacgcgccggcgcgaugggcucccgaacccccgaaucuccucugcaugcuguccagcuacguugggggccaagaaggcggcccccucuccugccacuucuguugcuccugcugccgcccccuccacgcguuggagguuuuaaccucgacgccgaggcacccgccguguuaucgggcccuccagggucauucuuuggauucagcguagaauuuuacagacccggcacagauggugugaguguccuggugggggcuccgaaagcaaauacuucccagccuggaguucuucaaggcggcgccguguauuugugccccuggggagcuucuccaacgcaguguaccccuaucgaguucgacagcaagggguccaggcugcuagaaucaagucucucuagcuccgagggugaggaacccgucgaguacaaaucacugcagugguuuggcgccacagugcgggcgcacgggagcaguauucuugcaugcgccccacuguauucuuggcgcacugaaaaggagcccuuguccgauccuguaggaaccuguuaccucagcacagacaacuucacccgaauacuggaguaugcuccaugcagaucggauuuuucuugggccgcaggccaggguuacugucaagggggcuucuccgcugaauuuacuaaaacaggaaggguuguguuaggcgggccgggaucauauuucuggcagggucagauccugagugccacccaggagcaaauugcggaaagcuacuaccccgaguaucucaucaaucuuguccagggccagcugcaaacgcggcaggccuccucuauuuacgacgauagcuauuugggguacucaguggcagugggagaauuuaguggcgacgauacugaggacuucgucgcugguguuccuaaggggaaccuaaccuauggcuacgugacaauccugaauggauccgauauacguagccucuauaacuucucuggcgagcagauggccucauacuuuggguacgcuguagccgcaacugacgugaauggagauggucuggacgaccuucuggucggcgccccauugcucauggaucgcacccccgacgggagaccucaggaagugggaaggguuuauguguaccugcaacauccagcuggcaucgagcccacaccgaccuuaacgcugacuggucacgaugaguucgggcgguuuggcaguagccuaacaccucucggagaccuggaucaggacggcuauaacgaugucgcgauuggggcaccauucggaggcgagacccagcagggugugguauuuguuuuccccgggggaccuggcggucuuggcuccaagcccucucaaguguugcagccacugugggccgcuucgcauacuccugacuuuuucgggagcgcccuccgaggaggccgcgaucuggacgggaauggauaccccgaucuuaucgucggcuccuuugguguggacaaagcagucguguauagagggaggccaauuguuucagccagugcuucucugacaaucuucccggccauguuuaacccugaagaacggagcugcuccuuggagggaaaucccguggcauguauaaaccucucauucugccugaaugcgagcggcaagcacguagcugacucuauugguuuuaccgucgaauuacagcuggauuggcagaaacaaaagggcggggugcgcagagcccuauuccucgcauccaggcaggccacgcugacccagacacuuuugauccagaacggagcucgugaggacugucgggaaaugaaaauuuaccugcgaaaugagagugaguucagagauaagcucagcccaauccacaucgcccugaacuuuucuuuagacccccaagcaccuguugauucccauggccugaggccagcccuucacuaucagucaaagagucgcauugaagacaaagcucagauauugcucgauugcggggaggacaacaucugugugcccgaucugcaacuagaagucuucggagagcagaaucauguguaccugggcgacaagaacgcgcucaaucugacuuuucacgcccagaacguaggugaagggggagcuuacgaggcagagcuucgggugaccgccccuccggaagcugaguauagcggcuugguuagacacccagguaauuucucgucccugucuugcgauuacuuugccgucaaccagagcagguuacucgugugcgaccugggcaaucccaugaaagcaggggcgucacuuuggggaggccugcgcuucacagugccucauuugcgagauacuaagaaaaccauucaauuugacuuccagauccucaguaagaaccugaauaacucccagucugacgucguuagcuuucggcuauccguggaagcccaggcucaagugacacugaaugggguaucaaaaccagaggccguccucuuccccgugagcgauuggcacccucgugaccagccgcagaaggaagaggaucugggacccgcaguucaucacguguaugagcuuauaaaccagggcccaaguucuauuucccaaggugucuuggaacugagcuguccucaggcuuuagaggggcagcaacuccuguacgugaccagaguuacuggacuuaauugcacgacaaaccaucccaucaauccaaagggccuggaacuagacccugagggcucgcuccaccaccagcagaaaagggaagcccccucacgcucuagugcauccagcgggccacagauccugaaguguccggaggccgagugcuuucgguugagaugugaacugggaccuuuacaucaacaggagucucagagccuccagcugcacuucagggugugggcuaaaaccuuucuucaacgagaacaucagcccuucucccugcagugcgaggcgguauauaaggccuugaaaaugccauaccgcauucucccccggcagcugccucaaaaggaaagacaggucgcaacugcugugcaguggaccaaggccgaggguucauauggcgugccacuauggaucauuauacuggccauccuuuucgggcuccuguugcugggauuacucauuuacauccuguacaaacuuggcuuuuucaagaggagucugcccuaugguacagcuauggagaaagcacaguugaagccuccggccaccagcgaugcguga

SEQ ID NO: 2191 - RNA, 3597 nt, Artificial Sequence
  EAX08808 variant
auggccgagcaucccccucugcucgacaccacacagauccuuagcuccgauauuucucuguugucagcuccaauagugagugcagacggcacucaacaggucaucuuaguucaggugaacccgggggaagccuucacgauuagaagggaggauggacaguuucaaugcaucaccggucccgcgcagguaccuaugaugagcccaaauggcuccgugcccccuauuuacgucccacccggguaugcuccucaggugaucgaagacaacggaguucggcgcguggucgugguaccacaggccccggaguuccaccccggcucucacacaguucugcaucgaucgccucacccaccccuaccugguuuuauaccagugcccacuaugaugccgccucccccacgucauauguacucaccugucaccggggcaggagauaugacaacccaauauaugccccaguaccagagcagucagguguauggcgacguggaugcccacuccacucacggcagaucuaauuucagggacgaacggagcuccaagacauacgagcgccuccaaaagaagcugaaagauagacaggggacccagaaggacaaaaugucaaguccacccagcucuccucaaaaguguccauccccgaucaacgagcauaauggacuuauuaagggucagaucgcuggcgggauuaacacgggaucagcaaaaaucaagagcggcaaagguaaagggggaacucaggucgauaccgaaauagaggaaaaagacgaggagacaaaggccuuugaagcucuguugaguaauauuguuaagcccguggccucugauauccaggcgaggacuguagugcucaccugguccccuccaagcucgcugauuaacggcgagacagacgaaucuuccguccccgagcuguauggcuacgaagugcucaucucaaguaccgggaaagacggaaaguacaaaagcguuuaugugggugaggagacgaauaucacuuuaaacgaucugaagccugcaauggacuaccacgccaaaguccaagcugaauauaauuccauuaagggcacaccaucugaggccgaaauauucaccacucuuagcugcgagcccgauaucccgaacccuccacggauugcaaaucgcaccaaaaacucauugacccugcaguggaaggcucccagugacaauggguccaagauccagaacuuugugcuagaaugggaugagggaaaaggcaacggugaguucugucagugcuacauggggagccaaaagcaguuuaaaauaacgaagcucucuccugccaugggcuguaaauuccgacugucagcgagaaaugacuauggaaccaguggcuuuagcgaagagguacuuuacuauacauccgggugcgcccccucuaugccagcaucgccuguucugacuaaggcuggaauuaccugguugagccuccagugguccaagcccucagguacaccaagugaugaaggcaucucuuacauccuggagauggaagaggagacuagcggguacggauucaaaccgaaguaugacggcgaagauuuagccuacaccgugaaaaaccugaggcgguccacaaaguauaaauuuaaggucauugcuuacaauucagaggguaagagcaacccuucugaaguggucgaguucaccacuugucccgacaaaccagggauccccgugaagccuuccguuaaaggcaagauucauagucacagcuucaaaauaacgugggauccacccaaggacaauggaggcgccacaaucaacaaguaugugguagagauggcagaagggucuaauggaaacaaaugggagaugauuuacuccggugccacccgugaacaccucugcgaccgccuuaauccuggcuguuuuuauagacugagggucuacugcaucucagaugggggacagagugcugugagcgagucguugcuaguucaaacuccggcggugccacccggcccuugucugccaccccggcuccagggucgaccuaaggcaaaagaaauccagcugcgcugggggccgccccuugucgacggcggauccccaauuucuugcuacagcguggagaugucaccuauagagaaggaugaacccagagagguauaucagggcagugaaguggagugcaccguuuccucucuguugccagggaaaacauacagcuucaggcuccgggccgcuaacaagaugggauuuggcccuuucuccgaaaaaugugacaucaccacugcccccgguccaccggaucaaugcaagccuccccaggucacaugucgcucagcaacgugcgcccaggugaauugggaggugccacugagcaacgggaccgacgucacugaguauagauuagaauggggaggcguugaggguaguaugcaaauuuguuacugcggccccgggcugucuuaugaaaucaagggacuauccccugcuacaaccuacuauuguagggugcaggcccucagcgugguaggcgcagggccauuuucggaggucguggcgugcguuacacccccuucagugccgggaauugucacuugucugcaggaaaucucugaugacgagauagagaauccacauuacagucccuccacaugccuugcuaucagcugggaaaaaccuugugaucacggcucugagauuuuggccuacagcaucgacuucggugauaagcagucccugacgguggggaaaguuaccucauauauuaucaacaaucuccaacccgacacaacuuaccguauacggauucaggcacugaacagucuuggagccggcccauuuagccauaugaucaagcugaaaaccaagccuuugcccccagauccuccgcgacucgaaugcguggcuuucucucaccagaaccugaaguuaaaauggggugagggcacacccaagacucuguccaccgacucaauucaguaucaucuacaaauggaggacaaaaaugggagauuuguaagucucuacaggggaccaugccacacguauaagguccagcgccugaacgaaagcacauccuacaaauucuguauccaggccugcaaugaggcaggcgaagggccucuuucucaggaguauauauuuaccacucccaagucggugccagcugccuugaaggcgccuaaaaucgaaaaggugaacgaucacauuugugagaucacaugggagugccugcaacccaugaaaggagacccggucauuuacagccuccagguuaugcugggcaaggauucagaguucaaacagaucuacaaggguccagacuccaguuuucgguauucuagcuuacaacugaauugugaauacagauucagggugugcgccauacgccagugucaggauucccuugggcaucaggacuugguaggaccuuauucaaccacuguccucuucauuucucaacgaaccgaacccccagcuagcacaaaccgggauacgguggagaguacccguacuagaagggcacuguccgacgaacagugcgccgcugugauccuaguucuguuugccuucuuuagcauccucauugcauucaucauucaguacuuugugauaaaguga

SEQ ID NO: 2192 - RNA, 3429 nt, Artificial Sequence
  EAX08809 variant
augagcggccccgcccaggugccuaugauguccccaaacgggucugucccgcccaucuacguuccuccaggauaugcuccccaagugauugaggacaaugguguaagaaggguggucgugguuccucaggcaccagaguuccaccccggcucacauaccgugcugcaccggaguccucauccaccgcuccccggguuuauaccugucccaacaaugaugcccccuccaccccgccacauguacagcccggugacuggagccggcgauaugacgacccaguauaugccucaguaccaauccucucagguauauggugacguugaugcgcauucgacacacgggcgaucaaacuuccgugacgaaagaagcaguaagacuuacgaaaggcuucagaaaaagcugaaagaucggcagggaacccaaaaggacaaaauguccucucccccaagcuccccucagaagugccccucaccaaucaaugagcacaacggcuugauuaagggccagaucgcugggggaauuaauacagguagugccaaaaucaagagcggcaaagggaagggaggcacccagguggauacugaaauagaggagaaagacgaagagacaaaggcauuugaagccuuacugucuaacaucgucaagcccguggcuuccgauauucaagcacgcaccgugguccuaacguggucaccuccaagcagucucaucaauggugagacugacgagucuuccguuccggaacuguauggguacgaggugcuuauuagcucgaccggaaaagauggcaaguacaaaucuguauaugugggcgaagagacaaacaucacucugaaugacuugaagcccgccauggauuaccaugcuaaaguccaggccgaauauaacuccauaaaggggaccccuucagaggcggagauuuucacaacccucaguugugaaccagacauccccaauccuccaagaauugcaaacaggacgaaaaauagccugacucugcaguggaaggcccccuccgacaacggaucuaagauccaaaauuuugugcucgagugggaugaagguaaaggcaacggggaguucugccaguguuacaugggaagccagaagcaguuuaaaaucacaaaguuaucaccggcuaugggcugcaaauuccggcugagugcccgcaacgacuaugguaccuccggguuuagcgaagagguucuuuacuauacuucuggcugugcaccuucaaugccagcuagucccguguugacaaaggccggaauuaccuggcugagccuacaaugguccaagccuucuggcacgcccucggaugaggggauaagcuacauccucgaaauggaggaagagaccuccggauacgguuucaaaccaaaguaugacggcgaagaucuggcguacacagucaaaaaucuucgaagaucaacuaaguauaaauuuaaggugauugccuacaacagugaggggaagucuaauccuagcgagguaguugaguucaccacaugccccgacaaaccaggaaucccggugaagccuuccgucaaaggcaagauacacucacauagcuuuaaaauuacuugggaucccccaaaggacaacgguggggcaaccaucaauaaguauguggucgaaauggcugaaggcucuaacggaaauaaaugggagaugaucuacuccggcgccacaagggagcaccugugugaucgguugaaccccgggugcuucuaucgucuccgcguguacuguauuagugacggaggucagagcgcuguuucugaaucccuguuagugcagaccccugccguaccacccggcccuugccugccgccaagacuccaggggaggcccaaggcaaaagagauccaacuucgguggggaccuccacuggucgauggcgguucacccauuaguuguuacagcguggaaaugucgccuauagagaaggacgaaccgcgagagguuuaucagggguccgagguggaaugcacugucucuagcuugcuacccggcaaaacguacucauuccgccugagagccgcuaauaagaugggauuuggcccauucagugagaaaugcgacaucacaaccgcgccugggcccccagaucaguguaagccuccccaggugacuugcagguccgcaaccugugcccaaguaaacugggaagugccacucucuaauggaacagacguuaccgaguaucggcuggaauggggcggugucgaggggagcaugcagauuugcuacuguggaccgggccuuuccuaugagaucaagggucugagcccugcuacuacauacuauugccgcgugcaggccuugucaguggucggcgcagggcccuuuagugaaguuguggccugugugacgccacccucuguaccuggaaucgugaccugccuccaggagauuuccgaugacgaaauagagaacccacacuacagccccucgacuugucuggcuaucucaugggaaaaaccuugcgaucauggcucugagauuuuagccuacaguaucgacuucggggauaagcaaucccugacagucggaaaaguuaccagcuauauuaucaauaaccuacagccggacacaacuuacagaauaaggauccaggcacucaauucucugggcgcggguccauuuagccacaugauuaagcugaaaaccaagcccuugccucccgauccaccucgucuggaguguguggcuuucucccaucaaaaccucaagcugaaauggggagaagggacgcccaagacccuuucaacagacaguauccaguaucaccuucagauggaggauaaaaacggccgguuugucagcuuguaccgagguccaugccauacuuauaaggugcagagacucaaugaaucuaccuccuacaaauucugcauucaagccuguaacgaggcaggcgaggggccucugucacaggaauauaucuuuacaacuccgaagaguguucccgccgcuuuaaaggccccaaaaauagagaaggugaaugaccacauuugcgaaaucaccugggagugucugcagccuaugaaaggagaucccguaauuuacagccuacaggucaugcucggcaaggacuccgaguucaaacaaaucuacaaggggccagacucuucguuuagguauagcucacugcagcuuaacugcgaauaccgcuuccgggugugugcaauaagacagugccaggauuccuugggacaccaagaccuggugggcccuuauaguacgacaguccucuuuaucucucagaggaccgagcccccggcuagcacuaaucgcgauacaguugaauccacccgaacucggcgugcccugucagacgagcagugugcggccgugauuuuaguacuguucgcuuucuuuucuauccuuauugcauucaucauacaauacuuugugauuaaguga

SEQ ID NO: 2193 - RNA, 1020 nt, Artificial Sequence
  EAW49214 variant
augcccccuagcaagccacacccgcccguggucggcaaaguuacccaucacuccaucgagcuguacugggaccucgaaaagaaagccaagagacaggggccucaagagcagugguucagguuuucuauugaagaggaagauccaaaaaugcauacauauggaauaaucuacacugguuaugcuacgaagcacgugguagagggccuugagccccggacccuguaccgcuuccgauugaaggugacaucaccuaguggggaaugcgaguauagcccauuagucuccgugucuacuacccgugaacccauuucgucagagcaucugcacagagcaguuagcgugaacgacgaggaucuacucgucaggauccugcagggaggccgggugaaaguagacguuccuaauaaguuugguuucacagcccuuaugguggcggcucagaaaggguacacccgccuggucaagauuuuggugaguaacggaacugaugugaaucucaaaaacggcuccggcaaggacucucugaugcuggccuguuaugcagggcaccucgaugucguuaaguacuuaagaaggcauggagccagcuggcaagcucgggaccuggguggcugcacagcacuucacugggccgcugaugggggacauuguuccgugaucgaauggaugauaaaagacggcugcgagguagauguggucgacaccgguucaggguggacgccauugaugcgcgugagugccguuagcggaaaucagcgaguggcgucucugcuaaucgaugcaggcgccaacgucaaugugaaggacagaaacggcaaaacuccgcucaugguagcuguucugaauaaccacgaggaacuugugcagcuguugcucgacaagggggccgaugcauccgucaaaaaugaauuuggaaagggugugcuggagauggcuagggucuucgaccggcagucagugguuagcuuacuggaggaacguaaaaagaagcaacgccccaaaaagaguugugugugcuga

SEQ ID NO: 2194 - RNA, 3150 nt, Artificial Sequence
  BAF84259 variant
augggcagcagaacccccgaguccccucugcacgccgugcagcucaggugggggccacggcgccgaccgccccuucugccuuuguuacugcuacuccugccacccccuccacgugucggagguuucaaccuugacgcugaagcacccgccguucugucuggcccuccagggucauuuuucggauuuaguguggaguucuacagaccgggcacagaugguguaagcguguuggucggggcgcccaaggcuaauacuucccaaccuggagugcuccagggcggcgccguuuaucugugcccauggggagcaucucccacgcaguguaccccuaucgaauuugacucgaaaggaucaaggcugcucgagagcaguuuauccucuagcgaaggugaggagccaguggaauacaagucccugcagugguucggcgccacaguccgggcucaugggucaaguauucuugcaugcgcccccuuguauagcuggcgcacugagaaagaaccgcugucugauccugugggaaccuguuaccuauccacagacaacuuuaccagaauacucgaguaugcucccugcaggucagauuucagcugggccgcgggccaagguuacugucaagggggauuuagugcagaguucacuaagacaggccggguaguucugggcgggccaggaucuuauuuuuggcagggucagauccuuuccgccacccaggaacagauugcugagagcuacuacccugaauaucugaucaauuuggugcagggccagcuccaaacgcgccaggccucgucuauuuacgacgauuccuaucugggguacucagucgcagugggagaguucaguggcgacgauacugaagacuuuguggcugguguccccaaagggaacuuaaccuauggcuacguuacaauccugaauggaagcgauauacgaucccucuauaacuucucuggcgagcagauggccagcuacuucgcguacgccguggcagcuacugacguaaauggggauggacuugacgaccuguuggugggugccccacuacugauggauagaacccccgacggcaggccucaagaggucgggcggguguauguuuaccuccagcacccagcuggaaucgaaucaacaccgacccugacgcuuacuggccaugaugaguuuggucguuucgggaguucccugacacccuugggcgaccucgaucaggacggauauaacgauguggccauuggcgcaccuuuugggggagaaacccagcaaggugucguguucguauuuccaggcgggcccggaggccuggguagcaagccuucucagguuuuacagccacugugggccgcuucacacacucccgacuucuuugggagugcgcuacgcggcggaagagaucucgacggcaauggguacccggaucugaucguggggagcuucggcgucgacaaggcaguggucuauaggggucggccuauuguguccgccucugcuucgcuuacaaucuuuccagccauguucaaccccgaggaacgaagcugcuccuuggaggggaauccuguugcauguauaaaccugucauuuugccucaaugccaguggaaaacauguggcugacucuauuggcuucaccguagagcugcagcuugauuggcaaaagcagaaagguggcguccgcagagcccuguuuuuggcaagcaggcaggcgacgcucacccagacacuguuaauccaaaacggggcucgggaagacugucgcgagaugaagauuuaccugagaaaugaauccgaguucagggauaaacuaucacccauccacaucgcccucaacuucagccuggacccacaggcaccuguggauucucacggacuucgucccgccuugcauuaucaguccaagagucggauugaagacaaggcucagauacugcucggcugcggggaggauaacaucuguguuccagaccugcaauuagagguguuuggagaacagaaucacgucuaccugggcgauaaaaacgcccuuaauuugacuuuccaugcacagaacgugggugaagggggagcuuacgaggccgagcuccgaguaaccgcgccgccugaggccgaauauagcggccuggugagacaccccgguaauuuuucuucccuaucaugcgacuacuucgcuguuaaccaaaguaggcugcucgucugcgaucugggcaauccaaugaaggcaggggccagccuuuggggaggcuugcgcuuuacagugccccacuugcgggacacuaaaaagaccauucaguucgauuuucagaucuuaucgaaaaaccucaauaacucccagucugacguggucagcuucagacugucaguugaggcucaagcccaggugacacuuaauggggugaguaagccugaagcaguacuguuuccagucuccgacuggcaucccagggaucagccucaggaggaagaggacuugggaccggcggugcaccauguuuaugagcucauaaaccaaggcccaucuagcauuucccagggugugcuggaacuaucauguccccaggcccuggaggggcagcaacuccuguacgucacccgcgugacuggacuuaauugcacgacaaaccacccuaucaauccaaaaggcuuggaacuggaucccgaggguagcuuacaucaccagcagaagcgagaagcuccuagucggucuuccgccagcucgggcccgcaaauccucaagugucccgaggcagagugcuuccgucugagaugugaacuugggccacugcaccagcaggagucacagucucuacaacuccauuuuaggguuugggcuaaaaccuuccugcagcgcgaacaccagccuuuuaguuugcagugcgaggccguguauaaggcacugaaaaugcccuaccggauuuuaccaagacaacucccucagaaggaaaggcagguagccacugcuguccaguggaccaaagcggagggauccuauggcgugccccuguggaucauuauacuugccauccuguucggguugcuccugcuaggacugcuuauuuacauccucuacaagcugggcuucuuuaagcgaagccugccauaugguacagcaauggagaaagcucaacugaagccgccugccaccucugacgccuga

SEQ ID NO: 2195 - RNA, 3150 nt, Artificial Sequence
  BAG35324 variant
augggcagcagaacccccgaguccccucugcacgccgugcagcucaggugggggccacggcgccgaccgccccuucugccuuuguuacugcuacuccugccacccccuccacgugucggagguuucaaccuugacgcugaagcacccgccguucugucuggcccuccagggucauuuuucggauuuaguguggaguucuacagaccgggcacagaugguguaagcguguuggucggggcgcccaaggcuaauacuucccaaccuggagugcuccagggcggcgccguuuaucugugcccauggggagcaucucccacgcaguguaccccuaucgaauuugacucgaaagggucaaggcugcucgagagcaguuuauccucuagcgaaggugaggagccaguggaauacaagucccugcagugguucggcgccacaguccgggcucaugggucaaguauucuugcaugcgcccccuuguauagcuggcgcacugagaaagaaccgcugucugauccugugggaaccuguuaccuauccacagacaacuuuaccagaauacucgaguaugcucccugcaggucagauuucagcugggccgcgggccaagguuacugucaagggggauuuagugcagaguucacuaagacaggccggguaguucugggcgggccaggaucuuauuuuuggcagggucagauccuuuccgccacccaggaacagauugcugagagcuacuacccugaauaucugaucaauuuggugcagggccagcuccaaacgcgccaggccucgucuauuuacgacgauuccuaucugggguacucagucgcagugggagaguucaguggcgacgauacugaagacuuuguggcugguguccccaaagggaacuuaaccuauggcuacguuacaauccugaauggaagcgauauacgaucccucuauaacuucucuggcgagcagauggccagcuacuucggguacgcgguggccgcaacugacguaaauggagauggucuugacgaccuguuggugggcgcuccacuacugauggauagaacccccgacgggaggccucaaggagucggccggguguauguuuaccuccagcacccagccgguaucgagccgacacccacccugacgcuuacugggcaugaugaauuuggccguuucggaucaagucugacaccuuugggcgaccucgaucaggacggguauaacgauguggcuauuggagccccauuugguggcgagacccagcaaggggucguguucguauuucccggaggcccuggugggcugggcuccaaguuaagccagguucugcagccacuaugggcagccucucacacucccgacuucuuuggaucagcucuccgcggcgggagagaucuggacggaaauggcuacccggaucuuaucguggguaguuucggggucgacaaggcgguggucuauaggggacggccuauugugagcgcauccgccucuuugacaaucuuuccagcuauguucaaccccgaagaacgaucgugcagccuggaaggcaauccuguugccuguauaaaccucuccuuuugccugaaugcaucagguaaacauguggccgacaguauuggcuucaccguagagcuucagcuggauuggcaaaagcagaaagggggaguccgcagagcuuuguuucucgccucuaggcaggcaacgcugacccagacauuacugauccaaaacggcgcgcgggaggacugucgcgaaaugaagauuuaccuaagaaaugagagcgaguucagggauaaacucucccccauccacaucgcucugaacuucucacuugacccacaggccccuguggauagccacggguugcgucccgcacugcauuaucagucuaagucccggauugaggacaaggcccagauacuccuggauugcggagaagacaacaucuguguuccagauuuacaacuggagguguuuggcgagcagaaucacgucuaccuuggugacaaaaacgcuuugaaucucacuuuccaugcccagaacgugggggaaggaggcgcauacgaggcugaacugcgaguaaccgccccgccugaggcggaguauaguggucuagugagacaccccggcaauuuuagcucucuguccugcgauuacuucgccguuaaccaaucaaggcuccuggucugcgaccuugggaauccaaugaaggcuggagcaaguuuguggggcgggcugcgcuuuacagugccccacuuacgggauacuaaaaagaccauucaguucgacuuucagauccucagcaaaaaccugaauaacucgcaguccgacguggucucuuucagacuuagcguugaagcccaagcucaggugacacugaauggagugucaaagccugaggccguauuguuuccagucagugauuggcaucccagggaccagccucagaaagaagaggaucucggcccggcagugcaccauguuuaugaacugauaaaccaagguccauccucuauuagccagggggugcuagagcuguccuguccccaggcgcucgagggacagcaacugcuuuacgucacccgcgugacuggcuugaauugcacgacaaaccacccuaucaauccaaagggucuggaauuagaccccgagggcucacuccaucaccagcagaagcgagaagccccuagccggaguucugcuuccagcgggccgcaaauccugaaaugucccgaggccgaaugcuuccgucuuagaugugagcugggaccacuacaccagcaggagucgcagucacuccaacugcauuuuaggguuugggcaaagaccuucuugcagcgcgaacaccagccuuuuucucugcagugcgaggcuguguauaaagccuuaaagaugcccuaccggauucucccaagacaacugccucagaaagaaaggcagguagcaacugccguccaguggaccaaggcugagggcaguuauggggugccccuuuggaucauuauacuggcgaucuuguucggacuccugcuacugggccuucucauuuacauccuguacaaguuggguuucuuuaaacgaucccugccauaugggacagccauggaaaaggcacaauuaaaaccgccugcuaccagcgaugccuga

SEQ ID NO: 2196 - RNA, 1401 nt, Artificial Sequence
  BAG54537 variant
augcugagccucagacagaggaugaugcacgcccgguuccgcaacccccuuucccgacaaccugcucguccaucuuacagacagggcuauaaugggaggccgaacguggagggaaagguccugcccgguucaaauggcaaaccuaacgggcagcggaucauuaauggaccacagggcaccaaguggguuguggacuuggaucgcgguuuaguacugaacgcagaagggagauaccuacaagacagucauggaaauccccucaggauaaaacugggcggcgaugggcggacaaucguggaccuugagggaacuccugucgugagcccagauggucugcccuuguuuggccaggggcgccacggaacgccucucgccaacgcgcaggacaagccaauucugucccugggcgguaaaccgcucguuggguuagaagugaucaagaagaccacacaucccccuacuaccacaaugcagccaaccacuacaaccacgccccugccuacuaccacaacuccacgacccaccacagcuaccacgagaaggacuacaacccggcguccgacuacaaccguccgcacgaccacaagaacuaccacaacuaccacaccuaaacccaccacuccaauuccuacgugucccccaggaacacuugagaggcacgaugacgauggcaauuugaucaugucuucgaacggcauacccgaaugcuaugccgaggaggacgaguucucagggcuggaaaccgauacugcagugccuaccgaagaggccuacguaaucuaugacgaggauuacgaauuugagacaagccggccaccgaccacuacagaacccaguacgaccgcuacuacaccucgaguuauuccagaggaaggagcaaucuccucuuuccccgaggaggaauuugaccuagccggucgcaagagauucguggcuccuuaugucaccuaccucaauaaagacccaagcgcccccugcucccugacagaugcgcuugaccauuuucaaguggauucacuggacgagauuaucccgaacgauuugaagaaaagugaccucccuccacagcacgcacccaggaauauaacuguggucgccguugaaggcugucacagcuucgugauuguagauugggacaaggcuaccccuggggauguggucacgggauaccugguguauucugccuccuacgaggacuuuauccggaacaaguggucaacccaggcaagcaguguuacacauuuacccauugaaaaucugaaaccaaacacucgcuauuacuucaaggugcaggcucaaaacccucacggcuauggucccaucucuccauccgucagcuuugugaccgagucggauaauccgcuccuuguaguuagaccucccgggggcgagccaaucuga

SEQ ID NO: 2197 - RNA, 471 nt, Artificial Sequence
  BAG58437 variant
auggaggaacagagaaacgaggaaauccagagcuucauuuacucccugaagcaaaugcuccuuaauguggaggccaacucugcuaaaguccaggaagaccuggaggcagaguuucagucauuguucaguuuacuggaggaacuaaaggaaggcaugcucaugaaaauaaagcaagauagggccagccggaccuaugagcugcagaaucagcuugcggcuugcacacgcgcccuggaguccucugaagaguugcucgaaacugcaaaccagacgcugcaagccauggacucggaggauuuuccccaggcugcaaaacagaucaaggacgggguuaccauggccccugcuuuccgacugucacucaaggccaaagugagcgauaauaugagucacuuaaugguagacuuugcgcaggaacgucaaaugcugcaggcacuuaaguucuugccaggagagagagguacacauuga

SEQ ID NO: 2198 - RNA, 921 nt, Artificial Sequence
  BAH14721 variant
augaucuucgaggaacacggcuuuagaaggaccacacccccuacuacggccaccccaauucggcaucgcccgcgacccuacccuccaaacguggggcaggaggcucugagccaaacaacuauauccugggcacccuuccaggacaccucugaauauaucauuucaugccacccugucggaacagaugaggaaccacuccaguuucguguucccgguaccaguacuagcgccacacuuaccggccugacgagaggggcgacuuacaauaucauuguggaggcuuugaaggaccagcaaaggcauaaaguacgggaggaaguggucaccgugggaaacuccguuaaugagggcuuaaaccagccuacagaugacucuuguuucgauccauauacugugucgcacuacgccgucggugacgaaugggagcgcaugucagagagcggguuuaagcugcuaugccagugucucggauucggcaguggccauuuuagaugcgauuccucuagguggugucacgacaauggggugaacuauaaaaucggagaaaagugggaucggcagggugagaauggccaaaugaugagcugcaccugucuggggaacggaaaaggcgaguucaagugcgacccgcacgaagcaacauguuacgaugacgguaagaccuaucauguaggggaacaguggcagaaagaguaccuuggagccauaugcuccuguacgugcuuuggcggccagcgcggguggcgaugcgauaauuguagaaggcccggaggugagccuucaccagaaggcacuacagggcaaaguuacaaccaguauagccagcgguaccaccaacguaccaauacuaacguuaauugccccaucgaguguuucaugccucuggacgugcaggcugaccgcgaagauucuagagaguga

SEQ ID NO: 2199 - RNA, 1920 nt, Artificial Sequence
  BAG61560 variant
auggagaagauccuguucuaccucuuucuuauuggcauagccgugaaagcucagaucugccccaagagaugugucugccaaauucugagcccuaacuuggcaaccuuaugugccaaaaaggggcugcuauucguuccaccgaauaucgacaggcggacaguggaacuccgccuggcggauaacuuuguaacuaauauuaaacgaaaggacuucgcuaacaugacgucccuuguggaucugaccuugucucguaauacaaucucauuuauaacuccccacgccuucgcagaccucagaaaccugaggagucugcaucucaauagcaaccgguuaaccaagaucacaaaugauauguuuuccggacugucuaaccuucaccauuugauucugaauaacaaucagcuaacccucaucucgucaacugccuucgacgaugucuuugcucuggaggaacuugaccugagcuauaacaauuuggagacaauuccuugggaugcaguggaaaagaugguuagucuccacacccuguccuuagaccauaacaugaucgauaacauaccaaaggguacguucucucaccuucacaaaaugacucgccucgacgugaccagcaauaagcugcagaaacugcccccugauccauuguuucagagagcccaaguccuagcuacauccggcauuaucucacccaguacuuucgcccugagcuuugggggaaacccucuccauugcaauugugagcugcuuuggcugaggcgguugucucgcgaguacgaccucgaaaccugcgcguccccaccgcuguuaacaggccgauauuucuggucaauucccgaggaagaguuccugugugagccuccacuaaucaccagacacacgcaugaaaugagggugcucgagggucagcgggcaacucugcguugcaaggcccgcggggaccccgaaccugcuauccacuggauuagcccagagggaaaacuuauaaguaacgccacaagaucuuugguauacgauaauggcacccuggacauccucauuacuacaguuaaagauaccggcgcauuuacguguaucgcuuccaaccccgccggggaagcgacccagauaguggaccugcacauuaucaaacuuccgcaucuguugaauagcacaaaccacauccaugagccugaucccggaucgucugacauuuccacuucaaccaagagugguagcaauacauccucuagcaacgauggcaucacuucacucaccgccacaagggucguggggugcauucaguucaccacugagcaagacuaugugcggugucacuuuaugcagagucaguuccugggaggcacgaugauaaucauuaucggugggaucauugucgcauccguuuuaguguuuauaaucauucugaugauccgauacaagguaugcaauaacaauggacagcauaaagugacaaaggucagcaacguguauucucaaaccaauggcgcucagauucagggcugcucaguuacucuaccacaaagugugagcaaacaggccgucgggcacgaagagaacgcucaguguugcaaggccaccuccgauaacgugauccagucuucggaaacauguagcucccaagacucagcaaccacuacaagugcccucccucccucuuggacgagcuccaccucaguaagccagaagcagaaacgcaagacuggaacaaaaccaucuaccgagccccagaaugaagcuguuacaaacguggagucccaaaauacuaacagaaauaacaguaccgcgcugcagcuugcaagcaggccuccagauucugucacggaggguccgaccuccaagcgggcccacauaaaacccaaugcuuugcugacaaacguggaccagaucguccaggaaacucaacgccucgagcugauuuga

SEQ ID NO: 2200 - RNA, 1014 nt, Artificial Sequence
  BAG61984 variant
augaucuucgaggaacacggcuuuagaaggaccacacccccuacuacggccaccccaauucggcaucgcccgcgacccuacccuccaaacgugggggaggaaauacagaucggacacauuccccgugaggacgucgauuaucaucuguacccucacgguccaggccucaaucccaacgcuagcacagggcaagaagcacuuucccagacuaccaucucuugggccccuuuccaggacacaucagaguauauuaucaguugccauccaguuggaaccgaugaggaaccgcugcaguuuagagugcccggcacuagcacauccgcgaccuugacggguuuaacuaggggagcuaccuacaauauaaucguagaggcccugaaggaccaacagcggcacaaagugcgcgaagaggucgugacaguugggaacucugugaaugagggccuaaaccagccuacugaugacucguguuucgauccauauaccgucucacacuacgcagugggcgacgaaugggagagaaugagcgaaaguggguuuaagcuccugugccagugucuuggauucgguuccggccauuuuaggugcgauucuagccgguggugucacgacaaugggguaaacuauaaaauuggagagaagugggaucgccaaggcgaaaauggucagaugauguccugcacaugucuggggaacggaaaaggcgaguucaagugcgacccccaugaggccaccuguuacgaugacggcaagacguaccacguuggggaacaguggcagaaagaguauuugggagcuaucugcucauguacuugcuuugguggccaacgaggguggagaugcgacaauuguaggcggccuggaggcgaaccaagucccgaggguacaaccgggcagagcuacaaccaguauucucaacguuaccaccagcgcacuaauacaaacgugaauugcccgauugaauguuucaugccucucgauguccaggcagacagagaggauuccagggaguga

SEQ ID NO: 2201 - RNA, 3045 nt, Artificial Sequence
  BAG62013 variant
augagagugaccugggccccgccuccaagcaucgaccugacaaacuuccucgucagguacuccccgguuaagaaugaggaagauguggcugagcuuucuauuucacccagugacaacgcaguagugcugacuaauuuguuaccuggcacggaauaugucgugagcguuuccucuguguacgagcagcacgaaucgaccccacugcgggggcgccagaaaacaggacuagauucacccacugguauagacuuuagcgauaucaccggcaacaguuucacaguccauuggauugccccucgagcgaccaucacuggguaucguauuagacaccauccagagcacuuuuccggaaggccccgggaggaccgcgugccucauucuagaaauagcaucacacucaccaaccugacgccaggcacugaauacguaguuuccauaguggcucuuaaugguagggaggaaucaccgcuguugaucgggcagcagaguaccgucagcgaugugccccgggaccucgagguggucgccgcaacaccuacuucucugcugauuuccugggaugccccagcuguuaccgugcgcuauuaccgaaucacauauggagagaccggcggcaacucacccguacaggaguucacggugccugggagcaagaguacugcaacaauuucuggacucaaaccaggugucgacuacaccaucacuguguacgccguuacaggcagaggggauucccccgcuagcucgaagccgauaucuauuaauuauaggaccgaaaucgacaaaccuucccaaaugcaagugacggauguccaggacaacucaauuagugugaagugguuacccagcuccucuccaguaaccggauaccggguuacaacuaccccuaagaauggccccgguccaacaaaaacuaagaccgccgggcccgaccagacagaaaugaccaucgagggacugcaaccuacuguggaauaugucgugagcgucuacgcgcagaacccaucaggcgagagucagccgcuugugcagacggcaguuacaaccauccccgccccuacugauuugaaauuuacccaagugacaccaaccucccugagcgcucaguggacucccccuaauguacagcuaacaggcuaucguguccgcgugacgccaaaggagaaaaccgggcccaugaaggaaauuaaccucgccccggacucuucaaguguuguggucagcggacugaugguggcaacuaaguacgagguauccguguaugcucuuaaagauacacugaccucuagaccugcccaagguguugucacaacuuuggaaaaugugucgccacccaggcgggcgcgagugaccgacgccacggagaccacaauaacuaucagcuggcgcaccaagacagaaacuauuaccggcuuccaggucgaugcaguuccugcuaacgggcagacgcccauccagagaacaauaaaaccagacgugagguccuacaccauuacuggacuccaaccuggcacagauuacaagaucuaucuguacaccuuaaacgacaaugcccggucaagucccgugguaaucgaugcuucuacugccauugacgcaccaagcaaccugcgcuuucucgccaccacacccaauucccuucuggucucauggcagccucccagagcuaggaucacggguuauauuauaaaauacgagaagccagggucucccccucgugaggugguuccacggccccgaccuggcgugaccgaagcgacuaucacaggauuggagccgggcaccgaauauacaauuuacgucaucgcacuaaagaacaaucagaaaagcgagccacugaucgggagaaagaaaacugaugaacucccccagcuggugacccuuccucacccaaaccugcacggacccgagauuuuggacguuccuuccacggugcaaaagacaccguucguaacccaucccgguuaugacacuggcaaugggauacagcucccaggaaccaguggccagcagccuagcgucggucaacagaugaucuuugaggaacacggguucaggcgcacaacucccccaaccacagccacgccuauucggcauagacccaggccauacccgccuaacgugggcgaggaaauccagauuggacacaucccccgcgaggauguggacuaccaccuguauccacauggccccggguuaaauccuaacgcuucuaccggacaggaggcccugucccaaacuacaauaucaugggcaccauuucaggauaccagugaauacaucauuagcugccaccccgucgguacugacgaggaaccucuacaguuccgaguuccgggcacaucgaccuccgccacgcucacugggcugacccggggagcuacauauaauaucauuguggaggcccuuaaagaucaacagcgucauaagguaagagaagagguggucaccgugggcaacucuguuaaugaggguuugaaccagccaacugacgauagcuguuuugaccccuacacagugucacacuaugcagucggggaugaaugggagaggaugagugaauccggcuucaaacugcucugccagugucugggauucggcucugggcauuuucgcugcgacagcucccgguggugucacgauaauggagugaacuacaagaucggcgagaagugggacagacaaggugaaaacgggcagaugaugucaugcaccugucuuggaaauggcaaaggugaguucaagugcgauccucacgaggcgacauguuaugacgacggcaaaacuuaccauguuggggaacaguggcagaaggaguaccugggagcuauaugcagcuguaccugcuuuggcgggcaaaggggauggcgaugcgauaacugucgccggcccggcggugaaccaaguccugaggggacgacaggacagucuuauaaucaguacucccagagauaucaccaaaggaccaacacuaaugugaacugccccauugaauguuucaugccauuggacguccaggccgaucgugaggacagccgcgaguga

SEQ ID NO: 2202 - RNA, 2685 nt, Artificial Sequence
  BAG62178 variant
augagagugaccugggccccgccuccaagcaucgaccugacaaacuuccucgucagguacuccccgguuaagaaugaggaagauguggcugagcuuucuauuucacccagugacaacgcaguagugcugacuaauuuguuaccuggcacggaauaugucgugagcguuuccucuguguacgagcagcacgaaucgaccccacugcgggggcgccagaaaacaggacuagauucacccacugguauagacuuuagcgauaucaccgccaacaguuucacaguccauuggauugcgccucgagcuaccaucacuggcuaucguauuagacaccauccagagcacuuuuccgggaggccccgggaggaccgcgugccucauucuagaaauagcaucacacucaccaaccugacgccaggaacugaauacguaguuuccauaguggcccuuaauggcagggaggaaucaccgcuguugaucggucagcagaguaccgucagcgaugugccccgggaccucgagguggucgcagccacaccuacuucucugcugauuuccugggaugcuccagcaguuaccgugcgcuauuaccgaaucacauauggggagaccggaggcaacucacccguacaggaguucacggugccuggcagcaagaguacugccacaauuucugggcucaaaccaggagucgacuacaccaucacuguguacgcuguuacagguagaggcgauucccccgccagcucgaagccgauaucuauuaauuauaggaccgaaaucgacaaaccuucccaaaugcaagugacggauguccaggacaacucaauuagugugaagugguuacccagcuccucuccaguaaccggguaccggguuacaacuaccccuaagaauggacccggcccaacaaaaacuaagaccgcgggucccgaccagacagaaaugaccaucgaggggcugcacccuacuguggaauaugucgugagcgucuacgcacaaaacccaucaggagagagucagccgcuugugcagacggccguuacaaccauccccgcuccuacugauuugaaauuuacccaggugacaccaaccucccugagcgcccaauggacucccccuaauguacagcuaacaggcuaucguguccgcgugacgccaaaggagaaaaccggccccaugaaggaaauuaaccucgcaccggacucuucaaguguuguggucagcgggcugaugguggcuacuaaguacgagguauccguguaugcccuuaaagauacacugaccucuagaccugcgcagggaguugucacaacuuuggaaaaugugucgccacccaggcgggcccgagugaccgacgcaacggagaccacaauaacuaucagcuggcgcaccaagacagaaacuauuaccgguuuccaagucgaugcuguuccugccaacggccagacgcccauccagagaacaauaaaaccagacgugagguccuacaccauuacugggcuccagccuggaacagauuacaagaucuaucuguacaccuuaaacgacaaugcucggucaagucccgugguaaucgaugccucuacugcaauugacgccccaagcaaccugcgcuuucucgcuaccacacccaauucccuucuggucucauggcaaccucccagagcgaggaucacgggcuauauuauaaaauacgagaagccagguucucccccucgugaggugguuccacggccccgaccuggggugaccgaagcaacuaucacaggcuuggagccgggaaccgaauauacaauuuacgucaucgcccuaaagaacaaucagaaaagcgagccacugaucggcagaaagaaaacugggcaggaagcucucucccagaccacgauuaguugggcccccuuccaagauacaagcgaguauauaaucucuugccacccugugggaaccgacgaggaaccacugcaguuuaggguucccgguacuuccaccucagcaacacuuacuggccugacccgcggggccacauacaacauuaucguggaggcuuugaaggaccagcagcggcauaaaguaagagaagaggucauuacggugggaaauagugugaacgagggccucaaucaaccuaccgaugacagcuguuucgauccguacacugucucgcacuaugccguuggugacgaaugggagaggauguccgaaucuggguuuaagcuguuaugccagugucugggcuucggaagcggccauuuucgcugcgauucaagucgauggugucacgacaacggggugaauuacaaaaucggagagaagugggaucggcagggugaaaacggccagaugauguccugcacaugucuagggaauggaaagggcgaguucaaaugcgacccccacgaggcaaccuguuaugaugacgguaagacuuaccauguaggggaacaauggcagaaagaguaucucggcgcgauaugcucuuguacaugcuucggaggccagcguggguggagaugcgauaacuguaggcgcccaggaggcgaaccuagccccgaggguaccacggggcaauccuacaaucaguauucacagcgguaccaccagagaacuaacaccaacgugaauugcccaaucgaauguuuuaugccucuggacguccaagcugauagggaggacagccgagaguga

SEQ ID NO: 2203 - RNA, 1152 nt, Artificial Sequence
  BAH12351 variant
auggccagcgcuuucagacugucccucaagcccaaagugucugacaacaugacccaccuuauggucgauuuuucacaggagaggcaaaugcugcagacauugaaguucuuaccuguuccaaaagcaccggaaaucgaccccguggagugccugguagccgauaauagugugacugucgcguggcggaugccugaagaggacaacaagauugaucauuuuauacuagaacaccgcaaaacgaauuucgacggccucccacgagugaaggaugagcguuguugggagaucauugacaacaucaaggggaccgaauacacacugagcggacuuaaauuugauuccaaguauaugaauuucagaguuagggcuugcaacaaagccguggccggugaguacucugaccccgucacucuggaaaccaaggcauugaauuuuaaccucgauaauucgucaagccaucugaaccugaaaguggaggacacauguguagagugggauccuaccggcgggaagggacaggaaaguaagauuaaaggcaaggagaauaaagguuccguucacgugacuucucucaagaaacauacaagcgggaccccaucccccaagcggacgucagucggaagucgcccuccagcugugagaggcagcagggaccgguucacuggcgaaucuuauaccguguuaggggacacagcaaucgaguccggacagcacuacugggaagucaaagcccaaaaggauugcaagucauauagcguugguguggcuuacaaaacucugggcaaguuugaccagcuugggaaaaccaacacaaguugguguauacacguaaauaacugguugcagaauaccuucgccgcgaagcauaacaacaaagugaaggcacuggaugucacggugccggagaagaucggaguguuuugcgacuucgauggcggucagcuaucuuuuuaugacgccaauuccaaacaacuccuguacagcuucaagacuaaauucacacagcccgugcuuccuggguuuauggucugguguggaggccugucguugucuaccggcaugcagguuccauccgcuguacgcacucuccagaagucagagaacgggaugacaggaagugccagcucccugaauaacguugugacccaauga

SEQ ID NO: 2204 - RNA, 441 nt, Artificial Sequence
  BAH14175 variant
augcccccuagcaagccacacccgcccguggucggcaaaguuacccaucacuccaucgagcuguacugggaccucgaaaagaaagccaagagacaggggccucaagagcagugguucagguuuucuauugaagaggaagauccaaaaaugcauacauauggaauaaucuacacugguuaugcuacgaagcacgugguagagggccuugagccccggacccuguaccgcuuccgauugaaggugacaucaccuaguggggaaugcgaguauagcccauuagucuccgugucuacuaccucggaauacucagaccguccccauagcccucugaguagauccauggagaugacaucuaaccuagagaaaaucuuuugucucagcuucggacugaccaggucccggaaugauacuauuuuuaagcacugcaacaauauuuguuga

SEQ ID NO: 2205 - RNA, 2055 nt, Artificial Sequence
  EAX08810 variant
auggccgagcaucccccucugcucgacaccacacagauccuuagcuccgauauuucucuguugucagcuccaauagugagugcagacggcacucaacaggucaucuuaguucaggugaacccgggggaagccuucacgauuagaagggaggauggacaguuucaaugcaucaccggucccgcgcagguaccuaugaugagcccaaauggcuccgugcccccuauuuacgucccacccggguaugcuccucaggugaucgaagacaacggaguucggcgcguggucgugguaccacaggccccggaguuccaccccggcucucacacaguucugcaucgaucgccucacccaccccuaccugguuuuauaccagugcccacuaugaugccgccucccccacgucauauguacucaccugucaccggggcaggagauaugacaacccaauauaugccccaguaccagagcagucagguguauggcgacguggaugcccacuccacucacggcagaucuaauuucagggacgaacggagcuccaagacauacgagcgccuccaaaagaagcugaaagauagacaggggacccagaaggacaaaaugucaaguccacccagcucuccucaaaaguguccauccccgaucaacgagcauaauggacuuauuaagggucagaucgcuggcgggauuaacacgggaucagcaaaaaucaagagcggcaaagguaaagggggaacucaggucgauaccgaaauagaggaaaaagacgaggagacaaaggccuuugaagcucuguugaguaauauuguuaagcccguggccucugauauccaggcgaggacuguagugcucaccugguccccuccaagcucgcugauuaacggcgagacagacgaaucuuccguccccgagcuguauggcuacgaagugcucaucucaaguaccgggaaagacggaaaguacaaaagcguuuaugugggugaggagacgaauaucacuuuaaacgaucugaagccugcaauggacuaccacgccaaaguccaagcugaauauaauuccauuaagggcacaccaucugaggccgaaauauucaccacucuuagcugcgagcccgauaucccgaacccuccacggauugcaaaucgcaccaaaaacucauugacacugcaguggaaggcucccagugacaauggguccaagauccagaacuuugugcuagaaugggaugagggaaaaggcaacggugaguucugucagugcuacauggggagccaaaagcaguuuaaaauaacgaagcucucuccugccaugggcuguaaauuccgacugucagcgagaaaugacuauggaaccaguggcuuuagcgaagagguacuuuacuauacauccgggugcgcccccucuaugccagcaucgccuguucugacuaaggcuggaauuaccugguugagccuccagugguccaagcccucagguacaccaagugaugaaggcaucucuuacauccuggagauggaagaggagacuagcggguacggauucaaaccgaaguaugacggcgaagauuuagccuacaccgugaaaaaccugaggcgguccacaaaguauaaauuuaaggucauugcuuacaauucagaggguaagagcaacccuucugaaguggucgaguucaccacuugucccgacaaaccagggauccccgugaagccuuccguuaaaggcaagauucauagucacagcuucaaaauaacgugggauccacccaaggacaauggaggcgccacaaucaacaaguaugugguagagauggcagaagggucuaauggaaacaaaugggagaugauuuacuccggugccacccgugaacaccucugcgaccgccuuaauccuggcuguuuuuauagacugagggucuacugcaucucagaugggggacagagugcugugagcgagucguugcuaguucaaacuccggcggugccacccggcccuugucugccaccccggcuccagggucgaccuaaggcaaaagaaauccagaccccguccggguga

SEQ ID NO: 2206 - RNA, 492 nt, Artificial Sequence
  AAG35520 variant
augagcgaguccggcuucaagcugcucugccagugucuuggguuuggaucuggucacuucagaugcgacucaaguagguggugucaugauaacggcgugaauuacaaaaucggggaaaagugggaccggcaaggagagaacggccagaugaugagcugcaccugucuggguaaugggaaaggagaauuuaagugcgauccccacgaggccacauguuaugacgauggcaaaacuuaccaugucggcgaacaguggcagaaggaguauuugggggcuauuugcuccuguacgugcuucggaggucaacgcggcuggcgaugugacaacugccguagaccugggggagagccaucuccggaaggcaccacaggucagucguacaaucaguauucacagagguaccaccaacggacuaacaccaauguuaacugccccauagaguguuuuaugccuuuagaugugcaggcagaccgcgaagauagcagagaguga

SEQ ID NO: 2207 - RNA, 1143 nt, Artificial Sequence
  AAA52471 variant
augauguucagcggcuuuaacgccgacuacgaggcuuccucuucaagaugcaguagcgcaucccccgccggggauucucugucguauuaccacagcccugcggacagcuucaguuccaugggaucuccagugaaugcucaggauuuuuguaccgaccucgccgucagcuccgcaaacuucaucccgacaguuacugccauuucaacgagucccgaucuucaauggcuggugcagccugcuuugguaagcucuguggcaccaucccagaccagggcuccccauccuuuuggugucccagcccccucagccggcgcguauagccgggcaggggugguuaagacaaugacuggaggccgcgcccagaguauaggucgacgugggaaaguggaacaauuaucuccugaggaagaggaaaagagaaggauccggcgcgagagaaauaaaauggcugccgcaaagugcaggaaccggcgccgagagcugaccgacacacuacaggcugaaaccgaucagcucgaggacgaaaaauccgcccugcagacugagauugcgaaucuucugaaggagaaggaaaaauuggaguucauccucgccgcacacagaccagcuuguaagauuccggaugaccugggauuucccgaagagaugagcgucgccucgcuggaucucacaggcggcuuaccugaaguggcuaccccagagucugaggaagccuucacgcugccccuuuugaacgacccugagccaaaacccuccguagaaccgguuaagucaaucaguagcauggagcugaaaacugaaccuuuugaugacuuccuauuucccgcauccucuaggccaagcgggucagagaccgcccggagugugccugacauggaucucuccggaucauucuacgcugcggacugggagccccugcauucugguucacuuggcauggggccaauggcaacagaacuggagcccuugugcacuccugucgugaccuguacaccaaguugcaccgccuauacgagcuccuuuguguucacuuacccggaagcugauucuuuccccucgugugccgcagcccaccguaagggaagcuccucaaaugagccuaguucugacagccucuccucaccaacacuguuagcucuguga

SEQ ID NO: 2208 - RNA, 1296 nt, Artificial Sequence
  AAG53607 variant
augcccaacccuagaccaggcaagccgagcgcccccucccuggcucucgggccuucuccaggagcaucacccaguuggagggccgcgccuaaagcuagcgaccuucugggugcccggggcccagggggaaccuuccagggccgcgauuugcgagguggggcacacgccuccucuucgucauuaaaucccaugccuccaagccaacugcagcuaccgacacucccccuggugauggucgcuccuaguggagcacgucuuggcccacugccccauuugcaggcccuccugcaggacagaccucacuuuaugcaucaacuguccacuguugaugcucacgccaggacgccagugcuccagguacaucccuuagaaucuccggcgaugaucagccugaccccucccacaacugcaaccggcguguucucccuuaaggcccggccaggguugccucccggaauuaacgucgcuucacuggaaugggugagucgcgagccagcccuacucugcacauuucccaauccuagcgcaccaagaaaagacucuacccuguccgcuguuccgcagucaagcuacccccuucuggccaacgguguguguaaguggccuggcugcgaaaaagucuucgaggaaccagaggauuucuugaagcacugucaggcggaccaccuccuggaugagaaggggagggcccaaugcuuacugcagcgggaaauggugcagagucucgagcagcaacuuguacuggaaaaagagaaguugucugcaaugcaggcucaucuagccggaaaaauggcucugacuaaggccuccagcguugcaucgucugacaaaggcuccuguugcauaguggccgcugguucacaggggcccgucgugccugcguggaguggaccacgcgaggcacccgauagccucuucgccgugcgaagacaccuguggggcucccauggcaauucuacauuuccggaauuucuucacaacauggacuauuuuaaguuccacaauaugaggccuccauuuaccuacgcuacgcugauccggugggccauuuuggaggcacccgaaaagcaacguacucucaacgagaucuaucauugguucacccgcauguuugccuucuucagaaaucacccugcuacauggaaaaacgccauuaggcauaaucugagcuuacacaaguguuuuguccggguugaaucagagaaaggggcaguguggacuguagaugagcuggaguuccgaaagaaacgcagucagagacccuccaggugcagcaacccaaccccuggacccuga

SEQ ID NO: 2209 - RNA, 1098 nt, Artificial Sequence
  AAA52639 variant
auguggcugagaagccacaggcagcucugccuugccuuccuguuggugugugucuuauccguuaucuuuuuccugcauauucaccaagacucuuuuccccauggccuagggcucucaauacugugcccugaucggcgccuugugaccccaccgguagcuaucuucugucugcccggaacagcaauggguccuaacgccaguagcuccugcccacagcaccccgcgucuuugucgggcacuuggacgguguacccuaaugggcgauuuggaaaccagaugggccaguaugcuacccuccuggcccuggcacaacucaauggucguagagccuucauuuuaccagcuaugcaugcagcccuggcucccgucuuuaggaucacacuuccuguguuggccccagagguugacucacggacuccguggcgcgaacugcagcuacacgauuggaugagcgaggaauacgcggaccucagagaucccuuccugaaacuuaguggguuuccuuguuccuggaccuucuuucaccaucugagggagcagauucggcgcgaguucacauugcacgaccaucuccgagaagaggcacagucugugcugggacaauuaagacugggcaggaccggcgaucggccacguacuuuugucggggugcacguacgcagaggagacuaucuccagguuaugccccagagguggaaggguguggucggcgauagcgccuaccuucggcaggcuauggacugguuccgagcccgccacgaagcaccuguguucguggucacauccaacgggauggaguggugcaaggaaaauaucgauaccucacaaggagacguuacguuugcuggcgauggucaggaggccacuccauggaaagacuucgcgcuguugacccaguguaaccauacaauaaugacuaucgggaccuuuggauucugggccgcauaucuagcuggcggcgacacaguguaccuggccaauuuuacccuccccgauagugaguuccugaagauuuuuaaaccggaagcugccuuccuuccugaguggguagggaucaacgcagaccugagccccuuguggacgcucgccaagccauga

SEQ ID NO: 2210 - RNA, 1380 nt, Artificial Sequence
  EAW58359 variant
auggcuccccugugcccuagcccauggcucccgcuucugauccccgcuccugcaccaggcuugaccgugcaguuacugcuaucccuccugcuucugguccccguucacccucaaagauugccaaggaugcaggaggacucuccccucgggggagguucaaguggcgaagaugacccucugggggaggaagaucugccaagcgaggaagacuccccgcgggaggaggaucccccuggagaagaggaccucccaggcgaagaggauuuacccggugaggaagaccugccugaggugaagccaaaaucugaagaggaagggucgcuuaaguuggaggaucugcccacaguagaggccccgggagacccucaggaaccccagaacaaugcgcaucgcgauaaagagggcgacgaucaaucacacuggcgauacggcggggacccaccuuggccccgugugagcccagcuugugccggaagauuccagagucccgucgacauuaggccucagcuagcagccuuuugcccagcucuccggccgcuggaacuucuggguuuccaguugcccccucucccagagcugcgcuuaagaaacaauggccauuccgugcaacugacuuugcccccugggcuugaaauggcacugggaccaggcagggaguaucgggccuugcagcuacaucugcacuggggugcugccgggcgccccggaucugagcacacgguugaaggccaccgauuuccggcggagauacaugugguccaccucagcaccgcauucgccagaguggaugaagcucugggcaggccugggggacuugccguacuggcagcuuuucucgaggaagguccagaggagaacuccgccuacgaacagcuccugucacgguuagaggaaaucgcggaggagggcagugaaacacagguucccgggcuggacauuagcgcccuacucccuucugauuucucccguuauuuucaauacgagggaucacugacuacacccccaugugcacagggcgugaucuggaccgucuucaaucagaccgugaugcuuagcgcuaagcaauugcauacucugagugacacacucugggguccuggggauucucgccugcagcuuaacuuuagagccacccagccccugaauggcagggugauugaagccuccuucccagccggagucgacagcucgccgcgggcagccgagccuguucaguugaacucuugccucgcugcgggcgauauccuggcauuaguguuugggcugcuauucgccguaacguccguggcuuuucucguccaaaugcgacgccagcacagaaggggaacuaaagguggcgugucauaucggcccgccgaaguugcagagaccggggccuga

SEQ ID NO: 2211 - RNA, 417 nt, Artificial Sequence
  U19142.1 variant
augagcuggagaggcagguccaccuaccggccccgcccucgacguuauguggagccaccggaaaugaucgggcccaugagaccugagcaguucucugacgaagucgagccagccacacccgaagagggagagccugcuacucaaaggcaggacccagcagccgcgcaggaaggugaggacgaaggcgcuucagccgggcagggacccaagccugaggcagauagucaagagcagggccacccacagacggguugcgaaugugaggacgggccggauggacaggaaauggaucccccuaacccagaggaaguuaaaacccccgaggaggaaaugcggagccauuacguggcccaaacaggcauucuguggcuccuuaugaauaacugcuuucugaauuuguccccucgcaagccauga

SEQ ID NO: 2212 - RNA, 351 nt, Artificial Sequence
  AAH69397 variant
augagcuggagaggcagguccaccuaccggccccgcccucgacguuauguggagccaccggaaaugaucgggcccaugagaccugagcaguucucugacgaagucgagccagccacacccgaagagggagagccugcuacucaaaggcaggauccagcagccgcgcaggaaggucaggacgagggcgcuucagccgggcaaggacccaagccugaagcacacagucaggagcagggccauccacagacggguugcgagugugaagaugggccggacggacaagagauggaucccccuaacccagaagagguuaaaacccccgaagagggcgagaagcagagccagugcuga

SEQ ID NO: 2213 - RNA, 357 nt, Artificial Sequence
  AAA82746 variant
augaaccugagcagaggcaaguccaccuacuauuggcccaggccucggcgcuacgugcagccaccggaggucaucgggcccaugcgaccugaacaauucucugacgagguugaaccagccacacccgaggaaggagagccugcuacucagcgucaggacccagcagccgcgcaggagggugaagacgagggcgcuucagccgggcaaggacccaaaccugaagcagauagucaggagcagggccacccacagacggguugcgagugugaagacgggccggauggacaagagauggaucccccuaauccagaagaggugaagacccccgaagagggcgagaaacagagccagugcuga

SEQ ID NO: 2214 - RNA, 354 nt, Artificial Sequence
  AAH69470 variant
augagcuggagaggcagguccaccuacuauuggccccggccucgccgauacgugcagccaccggagaugaucgggcccaugcguccugaacaauucucugacgaggucgaaccagccacacccgaggaaggagagccugcuacucagagacaggacccagcagccgcgcaggagggugaagacgagggcgcuucagccgggcaaggacccaagccugaagcagauagucaggagcagggccacccacagacggguugcgagugugaagacgggccggauggacaagagauggaucccccuaacccagaagagguuaaaacccccgaagagggcgagggccagagccagugcuga

SEQ ID NO: 2215 - RNA, 354 nt, Artificial Sequence
  AAA82748 variant
augagcuggagaggcagguccaccuacuauuggccccggccucgccgauacgugcagccaccggaggucaucgggcccaugcguccugaacaauucucugacgagguugaaccagccacacccgaggaaggagagccugcuacucagagacaggacccagcagccgcgcaggagggugaagacgagggcgcuucagccgggcaaggacccaagccugaagcagauagucaggagcagggccacccacagacggguugcgagugugaagacgggccggauggacaagagauggaucccccuaacccagaagaggugaaaacccccgaagagggcgagaagcagagccagugcuga

SEQ ID NO: 2216 - RNA, 354 nt, Artificial Sequence
  AAA82749 variant
augagcuggagaggcagguccaccuacuauuggccccggccucgccgauacgugcagccaccggaggucaucgggcccaugcguccugaacaauucucugacgagguugaaccagccacacccgaggaaggagagccugcuacucagagacaggacccagcagccgcgcaggagggugaagacgagggcgcuucagccgggcaaggacccaagccugaagcagauagucaggagcagggccacccacagacggguugcgagugugaagacgggccggauggacaagagguggaucccccuaacccagaagagguaaaaacccccgaagagggcgagaagcagagccagugcuga

SEQ ID NO: 2217 - RNA, 354 nt, Artificial Sequence
  AAC25989 variant
augagcuggagaggcagguccaccuacuauuggccccggccucgccgauacgugcagccaccggagaugaucgggcccaugcguccugaacaauucucugacgaggucgaaccagccacacccgaggaaggagagccugcuacucagagacaggauccagcagccgcgcaggagggugaagacgagggcgcuucagccgggcaaggacccaagccugaagcacacagucaggagcagggccauccacagacggguugcgagugugaagaugggccggacggacaagagauggaucccccuaacccagaagagguuaaaacccccgaagagggcgagaagcagagccagugcuga

SEQ ID NO: 2218 - RNA, 351 nt, Artificial Sequence
  AAC33676 variant
augagcuggagaggcagguccaccuaccggccccgcccucgacguuauguggagccaccggaaaugaucgggcccaugagaccugagcaguucucugacgaagucgagccagccacacccgaagagggagagccugcuacucaaaggcaggacccagcagccgcgcaggaaggugaggacgaaggcgcuucagccgggcagggacccaagccugaggcagauagucaagagcagggccacccacagacggguugcgaaugugaggacgggccggauggacaggaaauggaucccccuaacccagaggaaguuaaaacccccgaggagggcgaaaagcaaagccagugcuga

SEQ ID NO: 2219 - RNA, 1344 nt, Artificial Sequence
  AAA35657 variant
auggagcugcucaaacuuaacagaagcgugcagggcaccgggcccggaccuggugccucccugugcaggccaggcgcuccguuguuaaauucuucaagugucgggaaccugagcugugaacccccucggauccgcggagcaggcacacgagagcuagaacucgccauucguauaacucuguacgcgguuaucuuccuuauguccgugggugggaauaugcugauuaucguaguguugggacucucuagaaggcugcggacggucaccaacgcuuuucugcucucguuagccgugucagaccugcuuuuggcaguugccugcaugccauucacacugcuacccaaucucaugggcacuuuuauuuucggcaccgugaucuguaaggcugucagcuaucugaugggggugaguguauccguuucuacacuuagccugguggcaauagccuuggagcgcuacuccgcuaucugcagaccucuccaagccagggucuggcagacccggucacacgcggcacgcgugauuguggccacuuggcuguuaaguggacugcucauggucccauaucccguuuacacagugguacagccuguggguccacgaguccuucagugugugcauagauggccgagcgcuaggguucggcaaaccuggucugugcuguugcuacugcuccuguuuuucauccccggcgucgugauggccguagcauaugggcuuauuucccgugaacuguacuugggacuccgcuuugauggcgacucagauagcgacagucagucuagaguuaggaaccagggugggcugccuggagcugugcaccagaauggccggugccgaccagagacgggcgccgucggggaggauuccgacggauguuaugugcaauuaccccgcagcagaccugcgcuggaacuaacugcccucaccgcaccaggucccggcucggggucuaggccgacacaggcuaagcugcuugccaaaaagcgggucgugcgcauguugcugguuaucgugguacucuucuuucugugcuggcuuccugucuacuccgcuaacacuuggagagccuucgauggacccggcgcacauagggcccugucaggugcuccaauaaguuuuauucacuugcucagcuacgcguccgcaugugugaauccucugguuuauugcuucaugcaucgucgguuucgacaggccuguuuagagaccugcgcuagaugcugucccaggccaccccgcgcccggccuagagcacugccagacgaagauccgcccacaccuucuaucgccagccuaucaaggcucaguuacaccacgauuuccacucuggggccaggcuga

SEQ ID NO: 2220 - RNA, 2226 nt, Artificial Sequence
  AAD22449 variant
auggcccuguucacccccuggaagcucagcucccagaaacuuggcuuuuuccuggugacauuuggguucaucuggggaaugauguuguuacacuuuacuauucaacagagaacgcagccugagucuucaaguaugcugagggaacagauacuagaccucagcaagcgguacaucaaagcucuggcagaggaaaaccgcaaugucguugaugguccauaugccggcgugaugaccgcguacgaccuuaagaaaacacuggcuguauugcucgauaacauucugcaacgaaucgggaagcuggaguccaagguggacaaucucgucgugaacggaacuggcaccaauucuacaaacucgaccacugccguuccgucauuaguggcacuggaaaagauuaaugucgccgauaucauaaacggugcucaggagaagugcgugcuucccccuauggacggguauccacauugugagggaaaaaucaaguggaugaaagauauguggcguagcgaccccugcuacgcagauuauggcguagacggcaguacauguuccuucuuuauuuacuugucugaaguugagaauuggugcccucaucugccauggagagccaagaaccccuaugaagaggcugaucacaauagccuagccgagaucaggaccgacuucaacauucucuacuccaugaugaagaaacacgaagaguuucgguggaugcgccugagaaucaggcggauggcggaugcauggauacaggccauuaagucacuugcugaaaaacagaaucuggagaagcgcaaacgaaagaaaguguugguccaucucgggcuguuaacgaaggaaaguggauucaagaucgccgagacugcauuuagcgguggcccucugggggagcucgugcaauggucugaccuuauuaccucccuguacuugcuaggacacgacaucagaaucucagcuagccuggccgaacucaaagagauuaugaagaaaguggucggcaacaggagugguuguccaacaguuggggaucggauaguggaacugaucuauauugacaucguaggacuugcgcaguucaagaaaacucugggcccgucuugggugcacuaccagugcauguugcguguccucgauuccuuuggcaccgagcccgaguucaaucaugccaacuaugcacagagcaaggggcacaagacaccuuggggaaaauggaaccugaauccacaacaguucuacaccauguuuccccauacgccugacaacucguucuuagguuuugugguugaacagcaccuuaauucuuccgauauacaccauauuaacgagaucaagcgccaaaaucagagucuaguguauggcaaagucgacaguuucuggaagaacaaaaagaucuaccucgauauuauccacacuuauauggaagugcaugcuacaguauacgggagcuccaccaagaauauuccaucuuacguuaaaaaccacggaauacugagcggcagagaccuucaguuuuugcugagggagacuaaacucuucgugggucugggguuucccuaugaaggcccggccccucuugaggcuaucgccaauggaugugcauuccugaaccccaaauuuaauccaccuaagucaaguaaaaacacagauuucuuuauuggcaagcccaccuugcgggaacucacgucccagcauccauacgccgaggucuucaucgggcgaccccacguguggaccgucgaccugaauaaccaagaggaaguggaggaugcuguuaaggcgaucuuaaaucagaaaauugaaccuuauaugccauacgaguuuacaugcgagggaaugcugcagcgcauaaacgcauucaucgaaaagcaggacuucugucacggucaagugauguggccgccccuaagcgcccuccagguaaaacuggcugagccuggccagucuugcaagcaggucugucaagaaucacagcuuauuugcgagccaucauuuuuccagcauuugaacaaagacaaggauaugcugaaauauaaggugacuugccagagcuccgaacucgccaaggacauccugguucccucuuuugauccuaaaaauaagcacuguguguuccaaggggacuuacugcuguuuucgugcgcaggagcccauccaagacaccagagggucugucccugccgggauuucauuaaaggccagguggcuuuguguaaggacugccucuga

SEQ ID NO: 2221 - RNA, 1743 nt, Artificial Sequence
  EAX11770 variant
auggccggcaccgugagaacagcuugccuggucguugcaaugcuccuuagccuggacuuccccgggcaggcccaaccuccaccgcccccuccagaugcgacuugucaccaggugagguccuuuuuccagcgguugcagcccggauuaaaguggguaccugagacgccagugcccgguucugaccugcaagucugccuaccuaaaggcccaaccuguugcucacgcaagauggaagagaaauaccagcucacagcucgacugaacauggaacagcuucugcagagugccagcauggaguugaaguuucucaucauucaaaaugcagccguguuccaggaagcauuugagauaguugugcgucaugcuaaaaacuauacuaaugccauguucaagaacaauuacccgucccugacaccccaggcuuuugaguucgucggggaauuuuucaccgaugugucucuguauauccucggaucggacauuaacguagaugacaugguuaaugaguuauuugauucacuguucccugugaucuacacccagcuuaugaacccaggcuugcccgacagcgcccuggauauuaaugaaugucuaagaggugcgaggcgggaccucaaggucuuugggaacuucccuaaacugaucaugacucaagugaguaagucccuucaggugacacgcauauuccugcaggcauugaaucucggaaucgaggucauuaacaccacggaucaccugaaauuuucuaaggacugcggcagaauguuaacuaggaugugguauuguagcuacugccaaggccugaugaugguuaaaccaugugggggauauugcaaugugguaaugcaggguuguauggccggcguggucgagaucgauaaguacuggcgggaauacauucucucccuugaggaacuggugaacgggauguaucgcaucuacgacauggagaauguuuugcuaggacuguucucaaccauacaugacaguauucaguaugugcagaagaacgcuggcaaacucacaacuaccaucgguaagcugugcgcccacagccaacagcgacaguacagaucugcauauuaccccgaagaucuuuuuauugacaaaaagguccugaaaguggcucauguagagcacgaggaaacauuguccucaaggcggcgugagcucauccagaagcugaaaaguuucaucagcuuuuauucugccuuaccgggguacauuugcucccacagcccuguugcggaaaacgauacccuguguuggaauggacaagagcuaguggaacgcuacucgcagaaggccgcaagaaacggcaugaagaaucaguucaaccuccaugagcugaaaaugaagggccccgagccagucgugucucagauaaucgacaaacuuaagcacauuaaucaauugcugaggacgauguccaugccuaaagggcggguccucgauaagaaccuggacgaagagggauuugaaucaggugauugcggcgacgaugaggacgaauguaucgggggaaguggcgaugguaugauaaaggugaaaaaucagcuucgauuccuggcugaguuggccuaugaccucgacguugaugacgcucccgggaacagccagcaggccacuccaaaggauaaugagauuuccacauuucauaaccugggcaaugugcacucucccuuaaaacugcuaaccagcauggcaaucucaguagucugcuucuuuuuccucgugcacuga

SEQ ID NO: 2222 - RNA, 1743 nt, Artificial Sequence; identical to SEQ ID NO: 2221
  AAA93471 variant

SEQ ID NO: 2223 - RNA, 1743 nt, Artificial Sequence
  AAH35972 variant
auggccggcaccgugagaacagcuugccuggucguugcaaugcuccuuagccuggacuuccccgggcaggcccaaccuccaccgcccccuccagaugcgacuugucaccaggugagguccuuuuuccagcgguugcagcccggauuaaaguggguaccugagacgccagugcccgguucugaccugcaagucugccuaccuaaaggcccaaccuguugcucacgcaagauggaagagaaauaccagcucacagcucgacugaacauggaacagcuucugcagagugccagcauggaguugaaguuucucaucauucaaaaugcagccguguuccaggaagcauuugagauaguugugcgucaugcuaaaaacuauacuaaugccauguucaagaacaauuacccgucccugacaccccaggcuuuugaguucgucggggaauuuuucaccgaugugucucuguauauccucggaucggacauuaacguagaugacaugguuaaugaguuauuugauucacuguucccugugaucuacacccagcuuaugaacccaggcuugcccgacagcgcccuggauauuaaugaaugucuaagaggugcgaggcgggaccucaaggucuuugggaacuucccuaaacugaucaugacucaagugaguaagucccuucaggugacacgcauauuccugcaggcauugaaucucggaaucgaggucauuaacaccacggaucaccugaaauuuucuaaggacugcggcagaauguuaacuaggaugugguauuguagcuacugccaaggccugaugaugguuaaaccaugugggggauauugcaaugugguaaugcaggguuguauggccggcguggucgagaucgauaaguacuggcgggaauacauucucucccuugaggaacuggugaacgggauguaucgcaucuacgacauggagaauguuuugcuaggacuguucucaaccauacaugacaguauucaguaugugcagaagaacgcuggcaaacucacaacuaccaucgguaagcugugcgcccacagccaacagcgacaguacagauuugcauauuaccccgaagaucuuuucauugacaaaaagguccugaaaguggcucauguagagcacgaggaaacauugucuuccaggcggcgugagcucauccagaagcugaaaucauuuaucagcuucuauagugccuuaccgggguacauuugcucucacuccccuguugcggaaaacgauacccuguguuggaauggacaagagcuaguggaacgcuacagccagaaggccgcaagaaacggcaugaagaaucaguuuaaccuccaugagcugaaaaugaagggccccgagccagucgugucgcagauaaucgacaaacuuaagcacauuaaucaauugcugaggacgaugucuaugccuaaagggcggguccucgauaagaaccuggacgaagagggauucgaauccggugauugcggcgacgaugaggacgaauguaucgggggaucaggcgaugguaugauaaaggugaaaaaucagcuucgauuucuggcugaguuggccuaugaccucgacguugaugacgcucccgggaacagucagcaggccacuccaaaggauaaugagauuagcacauuccauaaccugggcaaugugcacucccccuuaaaacugcuaaccucuauggcaaucagcguagucugcuuuuucuuucucgugcacuga

SEQ ID NO: 2224 - RNA, 1683 nt, Artificial Sequence
  EAW93784 variant
auggagugccuauacuauuuccucggcuuucuucuguuggccgcuagauuaccccuggacgcagccaagagguuccacgaugugcuagggaacgaacggccuagcgcguacaugcgcgagcauaaucagcucaacggaugguccucugacgaaaaugauuggaacgagaaacuguauccagucuggaagcgaggugacaugcguuggaaaaauucauggaagggcgggagaguucaagcugugcuuaccagugauagcccggcccugguaggauccaacaucacauuugcagugaauuugauuuuccccaggugucagaaagaagacgccaacggcaauauagucuacgagaagaacugccggaaugaggcuggucucucugcagauccuuauguguacaacuggacugccuggucggaagacucagauggggagaauggaacgggccagagccaccauaacguuuuuccagacggcaagcccuucccucaccauccaggguggcgcagauggaauuuuaucuauguguuccacacccugggacaguacuuucaaaaacuggguagguguaguguccggguguccguaaacacagcuaacguuacucucggcccccaguuaauggaagugaccgucuaccgccgacacgggagagccuaugugccuauugcgcaagugaaggaugucuacguugugacagaccagaucccaguauucgugaccauguuucagaaaaaugauaggaacucuagcgacgagacuuuccugaaggaccuuccgauuauguuugaugucuugauccaugaccccucccacuuccugaauuauucaacaauaaacuacaaauggaguuucggagauaauaccggccuauuugugagcacgaaccauacuguuaaucacaccuaugugcucaacgguacauucucucugaaucuuacugucaaggcagccgcuccugggccaugucccccuccacccccgccuccccggccauccaagccuacccccucacugggaccagccggcgacaaccccuuggagcucagccguaucccugaugaaaauugccagauuaaccgcuacggccacuuucaggcaacaaucaccauuguggaggggauccuggaaguaaauauaauucagaugacggacguuuuaaugccagugccguggcccgagaguucucugaucgauuucgucgugacuugccaaggauccauuccuacagaagucuguaccaucaucagcgacccaacuugcgagauuacacagaacaccguguguucgcccguugauguggacgagaugugccuccuuacgguaagaaggaccuuuaaugguucuggcacauauugugucaaccugacuuugggggaugacaccucccuagcucugacaucaacucucauaagugugccugaccgggauccagccagcccccugcgaauggcgaacuccgcccuuaucucuguuggaugccuggcaauuuucgugaccgucaucagcuugcucguguacaaaaagcauaaagaauacaauccgauagagaacucaccuggcaauguagugcgcaguaagggucuguccgucuuuuuaaacagagcuaaagccguuuucuuuccagggaaucaggaaaaggacccccugcugaaaaaccaagaguucaagggcgugagcuga

SEQ ID NO: 2225 - RNA, 1719 nt, Artificial Sequence
  AAH32783 variant
auggagugccuguacuauuuccucggcuuucuucuguuggccgcuagauuaccccuggacgcagccaagagguuccacgaugugcuagggaacgaacggccuagcgcguacaugcgcgagcauaaucagcucaacggaugguccucugacgaaaaugauuggaacgagaaacuguauccagucuggaagcgaggugacaugcguuggaaaaauucauggaagggcgggagaguucaagcugugcuuaccagugauagcccggcccugguaggauccaacaucacauuugcagugaauuugauuuuccccaggugucagaaagaagacgccaacggcaauauagucuacgagaagaacugccggaaugaggcuggucucucugcagauccuuauguguacaacuggacugccuggucggaagacucagauggggagaauggaacgggccagagccaccauaacguuuuuccagacggcaagcccuucccucaccauccaggguggcgcagauggaauuuuaucuauguguuccacacccugggacaguacuuucaaaaacuggguagguguaguguccggguguccguaaacacagcuaacguuacucucggcccccaguuaauggaagugaccgucuaccgccgacacgggagagccuaugugccuauugcgcaagugaaggaugucuacguugugacagaccagaucccaguauucgugaccauguuucagaaaaaugauaggaacucuagcgacgagacuuuccugaaggaccuuccgauuauguuugaugucuugauccaugaccccucccacuuccugaauuauucaacaauaaacuacaaauggaguuucggagauaauaccggccuauuugugagcacgaaccauacuguuaaucacaccuaugugcucaacgguacauucucucugaaucuuacugucaaggcagccgcuccugggccaugucccccuccacccccgccuccccggccauccaagccuacccccucacuggccacaaccuugaaaagcuacgacaguaacacgccaggacccgcaggcgauaauccucucgagcugucucguaucccagacgaaaacugccagauuaaucgcuauggccacuuucaggcuacuaucacaauuguggaggggaucuuagaaguaaacauaauucagaugaccgauguucugaugccggugcccuggccugaguccagccucaucgacuucgucgugacuugccaaggaucgauuccaacagaagucuguaccaucaucucugaucccacgugcgagauuacccagaauacaguguguuccccuguugacguggaugagaugugccuucugacuguaagaaggaccuuuaacgguucaggcacauacugugucaacuugacucuaggggacgacaccagucuggcccucacaagcacccugauauccgugccagaucgggaccccgcgucuccgcuucgaauggccaauagcgcacugaucucaguuggaugcuuggcuauuuucgugacugucaucagucuccugguguacaagaaacauaaggaauauaacccuauagaaaauuccccaggcaacguagugcgcagcaaagguuuaucuguuuuucugaauagagccaaggcugucuucuuucccgggaaccaggagaaagauccucuacucaagaaucaagaguucaagggcgugucauga

SEQ ID NO: 2226 - RNA, 621 nt, Artificial Sequence
  CAD43718 variant
auggagugccuguacuauuuccucggcuuucuucuguuggccgcuagauuaccccuggacgcagccaagagguuccacgaugugcuagggaacgaacggccuagcgcguacaugcgcgagcauaaucagcucaacggaugguccucugacgaaaaugauuggaacgagaaacuguauccagucuggaagcgaggugacaugcguuggaaaaauucauggaagggcgggagaguucaagcugugcuuaccagugauagcccggcccugguaggauccaacaucacauuugcagugaauuugauuuuccccaggugucagaaagaagacgccaacggcaauauagucuacgagaagaacugccggaaugaggcuggucucucugcagauccuuauguguacaacuggacugccuggucggaagacucagauggggagaauggaacgggccagagccaccauaacguuuuuccagacggcaagcccuucccucaccauccaggguggcgcagauggaauuuuaucuauguguuccacacccuggauuggcugcuccagacacccaaauuacugcuuuacuugagucugaaguuucaaccuucccuauuccuccuguacaacuga

SEQ ID NO: 2227 - RNA, 621 nt, Artificial Sequence
  AAH11595 variant
auggagugccuguacuauuuccucggcuuucuucuguuggccgcuagauuaccccuggacgcagccaagagguuccacgaugugcuagggaacgaacggccuagcgcguacaugcgcgagcauaaucagcucaacggaugguccucugacgaaaaugauuggaacgagaaacuguauccagucuggaagcgaggugacaugcguuggaaaaauucauggaagggcgggagaguucaagcugugcuuaccagugauagcccggcccugguaggauccaacaucacauuugcagugaauuugauuuuccccaggugucagaaagaagacgccaacggcaauauagucuacgagaagaacugccggaaugaggcuggucucucugcagauccuuauguguacaacuggacugccuggucggaagacucagauggggagaauggaacgggccagagccaccauaacguuuuuccagacggcaagcccuucccucaccauccaggguggcgcagauggaauuuuaucuauguguuccacacccugggauggcugcuccagacacccaaauuacugcuuuacuugagucugaaguuucaaccuucccuauuccuccuguacaacuga

SEQ ID NO: 2228 - RNA, 2640 nt, Artificial Sequence
  CCDS5600.1 variant
augaagaugcugaccagacuccaggugcuuacacuggccuuguucagcaaaggcuuuuuacugucccuaggggaccacaacuuccucaggcgggagaucaagauugaaggagaucugguccuugguggccuguuucccauaaaugagaaagggacuggaacggaagagugcggccgcaucaacgaagaccgagguauucaacguuuggaggcuaugcuguucgcaaucgaugagauuaauaaggacgauuaccuccugccugggguuaaacucggagugcauaucuuagacaccuguucuagagauacauaugcccuggaacagucacuugaguuuguaagggcgaguuugacuaagguggacgaagcugaguacaugugcccagauggcagcuaugccauacaggagaacaucccgcugcuaauugcaggcgucaucgggggauccuacucuucggugucaauucagguugccaaucuccugcggcuuuuccaaaucccccagauaagcuaugcuaguaccuccgcaaagcugucugacaaaagccgcuacgauuauuuugccagaacagugccuccagacuucuaccaggcuaaggccauggcggaaauuuugagguuuuucaacuggaccuacgucuccacuguggcaucagagggugauuauggcgaaacagggaucgaggccuuugaacaggaggcucggcuccgcaauauuuguaucgccaccgcagagaaaguaggacgaaguaacaucagaaagagcuacgacucuguuauuagggaacuguuacaaaaacccaaugcucggguggucgugcuguucaugcguuccgacgauucacgcgagcucauagccgcggccagcagagcaaacgcuaguuuuacguggguggccucugacggcuggggugcucaggaauccaucauuaaggggagcgagcacgucgccuauggagcaaucacucuugaacuggccucgcagccuguuaggcaguucgaucgguacuuccaaucuuugaauccauauaacaaucaucgaaaccccugguuucgcgacuucugggagcagaaguuucagugcucccuacaaaauaaaagaaaccacaggcgggugugugauaagcaucuggcuauagacucaaguaacuacgagcaggaaagcaaaauuauguucguagugaaugcggucuaugcaauggcccacgcucuccacaagaugcagcgcacccugugcccuaacacaacuaaacuuugugaugccaugaagauccuggacggcaaaaaguuguacaaggauuaccuccugaaaaucaauuuuaccgcaccauucaacccgaauaaggacgccgauuccauugugaaauuugacacauucggcgacgggaugggaagauauaacguuuuuaauuuccagaacguggguggcaaguacucuuauuuaaaagucgggcauugggcugagacccugagccuagauguaaauucaauccacuggaguaggaacuccgugcccacgagccaaugcucugacccuugugccccaaaugaaaugaagaacaugcagcccggagauguuugcuguuggauuugcauaccuugcgagccauacgaauaucucgcagacgaguuuacuuguauggauugcggcucaggucaguggcccacagcggaccugaccggguguuacgaucuuccggaggacuauauccguugggaagaugcuugggccauuggcccugugacuaucgcaugcuugggauucauguguacaugcauggucgugaccgucuuuaucaagcauaauaacacgccccuggugaaagccaguggccgggagcucuguuacauucugcuuuucgggguuggacugagcuacugcaugaccuucuuuuucauagcuaagccauccccugugaucugugccuugcgaagacucggucuggggucuucguuugcaauuugcuauagcgcuuuacugacaaaaacuaauuguaucgccaggauuuucgacggcguaaagaacggagcgcagcgccccaaauuuaucuccccaucaagucaagucuucauaugccuaggccucauccuggugcagauuguuauggugucugucuggcuuaucuuggaagcccccgguacccggagauacacacuggcugagaagagggagacugugauucucaagugcaacguaaaagauagcuccaugcugaucucauuaaccuaugacgugauacugguuauucuuuguacagucuacgcauuuaagacccgcaaaugcccugaaaauuucaacgaggccaaguuuaucggguucacuauguauacgacauguauuaucugguuggcuuuucucccaauauucuacgugaccagcucugauuaucgagugcagacuaccacaaugugcaucuccgucagucugagcggcuuuguugugcuaggaugucuguucgccccgaaagugcacauuauccucuuccagccccaaaagaauguagucacccaccggcugcaucuuaaccguuuuucuguguccggcacugggacaacguacucacagaguagcgcaucgaccuacguuccuacugugugcaauggaagagaagucuuggacuccacaaccucuagccuguga

SEQ ID NO: 2229 - RNA, 1947 nt, Artificial Sequence
  CCDS4977.1 variant
augagccaccauggcggggcccccaaggcuuccaccuggguggucgcaucuagaaggucaaguacaguuagccgggccccugagcgccgaccagcggaagaacugaaccguacuggaccggaagguuacuccgugggcagagggggaagguggcggggcacgucuaggcccccugaggcuguagccgcaggucacgaggagcucccacuuugcuucgcccugaaaucgcauuuugugggggcugucaucggaagaggcggcucaaagauuaaaaauauacagagcaccacaaacacuaccauccaaauuauccaggagcagcccgaaaguuuggugaagauuuucggguccaaagcaaugcagacaaaggccaaggcuguuaucgacaauuuugugaaaaaguuagaggaaaacuauaauucugaguguggaauagauaccgccuuccaaccuagcgucgguaaagacggcuccacugauaacaaugugguagcgggggacaggccacugaucgauugggaccagauucgggaggaaggacuaaaguggcagaaaacaaagugggcagaucucccucccaucaagaaaaacuuuuacaaggagucaaccgccacgagugcuaugagcaaaguugaagccgacucuuggcgcaaggagaauuucaacauuacuugggaugaccugaaagauggcgaaaagcgaccaaucccgaauccuaccugcacauuugacgaugcauuccaguguuaucccgaggugauggagaacauuaaaaaggcugguuuucaaaagccaacucccauacagucccaggccuggccuaucguccuucaggggauugaccugaucggaguggcgcaaaccggcacaggcaaaaccuugugcuaccucaugccaggguucauccaccuggugcugcagcccucacucaagggacagagaaauaggccggguauguuaguccugacgccuacucgggaacuugccuugcaaguugagggcgaauguugcaaauauagcuacaaggggcugcguaguguguguguauauggaggcgguaaccgcgacgagcagauugaagaguugaaaaaggggguggauauaaucauugcaacacccggcagacucaaugaccugcagaugucuaacuuugucaaccuuaagaauaucaccuaccugguguuggaugaggcugacaaaaugcucgauaugggauucgaaccacagauaaugaagauucuguuagacguuaggccugaucggcaaacugugaugacauccgccaccuggccccauagcguccaccgacuggcucagucguaccucaaagagccaaugaucguguauguaggcacgcuugaccugguugccgugucuuccgucaagcagaacaucauugugaccacagaagaggaaaaauggucacacaugcagacuuuucuacaaaguaugagcuccaccgauaaggucaucguguucguuucucgcaaggcaguggccgaccaucuaagcucagaucugauucucgggaauauaaguguagagucccugcacggagacagagagcagagggaccgggaaaaagcucuugagaacuucaagacagguaaaguccgcauccugauugcgacugauuuggcaagcagaggccucgacgugcaugauguuacccacguguacaauuuugacuuccccaggaacaucgaagaguauguccaccguaucgggcggacaggacgagccggcagaaccggugugucuauuacuacgcugacaaggaaugauuggcgcguagcuucagaguuaauaaacauccuggaacgggccaaucagaguauuccugaggagcuagugagcauggcagaaagauuuaaggcccaucagcaaaaacgcgaaauggagcgcaagauggagcgaccacaggggcggccgaagaaauuccacuga

SEQ ID NO: 2230 - RNA, 1209 nt, Artificial Sequence
  ACD02430 variant
auggcccagaaggagggcgggagaaccgugcccugcuguagcaggccuaaagucgcugcacugacagccggaacucuccuucuguugacggcgaucggugcugccuccugggcaauuguugccguguuacugcggucugaccaagaaccacuauacccgguacaggugucaagugcugaugcacgccucauggucuucgacaagaccgagggcacauggcgacugcuuugcagcucccguucuaacgccagaguggcugggcugucgugugaagagaugggauuuuugagggcccucacucacucagaacuggauguucggaccgcgggcgcaaaugguacaagcggguucuuuugcguggacgagggacgccugccccauacccagagacucuuagaggucauaagugugugugauugcccuaggggccgguuccuggccgcuaucugucaggacugcggccgccgaaaacuuccaguagauagaauuguugggggaagggacacuuccuugggucgguggcccuggcaagugucucugcguuaugauggcgcccaccuaugugggggaagccuccuguccggcgacuggguccuuacagcagcucauugcuuuccugaacgcaacagagugcugucaagguggcggguguucgccggugcggucgcccaggcaaguccacacggguugcagcucggaguucaggcugugguauaccauggcggcuaucugcccuuucgagauccuaauagcgaggaaaacucuaaugacaucgccuuagugcaccuguccucaccacucccgcuuaccgaguacauucaacccgucugucugccugcugccgggcaggcauugguggauggaaagaucugcacgguuacugguuggggcaacacccaguauuacgggcagcaagccggagugcuacaggaggcucgcgucccaauaaucagcaaugacgugugcaacggcgcggacuucuaugguaaucagauuaaacccaagauguuuugugcaggguacccugaaggcggaaucgaugccugccaaggcgacagugggggaccauucguaugugaggauucuauuuccagaacacccagguggcggcugugcgguaucguuagcuggggcacugggugugcucucgcccagaagccgggaguguacaccaaagucucggacuuucgcgaauggauauuccaguga

SEQ ID NO: 2231 - RNA, 1254 nt, Artificial Sequence
  AAA36013 variant
auggcccagaaggagggcgggagaaccgugcccugcuguagcaggccuaaagucgcugcacugacagccggaacucuccuucuguugacggcgaucggugcugccuccugggcaauuguugccguguuacugcggucugaccaagaaccacuauacccgguacaggugucaagugcugaugcacgccucauggucuucgacaagaccgagggcacauggcgacugcuuugcagcucccguucuaacgccagaguggcugggcugucgugugaagagaugggauuuuugagggcccucacucacucagaacuggauguucggaccgcgggcgcaaaugguacaagcggguucuuuugcguggacgagggacgccugccccauacccagagacucuuagaggucauaagugugugugauugcccuaggggccgguuccuggccgcuaucugucaggacugcggccgccgaaaacuuccaguagauagaauuguugggggaagggacacuuccuugggucgguggcccuggcaagugucucugcguuaugauggcgcccaccuaugugggggaagccuccuguccggcgacuggguccuuacagcagcucauugcuuuccugaacgcaacagagugcugucaagguggcggguguucgccggugcggucgcccaggcaaguccacacggguugcagcucggaguucaggcugugguauaccauggcggcuaucugcccuuucgagauccuaauagcgaggaaaacucuaaugacaucgccuuagugcaccuguccucaccacucccgcuuaccgaguacauucaacccgucugucugccugcugccgggcaggcauugguggauggaaagaucugcacgguuacugguuggggcaacacccaguauuacgggcagcaagccggagugcuacaggaggcucgcgucccaauaaucagcaaugacgugugcaacggcgcggacuucuaugguaaucagauuaaacccaagauguuuugugcaggguacccugaaggcggaaucgaugccugccaaggcgacagugggggaccauucguaugugaggauucuauuuccagaacacccagguggcggcugugcgguaucguuagcuggggcacugggugugcucucgcccagaagccgggaguguacaccaaagucucggacuuucgcgaauggauauuccaggcaauuaagacacacucugaggccuccggcauggugacccagcuguga

SEQ ID NO: 2232 - RNA, 2940 nt, Artificial Sequence
  BAG62073 variant
auggagcuggccgcucucugcagauggggccuucuguuggcauuacugcccccuggggccgcgagcacccaggacaacuaccuauccacagaugugggaucuuguacucucgucugcccacugcacaaucaagaaguuacggcugaggacgguacccagaggugugaaaagugcucaaaaccgugugcccgggugugcuauggccuugggauggagcaucugcgcgaaguacgagcagugacaagugccaacauccaggaguucgcuggauguaagaaaauuuuuggcagcuuggcauuccuccccgaguccuuugauggugacccugccucuaauacugcuccacugcagcccgaacaacugcaggucuucgagacccucgaagagauaacaggguacuuauauaucucggccuggccugauucacugccagaccuuagcguguuucagaacuugcagguuauucguggaagaauccugcacaauggcgcguacagucuaacccuccaaggccuggggauuuccuggcuuggacugaggucuuugcgggagcucgguagcggccuggcauuaauccaucacaacacucaucugugcuucgugcacacaguccccugggaucagcucuuucgcaauccucaccaggcccuucugcauaccgcuaacagaccagaagacgagugugugggggaaggauuggccugccaccagcuaugugcaaggggccauugcugggguccggggcccacgcaaugcguaaauuguucccaguuccugcggggacaggagugcguugaagagugucgcgugcuccaaggccugccucgagaguaugucaacgcuagacacugccuuccaugucaccccgaaugccagccucagaauggcucagugacuuguuuugggccagaggccgaucagugcguggcgugugcccauuacaaggaucccccguucugcgucgcaagguguccuaguggaguuaaacccgaccugagcuauaugccaauauggaaguuuccugacgaagagggugcuugccaacccugcccaaucaacuguacccacucuugcguggauuuggacgacaagggcugucccgccgaacagcgggcuuccccucucacaucaauuaucagcgccguaguggggauucuguuagucgugguucugggaguggucuucggcauccuaauaaaacgucgccagcagaagauuagaaaauacacuaugaggcggcuccugcaagagaccgagcuuguggaaccauugacaccgaguggugcaaugcccaaucaggcccagaugcgaauccugaaggagaccgaacuccgcaaaguaaagguucuggggucuggcgcuuuuggaacgguguacaagggcauuuggaucccugauggggagaacgucaaaaucccaguggcgauuaagguccuuagagaaaauacuucccccaaagcaaacaaggagauacuggacgaggccuaugugauggcuggaguugguagcccuuacgugucgagguugcucggcaucugccugacaucuaccguacaguuagucacucaacugaugccauaugggugucuacucgaucaugugcgggaaaaccgcggaagacugggcucccaggaccuuuugaauuggugcaugcagauugccaaagguaugucauaccuggaggauguuaggcucgugcaccgugaccuggcagcccggaacgucuuagugaagagucccaaucauguaaaaaucacagauuucgggcuggcucgacuuuuggacauagaugaaaccgaguaucacgccgacggcggaaaggugccgauuaaguggauggcacucgagagcauccugagaaggcgcuucacgcaccaguccgauguuuggucuuacggcgucaccgugugggaacuaaugacauuuggggcgaaaccuuaugacggaaucccagcucgggagauucccgaccugcucgaaaagggugagagacugccucaacccccaaucuguacuauugauguguacaugauaauggucaaaugcuggaugaucgacagcgaauguaggccucgcuuccgagagcuuguuucagaguuuagucggauggcccgugauccccagagauucguggugauucagaacgaagacuugggcccagcauccccgcuggauagcaccuuuuacaggucuuuacucgaggacgaugacaugggggaucugguagacgccgaagaguaucuugucccucaacagggauucuuuugccccgauccagcucccggcgccggugggauggugcaucaccgccaucggucaaguagcacaagauccggcggaggcgaccugacuuuggggcucgaaccuucugaggaggaagcaccaaggucgccccuggcuccuagcgagggagccggcuccgauguuuucgacggugaccuagggaugggagcggccaagggccugcagucacucccgacccacgauccaaguccccugcagcgauacucugaagacccuacagugccacuucccagcgagaccgaugguuaugucgcuccuuugacuuguuccccgcaacccgaauacgugaaucagccagacguucgcccucagcccccaucaccucgggagggcccccugccagcagccagaccggcuggggccacguuagagaggccuaaaacacucagccccggaaagaacggcgugguaaaggaugucuuugcauucgggggagcgguggaaaauccagaguaucugacuccccagggcggugccgcuccucaaccacacccucccccggccuuuucuccagcauucgacaaccuuuacuauugggaucaggaucccccugaacguggggcucccccauccaccuuuaaaggaaccccuacagccgagaaucccgaguaccugggccuagacgugccagucuga

SEQ ID NO: 2233 - RNA, 264 nt, Artificial Sequence
  CCQ43016 variant
augaugagaaugaagaccuucgugaugauccacuuucaucugaugaacggcgggaaagccaagcucuacagcaggccccacgcuaaacuucugccugagcagcgggucacagacaagacuggagcaccaguugaauggccgggucaaacgcagugcuccaccgagacacagacuuuggccgcgaugcccgcucaggccgugaugcgcguaaccuguacaguggucgauaugcauaaaucugaaugcgccccugcacaaaccuga

SEQ ID NO: 2234 - RNA, 3768 nt, Artificial Sequence
  AAI67147 variant
auggagcuggccgcucucugcagauggggccuucuguuggcauuacugcccccuggggccgcgagcacccagguguguacaggaacugacaugaagcuaaggcucccagcuuccccggaaacgcaccuggauaugcuucggcaucuguaccaagguugccaggucguucagggcaacuuggagcucaccuaucugcccacaaaugccucucugucauuccuccaggacauccaagaagugcagggguacguauuaauugcacacaaccaggugcgccaggucccucugcaacgacuucguauagugagaggaacucaguuguuugaggauaauuaugcccuggcuguucuagacaacggcgauccacucaauaacaccacacccgugaccggugcaaguccugggggacugagggaacuucagcugcggagcuugacugagauccucaaaggcggcguccugauucagcgcaauccacaauuauguuaccaggacacaauccuguggaaggauauuuuccauaaaaacaaucagcucgcccuuacccugaucgacacgaacagauccagggcuugccaccccuguucuccuaugugcaaggggucgcgguguuggggagagucaagcgaagauugccaaaguuugacucgcaccgugugugccgguggcugcgcgcgauguaaagggccacuaccgacagacugcugccaugagcagugugcagccggaugcacuggccccaagcacuccgauugucuggcuugccuccacuuuaaucauucugguauaugugaacugcacugcccugcccuuguaaccuauaacacagacaccuucgagagcaugccaaaucccgaggggagauacacguuuggagcauccuguguuacugcuugcccuuauaacuaccugucaacagaugugggcaguuguaccuuggucugcccacuccauaaucaggaagugacugccgaggacggcacacagaggugugaaaagugcagcaaacccugcgcgcggguguguuacgggcugggaauggagcacuuacgugaaguccgcgccguuaccucugcaaacauccaagaguucgcugguugcaagaaaauuuuuggcucccuggccuuccuaccggagucauuugacggggauccugcuagcaacacggcaccccuccagccagaacagcuucagguguucgagacccuggaagagaucacaggauauuuguacauuagugccuggccugacucucugcccgaucucuccguauuucaaaaucuucaggugaucagaggcaggauacugcacaacggugccuauagccugacuuugcaggggcucggcauuucguggcugggauuacggucucugcgagaacuaggcuccgggcucgcucugauccaucacaauacccaucuuuguuucguccacacagugccaugggaccaguuguuucgcaacccccaucaagcgcugcuccacacugcaaauagaccugaggaugagugcguuggagaaggucuggccugucaccaguuaugcgcuaggggccauuguugggggccaggaccgacccagugcgugaacuguucacaguuccugcggggccaagagugcgucgaagagugucgcgugcuucaggguuugcccagagaauacguaaaugccaggcacugccucccuugccauccagagugucagccccaaaacgggaguguuacaugcuucggcccugaggcagaccaguguguggccugcgcucacuauaaggauccacccuuuugugucgcccguugcccgagcggagugaaaccugaccuguccuacaugccaauuuggaaguuccccgaugaagagggcgcaugucagccuugccccaucaauuguacccacucuugcgucgaccuagaugacaagggguguccagcggaacagcgggcuagcccucugacuucaaucauuagugccgugguuggaauacuccuggugguaguccuuggugugguuuuuggcaucuugauuaaacgaagacaacagaagaucaggaaauauacgaugcgccggcuguuacaggagacagagcucguggaaccccugaccccauccggggcaaugccgaaccaggcccaaaugagaauacuuaaggagacugaacugaggaaagucaagguguugggaagcggcgcuuucgguaccguauacaaagggauuuggaucccugacggcgagaaugugaagauccccguugccauuaagguccuccgcgaaaacacaucuccaaaagcaaauaaggagauccuggaugaggcuuacgugauggccggagugggcucacccuaugucagucgacuacuggggauuugccucaccagcacuguucagcuggugacacagcuuaugccuuacggaugcuugcuggaccaugugcgggaaaaccguggcagauuagguucccaggaucuccugaauugguguaugcaaauagcgaaagggaugucuuaucuugaggacguaaggcugguccaccgcgaucuagccgcucggaacgugcucguuaagucgccaaaccaugugaaaaucacggacuuuggacuggcaagauugcuggauauugacgaaaccgaguaccacgccgauggcgguaagguccccaucaaguggauggcuuuagaaagcauccucaggcgacgcuucacucaucaguccgacguguggucauauggcguuacagugugggagcugaugaccuuuggggccaaaccuuacgauggcauuccggcacgggagauaccagaccuucuggaaaagggagagagauugccccagccuccaaucugcacaauugauguauauaugaucauggucaaauguuggaugauugacagugaaugcaggccccguuuccgcgagcucgugucugaauuuagccggauggcgagagacccucaaagguucguggucauccagaaugaggaucuggggccggccucuccccuagacucaacuuuuuaccgaagccugcuugaggaugacgauaugggagaccucguugaugcugaagaguaccuggugccacagcagggcuucuuuuguccugaccccgccccaggugcagggggaaugguacaccaccggcaucgcuccuccaguaccagaagcggcgguggcgauuugacgcugggguuagaaccuucugaggaggaagcucccagguccccacucgccccgucagagggagcaggcagugacguguucgauggggaccugggaaugggcgccgcuaagggucuucaaagccugccuacccacgaucccucgccauugcagcgguauuccgaagaccccacagucccucucccaucugagacugacggguacguggcgccccugaccugcagcccucagccggaauauguuaaccagccagaugugcgaccccaaccucccucaccaagagagggaccucuacccgccgcacgcccagcuggcgccacacuggagaggccuaaaacucuuaguccggguaagaauggcgucgugaaggacguuuucgccuuugggggagcuguggaaaaccccgaguaccucaccccacagggcggggcagccccucagccccauccaccucccgcguucuccccggcuuuugauaaucuguauuacugggaccaggauccaccugaacguggagcacccccaucuacguucaaaggcacacccaccgccgagaacccugaauauuuggguuuagacgucccgguauga

SEQ ID NO: 2235 - RNA, 1260 nt, Artificial Sequence
  AAD56009 variant
auggagcuggccgcucucugcagauggggccuucuguuggcauuacugcccccuggggccgcgagcacccagguguguacaggaacugacaugaagcuaaggcucccagcuuccccggaaacgcaccuggauaugcuucggcaucuguaccaagguugccaggucguucagggcaacuuggagcucaccuaucugcccacaaaugccucucugucauuccuccaggacauccaagaagugcagggguacguauuaauugcacacaaccaggugcgccaggucccucugcaacgacuucguauagugagaggaacucaguuguuugaggauaauuaugcccuggcuguucuagacaacggcgauccacucaauaacaccacacccgugaccggugcaaguccugggggacugagggaacuucagcugcggagcuugacugagauccucaaaggcggcguccugauucagcgcaauccacaauuauguuaccaggacacaauccuguggaaggauauuuuccauaaaaacaaucagcucgcccuuacccugaucgacacgaacagauccagggcuugccaccccuguucuccuaugugcaaggggucgcgguguuggggagagucaagcgaagauugccaaaguuugacucgcaccgugugugccgguggcugcgcgcgauguaaagggccacuaccgacagacugcugccaugagcagugugcagccggaugcacuggccccaagcacuccgauugucuggcuugccuccacuuuaaucauucugguauaugugaacugcacugcccugcccuuguaaccuauaacacagacaccuucgagagcaugccaaaucccgaggggagauacacguuuggagcauccuguguuacugcuugcccuuauaacuaccugucaacagaugugggcaguuguaccuuggucugcccacuccauaaucaggaagugacugccgaggacggcacacagaggugugaaaagugcagcaaacccugcgcgcgggggacccacucucugccgccucgucccgccgcagugccagucccuuuacgcaugcaacccggaccagcucaccccguucuguccuuccuaagaccuucaugggaccucgugagcgccuuuuacagucugccacuugcuccguugucucccacguccguaccuaucagcccagugucggucgguaggggccccgauccugacgcccauguggcaguugaucugucucgguaugagggguga

SEQ ID NO: 2236 - RNA, 546 nt, Artificial Sequence
  U70863.1 variant
ggcagccacuccaugagauacuucuuuaccucugugucaaggcccgggcggggagagccucgcuucaucgccgucgguuauguugacgauacacaguuugugcgauucgacagugaugcugcaagccaacguauggaaccaagagccccguggauugagcaggaaggccccgaguacugggacggggaaacuaggaagguaaaagcgcauucccagacgcaccggguggaucugggaacccuccgcggcuauuacaaccagucugaggcugguucgcauacaguccaaagaauguaugggugcgacgugggaucagauuggagguuucuucggggcuaccaccaguaugccuacgacggcaaggauuacauagcacugaaagaggacuugcgcagcuggacugccgcugauauggcagcccagaccacaaagcauaaaugggaaaccgcucacguugccgagcaguuacgagcguaucuggaagggacuuguguggaguggcuaagaagguaccucgagaauggaaaggaaacacugcaacggacc

SEQ ID NO: 2237 - RNA, 543 nt, Artificial Sequence
  AH009136.2 variant
agccacuccaugagauacuucuuuaccucugugucaaggcccggccgcggggagccucgguucaucgccgucggauauguugacgauacacaguuugugcgauucgacagugaugcugcaagccaacguauggaaccaagagccccguggauugagcaggaaggucccgaguacugggacggcgaaacuaggaagguaaaagcgcauucccagacgcaccggguggaucuggggacccuccgcggauauuacaaccagucugaggcuggcucgcauacaguccaaagaauguaugguugcgacguggggucagauuggagguuucuucggggauaccaccaguaugccuacgacggcaaggauuacauagcacugaaagaggacuugcgcagcuggacugccgcugauauggcagcccagaccacaaagcauaaaugggaagcugcccacguugcggagcaguuacgagcauaucuggaaggcaccuguguggaguggcuaagaagguaccucgagaaugggaaggaaacucugcaacggaca

SEQ ID NO: 2238 - RNA, 705 nt, Artificial Sequence
  AAG09781 variant
augcugagagugcccgagccuaggccaggcgaagccaaggcugagggggcagccccgcccaccccuagcaaaccacucacauccuuccuuauccaggacauucugcgggauggagcgcaacgccaggguggccgaacuucuucacagcgucagagagaccccgaaccugagccagaacccgagccugaagggggaaggagucgggcuggcgcccaaaacgaucaguugagcacggguccacgcgcagccccggaggaggcugaaaccuuagcagagacagagcccgaaagacaccugggguccuaccuacucgacucugagaauacuucgggagcccugccuaggcuuccacagacccccaagcagccucaaaaacggucacgcgcugccuuuagccauacacaggucauagaacuggagcgaaaguucagucaccagaaauauuuguccgcgccagaaagagcacaucucgccaagaaccugaagcugaccgagacucagguuaaaaucugguuucaaaauaggcgguacaagacaaaacguaagcagcucucuagcgaguuaggcgaucuggaaaaacacuccucacuucccgcuuugaaggaggaagccuucagucgcgcaagccuggugucuguauauaacuccuacccguauuacccuuaucuauacugcgugggcucauggagccccgcuuuuugguga

SEQ ID NO: 2239 - RNA, 942 nt, Artificial Sequence
  BAG37303 variant
auggccagcuucagaaagcugacccucuccgagaaagugcccccuaaccacccaucuaggaagaaagucaauuuucuugacaugucacuggaugacaucauuauauacaaggaauuggagggcacaaacgcugaagaggagaaaaauaagcggcagaaccauaguaagaaagaaagcccgucccgccaacagucuaaggcacaccgacaucgucacagaagggauuauucgcggugccgcucaaauagcgaggaagggaaccaugacaaaaagcccagucagaaaccuuccggauucaagucuggucagcacccauuaaauggccaaccccugaucgagcaggaaaaguguagcgauaacuacgaggcccaggcggagaaaaaucaggggcaauccgaaggaaaccagcaccagucagagggcaauccugacaagagugaagagagccagggucaaccagaagagaaccaucacucugagagauccaggaaucaucuagaacggucacucagccagagugaucgcucucaggggcaacugaaacgacaccacccccaguaugagagaucccauggacaguacaagaggagccacggccagucggaacggucucauggccacuccgagcguucacaugggcacagugaacgcagccacggacauuccgagagaucucacggucauagcaaaaggucacggagucaaggcgaccuuguugauacucaguccgaccugauugcuacgcagcgagauuugaucgccacccagaaggaccucauugcaacacaacgcgaucugaucgccacucagagagaccugauagugacccagagggaccucguagcuacagagcgggauuuaaucaaccagagcgggcgcucucacggacaaucagaaagacaccagagguauaguaccggcaaaaauacuauuacaaccuga

SEQ ID NO: 2240 - RNA, 942 nt, Artificial Sequence
  AAI28135 variant
auggccagcuucagaaagcugacccucuccgagaaagugcccccuaaccacccaucuaggaagaaagucaauuuucuugacaugucacuggaugacaucauuauauacaaggaauuggagggcacaaacgcugaagaggagaaaaauaagcggcagaaccauaguaagaaagaaagcccgucccgccaacagucuaaggcacaccgacaucgucacagaaggggguauucgcggugccgcucaaauagcgaggaaggaaaccaugauaaaaagcccagucagaaaccuuccgguuucaagucuggccagcacccauuaaaugggcaaccccugaucgagcaggaaaaguguagcgacaacuacgaggcccaggcggagaaaaaucagggacaauccgaaggcaaccagcaccagucagaggguaauccugauaagagugaagagagccaggggcaaccagaagagaaccaucacucugagagauccaggaaucaucuagaacggucacucagccagagugaccgcucucagggacaacugaaacgacaccacccccaguaugagagaucccauggccaguacaagaggagccacggccagucggaacggucucaugggcacuccgagcguucacauggacacagugaacgcagccacggucauuccgagagaucucacggccauagcaaaaggucacggagucaaggggaucuuguugacacucaguccgaucugauugcuacgcagcgagacuugaucgccacccagaaggaucucauugcaacacaacgcgaccugaucgccacucagagagaucugauagugacccagagggaccucguagcuacagagcgggacuuaaucaaccagagcggacgcucucacggccaaucagaaagacaccagagguauaguaccgguaaaaauacuauuacaaccuga

SEQ ID NO: 2241 - RNA, 384 nt, Artificial Sequence
  12543784 variant
augaucaagaaaaaccugaagaaacucggcauugaggaaaccuaccuuaauauaaucaaggccauuuaugacagacccacagcuagcauccagaaaacugagaaccuguccacgaagaccgggacaucucaagaauaccacuugucaccuuuaugguucuauauugugcuggagauccuagcaaguacuauaaggcaggaaaagaaucucaaagauauccauaccgagaaggaggaagucaaacugagccuuuuugccgacgcgaugauucuguacuugaagaaaccaaacgauuccacacggaagcuccuggagcugaucaagaaaauucacucuucgugccgcaucaagauaaauauucauuucgcuuuuuguucacaguga

SEQ ID NO: 2242 - RNA, 1926 nt, Artificial Sequence
  AAA63226 variant
auggccaaggcugcagccaucggcauugaccuggggaccacauacagcugcgugggagucuuccagcacgguaaaguugagauaaucgcgaacgaucaaggcaauagaacuacgcccuccuauguggcuuuuaccgacacagaaaggcucauuggggaugccgcaaagaaccagguagcccuuaauccucagaacacuguguucgacgcuaaacggcugaucggacgcaaguuuggcgauccagucgugcagucugacaugaaacauuggccguuccaaguuauuaaugauggugacaagcccaaggugcaggucucauacaaaggggagaccaaggcauuuuauccugaagagaucaguagcaugguguugacaaaaaugaaggaaauagccgaggcuuacuuaggauauccaguaaccaacgccguuaucacugugcccgcguacuucaaugauucccagcgacaggcaacaaaagacgccggcgucauugcuggccugaacgugcuacguaucauuaaugagccuaccgccgcagcuaucgccuaugggcucgauagaacgggaaagggugaaaggaacgugcugauauuugaccuuggcgggggaacuuucgaugucucuauucugaccaucgacgacggcauuuuugagguuaaggcgacagccggugauacucaccuugggggagaagacuucgauaaucggcucgugaaccauuuuguagaggaguucaaacgcaagcacaaaaaggacaucucgcaaaauaaaagagcagugaggcggcugcgcaccgcuugugaacgagccaagagaacacugucaagcaguacccaggcuucccucgagaucgauucuuuauuugaaggcauugacuucuacacgagcauaacuagggcccgguucgaggaacugugcuccgaucuuuuucguucaacauuggagccagucgagaaagcacugcgcgacgccaagcuagauaaggcucagauccaugaccucgugcugguuggcgggaguacccggauucccaaagugcagaaguugcugcaagauuucuuuaacggaagggacuugaauaaaagcaucaacccugacgaagcggucgcauacggugccgcugugcaggccgcaauacucaugggcgauaagucugagaacguacaggaccuguuacugcucgauguugccccacuuucccugggguuggaaacugcuggaggcgugaugacagcccuaauuaaaagaaauucaaccaucccgacgaagcaaacccagaucuucacaacuuauagcgacaaccagcccgguguccugauucagguguacgagggggaacgagcaaugaccaaggauaauaaccuccugggccgcuuugagcuuaguggaaucccuccagcgcccagaggcgucccucaaauugaggugacauucgacauagaugcuaaugggauccugaacguuacugccaccgacaaaucuacaggaaaggcaaauaaaauuaccaucacuaacgauaaggguagguuguccaaagaagagaucgaacggauggugcaggaggccgaaaaguauaaggcugaggacgagguacagcgcgaaagagucagcgccaaaaaugcacucgagucguacgcuuuuaacaugaagucugccguggaagaugagggccugaaagggaagauuuccgaggcggacaaaaagaagguuuuagauaaaugucaggaagugauaucauggcuggacgccaauacgcuagcugagaaggacgaguucgaacacaaaaggaaggaacucgagcaagucugcaacccaaucauuaguggacuguaucagggcgccggugggcccggcccgggaggcuuuggggcacagggaccuaaagguggcagcggguccggacccacaaucgaggaaguggauuga

SEQ ID NO: 2243 - RNA, 1926 nt, Artificial Sequence; identical to SEQ ID NO: 2242
  AAA63227 variant

SEQ ID NO: 2244 - RNA, 627 nt, Artificial Sequence
  AAI21098 variant
auggcccugggccagaagcuguucaucaccaugagcagaggggcuggaaggcuucaagguacacugugggcauugguguuuuuaggcauucuggucgggaugguugugcccuccccugccggaacucgggcgaacaauacgcuacucgacucucgcggcugggguacccugcuuucacgaagucgugcugggcuggccggagagauagcaggcguaaacugggaaagcggcuacuugguggggaucaaaagacagaggcggcucuauugcaaugucggaauugguuuccaccuccaggugcugccagauggccgcaucuccgggacacaugaggaaaacccguacucucucuuagagauuucgacuguugaaagaggaguggucucacuguuuggcgugaggagcgcccuuuucguagcuaugaauaguaagggucgguuguaugcaacccccuccuuucaggaggaguguaaauuccgcgaaacacugcuaccuaacaauuacaacgccuaugagucugaccucuaccaagggaccuauaucgcucugagcaaguacggacgaguuaaaagaggcuccaaggugucaccaauaaugacugucacacacuuucuucccaggaucuga

SEQ ID NO: 2245 - RNA, 1569 nt, Artificial Sequence
  BAA74724 variant
augcccagagccccuaggugccgggcugugcgcagccugcuccgaucccacuaccgugagguccuuccacuggcaaccuucguuagaagguugggcccgcagggguggcgguuagugcaacgcggagaccccgccgcguuuagagcucugguagcccagugucuagugugcgucccuugggaugcaaggccacccccugccgcuccaucuuuccgccaggugucaugucucaaggaacugguugcacgggugcuucagcgacugugcgagagaggugccaaaaacgucuuggcuuuuggcuucgcccuccuggacggggcgaggggaggucccccugaagcauuuacaacgagugugcggagcuaucugccaaauacuguaaccgaugcccuccguggcuccggggcuuggggauuacugcuucgcagaguuggcgacgauguguugguccaucugcuagccaggugugcacucuucgugcugguggcuccgucuugcgccuaccaagucugugggcccccucuuuaucagcugggcgcggccacacaggcacggccacccccucacgcuucgggaccacgacgcagauuggguugcgagagggccuggaaccauucaguucgggaagcuggcgugccccucgggcugccggccccuggagcacgcagaaggggcgguagcgccagucguuccuuaccccugccaaagcggccucgaagaggggcugcgcccgagccagagaggacucccguaggacagggcucuugggcacacccuggccgcacccgggggccaagcgacagaggauuuuguguggucuccccggccaggcccgcugaagaggccacaucacucgaaggugcacuuaguggcacccgccauagccacccuucuguggggcgacaacaccaugccggaccacccuccacuucacggccuccacgucccugggauacaccgugcccuccaguuuacgcugagaccaaacacuuccuguauagcaguggcgacaaggagcaguugagacccucuuuucuacuguccagccucaggccuauccugacgggugcccgccggcuuguggaaacuauuuuccuggggucgucucccggcugucagggauugccagcaggcugcccugcgugccccuccgcuaccgggaaauguggaccaugcuuuuggucaugucucgguacaacuagaagugccccgaccggcugcagcuccaggcgaacagcacgcugugagcugcggucuccucagcaacccgucagcgugccagggagaucacccagggccuuauggcguccuccacgccggagaacccagacgcccguagcuuggugcaguuguuccgccagcacugcaccucuggcuggaguuaggcuacgagccggccucccggcgccagccggugcuccccggccucuggggcuucaggcacaacgcagaagguucuugcggaauacaaagaaguuuauaucucugggcaaacaugccaagcucucacugcaggaacuuaccuggaaaaugagugugcgagauugcgcuuggcugagacgcagccca

SEQ ID NO: 2246 - RNA, 1680 nt, Artificial Sequence
  BAA23606 variant
augagacugcacaggcuccgggcccgccuuagcgcuguggcaugcggccuguuguuacugcuaguccgagggcagggacaagacuccgccucucccauccguaccacacauacuggucagguucucggcucacuggugcacguaaagggggcgaacgcuggagugcagacguuccuuggcauuccuuuugccaaaccaccgcugggucccuugagauucgcaccuccagagcccccugaaaguuggagcggggucagggauggaaccacacauccagccaugugucuccaggaccugacugcuguggaguccgaauuucugucucaauucaauaugaccuuucccucggauucaaugagcgaggacugccucuacuuaaguauauauaccccugcacacucccaugaaggcucuaaccugccaguuaugguguggauccacggcggggcccuugucuucggaauggcuagcuuguacgaugguuccaugcuggccgcgcuagagaaugugguaguugugauuauccaguaucggcucggcguccugggguuuuucucaacaggagacaagcacgcaacuggcaacugggguuaccuugaucagguggccgcucugcgcugggugcagcaaaauauugcccauuuugggggaaacccggacagagucacaaucuucggcgagagugcaggcgggaccagcguuucuuccuuggugguaucacccauaagccagggacucuuucacggugcuaucauggaaaguggcguggcccuguuaccugggcugauugcgucuuccgccgaugucaucagcacggugguugcaaaucucucggcuugugaccagguggauucugaggcccuugucggaugccugaggggcaaauccaaggaagagauuuuggcuaucaacaaaccauucaagaugauacccggugugguagacgggguuuuucuaccucggcauccacaggagcugcucgccucagcagauuuccaacccgugccgaguauugucggcgugaauaacaaugaguucggauggcugaucccuaaggucaugcgcauuuaugacacucagaaagagauggaccgagaagccagccaggcugcgcuucaaaagaugcugaccuugcucaugcugcccccaacauuuggcgauuuacugagagaggaauacaucggggacaacggagauccucagacucuacaggcacaguuccaagagaugauggccgacuccauguuugugauccccgcucuccagguugcccacuuccaguguucuagggcaccaguguauuuuuacgaguuccagcaccaacccagcuggcugaaaaauauucggccuccacauaugaaggccgaucacggugacgaacuuccguuuguauuccguucauuuuucggcgggaacuacauaaaauuuaccgaggaagaggaacaguugagucgcaagaugaugaaguauugggcuaauuucgccagaaacggaaaccccaauggcgagggucugccucauuggccacucuuugaucaggaggaacaguaccugcaacuuaaccugcagcccgcagucgggagggcguugaaagcucaccggcuccaguucuggaagaaagcccugccucagaagauccaagaguuagaagaaccagaggaacgacauacagagcuguga

SEQ ID NO: 2247 - RNA, 1740 nt, Artificial Sequence
  AAH65269 variant
augaacaagcuguacaucggcaaucucagcgagaacgccgcucccuccgaccuugaaucuauuuucaaagaugcaaagauaccugugucagggccauuucuggucaaaaccggauaugccuucguugacugcccggaugagaguugggcguugaaggcuaucgaagccuuaagcgguaaaauugagcugcacggcaagcccaucgaaguggagcauuccguaccuaagagacagaggauucggaaacuacaaauccgcaauauaccaccccaccuccagugggaggugcuggacucucuucugguccaguacggggugguugaaucgugugaacaggugaacacagauucagagacugcagucgugaauguaacguauagcaguaaggaccaagcccgacaggcuuuggauaaacucaacggauuucagcuggagaauuucacccugaagguugcauacaucccugacgagauggccgcucagcaaaacccacuccagcagccccguggcagaagggguuuagggcagcggggauccucucgccaaggcagcccuggcuccgugucaaaacagaagccaugcgaucugccgcuuagauugcugguccccacacaguuugugggggccauuaucggaaaggaaggugcgacuauuaggaauaucaccaaacaaacacagaguaagauagacgugcaucggaaagagaacgcaggcgccgcugaaaagagcauuaccauccuaucuacuccugaggggacauccgccgcauguaaaucaauucucgaaaucaugcacaaggaggcucaggauaucaaauucaccgaggaaauuccacugaagauacuugcccauaauaacuuugucggacgccugaucggcaaggagggucgaaauuugaaaaagauugaacaggacacggauacuaaaaucaccauaagcccccuccaagagcugacauuauauaacccugaaagaacuauuaccguuaaggggaauguggagacaugcgcgaaagccgaggaagagaucaugaagaagaucagggaaaguuacgagaacgacauugcaucuaugaaccugcaggcucaccucaucccaggacuuaaucugaacgccuugggccuauuucccccgaccuccggcaugccucccccaacgagcgggccucccucggcuaugacuccacccuauccucaguucgaacagucugagacagagaccguacaccuguucauuccagcccucuccgugggagcaauaaucgguaaacaaggccagcauauuaagcagcugucacgguuugccggggcuaguaucaaaaucgcgccggcagaagcccccgacgcuaagguccguauggugauuauaacuggaccuccagaggcccaguucaaagcacaaggccgcaucuacgguaagauuaaggaagagaauuuuguuagccccaaagaggaagugaaacuugaggcccacaucagagucccuuccuucgcugccgggagggugauuggcaagggaggcaagacaguaaacgaacugcagaauuugucuagcgcagagguuguggucccacgggaucagacccccgacgaaaacgaucagguggucgugaaaaucacggggcauuucuacgcgugucaaguugcucagcgaaagauacaggagauccucacccaagugaagcagcaccagcagcaaaaagcccugcagucaggaccgccucagagucgcagaaaguga

SEQ ID NO: 2248 - RNA, 537 nt, Artificial Sequence
  AAA63207 variant
augcacagcuccgcccugcucugcugucuugugcuguugaccggcgucagagcuucucccgggcagggaacacaaucagagaacaguugcacucauuucccugguaauuuaccaaacaugcugagggaccuacgggaugcauuuagccgcguuaagacguucuuucagaugaaagaccagcucgauaaucugcuucugaaggaauccuugcucgaggacuucaaaggcuaccuggggugucaggcccugucugaaaugauccaauuuuaucucgaggaagugaugccgcaggcggagaaccaggaucccgacauuaaggcucacguaaauucguuaggagagaaccugaaaacccuucgauugcgucugagaaggugccaucgguuccuaccuugugaaaauaagucaaaggccguggagcaggucaaaaacgcauuuaauaagcuccaagaaaaaggcauauacaaggccaugagcgaguucgauaucuuuauuaacuauaucgaggcuuacaugacaaugaaaauucgcaauuga

SEQ ID NO: 2249 - RNA, 1143 nt, Artificial Sequence
  AAB17170 variant
auggccuucgugugccuggcuaucggcugucucuacaccuuucuuauuagcacaacuuucgggugcacguccucuucagacaccgagauaaaggucaaucccccucaggauuuugaaaucguugacccaggauaucuggguuacuuguauuuacaauggcagccgccccugagucuagaucacuucaaagaguguacaguggaauacgagcucaaguauagaaacauuggcagcgaaacuuggaaaaccaucauuacaaagaaccugcauuacaaagacggguuugaucuuaauaagggaaucgaggcaaagauacacacccuguugccuuggcagugcacuaacggcuccgagguacagucuucgugggccgaaacaaccuauuggaucucaccacaagguauucccgagacgaaagugcaggacauggauugugucuacuacaauuggcaguaucuccugugcagcuggaagccugggaucggagugcugcucgacacuaacuacaauuuauucuauugguacgaaggccuggaucaugcgcuucaguguguugacuauauuaaagcugauggccaaaacaucgggugcagguuuccauacuuggaggccagugacuauaaggauuucuacauaugugugaauggauccucugagaacaaacccauucggagcuccuacuuuaccuuccagcugcagaauaucgucaagccucuaccaccgguguaucucacauuuacucgcgaaucaaguugcgagauuaagcugaaauggagcaucccccuugguccuaucccagcacgauguuucgacuacgaaauugagauacgugaagacgauaccacacugguaaccgccacgguugagaacgagacuuauacauugaagaccacuaaugaaacaagacagcucugcuuuguggucaggucuaaagugaacaucuacugcuccgacgauggcauuuggucagaguggagcgacaagcaauguugggaaggggaggaucugaguaaaaagaccuuacugcgguucuggcuccccuucggauuuauccuuauacuggugauuuucgucacgggcuugcuacugcgcaaaccuaauaccuauccaaagaugauccccgaauuuuucugcgacacauga

SEQ ID NO: 2250 - RNA, 819 nt, Artificial Sequence
  AAA67527 variant
auggacagcuaccugcucauguggggccuucugaccuucaucauggugcccgggugccaggccgaguugugugaugacgauccuccagaaauuccgcacgcuacauuuaaggcaauggccuauaaagagggaacuauguuaaacugcgaauguaagagagguuucaggcggauaaaauccggcucucuguacaugcuaugcacgggaaauucaagucauagcuccugggacaaccaaugucagugcaccucuucggcgacacgcaauacuaccaagcaggucacaccccagccugaggaacaaaaagagcgaaagaccacugagaugcagucaccaaugcagcccguugaucaggcuagccucccugggcacugucgugaaccacccccuugggagaacgaagccacagagagaaucuaucauuuugugguaggccaaaugguguacuaucagugcguccaggguuacagggcacugcaccgggggccagccgagaguguguguaagaugacccauggaaaaacgcgcuggacucagccgcaacuuauuugcaccggcgaaauggagacaucccaguuccccggcgaagagaagccucaggcuucuccagaagggagacccgagagcgagacuuccugucugguuaccacaaccgacuuucaaauccagacggaaauggcagccacuauggagacaucaauuuucaccacugaauaucagguggcugucgccggaugcguguuuuugcucaucaguguacugcugcucagcgguuuaacauggcagaggcggcaacgcaaaucucgaagaaccauauga

SEQ ID NO: 2251 - RNA, 1656 nt, Artificial Sequence
  AAA59143 variant
auggccgcucccgcacugagcuggagacucccucuucugaucuuguuacugccacuagccaccuccugggcgucugcugccgugaacggcacaucacaguucacuugcuuuuacaauaguagggcaaacauuagcugugucuggucccaagacggggcccuccaggauacgucuugccagguucacgcuuggccggaccggcgccgauggaaucagaccugugagcugcuucccgugucgcaagcaucaugggccugcaaccugauauugggagcuccugauagccagaagcucacaacuguagacaucgugacccugcguguccuguguagagaaggugugagguggcggguuauggccauucaggauuucaaaccauuugagaaucuccgcuuaauggcgcccaucagucuucaggugguccauguggaaacacacagaugcaacauuuccugggagaucucucaagcaagccauuauuucgaaaggcaccuggaguuugaggcccggaccuuguccccuggccauacuugggaagaggcuccacugcuaacacucaagcagaaacaggaauggauaugucuggagacccuuacgcccgacacucaguacgaguuccaaguacgcguuaagccucugcagggggaauuuaccacauggucaccauggagucagccguuggccuuccgaacuaaacccgcagcucucggaaaggauaccaucccuuggcugggccacuuacuggugggucucagcggggccuuuggauucauuauccuugucuaucuguugauuaauugcagaaacacaggcccauggcuaaagaaagugcugaaguguaauacccccgacccuucuaaauuuuucucccaacucucaagcgagcacggcggggaugugcagaaguggcugaguucuccauuucccuccagcucguucucuccgggaggucuugcgccugaaaucucaccccuggaggucuuggaaagggacaaaguuacgcagcuccuguuacagcaagauaaggugccagagccugccucccugaguagcaaccauucccuaacuucuugcuucacaaaucagggcuacuuuuucuuucaccuccccgacgcacuggagauagaggcuugucagguauauuucaccuacgauccauauagcgaagaagaccccgacgaggggguggccggagcuccuacuggcucaaguccacagccgcuucaacccuuguccggugaagaugacgccuacugcacauuuccuagccgggaugaccugcuccuguucucuccaucacuucugggagggcccaguccuccaagcaccgcacccggcggcuccggggccggagaggagcguaugccgccuucuuugcaggaacgcgucccaagagauugggacccccagccucucggucccccaacgccuggcgugcccgaucugguugacuuucagccaccgccugaguuagugcugagggaagcuggggaggaaguccccgaugcgggaccacgggagggcgugucguuccccuggagccgaccuccaggucaaggggaguuucgcgcacuaaacgccagacucccccugaauaccgacgcuuaccuuuccuugcaggaacugcagggccaggauccuacacaucucguauga

SEQ ID NO: 2252 - RNA, 1110 nt, Artificial Sequence
  AAA59145 variant
augcugaagcccagccucccuuucaccucccuucuguuuuugcaguuaccacugcuaggcguggggcucaacacaacuauccugacgccgaauggaaacgaggacaccacagccgauuucuuucuuacuaccaugcccacagacucucugucagucaguaccuugccucucccagaaguucaaugcuucguguuuaauguagaguacaugaacuguacuuggaauagcuccucugaaccccagccuacaaaccugacccugcacuauugguacaaaaauucggauaacgacaaggugcagaaaugcucacauuaucucuucagcgaggaaaucacgagugguugucaguuacaaaagaaagagauacaccuguaccagacuuuugucgugcagcuucaggauccaagagagcccaggcggcaagcuacccagauguugaagcugcagaaucuaguuaucccuugggcaccagaaaaccucacacugcauaaacuuuccgagucucagcuggaauugaauuggaacaaucgcuuccucaaccacugccuggagcauuuagugcaauaucgaacugacugggaucacagcuggaccgagcaguccgucgacuaccgucacaaguuuucacugccgaguguggauggccagaagagauauacauucaggguacggagccgcuuuaauccccucugugggucugcccaacauugguccgaauggucacacccuauucauuggggaagcaacaccaguaaagagaacccauuccuuuuugcgcuggaagcuguugugaucucugucggcuccauggguuugauuaucagccuacugugcguguacuucuggcucgagagaacgaugcccaggauaccuacucugaagaaucuugaagaccuggugacagaguaccacgggaacuucucggccuggucuggagucuccaaaggcuuggcagagucacuccagccagauuauagugaacggcuguguuuaguuagcgagauucccccgaagggcggggcccugggagaagguccuggcgcuucccccugcaaucagcacucuccauacugggcaccucccuguuauacccuaaagccagagacuuga

SEQ ID NO: 2253 - RNA, 405 nt, Artificial Sequence
  AAA74469 variant
augagaaugcugcuccaccuuagccuguuggccuuaggcgcugcauacguguaugccauccccaccgagauuccuacauccgcgcuggucaaggaaacucuagcucuccugucuacgcauaggacccuucugauagccaacgagacauugcggaucccaguuccggugcacaaaaaucaucagcucugcacugaagagauuuuccaagggaucggaacccuggaaucacagacaguacaggguggcaccguggagcgccuguuuaagaaccucaguuuaauuaaaaaguacaucgacgggcagaaaaagaaguguggagaggaacgacguagagucaaucaauuccuggauuaucuucaggaguuuuugggcgugaugaacacugaauggauaaucgagagcuga

SEQ ID NO: 2254 - RNA, 555 nt, Artificial Sequence
  AAH06487 variant
auggugagaaagcugaaauuccacgagcagaagcuccuuaaacaagucgacuuucugaacugggaaguuaccgaucauaauuugcacgaguuaagggugcugcggcgcuaccgacuacagcguagagaagacuauacaagguacaaccagcucagccgggccguacgcgagcuggcuagaaggcuucgggaucugcccgaacgcgaccaguuccgagugagagcauccgccgcguugcucgauaagcuguaugcucugggccucgucccuacuagggggucuuuagagcugugcgacuuugugacggccucaaguuucugucggcgucgccuuccaaccguuuugcugaaacuaagaauggcacaacaucuccaggccgcuguggcauuugucgagcagggacacgugaggguagguccggauguugugacagaccccgccuuccuggucacucggagcauggaagauuuugugaccuggguggacuccucuaagaucaagcgacauguccuugaguacaaugaggaacgcgaugacuucgaucuggaggcuuga

SEQ ID NO: 2255 - RNA, 3150 nt, Artificial Sequence
  AAH08786 variant
augggcagcagaacccccgaguccccucugcacgccgugcagcucaggugggggccacggcgccgaccgccccuucugccuuuguuacugcuacuccugccacccccuccacgugucggagguuucaaccuugacgcugaagcacccgccguucugucuggcccuccagggucauuuuucggauuuaguguggaguucuacagaccgggcacagaugguguaagcguguuggucggggcgcccaaggcuaauacuucccaaccuggagugcuccagggcggcgccguuuaucugugcccauggggagcaucucccacgcaguguaccccuaucgaauuugacucgaaagggucaaggcugcucgagagcaguuuauccucuagcgaaggugaggagccaguggaauacaagucccugcagugguucggcgccacaguccgggcucaugggucaaguauucuugcaugcgcccccuuguauagcuggcgcacugagaaagaaccgcugucugauccugugggaaccuguuaccuauccacagacaacuuuaccagaauacucgaguaugcucccugcaggucagauuucagcugggccgcgggccaagguuacugucaagggggauuuagugcagaguucacuaagacaggccggguaguucugggcgggccaggaucuuauuuuuggcagggucagauccuuuccgccacccaggaacagauugcugagagcuacuacccugaauaucugaucaauuuggugcagggccagcuccaaacgcgccaggccucgucuauuuacgacgauuccuaucugggguacucagucgcagugggagaguucaguggcgacgauacugaagacuuuguggcugguguccccaaagggaacuuaaccuauggcuacguuacaauccugaauggaagcgauauacgaucccucuauaacuucucuggcgagcagauggccagcuacuucggguacgcgguggccgcaacugacguaaauggagauggucuugacgaccuguuggugggcgcuccacuacugauggauagaacccccgacgggaggccucaagaggucggacggguguauguuuaccuccagcacccagccggcaucgaaccgacacccacccugacgcuuacuggucaugaugaguuugggcguuucggcucaagucugacaccuuugggagaccucgaucaggacggcuauaacgauguggcuauuggggccccauuuggaggugaaacccagcaaggcgucguguucguauuucccgggggaccuggcggucugggguccaagccaagccagguuuuacagccccugugggcagccucucacacuccggacuucuuuggcucagcucuacgcggaggcagagaucucgacgggaauggauacccugaucugaucgugggcaguuucggugucgacaaggcgguggucuauagggggcggccaauugugagcgcauccgccucucuuacaaucuuucccgcuauguucaacccugaggaacgaucgugcagcuuggagggaaaucccguugccuguauaaaccuguccuuuugccucaaugcaucaggcaaacauguggccgacaguauugguuucaccguagagcugcagcuugauuggcaaaagcagaaaggcgggguccgcagagcucuguuuuuggccucuaggcaggcaacgcucacccagacacuguuaauccaaaacggagcgcgggaagacugucgcgagaugaagauuuaccugagaaaugaaagcgaguucagggauaaacuauccccaauccacaucgcucucaacuucucacuggacccucaggcccccguggauagccacggccuucguccagcauugcauuaucagucuaagucccggauugaagacaaggcccagauacugcucgauugcggggaggacaacaucuguguuccggaucugcaauuagagguguuuggagaacagaaucacgucuaccugggcgacaaaaacgcucuuaauuugacuuuccaugcccagaacgugggugaagggggagcauacgaggcugagcuccgaguaaccgccccucccgaggcggaauauaguggccuggugagacacccagguaauuuuagcucucuauccugcgauuacuucgccguuaaccaaucaaggcugcucgucugcgaccugggcaaucccaugaaggcuggggcaagucuuuggggaggcuugcgcuuuacagugccucaucugcgggauacuaaaaagaccauucaguucgacuuucagaucuuaagcaaaaaccucaauaacucgcaguccgacguggucucuuucagacugagcguugaggcccaagcucaggugacacuuaauggggugucaaagccagaagccguacuguuucccgucagugauuggcacccuagggaccagccgcagaaagaggaagauuugggaccagcagugcaccauguuuaugagcucauaaaccaaggccccuccucuauuagccagggugugcuggagcuauccuguccucaggcgcuggaagggcagcaacuccuguacgucacccgcgugacuggacuuaauugcacgacaaaccacccaaucaaucccaagggcuuggagcuggacccugaagguucauuacaucaccagcagaagcgagaggccccgagccggaguucugcuuccagcggcccccaaauccucaaauguccagaagccgagugcuuccgucugagaugugagcuugggccucugcaccagcaggaaucgcagucacuacaacuccauuuuaggguuugggcaaagaccuuccugcagcgcgagcaccagcccuuuucuuugcagugcgaagcuguguauaaagcccugaagaugccauaccggauuuuaccuagacaacucccccagaaagagaggcagguagcaacugccguccaguggaccaaggcugaaggaaguuauggcgugccacuguggaucauuauacuugcgauccuguucggguugcuccugcuaggacugcuuauuuacauccucuacaagcugggcuucuuuaaacgauccuugccguaugguacagccauggagaaggcacaacugaaaccucccgcuaccagcgaugccuga

SEQ ID NO: 2256 - RNA, 2397 nt, Artificial Sequence
  AAH20057 variant
augaaccugcagcccaucuucuggauuggccucauaagcuccgugugcugugucuuugcccaaaccgacgagaauagaugccuuaaggcuaacgcaaaaucuuguggggaaugcauccaggccggaccuaauugugguuggugcacaaacucaacuuuccugcaggagggcaugccaacgagugcgaggugugaugacuuggaggcuuuaaagaaaaaggggugcccgcccgaugacauugaaaauccucggggaagcaaagauaucaagaagaacaaaaauguuaccaaccgcuccaagggcacagccgaaaaacugaagccagaggacauuacucagauccaaccccagcagcuagugcuccgacugcguucuggugagccucagaccuuuacacuuaaauucaagagagcagaagauuacccaauagaccuguauuacuugauggaucucucguauucaaugaaggacgaucuggagaauguaaaaagccuggggaccgaccucaugaacgaaaugaggcggaucacaagugauuuucgcauuggauucggcuccuuuguggagaagacugucaugcccuacaucucuaccacgccugccaaauuaagaaauccauguacuagcgagcaaaacugcaccuccccguucucauauaagaaugugcugagucuuacaaacaaaggcgaaguuuuuaaugaguugguggggaagcagaggauuagcggaaaccuggacucucccgaagguggcuucgacgcuaucaugcaggucgcagugugugggucccuaauaggauggcggaacguaacucgccuccugguuuuuagcaccgaugccggcuuccacuuugcuggugacgggaaacuuggaggcauugugcugccuaaugauggccagugccauuuggagaacaauauguacacaaugagccacuauuacgacuacccaaguaucgcccaucucguccaaaagcugucugaaaacaauauucagaccaucuucgcggugacggaggaguuccagcccguguauaaggaacugaaaaacuuaaucccuaaguccgcagucgggacucucagcgccaauucgucuaacguuauucaacuuauaaucgaugcuuacaauucccugucaagugaggugauuuuggaaaacggaaaacuaagcgaggguguaacaaucuccuauaagucuuacugcaaaaauggcgugaacgggaccggagaaaauggccgaaaguguagcaacauaucaauuggugacgagguccaguuugagaucaguaucacuuccaauaagugccccaaaaaggauagcgacucuuucaaaauuagaccacugggguuuacagaagagguggaaguuauccuccaguauauuugugagugcgaaugucagucagagggcauaccggagaguccuaagugccacgaaggaaacggcaccuucgaguguggggccuguaggugcaacgaaggacgggugggucgucauugcgaguguagcacggaugaggucaauuccgaagacauggaugcauacugccgcaaagagaacucuucggaaaucugcagcaauaacggcgagugugugugcgggcaauguguaugcagaaagagggacaauaccaacgaaauuuauuccggaaaguuuugugagugcgacaauuucaacugugaucggucaaauggccugaucugcggugggaacggcguuuguaaaugccgagugugugagugcaaucccaacuacacaggaagugcuugcgacuguucucuugauacuucaaccugcgaagccuccaauggccagaucuguaacgggcgcggaauuugcgaguguggugucugcaaguguacagacccaaaauuucagggccagacuugcgaaaugugucaaaccugccugggggugugugcggagcacaaggaaugcguccagugcagagccuucaauaaaggagagaagaaggauacauguacccaggagugcucauacuuuaacauaacuaaaguggaaagcagggacaaguugccucagcccguucaaccagaucccgugucucacuguaaagagaaggacguagaugacugcugguucuauuuuacguacuccgucaacggcaauaacgaagugaugguucauguggucgagaauccugaauguccaacagguccggauaucauucccaucguggcagggguaguggcuggcauuguucucaucggacuggccuuacugcuaauauggaaacuccugaugaucauucacgaccggcgcgaguucgcuaaguuugagaaagaaaagaugaacgccaagugggauaccggcgagaauccuaucuauaaaagugcagucacuaccguggugaacccaaaguacgaagggaaauga

SEQ ID NO: 2257 - RNA, 2367 nt, Artificial Sequence
  AAA36122 variant
augggcaucgagcugcucugccuuuucuuucuguucuuggggagaaacgaccacgugcagggagguugugccuuaggcggggcugaaaccugcgaggauugucugcuaauuggaccccaaugcgcauggugugcccaggaaaauuuuacacauccuagcggcgucggugagaggugcgacacuccagcgaaccuccuggcuaaggggugucagcuuaauuucauagaaaacccgguuucccagguggagauccugaaaaauaagcccuugucuguaggacggcagaaaaacucaagugauauugugcaaaucgccccucagagccucauucugaagcugcgcccaggcggcgcacagacgcuccaaguccacgugcgacagaccgaggacuaccccguugauuuauauuaccugauggaccuuuccgccucuauggaugacgauuugaauacaaucaaagaacuggggucgcgucuaucaaaggagaugagcaagcucacuuccaacuuuagacugggauucgguuccuuuguggaaaaaccugucucuccauucgugaagaccacacccgaggagauagcuaauccuugcagcuccaucccauauuuuugucuuccgaccuucggcuuuaaacauauucugcccuugacuaacgacgcagaaagguucaaugagaucguaaagaaccagaaaauuucagccaauaucgauacaccugaagggggauuugacgcuauaaugcaggccgcgguuugcaaggagaagauuggcuggcggaacgauagucuccaccuguuaguguucgucagcgacgcagacucucauuucgguauggauuccaaacuggccgggaucgugauuccaaaugacggacucugucaccuugauucaaagaacgaauacagcaugaguaccgugcuggaguaucccacgaucggccaauugaucgacaagcuaguccagaacaauguucugcucauuuuugcugugacucaggagcaaguacaccuguacgaaaacuaugccaaacuuauaccuggcgcaaccguggggcuguugcagaaagauucuggaaauauccuccagcugauuaucuccgcuuacgaggaauuacgcagcgaggucgaacuggaggugcuaggugacacagagggccucaaccugucguucacugccauaugcaauaacgggacccuuuuucagcaucaaaagaaaugcucucacaugaagguuggagauacagcguccuucucagugaccgucaauauuccacauugugaaagaaggagucggcacaucaucauuaagcccgugggcuugggugacgcccuggagcuccugguaagcccggaaugcaacugugauugccagaaagagguugaagugaauaguucuaagugucaccaugggaacggcagcuuucagugcggagucugugcaugccacccuggccauauggggccccgcugugagugcggagaggacaugcuuucaacggauaguuguaaagaagcuccagaccacccuuccugcagcggucgaggcgacugcuacugugggcagugcaucugucaucugucucccuauggaaauauuuacggcccauauugccaaugugauaacuucucaugcgugagacacaaggguuugcucugugggggcaauggagacugcgauuguggcgagugcgucuguaggaguggguggacuggagaauacugcaacugcacaaccagcacugacuccugugugucugaggaugguguucugugcucgggccguggggacugugugugcggaaaauguguaugcacaaaucccggcgccagcgguccuaccugugagcggugcccaacguguggggauccgugcaacuccaagcgcucauguauagaaugccacuuaagugcugccggccaggcaagagaggaaugcgucgacaaguguaaacuggccggagcuaccaucucugaggaagaggauuuuagcaaggacggcuccgugucaugcagccuacagggggagaacgaaugucucauuacauuccugaucacuaccgauaaugagggaaaaacaaucauucauucuauaaacgaaaaggacugccccaaaccuccaaauauccccaugauuaugcuuggcguuuccuuggcgauccugcucauuggugugguccuguuauguaucuggaagcugcuugugaguuuucacgauaggaaggagguagcaaaauucgaagccgagcggagcaaggcuaaauggcagacugggaccaacccuuuguaucgaggaucuacauccaccuuuaagaaugugacuuacaaacaucgcgagaagcaaaagguugaccucucaacggacugcuga

SEQ ID NO: 2258 - RNA, 786 nt, Artificial Sequence
  EAW71937 variant
augugggaccuggugcucagcaucgcccuuuccgucggcugcaccggggcuguuccccugauucagucuagaauagugggagguugggagugugaaaagcacucacaaccuuggcagguagcaguguacagucauggcugggcccacugcgggggagucuuggugcauccacaguggguuuuaacagcggcucacugucugaaaaagaacagccagguguggcuaggcaggcauaaucucuucgagccggaagauacuggucaacggguccccgugucccacucuuuuccucacccacuguauaacaugucgcuucugaaacaucagucauugcgccccgacgaggauagcagucacgaccucaugcugcugcgacucuccgaaccugccaagaucacggauguaguuaaaguguuagggcugccaacccaggagcccgcacuuggaacaacuugcuacgccucuggcuggggcagcauugagccugaagaguucuugcguccaagaucccugcagugugucucacuacaucuccugaguaaugacaugugcgcuagggcauauagcgaaaaggugaccgaguuuaugcuuugugccgggcuguggacaggagguaaggauaccugcggcggggacucuggaggcccguugguguguaacgguguccuccaagggaucacuuccuggggacccgagccuugcgcucugccagaaaaacccgccguuuacacaaaggugguacacuaucggaaauggauuaaggauaccaucgcggcaaauccuuga

SEQ ID NO: 2259 - RNA, 672 nt, Artificial Sequence
  EAW71938 variant
augugggaccuggugcucagcaucgcccuuuccgucggcugcaccggggcuguuccccugauucagucuagaauagugggagguugggagugugaaaagcacucacaaccuuggcagguagcaguguacagucauggcugggcccacugcgggggagucuuggugcauccacaguggguuuuaacagcggcucacugucugaaaaagaacagccagguguggcuaggcaggcauaaucucuucgagccggaagauacuggucaacggguccccgugucccacucuuuuccucacccacuguauaacaugucgcuucugaaacaucagucauugcgccccgacgaggauagcagucacgaccucaugcugcugcgacucuccgaaccugccaagaucacggauguaguuaaaguguuagggcugccaacccaggagcccgcacuuggaacaacuugcuacgccucuggcuggggcagcauugagccugaagaguucuugcguccaagaucccugcagugugucucacuacaucuccugaguaaugacaugugcgcuagggcauauagcgaaaaggugaccgaguuuaugcuuugugccgggcuguggacaggagguaaggauaccugcggcgugucucacccguacucccaacacuuggaggggaaaggauga

SEQ ID NO: 2260 - RNA, 189 nt, Artificial Sequence
  BAF98781 variant
augagccugcucaagcaccagucccuuagacccgacgaggauucuucacaugaccugauguuguuaaggcugagugaaccugccaaaaucaccgauguggucaagguucuaggccucccaacacaagagccggcucuggggacuacgugcuacgcaagcggaugggguuccauugaacccgaggaauga

SEQ ID NO: 2261 - RNA, 735 nt, Artificial Sequence
  BAG62239 variant
augggcacccugugggggugccccggagccccuccagugggugcucacagcuguccgcuccccaaggaggucuccagaacacuuggcucuggggaaggaauggcaguuucacauaggaacaauaguggcaugcugccuccagguagcuuguuacggaacucccagguguggcuggggcgccacaaucuauucgagcccgaagacacuggacgacguguaccugugucucauucguuuccacacccccucuacaacaugucacugcuuaaacaucaaagccugagaccugaugaggacaguucccacgauuugaugcuccugaggcugucugaaccagccaagaucacggacgucgugaaaguucucggcuuaccgacccaggagcccgcgcugggcacaacuugcuaugcuagcggguggggauccauugagccugaagaguuccuucggccacgcucauugcagugugugagucugcaccuacucagcaaugauaugugcgccagagcauacucugaaaaggucaccgaguuuaugcugugugccggucuuuggacaggcgggaaagauaccugcggaggcgacuccggugggccccugguguguaacggaguauugcagggcauaacuucauggggcccugagccaugcgcucuccccgaaaagccggcaguuuauacaaaggugguccauuacaggaaauggaucaaggacaccauugccgcuaauccuuga

SEQ ID NO: 2262 - RNA, 786 nt, Artificial Sequence; identical to SEQ ID NO: 2258
  AAA74454 variant

SEQ ID NO: 2263 - RNA, 150 nt, Artificial Sequence
  AAR10469 variant
augugggaccuggugcucagcaucgcccuuuccgucggcugcaccgggauugcuagaucuggauggguugguacaacuugucugucauugaagacgcaggcaaggggcaguuuaagcgccaccgcgucccacacacggucuacuauauga

SEQ ID NO: 2264 - RNA, 543 nt, Artificial Sequence
  AAR10468 variant
augugggaccuggugcucagcaucgcccuuuccgucggcugcaccggggcuguuccccugauucagucuagaauagugggagguugggagugugaaaagcacucacaaccuuggcagguagcaguguacagucauggcugggcccacugcgggggagucuuggugcauccacaguggguuuuaacagcggcucacugucugaaaaagaacagccagguguggcuaggcaggcauaaucucuucgagccggaagauacuggucaacggguccccgugucccacucuuuuccucacccacuguauaacaugucgcuucugaaacaucagucauugcgccccgacgaggauagcagucacgaccucaugcugcugcgacucuccgaaccugccaagaucacggauguaguuaaaguguuagggcugccaacccaggagcccgcacuuggaacaacuugcuacgccucuggcuggggcagcauugagccugaagaguguaccccagggccggacggagucgcugguucccccgaugcauggguguga

SEQ ID NO: 2265 - RNA, 765 nt, Artificial Sequence
  EAW71943 variant
auggccaccgcuggcaaccccugggggugguuccugggauaccucauccuugguguggcaggcagccuggucuccgggucuugcucacagauuauaaauggagaggacuguaguccucacagccaaccauggcaggccgcguugguuauggaaaacgaguuauuuugcuccggcgugcugguacauccgcagugggugcuaucugcugcccacuguuuccaaaauucguauacaaucggucucgggcugcauucacuugaagcagaucaggagcccggaagccagauggucgaagccagucuguccgugagacacccugaguacaacaggccauugcucgcuaaugaccugaugcugauuaagcucgaugagucuguuagcgaauccgacacuauccggucaauuaguaucgcaagccagugccccacggccggcaacucuuguuuaguguccggcugggggcugcuugcuaauggacgcaugccuaccgucuugcagugcgugaacguaucaguugugagcgaggaagucuguaguaaacuguaugauccacuauaccaucccucuauguuuugcgccgguggcgggcaagaccagaaggauuccuguaauggagacagcggcgguccucucauaugcaacggguaucugcagggacuugugucguucggcaaagcgccauguggccaggugggggucccgggaguuuacacaaaucugugcaaguuuacugaguggaucgagaaaaccgugcaagcaucuuga

SEQ ID NO: 2266 - RNA, 228 nt, Artificial Sequence
  AAX30051 variant
auggccaccgcuggcaaccccugggggugguuccugggauaccucauccuugguguggcaggcagccuggucuccgggucuugcucacagauuauaaauggagaggacuguaguccucacagccaaccauggcaggccgcguugguuauggaaaacgaguuauuuugcuccggcgugcugguacauccgcagugggugcuaucugcugcccacuguuuccagaaguga

SEQ ID NO: 2267 - RNA, 588 nt, Artificial Sequence
  AAL14782 variant
auggccaccgcuggcaaccccugggggugguuccugggauaccucauccuugguguggcaggcagccuggucuccgggucuugcucacagauuauaaauggagaggacuguaguccucacagccaaccauggcaggccgcguugguuauggaaaacgaguuauuuugcuccggcgugcugguacauccgcagugggugcuaucugcugcccacuguuuccaaaauucguauacaaucggucucgggcugcauucacuugaagcagaucaggagcccggaagccagauggucgaagccagucuguccgugagacacccugaguacaacaggccauugcucgcuaaugaccugaugcugauuaagcucgaugagucuguuagcgaauccgacacuauccggucaauuaguaucgcaagccagugccccacggccggcaacucuuguuuaguguccggcugggggcugcuugcuaauggagaguugaccggugucugccugccuucaagccgccgaaguucugcccagucccguggccuaacacaaagcucggcgucucaggcagaaugucucccaugcuguuccgccuga

SEQ ID NO: 2268 - RNA, 480 nt, Artificial Sequence
  AAL14781 variant
auggccaccgcuggcaaccccugggggugguuccugggauaccucauccuugguguggcaggcagccuggucuccgggucuugcucacagauuauaaauggagaggacuguaguccucacagccaaccauggcaggccgcguugguuauggaaaacgaguuauuuugcuccggcgugcugguacauccgcagugggugcuaucugcugcccacuguuuccaaaauucguauacaaucggucucgggcugcauucacuugaagcagaucaggagcccggaagccagauggucgaagccagucuguccgugagacacccugaguacaacaggccauugcucgcuaaugaccugaugcugauuaagcucgaugagucuguuagcgaauccgacacuauccggucaauuaguaucgcaagccagugccccacggccggcaacucuuguuuaguguccggcugggggcugcuugcuaauggauga

SEQ ID NO: 2269 - RNA, 765 nt, Artificial Sequence
  AAD21580 variant
auggccaccgcuggcaaccccugggggugguuccugggauaccucauccuugguguggcaggcagccuggucuccgggucuugcucacagauuauaaauggagaggacuguaguccucacagccaaccauggcaggccgcguugguuauggaaaacgaguuauuuugcuccggcgugcugguacauccgcagugggugcuaucugcugcccacuguuuccaaaauucguauacaaucggucucgggcugcauucacuugaagcagaucaggagcccggaagccagauggucgaagccagucuguccgugagacacccugaguacaacaggccauugcucgcuaaugaccugaugcugauuaagcucgaugagucuguuagcgaauccgacacuauccggucaauuaguaucgcaagccagugccccacggccggcaacucuuguuuaguguccggcugggggcugcuugcuaauggacgcaugccuaccgucuugcagugcgugaacguaucaguugugagcgaggaagucuguaguaaacuguaugauccacuauaccaucccucuauguuuugcgccgguggcgggcacgaccaaaaggauuccuguaauggagacagcggcgguccucucauaugcaacggguaucugcagggacuugugucguucggcaaagcgccauguggccaggugggggucccgggaguuuacacaaaucugugcaaguuuacugaguggaucgagaaaaccgugcaggcaucuuga

SEQ ID NO: 2270 - RNA, 2673 nt, Artificial Sequence
  AAC83230 variant
augagccagggcauccugucucccccugccgggcuccuuuccgacgaugacguggucguuucaccaauguucgagaguaccgcugcagaucugggaagcgugguaagaaagaacuuguuauccgacugcucuguggucucgacaucacuggaagauaaacaacaggugccgagcgaggacaguauggaaaagguuaaaguguaccuaaggguccggccccuccugccuuccgagcuugaacgccaggaggaucaggguugugugcgaauugagaauguagaaacucugguuuugcaagccccaaaggacucuuuugcgcucaaaagcaacgagcguggcauagggcaggcuacgcacagauucaccuuuucccagaucuucggacccgaagugggccaggccucauuuuucaaucugacagucaaggagauggugaaggaugugcugaaaggucaaaacuggcucauuuauacuuacggggucaccaauaguggaaagacacauaccauccagggcacuauuaaagacggcgggaucuuaccuaggagccuggcacuuauauuuaacucuuugcagggacagcugcacccaacacccgaucuaaagccucuccuguccaaugagguuaucuggcuugacucaaaacaaauucggcaggaagagaugaagaagcugagcuugcucaacgguggccugcaggaagaggaauuaaguaccucucugaaacgcuccguguauaucgagagcagaauugggacgucgacuucuuucgauuccggaaucgccggccucucaaguauaagccaaugcaccuccucuagccagcuugacgagacaucacauaggugggcucagccagacacugcaccgcugcccguaccugccaauauucgguuuaguaucuggauuuccuucuuugaaaucuacaacgaguugcuauaugaucugcucgaaccacccagccagcaacgcaagcgacagacccugagacuuugugaggaccagaaugguaacccuuacgugaaagaucugaauuggauccacguccaggacgcugaagaggccuggaaguugcucaaaguggggaggaagaaccaaucuuucgcgucaacacaucugaaucagaacaguagccggucccacucuauauuuucgauucguaucuuacaucugcagggagagggcgauauuguuccaaaaaucagcgaacuaucccucugcgaccuggcaggcucagagcgcuguaaggaucagaagaguggggaaagacuuaaagaggccggaaacauaaauaccucuuugcacacgcuggguaggugcauugcugcccuccggcaaaaccagcagaaucgaagcaagcagaaccuggugcccuuccgcgacuccaaacuuacuagagucuuccaaggcuuuuucacagggaggggacggucauguaugaucgugaauguaaacccgugcgcaagcaccuaugaugaaacucugcacguugcuaaguuuucugccaucgcgucccaguuggugcaugccccucccaugcagcucggcuucccaagucugcacagcuuuauuaaagagcacucuuuacaagucuccccuucacuggagaagggugcaaaggcugacacagggcuagaugacgacaucgaaaaugaggccgauauuaguauguacggcaaagaagaacuccuucagguggucgaggcuaugaagacccuguugcugaaagaacgccaggagaagcuccagcuggaaaugcauuuaagagacgagauauguaacgaaaugguggagcaaaugcagcagagggagcaguggugcagcgaacaccuggauacgcaaaaagagcuuuuggaagagauguacgaagagaagcucaauauccugaaggagucgcuaaccuccuucuaucaggaagagauucaggaacgugacgagaaaaucgaggagcuggaggcccuccugcaggaagcacggcaacagucuguugcccaucagcaaagcggaucagagcuugcuuugcgaagaagucagaggcuggcggcauccgccucuacacagcaguuacaagaagugaaggcuaaacuccagcaguguaaggccgagcugaacagcacuaccgaggaacuucacaaauaccagaagaugcuggagcccccacccuccgcaaagccuuuuacaaucgauguagacaaaaaguuggaagagggccagaaaaauauucgccuccugcggacugaacuacaaaagcugggggagucacuccagagcgccgagagagcuugcugccauaguaccggagccgguaaacugaggcaggcacuuacaaccugugaugacauauugaucaagcaagaucagacucuggcggaauuacagaacaauaugguccucgugaaacuggaccuucgcaagaaggcugccugcauugcagagcaguaucacacgguucugaaacuacaaggccaggugucugccaagaaacgacucgggacaaaccaggaaaaucaacagccaaaccagcagccgcccggaaagaaaccuuuccugcggaacuugcugccacguacccccacuugucaauccagcaccgauugcucgccuuacgcuagaaucuuaaggucacgccggucuccacuccugaagaguggccccuuugguaagaaauauuga

SEQ ID NO: 2271 - RNA, 1113 nt, Artificial Sequence
  AAH34621 variant
auggccaucacccuggaggaagcucccuggcucggcuggcuucuggugaaggcauugaugagauucgccuuuauggucguuaacaauuuaguggcgauuccuagcuacauaugcuauguaaucauucugcagccacuaagggugcucgacuccaaacgguucugguacaucgaggggauuauguauaaguggcugcuuggaauggucgcuucuugggguugguacgccggcuauacagugauggaauggggagaggauaucaaagcaguuucaaaggacgaagccgugaugcuggucaaccaccaagcuacuggggauguguguacguugaugaugugccuccaggacaaaggccugguaguugcacagaugauguggcugauggaucauauauuuaaguacaccaauuucgguaucgugagucucguccacggggacuuuuucauucgccagggacgaagcuaucgugaucaacaguuacugcuuuugaagaaacaucuggagaacaauuacagauccagggaccggaaguggaucgugcuauuuccggagggcggcuuccuccgcaaaagaagggaaacaucucaggccuuugcuaagaaaaacaaucugcccuuccuuacuaacgugacccugccucggucgggggccacaaagauuaucuugaaugcgcucgucgcacagcaaaagaacggaucaccagccgguggcgaugcuaaagagcuggacagcaagaguaaaggguuacaguggauaauugauaccacuaucgccuaccccaaggcagaaccuauugacauccagacauggauccugggauaucgcaaaccaaccguuacgcacgugcauuaccgaauuuuucccauaaaggauguaccucucgagacugacgaccuuaccacauggcuguaucagagauucguggagaaagaagauuugcuaucccacuuuuacgagacuggcgcuuucccaccgucuaagggucacaaggaagccgucagcagggagaugacccuguccaaucucuggaucuuccugauucaaucauuugcguuccuuaguggguauaugugguacaacaucauacaguauuuuuaccauugucuguucuga

SEQ ID NO: 2272 - RNA, 2178 nt, Artificial Sequence
  AAH14924 variant
auggccauggacagcucccugcaggcuagacucuuccccggccuugcaaucaagauucaaaggucuaacgggcugauacacucagccaaugugcggaccgucaacuuggagaaaaguugcguuagcguggaaugggcggagggaggugcuacaaagggcaaagaaaucgauuuugacgauguagccgcaauuaauccugaguuacugcagcuacucccacugcauccgaaggacaaccuuccccugcaggaaaaugugacuauccagaaacaaaagcgccgauccgucaacucuaagauuccugccccaaaagagucguugcguucaagaagcacgaggaugaguaccguguccgagcuccggaucacagcucaggaaaaugauauggagguugaacugcccgcagccgcuaacucucgcaagcaguucagcgugccuccagcccccacuagaccuuccuguccagcggucgcagagauaccgcugaggauggugucagaggaaauggaggaacagguacacaguauccgggggucuagcuccgccaaucccguuaacucagugcgccgaaaaagcugccucgucaaggagguggagaaaaugaagaauaagagagaggagaaaaaggcucaaaacagugaaaugaggaugaaacgggcccaggaguacgacucuuccuuuccuaauugggaguucgcacguaugauuaaggaguuucgcgcuaccuuagaaugucauccacugacaaugaccgaucccaucgaggagcacagaauuugcgugugugucaggaaacggccucuuaacaagcaggaauuggccaaaaaggagaucgacguuauaagcauuccaucgaagugccugcuacucgugcaugaacccaaacugaagguagaucuuacuaaauaucuggagaaucaggcguucuguuuugacuucgccuuugaugaaacagcaucuaacgagguggucuaccgauucaccgcucgcccguuggugcaaacgaucuuugagggaggcaaggccacuugcuucgcuuauggucagaccggguccggaaaaacacacacuaugggcggcgaccucucagggaaggcccagaacgcaaguaagggaauuuacgccauggcuagcagagauguuuuucugcugaaaaaucaaccuuguuauaggaaguuaggucucgaaguguacgucaccuucuucgagaucuauaacggcaaacuuuuugaccuguugaauaagaaagcgaagcuacgggugcuggaagacgggaagcagcagguacagguugugggacuccaagagcaccuggucaacuccgcagaugacgugaucaaaaugauugauaugggcucugccugccgcacaagcggucagaccuucgcuaauucaaacaguuccagaagccaugccuguuuucagauaauccuuagggcaaaggggcguaugcacggaaaauucucucuggucgacuuggccggcaaugagcggggcgcugauacgucaagugccgaccgacagacuagaauggaaggggcagagauuaacaagagccuccuggcguuaaaagaaugcaucagggcucugggacaaaauaaggcccauacacccuuucgcgaguccaagcuaacccaggugcuccgggauucuuucauaggugaaaacucgagaacuugcaugauugcaacaaucagcccaggcaucuccucaugugaguacacccugaauacgcuuagguacgccgaccgcguuaaagaguugaguccucacucugggcccagcggagaacagcugauucagauggagaccgaagagauggaggcuugcuccaacggcgcccucaucccagguaaucugucaaaggaagaggaagaacuuagcucucaaauguccaguuuuaacgaagcaaugacacagauucgagagcuggaagagaaagcuauggaggaauugaaggagauaauccagcaggggcccgauuggcucgaacugagcgagaugacugagcaaccugacuaugauuuagaaaccuucgugaauaaagccgagucugcgcuggcccagcaggcuaagcacuuuuccgcacuacgggacguaauuaaagcccuccgucuggcuaugcaacuugaagaacaggccucaagacagaucaguagcaagaagaggccacaguga

SEQ ID NO: 2273 - RNA, 342 nt, Artificial Sequence
  AAH62223 variant
augaacuucuaccugcuccuugccagcuccauccugugcgcuuugauuguguuuuggaaguauagaagguuccagcggaauaccggcgagaugucuucaaacaguacagcauuagcccugguccgccccagcuccucugggcuaauaaauucgaacacugacaauaaccucgcgguuuacgaucugucacgagacauccuuaauaacuuuccucacagcauugcucgucaaaaacggauccuggugaauuugaguaugguagaaaacaagcucguggagcuggaacauacgcugcucuccaaaggauucaggggugccucuccacacagaaagagcaccuga

SEQ ID NO: 2274 - RNA, 2583 nt, Artificial Sequence
  AAA56833 variant
augggccccuggggguggaagcugagauggaccguggcccuccuucuggcugcagccggaacagcggucggugacaggugcgagcggaacgaauuucagugucaagauggcaaaugcaucagcuacaaguggguuugugacggguccgcugagugccaggauggaucugacgaaucacaggagacuuguuugagugugacgugcaaaagcggcgauuuuuccuguggugggcgcguaaaucgaugcauuccucaguucuggcguugugacggacaaguggauugcgacaacggcucugaugaacagggcuguccaccgaagaccugcucgcaggacgaguuuagaugccacgaugggaaauguauaucaaggcaguucgucugcgacagcgaucgggacuguuuagacggaagugaugaggccuccugccccgugcugacaugugguccugcaucuuuucaaugcaauagcuccacuuguaucccacagcuaugggccugcgacaacgaucccgacugugaagauggcucagacgaguggccucagcgcugcagagggcucuauguuuuccagggagauaguagcccauguucugcuuuugaguuccauugccuguccggcgaaugcauucacucaagcuggaggugugacggugggcccgauugcaaggacaagagugaugaggaaaauugugcaguggcuaccugccggccugacgaguuucaauguucugacggaaacugcauccauggcucccgccagugugaucgagaauacgacugcaaagauaugagcgacgaggucggcugugugaauguaacacuuugcgaagggccaaacaaguucaaaugucacucgggagagugcauuacccuggauaagguuugcaauauggccagagacuguagggauuggucugacgagccgaucaaagaaugcgguacuaacgaguguuuggauaauaacggcgggugcucccauguguguaaugaccucaagauaggauaugaaugccugugucccgauggcuuucagcuggucgcccaacggcguugcgaggacaucgaugaaugucaggacccugacacaugcucacagcucugugugaacuuagaggguggguacaagugccagugcgaggaaggcuuccaacuggauccacacaccaaagcguguaaggcagugggaaguauugccuaucuuuucuucacgaaucgccacgaggucagaaaaaugacuuuggacaggagcgaauacaccucccugauccccaaccuacggaacguuguggcucucgauacagagguagccucuaaucgaauuuauuggagcgaccugucacagcgcaugaucugcaguacucagcuugauagagcacauggcguguccagcuacgacaccgucauaucuagggauauucaggcuccugacgggcuggccguggauuggauccacucaaacauuuacuggacagacaguguuuugggaaccgugagcgucgcggauacgaagggugugaaacggaagacucucuuccgcgaaaauggcuccaaaccaagagccaucguaguugaccccgugcauggguuuauguauuggacagauuggggaaccccggcaaagaucaagaaaggcggucugaacggggucgacauuuacucuuuagugacugagaauauacaauggccuaacggcaucacacuggaccuccuuucgggaaggcuguauugggucgauagcaaguugcacuccauuucaaguaucgacgugaauggcgggaaccguaaaaccauacuagaggaugaaaagcggcuggcucaccccuucucucucgccguuuuugaggacaaaguguucuggacggauauuaucaaugaagcuaucuuuagcgccaaccgacugaccggauccgacguaaaucuucuggcagagaacuugcucucaccagaggauaugguccuguuccauaauuuaacacagccuagaggugugaacuggugugaaaggacuacccugagcaauggcgggugccaguaccuaugucuccccgccccacagauuaacccccacucuccuaaguuuacaugcgcuuguccagacggaaugcugcuugcgcgcgauaugcgguccugcuugacugaggcagaagccgcuguugccacccaagagacaaguaccgugagacugaaggucagcucuacugcagugaggacgcagcauacaaccacucgcccgguacccgacaccucccgacucccuggcgccacaccaggucugaccacuguggaaaucguuacaaugucacaccaggcucuuggggaugucgccggccggggaaacgagaaaaagcccaguagcgugcgugcacugucgauuguguugccuauaguccuccugguuuucuuaugucugggcguguuucuacucuggaaaaauuggagacugaagaacaucaauuccauuaacuucgacaauccaguguaucagaaaacgaccgaggacgaaguacauaucugccacaaccaagauggguacucuuaucccagcaggcagauggucucacuugaggacgauguggcguga

SEQ ID NO: 2275 - RNA, 1302 nt, Artificial Sequence
  CAA70989 variant
augguguggaaggucgccguuuuccugagcguggcucucggcaucggggcaguacccauugacgauccugaggacggagguaaacacuggguggucauaguggccggcuccaacgggugguacaauuauagacaucaggcggaugcuugccacgccuaccaaaucauucauaggaacggaaucccagacgaacagauuguugugaugauguaugaugacaucgcauacucugaggauaauccgacccccggcauagucaucaaccggccuaaugguacagacguguaucaggggguaccaaaggauuacacuggagaagacguuacgccccagaacuuucuugccgugcugcgcggcgaugcugaggcagucaaaggcauugggucaggaaagguguugaaaagugguccucaagaccacguguucaucuauuuuaccgaucauggcagcacagggauuuuagucuucccaaaugaagaccugcacguuaaggaccuaaacgagacuauccacuacauguacaagcauaaaauguaucgaaagaugguguuuuacauagaggccugugaauccggaucuaugaugaaucaccuccccgauaacauuaauguauaugcuaccacagccgcgaacccucgugagucgucauacgcaugcuauuacgacgagaaaagaagcaccuaucugggcgauugguacagugugaauuggauggaagacuccgaugucgaggaccuuacuaaggaaacacugcauaaacaguaccacuuggugaagucucacaccaacacgagccauguuaugcaguaugguaauaagacuaucuccaccaugaaagugaugcaguuccaagggaugaagaggaaagccucaaguccagucccgcugcccccugugacacaccucgaucugacuccaagccccgacguaccucucaccauuaugaagcggaaauuaaugaacacaaacgaucuggaggaaucucgccagcuuaccgaggaaauccagagacauuuggacgcuaggcaccugaucgagaaguccguucggaaaauugugucacuacucgccgcaagcgaggcugaagucgagcagcugcuuagugaacgcgccccacugacgggacauucuuguuaccccgaggcguugcuccacuuucgaacucacugcuucaauuggcauuccccgacauaugaauacgcccugagacacuuauaugugcuggucaaccucugugagaagccuuacccccuucauaggauaaagcugagcauggaucacgugugcuugggccacuauuga

SEQ ID NO: 2276 - RNA, 1797 nt, Artificial Sequence
  AAL36991 variant
augacccccaucgugacaguccugauuugccucggccuuagccuggggccuagaacucacguucagacgggaaccauaccaaagccgacauugugggccgagcccgacuccgugaucacucaagguucuccuguaaccuuaucaugucagggcagucuggaagcucaggaguacaggcuauaucgggagaaaaagagcgcauccuggauuacacgcauccgaccagagcucgugaaaaacgggcaguuccauauucccucuaucaccugggaacacacuggacguuacggcugccaauauuacucgagagccagguggucagagcugagcgauccucuuguccuggugaugacaggugcguauccaaagcccaccuugagugcucagccuuccccaguugugacgucugggggacgggucacucuccagugugagagccagguggccuuuggcggcuucauacugugcaaagaaggggaggaagaacauccgcaaugucugaacucccagccccacgcacgcggaucaaguagagccaucuuuagcguagguccuguuucuccaaauaggcgguggucccaucgcugcuacggcuaugaccucaauucacccuacguguggagcaguccuucugauuuacuggagcuuuuggucccagggguguccaagaagcccagccugucggugcagccgggaccugucguugcucccggcgaaucucuaacccuccaguguguguccgacguagguuacgaucgauucgugcuguauaaagagggggaaagagaccuuaggcaacugccaggacggcagccucaggcaggcuugucacaagccaacuuuacacucggccccgucagucguagcuacgggggacaguaucgcugcuacggugcucacaaucuguccucugaguguagcgccccaucagaucccuuagacauucugaucacuggccagauuagagggaccccuuucaucagugugcagccaggaccgacaguugcguccggcgaaaacgugacccuccuuugccaaagcuggaggcaguuucacacguuccuguugacuaaggccggugccgcugaugcaccccuacggcugcgaucuauacaugaguauccuaaauaccaggcagaguuuccaaugucacccgucacaagugcucacgccgggaccuaucgcuguuacggcagccucaauuccgacccuuaccugcuuucucauccaucggaaccccuggaguuggugguaagcggaccguccaugggcucaaguccuccacccacugggccuauuucuacacccgcgggaccagaagaucagccucucacccccacggguagcgacccacaauccggccuggggagacacuuaggaguugugaucggcauucuggucgccgugguccuacuccugcuuuugcugcuccugcuuuuccugaucuugaggcaccggcgccaggguaagcauuggaccucaacacagagaaaagcagauuuucagcacccggcuggggccgugggcccugagcccacugacaggggacuccaauggcguagcucuccagcugccgacgcacaggaagagaaccuguaugccgcuguuaaggauacccagcccgaggacggcguggaaauggauacacgggcggcagccuccgaggcuccucaggacguaacuuacgcccaauuacauagucugacccuacgaagaaaggcaacagaaccacccccuagccaggagagggaaccgccagccgagcccucuaucuaugcuacccucgccauucacuga

SEQ ID NO: 2277 - RNA, 498 nt, Artificial Sequence
  CCDS6385.2 variant
auggcccugcucgcacuucuguugguggucgcuuuacccagaguuuggaccgacgccaaccugacagcgaggcagcgggauccugaggacagccaacgcacugaugaaggcgacaaucgaguguggugccacguaugugagcgugaaaacacguucgagugccagaauccaagaagguguaaguggaccgaaccguacugcgugaucgcugccgucaaaauuuuuccccgguucuuuaugguggcaaagcaguguuccgccgggugcgcugcaauggagcgcccuaaaccagaggaaaagagauuccuacucgaggaacccaugccauuuuucuaucugaaauguugcaagauaagguacuguaaccuugagggaccucccaucaauucuucaguuuuuaaggaguaugccgguaguaugggcgaaagcugcgggggacugugguuggcuauucuccugcugcucgccuccaucgcggcaggcuuaucucugucguga

SEQ ID NO: 2278 - RNA, 375 nt, Artificial Sequence
  AAA68873 variant
augagccuggagcagaagucccaacacugcaaacccgaagagggccucgacacccaggaagaggcccuugggcuggugggaguccaggcugcaacaacugaggaacaggaggccguuucuucaaguagcccuuuggugccagguacguuaggcgaaguaccggcggcugggucccccggaccucugaagucuccacaaggcgccucggcaauccccaccgccauugauuucacacuauggagacagucaauaaaagguagcaguaaccaggaggaagaggggccuuccacuucuccagaccccgagagcguguuuagggcugcacucuccaagaaagucgccgaucugauccauuuccuucuguugaaguacuga

SEQ ID NO: 2279 - RNA, 957 nt, Artificial Sequence
  AAH02455 variant
augcugcucggccaaaagagccagagauacaaagccgaggaagggcuucaggcucagggagaggcacccggucugauggacgugcagaucccuaccgccgaggaacaaaaggcggcuuccucuucaaguacauugauuaugggcacuuuagaagaggucacggauagcggguccccaucuccgccccagucgccugagggagccucaagcagucugaccguuacagacuccacucuauggucucagagcgaugaaggcuccucaaguaacgaggaagaggguccaagcaccucucccgacccugcacaccucgagucccuguucagggaagcccuugaugagaaaguggcugaacugguacgguuuuugcuccgcaaguaucagauaaaagagccagugacaaaggcagaaaugcuggagucagucaucaagaauuacaaaaaccauuuccccgacauuuuuagcaaggccagugagugcaugcaagugaucuucgggauugauguuaaagaaguggacccugcuggacacucuuauauccuggucaccugucucggcuuauccuacgauggccugcuuggggacgaucagagcacuccaaagacaggauugcugauaaucgugcuagguaugauucucauggagggcucgcgagccccggaagaggcgaucugggaagcacugucuguaauggggcuuuaugacggacgugagcauuccguuuacuggaaacugagaaaguugcucacccaggagugggugcaggaaaauuaucuggaguacaggcaagcccccggcucagauccuguccgguacgaauuuuuaugggguccacgcgcucuggccgagacgaguuaugugaaggugcucgaacacgucguuagagugaacgcaaggguacggauuagcuaccccucccuucaugaggaggcucugggggaagagaaaggaguguga

SEQ ID NO: 2280 - RNA, 1290 nt, Artificial Sequence
  AAH04479 variant
auggagacccaguucagaaggggcgggcugggaugcagccccgccuccaucaagcggaaaaagaaacgcgaagacucuggugauuuuggccuccaagugucaacaauguucagugaggacgauuuucagagcacugaacgagcuccuuacgggccacagcuucaguggucccaagaccugccgcguguccagguuuucagagagcaggcaaacuuggaagauaggucuccccggcgcacgcagagaauuaccggaggcgagcaaguguuaugggguccuauaacacagaucuuuccaacuguaaggcccgccgaccugacccgggugauuaugccucuagagcagcgcucgcagcacuguaagccagaagaggggcuccaagcgcaggaagaggaucugggacuugucggcgcucaggcccugcaagcagaggaacaggaggccgcuuucuuuucaagcacauugaaugugggcacccucgaggaacugcccgcagccgaaaguccuuccccaccgcagucuccccaggaggagagcuucuccccuacugcuauggacgccaucuuugggucacugagugaugaaggaagcgguucucaagagaaagaaggcccauccacaucacccgaccucauugauccugagagcuucagucaggacaucuuacaugauaagauaaucgaccugguucaccuuuugcugcgaaaguauagagugaaagggcuaauuaccaaggcggaaaugcucggaucugucaucaaaaacuacgaggacuauuuuccagagauuuucagggaagcauccgugugcaugcagcugcuuuuuggcaucgauguaaaggagguugaccccacgagccauucguacgugcuggucacuucuuugaaucucuccuaugaugguauacaguguaacgaacaaucaaugccgaaaagugggcuguuaauuaucgugcugggagugauuuucauggagggcaauugcaucccugaagaggucaugugggagguucucagcaucaugggcguguacgccgggcgggaacacuuccuuuuuggagagcccaagcgucuguugacccagaacuggguacaggaaaaguaucuaguguaccgccaggucccagguacagacccugcuuguuacgaguuccuguggggccccagagcccaugcagagacuuccaaaaugaaggugcucgaauauauugcuaaugccaacgggagggauccaaccucuuaccccagccuguaugaggacgcgcuucgggaagagggagaaggcguuuga

SEQ ID NO: 2281 - RNA, 1110 nt, Artificial Sequence
  EAW99421 variant
augcccagagccccuaagaggcagcggugcaugccagaggaagaccugcaaagccaguccgagacccagggccucgaaggggcucaggcaccgcuugccguggaggaagaugcgucuucaaguacaagcacuuccucuucguuccccagcucauuuccuaguuccucuagcuccucaaguagcucuuguuacccacugauccccuccacgccugaggaggucucagcugacgaugaaaccccaaaucccccucaaagcgcccagauugcaugcaguucuccauccguuguggccagcuugccguuagaccagucggaugagggaucuuccucacagaaagaagagagucccagcacacugcaaguacuaccugacuccgagucucucccacgcagcgaaauagaugagaaggugacugaccugguccaguuccuucuguuuaaauaucagaugaaggaacccaucaccaaagcugagauuuuggaaucagugaucaagaacuacgaggaucacuucccucuccuguuuagugaggcauccgaauguaugcugcucguuuucgguauugacgugaaggaggucgauccaacaggccauagcuuuguguuaguaaccucucuggggcuuacuuaugacggaauguugucagauguucagaguaugcccaaaacaggcauccugauacuaauccucagcauuaucuucauugaagguuacugcaccccggaggaagugaucugggaggcccugaacaugauggggcuuuaugacggaauggagcaccugauauacggcgaaccucgaaaguugcucacgcaagacuggguccaggagaauuaucuggaauaccgucaggugcccggcuccgauccagcuagauacgaguuuuuaugggggccuagggcccaugcggaaauucggaaaaugucucugcucaaguuccuugcaaaagugaacggaucggacccccgcagcuuuccacugugguaugaggaggccuugaaggaugaagaggaaagagcucaagacaggaucgccacuaccgaugacacaacugcaauggcuuccgccucaaguucugcgaccgguagcuucuccuaccccgaguga

SEQ ID NO: 2282 - RNA, 945 nt, Artificial Sequence
  AAH03408 variant
augccccuggagcagagaagccaacacugcaagccugaagagggccucgaagcccagggggaggcucuuggacuggugggugcacaggccccagcgaccgaagaacaggagacagcuuccucuucaaguacuuuggucgaaguuacguuaagggaggugccggccgcagaaagccccuccccuccacauucuccccaaggcgccucgacccugccuacaacuaucaacuacacccuauggucacagagcgacgaggggaguuccaaugaggaacaggagggaccaucuacauuccccgaucucgaaaccagcuuucagguagcucugucccggaaaauggcagagcuugugcacuuccuguugcucaaguaccgcgcccgagaaccuuuuacuaaagcugagaugcugggcucagucauucguaacuuccaagacuuuuucccagugauauuuaguaaggccagcgaguaccugcagcucguuuucgguaucgaaguggucgaggugguaagaauugggcauuuauauauccugguuacaugucuuggauugucuuacgauggccugcuaggcgacaaucagauugugccgaaaaccgggcuccugaucauaguccuugcgaucauugcaaaggaaggagauugcgcccccgaggaaaagaucugggaggagcuguccguguuggaggcuucagacgguagggaggauagcguguuugcccacccucggaaacuccugacgcaggacuuaguccaagaaaacuaucuggaguaccgccagguuccaggcagugaucccgcauguuaugaguuccucugggggccuagagcucuuguggaaacuucuuacguaaaggugcugcaucacuugcuaaaaauuuccggaggcccacacaucagcuaucccccgcugcaugagugggccuuuagggaaggugaggaauga

SEQ ID NO: 2283 - RNA, 930 nt, Artificial Sequence
  AAA03229 variant
augagccuggagcagagaucccuccacugcaagcccgaagaggcccuugaagcucaacaggaggcacugggcuugguguguguccaggccgcgaccucuucaaguagcccuuuaguucuggggacacuagaagaggugccaacugcuggauccacggacccgccccagucuccucaaggugccucggcauucccaaccacaaucaacuuuacuaggcagcggcagcccucagagggcagcaguucccgcgaagaggaagggccuucuaccagcugcauucucgagucccuguuccgagccguaauaaccaaaaagguggcugaucuugucggauuucuguugcucaaauaccgugcaagagagccagugacaaaggccgaaaugcuggagucaguuaucaaaaauuauaagcauuguuuccccgaaauuuuuggcaaggcuagugagagccugcagcucguguucgguaucgacgucaaagaagccgauccuacugggcacucuuacguguuaguaacaugccugggacuuuccuaugacggcuugcugggcgauaaccaaauuaugccaaagaccggguuucuaaucauaguucucgugaugaucgcgauggagggaggucaugcaccggaggaagagauuugggaagaacugucagucauggaaguguacgacggcagggagcacagcgccuauggggagccccggaaacuucugacgcaggauuuggugcaggaaaaguaccucgaguaucgccaggucccugacagugauccagcuagauacgaguuccuguggggacccagggccuuagcagagacuucuuacguuaaagugcuggaauauguaaucaagguguccgcucggguccgcuuuuucuuuccuagccuccgagaggccgcgcuuagagaggaagaggaaggcguguga

SEQ ID NO: 2284 - RNA, 945 nt, Artificial Sequence
  AAA17729 variant
augccccuggagcagagaagccaacacugcaagccugaagagggccucgaagccaggggagaggcucuugggcuggugggugcacaggccccagcgaccgaggaacagcagacagcuuccucuucaaguacuuuggucgagguuacguuaggcgaagugccggccgcagacagccccuccccuccacauucuccccaaggggccucgucauucagcaccacaaucaacuacacucuguggcggcagagugaugagggauccucuaaucaggaagaggagggcccucgcauguuuccagaccuagaaagcgaguuccaggcugcaauuucccgaaaaaugguagaacucgugcacuuucugcuucugaaguaccgugccagagagcccgucaccaaagcugaaauguuggagucagugcucaggaacugucaagauuucuuuccuguuauauucaguaaggccagcgaguaccugcagcugguguuugguaucgaagucguggagguaguuccaauuucucaucucuauaucuuagugacaugccuggggcuuuccuacgacggauugcugggcgauaaucaggucaugccgaaaaccggccuacucauuaucgugcuggcgauaaucgcaauugaaggggacugugcccccgaggaaaagaucugggaggagcuuucaaugcuggaaguguucgagggacgggaagauagcgucuuugcucacccucgcaaguugcucaugcaggaccugguucaagagaacuauuuagaauacagacaggugccagguagugaucccgccugcuaugaguuccuguggggcccuagggcacucauugagacuucuuacguaaaagugcuucaucacacacugaagaucgggggagaaccacacauauccuaucccccguugcaugagcgggcucuacgcgaaggcgaggaguga

SEQ ID NO: 2285 - RNA, 945 nt, Artificial Sequence
  AAA17446 variant
augccccuggagcagagaagccagcacugcaagccugaagagggccucgaagccaggggagaggcucuugggcuggugggugcacaggccccagcgaccgaggaacaggaggcugccuccucuucaaguacauuggucgaaguuacuuuaggcgaggugccggcagccgaaagccccgacccuccacagagcccccaaggggcuucuucgcugccuacgaccaugaacuacccacuauggucacagagcuaugaggauaguuccaaucaggaggaagagggacccucuacauucccugaccucgaaagcgaguuucaggcagcccugucccggaaaguagcugaacuugugcauuuccuguugcucaaguaccgcgcccgagagccagucacuaaagcggagaugcugggcucagugguugguaacuggcaauacuuuuucccggugaucuuuaguaaggcauccucuucccugcagcucgucuucgggauugaauuaauggagguggaucccauaggacaccuguauaucuuugccaccugucuuggcuugucauaugacggccugcuaggggauaaucagauuaugccuaaagcuggacuccugaucauuguacuugccaucauagcacgugaaggugacugcgcuccagaggaaaagaucugggaggagcugagcguuuuggaaguguucgagggcagagaagauaguauucucggggaccccaagaaacuguuaacacagcauuuuguccaagagaacuaccuggaauauaggcaagugccuggaucugauccagccuguuacgaguuccucuggggcccccgggcgcuuguggagaccuccuacgucaagguucugcaccauauggugaaaaucagcggugggccgcacauuucguauccucccuugcacgaauggguacuacgcgagggagaagaguga

SEQ ID NO: 2286 - RNA, 954 nt, Artificial Sequence
  EAW99410 variant
augagcuccgagcagaagucucaacacugcaaacccgaagagggcguggaagcccaggaggaagcucuggggcucgucggagcacaggccccuaccacagaggagcaggaagcggcuguuucaaguagcuccccacuugugccggguacucuggaggaaguacccgccgcagagucugccggcccuccacaaucgccccagggggcuucagcauugccuacgaccaucagcuucacauguuggagacagccaaacgagggaaguuccucucaggaagaggaaggccccagcacuuccccugacgccgagucauuauuuagggaagcucugaguaauaagguggaugagcuagcccauuuccuccugcggaaauaccgcgcgaaggagcuugucaccaaagcagaaaugcuggagcgagugauuaagaacuauaagcguugcuuuccaguuauauucgguaaagccagcgaaucuuugaagaugaucuuugggauugacgugaaagaggucgauccggcuuccaauacauacacccucgugacuugucugggacugucauaugacggccucuuaggcaacaaucaaaucuuccccaagacagggcugcuuauuaucguauugggaaccauagccauggaaggugauagcgcaagugaggaggaaaucugggaggaacugggcguuauggggguguacgacggaagagagcacacggucuauggcgaaccuaggaaacuacucacucaggauugggugcaggagaacuaccuggaguaucgccaggugccagguucuaaucccgcucgguacgaauuucuuugggggccuagagcccuggcggagaccuccuacgucaagguuuuggaacaugugguaagggugaacgcccggguccgcauugcauauccaagccuccgagaggcugcccuguuagaggaagaggaaggaguguga

SEQ ID NO: 2287 - RNA, 954 nt, Artificial Sequence; identical to SEQ ID NO: 2286
  AAA68871 variant

SEQ ID NO: 2288 - RNA, 954 nt, Artificial Sequence
  AAY27261 variant
augagcuccgagcagaagucucaacacugcaaacccgaagagggcguggaagcccaggaggaagcucuggggcucgucggagcacaggccccuaccacagaggagcaggaagcggcuguuucaaguagcuccccacuugugccggguacucuggaggaaguacccgccgcagagucugccggcccuccacaaucgccccagggggcuucagcauugccuacgaccaucagcuucacauguuggagacagccaaacgagggaaguuccucucaggaagaggaaggccccagcacuuccccugacgccgagucauuauuuagggaagcucugaguaauaagguggaugagcuagcccauuuccuccugcggaaauaccgcgcgaaggagcuugucaccaaagcagaaaugcuggagcgagugauuaagaacuauaagcguugcuuuccaguuauauucgguaaagccagcgaaucuuugaagaugaucuuugggauugacgugaaagaggucgauccgacauccaauaccuacacucucgugacaugucugggacugucauaugacggccucuuaggcaacaaucaaaucuuccccaagaccgggcugcuuauuaucguauugggaacgauagcuauggaaggugauagcgccagugaggaggaaaucugggaggaacugggcguuauggggguguacgacggaagagagcacacugucuauggcgaaccuaggaaacuacucacccaggauugggugcaggagaacuaccuggaguaucgccaggugccagguucuaaucccgcacgguacgaauuucuuugggggccuagagcucuggccgagacauccuacgucaagguuuuggaacaugugguaagggugaacgcgcggguccgcauugccuauccaagccuccgagaggcagcucuguuagaggaagaggaaggaguguga

SEQ ID NO: 2289 - RNA, 945 nt, Artificial Sequence
  BAF82126 variant
augccccuggagcagagaagccaacacugcaagccugaagagggccucgaagccaggggagaggcucuugggcuggugggugcacaggccccagcgaccgaagaacaggaggcugccuccucuucaaguacauuggucgaaguuacuuuaggcgaggugccggcagccgaaagccccgacccuccacagaguccccaaggggcuucuucgcugccuacgaccaugaacuacccacuauggucacagagcuaugaggauaguuccaaucaggaggaagagggacccucuacauucccugaccucgaaagcgaguuucaggcagcccugucccggaaacuugcuaagcugguacauuucuugcuccugaaauaccgcgcccgagaaccagugacuaaggcggagaugcugggcucagucguggguaacuggcaauauuucuucccgguuaucuuuaguaaagcaagcgauucucuccaguuaguguucgggauugagcugauggaagucgaccccauaggacacguguacaucuuugccaccugucuuggcuuguccuaugauggccugcuaggggacaaucagauuaugccuaagacaggauuccucaucauuauccuggcuauaaucgccaaggagggugauugcgcaccagaagagaaaauuugggaggagcuuucaguacuggagguuuuugaaggccgugaggacaucauuuucggggaucccaagaaauugcucacccaguacuuugugcaagaaaacuaucuggaguacagacaggucccuggaagcgacccagcuuguuacgaauuuuuauggggccccagggcccugaucgagacuuccuaugugaaggugcuccaucacauggucaaaauaucuggugggccgcggauuuccuacccucuucugcaugagugggcguugcgcgaaggagaggaauga

SEQ ID NO: 2290 - RNA, 945 nt, Artificial Sequence
  AAA19006 variant
augccccuggagcagagaagccaacacugcaagccugaagagggccucgaagccaggggagaggcucuugggcuggugggugcacaggccccagcgaccgaagaacaggaggcugccuccucuucaaguacauuggucgaaguuacuuuaggcgaggugccggcagccgaaagccccgacccuccacagucuccccaaggggcuuccucgcugccuacgaccaugaacuacccacuauggucacagagcuaugaggauaguuccaaucaggaggaagagggacccucuacauucccugaccucgaaagcgaguuucaggcagcccugucccggaaaguagcuaaacuugugcauuuccuguugcucaaguaccgcgcccgagaaccagucacuaaggcggagaugcugggcucagugguugguaacuggcaauauuucuucccggugaucuuuaguaaagcaagcgauucucugcagcucgucuucgggauugaguuaauggaaguggaccccauaggacacguauacaucuuugccaccugucugggccuuuccuaugauggcuugcugggggacaaucagauuaugccuaagacaggauuccuaaucauuauccucgcuauaaucgccaaggagggugauugcgcaccagaagagaaaauuugggaggagcugucaguucuugagguguuugaaggccgugaggacagcaucuucggggaucccaagaaacuguugacccaguacuuuguccaagaaaacuaucucgaguacagacaggugccuggaagugacccagcuuguuacgaauuucuguggggccccagggccuuaauugagacuucuuaugugaagguccugcaucacaugguuaaaaucuccggugggccgcggauaagcuacccucuccuucaugagugggcgcugcgcgaaggagaggaauga

SEQ ID NO: 2291 - RNA, 945 nt, Artificial Sequence
  CAG46567 variant
augccccuggagcagagaagccaacacugcaagccugaagagggccucgaagccaggggagaggcucuugggcuggugggugcacaggccccagcgaccgaagaacaggaggcugccuccucuucaaguacauuggucgaaguuacuuuaggcgaggugccggcagccgaaagccccgacccuccacagucuccccaaggggcuuccucgcugccuacgaccaugaacuacccacuauggucacagagcuaugaggauaguuccaaucaggaggaagagggacccucuacauucccugaccucgaaagcgaguuucaggcagcccugucccggaaaguagcuaaacuugugcauuuccuguugcucaaguaccgcgcccgagaaccagucacuaaggcggagaugcugggcucagugguugguaacuggcaauauuucuucccggugaucuuuaguaaagcaagcgauucucugcagcucgucuucgggauugaguuaauggaaguggaccccauaggacacguauacaucuuugccaccugucugggccuuuccuaugauggcuugcugggggacaaucagauuaugccuaagacaggauuccuaaucauuauccucgcuauaaucgccaaggagggugauugcgcaccagaagagaaaauuugggaggagcugucaguucuugagguguuugaaggccgugaggacagcaucuucggggaucccaagaaacuguugacccaguacuuuguccaagaaaacuaucucgaguacagacaggugccuggaagugacccagcuuguuacgaauuucuguggggccccagggccuuaauugagacuucuuaugugaagguccugcaucacaugguuaaaaucuccggugggccgcggauaagcuacccucuccuucaugagugggcguuucgcgaaggagaggaauga

SEQ ID NO: 2292 - RNA, 948 nt, Artificial Sequence
  AAA68877 variant
augagccuggagcagagaucuccccacugcaagccugacgaagaucucgaggcccaaggcgaagaccuugggcugaugggagcucaggagccaaccggugaagaggaggaaacaacuuccucaagugauagcaaagaggaagagguguccgcagccgggucuucgucaccgccccagagcccucagggcggagcgaguuccucuaucagcgucuacuauacguuguggucccaauucgacgagggcucaaguagccaggaagaggaggaaccaucuuccucaguugaucccgcucaguuagaauuuauguuccaggaggcccugaagcuaaaaguggcagagcucguacauuuucugcuucacaaguacagggugaaagaaccugucaccaaggccgagaugcuggaaagcgugauuaagaacuauaaacgguacuucccaguuauauuugguaaggcuagugaguucaugcaagugaucuuugggacagacgucaaagaaguggaucccgcaggacauucuuauauuuugguaacugcccucggccuguccugugacagcaugcugggcgaugggcacucgaugccuaaggcugcccucuuaaucauuguucugggagugauccuuaccaaagacaauugcgcgccagaggaggucauaugggaagcauugucugugauggguguguacgucggcaaggagcauauguucuauggggaaccgcgcaagcugcuaacacaggauuggguucaggagaacuaccucgaauaccgacaggugcccggauccgacccugcccacuaugaguuucuguggggcucaaaagcucacgccgagaccaguuacgaaaagguaaucaauuaucuugugaugcugaacgcacgugagccaauuuguuaccccagcuuguaugaagagguccucggugaggaacaagaggggguguga

SEQ ID NO: 2293 - RNA, 1044 nt, Artificial Sequence
  AAI01309 variant
augcccagaggccaaaagagcaaacugagggcccgggagaagcgccgacaggcucgugggggacucgaagaccuuaucgaugcacuggacauuuuggaggaagaggaagaguccccuccaucugccucagcgugcuuaaaagauguguuccagaguagccuggacggugcuuccaacaauccgcacggccuaagagaggcccagucuaccucgacaucagcaacugccgcuagccauacgaggcaccccgaaggggucaacgaucagauggaggaacggccuauauguacccaagaccucgaggcaacagauaguuuuccacgcggacccguugacgagaaggugaucauucugguacauuaccuucuguauaaauaccagaugaaggaaccuaucacuaaggccgauauguugagaaaugugacccagauguccaaaucucaguucccagucauucucagcagggcuuccgagcaccuggaacugaucuuuggccucgacuuaaaggagguggaacccaacaaacauauauauguucuggugaauaaacuugauuuggguugcgacgccaagcugucagaugagacaggggucccuaagaccggacuacucaugacugugcugggcaucauuuucacaaacggcaauuguguagcggaggaagagguuuggaagguguuuaacaccauggggcuuuacgacggaaucgaacacuucauguuuggugagccacggaaacuguugacgaaggaccucgucaaagaaaauuaucuggaguaccaacaggugccgaacagugaucccccucgcuaucaguucuuauggggcccacgagcacacgccgagacuagcaagaugaaagugcuggaauuucucgcuaaggucaaugacaccgcccccucugaguucuccaacugguacacagaagcacuucaggaugaggaagagagagcuagggcccggguugcggccaaagcacgugugucagcuacugccggggcucgcagcaagguaaagaguucuaaauccagccaacugcaguga

SEQ ID NO: 2294 - RNA, 975 nt, Artificial Sequence
  CCDS43927.1 variant
augagccaggaccaagagucccccagaugcacccacgaucagcaucugcagacauucucugaaacucagucacucgagguggcccaagucaguaaggcucuugagaaaacgcuguugagcuccucucacccuuuaguuccaggcaagcugaaagaagcaccggccgcgaaggcugaaucgccccuagaggugccucagucauuuuguagcaguuccaucgccguaaccacaacuucuagcuccgagucagacgaagcaaguagcaaccaggaggaagaggauucuccauccucaagcgaggacaccagugaucccaggaaugugccugccgacgcucucgaucagaaagucgcauuccuggugaacuuuaugcuucauaagugccaaaugaagaaaccaauuacaaaggccgacaugcugaaaauaaucauuaaggaugacgaaucucacuucuccgagaucuugcuccgggcuagcgaacaucuggagaugauuuuugggcuggauguuguggaagucgaccccaccacucacuguuacggacucuucaucaaauuaggucugacauaugauggcaugcuuucgggggagaagggagugccuaagaccggcuugcugauaaucguacuagguguuauuuuuaugaaagggaaucgcgccacggaggaagaggugugggaaguccucaaccugacuggaguguacucuggcaagaaacacuucaucuuuggcgagccacgaaugcuuauuaccaaggacuucgugaaagaaaaguaucuggaguaccagcaggucgcaaauuccgacccggcgcguuaugaguuuuugugggggcccagagccaaagcugaaacaucaaagaugaagguucucgaguucguggccaaaguacauggaaguuacccucacagcuuuccaucccaguaugcagaagcucugaaggaggaagaggagagggcccgggcgcgcaucuga

SEQ ID NO: 2295 - RNA, 1011 nt, Artificial Sequence
  CCDS59524.1 variant
augcccagaggccaggccagcaagaggcgggcucgcgagaaacgacgucaagcaagaggggaagaccagugccugggaggugcccaggcgaccgcugccgagaaggaaaaacucccuuccucuucaaguccagcaugucagagcccgccccaauccuucccuaacgccggcaucccacaggagucucagagggcuucguaccccucaagcccugcaagugccgugucccuuacaucuagcgaugaaggggcuaagggacagaaaggcgaguccccaaauucauuucacggucccaguagcucugaguccacugggcgggaccuguugaacacgaagaccggagaauuaguccaauuccugcuaaauaaguauauucgcaaagagccuauaacaagagaagccaugcucaagguuaucaacaggaaauacaagcagcauuuuccagagauucugcggcgcucaacugagaauguggaaguaguguucggccuuuaucugaaagagauggauccgagccgacagaguuacgucuuggugggcaagcucgacuuucccaaccaggggucucuguccgauggagguggcuucccucugagcgggcucuuaaugguucugcuuucgaccaucuuuaugcacggaaauagagcgacagaagaggaaaugugggagugcuugaacgcacugggcauguauaaggguaggaaacauuucauuuacggggagccacaagagcuagugaccaaggaccucguccgggaaggauaucuggaauaccaacaggugcccucuuccgauccuccacguuacgaguuucuuuggggcccccgcgccagagcugaaacuucaaaaaugaagguacuggaguucguugccaaauugaaugacacaguggcaaguaccuauaagagcagguacgaggaagcucuccgggaggaagaggaacaggcccgagcgcgcgccgucgcaagagauuccgcuagggcccgggcuucucgcagcuuucagccguga

SEQ ID NO: 2296 - RNA, 1044 nt, Artificial Sequence
  AAC23616 variant
augcccagaggccaaaagagcaaacugagggcccgggagaagcgccgaaaagcucgugaagagacccaggggcucaaggugagacacgcaacagccgcggaaaaagaggaaugcccuuccucuucaccaguccuuggagacacuccgacgaguagccccgcugccgguaucccucagaagccacagggcgcacccccuaccacaacugccgcugcagccguuuccuguaccgagucugaugagggggcuaagugccagggagaagagaacgccucguucucacaagcgacaaccagcacugaaaguuccgugaaagacccaguagcaugggaggccggcaugcugaugcauuuuauuuugaggaaguacaaaaugcgggagcccauaaugaaggcugauauguuaaaaguggucgacgaaaaguauaaggaucacuucacagagauccugaauggugccucucgcagacuagaacucguguuugggcuggaccuuaaagaggauaacccuagcucccauaccuacacgcugguuucaaaguugaaucucacuaacgacggaaaucugaguaacgauugggacuucccaaggaauggccugcucaugccguuacugggcgugauuuuucuuaaagggaacagcgcaaccgaagaggagaucuggaaguucaugaaugucuugggagcuuaugauggugaggaacaccugauuuacggcgaaccccggaaauuuaucacacaggaccuagugcaggagaaguaucucaaauacgaacagguaccuaacucugauccaccccgcuaucaauuccugugggggccucgagccuacgcggagacuaccaagaugaagguucuugaguuucuggccaaaaugaauggagcaacaccaagagacuuccccucccauuacgaagaggcuuugagggacgaagaggaacgggcccaggugcguucaagcguccgcgcuagaaggcggaccacggccacuacauuucgagcacgcaguagagccccguucucuagguccagccacccuauguga

SEQ ID NO: 2297 - RNA, 960 nt, Artificial Sequence
  AAD10635 variant
augcccagaggccagaaaagcaaacugagggcccgggagaagcgccgaaaagcucgugacgaaaccagagggcucaacgugccucaagucacagaggcagaagaggaagaggccccaugcuguuccucuucaguuaguggaggugcggcuagcuccucuccggccgcaggcaucccccaggagccucagagggccccaacuacggcugcagccgcugccgcgggggugucgucaaccaagagcaaaaagggagcaaagagucaccagggcgaaaagaaugccuccucuagccaagcuaguacaucaacuaagagucccagcgaggauccucuuacccggaaaucugguucccugguacaguucuuguuauacaaguauaaaauuaagaagucagugacaaaaggggaaaugcugaagauagucggaaaacgcuuuagagagcauuucccagagauccuaaagaaagccagcgaaggccucagugugguuuuuggccuggagcuuaacaaggugaaucccaacgggcacaccuacacuuucauugacaaagucgaucugacagacgaagagucuuugcucuccagcugggauuuuccuaggcggaagcugcugaugccacucuuaggagugaucuuccugaaugguaacucggcaaccgaagaggagauuugggaauuucuuaauauguugggcguauaugacggggaggaacauucuguuuucggagagccguggaagcugaucacgaaagaucuagugcaggaaaaguaccucgaguauaaacagguccccuccucagacccuccacgcuuucaauuccuguggggcccccgagcuuacgccgagacuuccaagaugaaagugcuugaauuucuggcgaaggugaacgguaccacaccuugcgccuucccaacucacuaugaggaagcauugaaggaugaggaaaaagcuggggucuga

SEQ ID NO: 2298 - RNA, 1041 nt, Artificial Sequence
  AAD10636 variant
augcccagaggccaaaagagcacccugcacgccagggagaaacggcaacagacacgcgggcagacucaggaccaucaaggagcucagaucacggcaaccaacaagaaaaagguguccuucucuucaccucucauucuuggugccacaauacagaaaaagagugcgggccgaagccguuccgcucugaagaaaccacagagagccuugucuacuaccacaucggucgauguuucauacaagaaaagcuauaagggggcaaauaguaaaaucgaaaagaagcaauccuuuucucagggauuaagcuccaccgugcagucaaggacugacccgcugauuaugaaaacaaacaugcuaguacaguuccucauggagauguacaagaugaaaaagcccaucaugaaagccgauaugcugaagauugugcagaaaagucacaagaauugcuuuccugaaauccuuaagaaagcuagcuucaacauggaggucguguuuggcguugaccugaagaaaguggauucuaccaaggacuccuaugucuuggugucaaaaauggaucucccaaauaacgguacgguaacucgggggcgcggauuccccaagaccggccugcugcucaauuuacugggcguuauauuuaugaaggggaacugugcaacagaagagaaaaucugggaguuccuuaauaagaugagaauuuacgacgguaaaaagcauuuuaucuucggagaaccuaggaaauugauuacucaggaucuggugaagcuaaaguaucucgaguaccggcaggucccaaacagcaaucccgcccgcuaugaauuucuguggggcccucgagcucacgccgagaccaguaaaaugaaggugcuugaguucugggcgaaagugaacaagacagucccaucugcauuucaauucugguacgaagaggcccugagagacgaagaggaaaggguucaggcugccgcaauguugaaugauggguccagcgcuaugggacggaaaugcucgaaggccaaggcgucuuccucaagucaugccuga

SEQ ID NO: 2299 - RNA, 1041 nt, Artificial Sequence
  AAC23619 variant
augcccagaggccaaaagagcaaacugagggcccgggagaagcgccagcgaacccgugggcagacacaggaccucaaagugggacagccuacugcugcagaaaaggaggaauccccaucuucaaguagcuccguccuuagagauacggccucuucgucacuggcguucgguaucccgcaagagccccagagggaaccuccaaccacaagcgcugccgcagccaugaguugcacuggcuccgacaaaggggaugagucucaggacgaggaaaacgcuagcuccucacaggcaaguaccagcacagagcggucuuugaaggauuccuuaacccgcaagacuaaaaugcugguucaauuucuacucuacaaguauaaaaugaaggaacccacaaccaaagccgagaugcugaagauuauaucaaagaaauacaaggagcacuucccugaaaucuuuagaaaagugagccagaggacggagcuuguauucggacuggcuuugaaggaagugaauccaacuacccauaguuauauucucgucucuaugcugggccccaacgacgguaaucaguccagcgccuggacacugccucggaacgggcucuuaaugccacugcuuucggugaucuuuuugaauggaaacugugcgcgcgaggaagagauuugggaguuccugaauaugcuaggcaucuacgauggcaaacgacaccucauauuuggggaaccgagaaagcugaucacucaggaccuuguucaagagaaauaucuggaauaccaacaggugcccaacucugauccuccaagguaucaguucuuguggggaccccgggcacaugccgagaccuccaagaugaagguccucgaauuucuggcuaaagugaaugacacaaccccuaacaauuucccauuacuguacgaggaggcccuccgugaugaagaggaacgcgcuggugcaagacccaggguagccgcgcggcgaggcacgacugccaugacaucagcauacagucgcgcuaccagcuccucuagcucacagccgauguga

SEQ ID NO: 2300 - RNA, 828 nt, Artificial Sequence
  CCDS65233.1 variant
augaccagcgccggcguguucaacgcuggguccgacgagagagcaaauucuagggaugaagaguaccccugcucaagugaagucagcccuuccacagagucuucguguucaaacuuuaucaauauuaagguuggacugcucgaacaguuccuucuguauaaauuuaagaugaaacaacggauauugaaggaggacauguuaaaaaucgugaacccacgcuaccagaaucaguucgccgagauucaccgacgugcgagcgaacauaucgagguaguguuugcugucgaucugaaggaagugaacccgacuugccaccuauaugaccucguuaguaagcugaaacuucccaauaacgguaggauucaugugggcaagguccugccuaaaacgggguugcucaugaccuuccuggugguaaucuuucugaagggaaauugugccaacaaagaggauacauggaaguuccucgacaugaugcagauauacgauggcaagaaauauuacaucuauggugagccaagaaaguuaauuacucaagacuuuguucggcugaccuaccuugaauaccaccaggugcccugcuccuauccugcacauuaccaguucuugugggggccacgcgccuauacagagaccucuaaaaugaagguccuggaauaccuagcuaaagugaaugauaucgcacccggagccuuuagcucccaguaugaggaagcucuccaagacgaggaggaaucaccuagucagagauguagcaggaacuggcacuacugcucuggccaggauugucugcgggccaaguucuccucauuuagccagccauauuga

SEQ ID NO: 2301 - RNA, 1224 nt, Artificial Sequence
  AAH67286 variant
augcccagaggccacaagagcaaacugaggaccugcgagaagcggcaggaaacaaacgggcaaccucagggacucacugguccacaggccacggcugagaaacaggaagagucccauucuucaaguagcuccucucgcgcaugucuuggcgacugccgacguucgucagaugccagcaucccgcaagaaagucagggggugucccccaccggaucuccugacgcggucguuagcuacuccaagucagauguggcugccaauggccaggacgagaaaaguccaagcacaucuagagaugcauccguaccccaggagucacaaggugccagcccuacugggaguccagacgcuggagugucuggcuccaaguaugaugucgcagccaacggccaggacgaaaagagccccucgaccucucacgauguguccguuccucaggagucacagggggcuaguccaacaggaagcccggacgccgguguguccggcucuaaauacgaugucgcggcagaaggggaggacgaggaaagcgugucagccagucaaaaggcuauuauauucaaaaggcuguccaaggaugccgugaaaaagaaggcauguaccuuggcucaguuuuuacagaaaaaguucgagaaaaaggaaagcauccugaaagccgacaugcuaaagugcguucggcgcgaguauaaacccuacuuuccucaaauucucaauagaacuucucagcaucugguggucgcguucggaguggaacuuaaggagauggacucaaguggcgagagcuauacacugguguccaaguugggucucccaucugaagggauccugucgggagauaacgcccugcccaaaagcggccucuuaaugucccugcuugucguuauuuuuaugaauggcaacugugcaaccgaggaagaggugugggaguucuuggggcugcuaggaaucuacgacgguauacuccacucaaucuauggcgaugcuaggaagauuaucacggaagaccugguacaggauaaauacguggucuaccggcagguaugcaauagugacccuccauguuaugaguuucuuugggggccccgcgccuacgcugaaacuaccaagaugcgaguucugagaguguuggccgauucuagcaacacauccccgggacucuauccucaucuguacgaggacgcauuaauugaugaagucgagagggcccugcggcuccgugcuuga

SEQ ID NO: 2302 - RNA, 3429 nt, Artificial Sequence
  CCDS35417.1 variant
augggcgacaaggauaugcccaccgccgggaugccuagccugcuccaguccucuucagagaguccacaaagcugcccggaaggagaggacucccagucuccccuucagaucccucagucgucaccagaaagcgaugacacacuguaccccuugcaaaguccucaguccagaucugagggugaagauagcuccgacccauuacagaggcccccugagggcaaagauucacagaguccacugcaaauuccgcagagcucucccgagggggacgauacucaguccccucuacagaacucacaaagcaguccagaaggaaaggacucucucuccccucuggagauaagccagucgcccccagaaggcgaggaugugcagucuccccuucaaaauccggcuuccucauucuuuaguagcgcacuguuguccaucuuccagucuagcccugagucaacgcagagucccuuugaagguuucccacaguccguccuccaaauuccuguuagcgccgcgucuucaaguacccuggugagcaucuuucaguccucucccgagucgacacagagcccauucgaaggguuuccccaguccccucugcaaauuccaguaucacggaguuucucuagcacucucuuauccaucuuucagucaagcccggagcgcacccagucuacauucgaaggauuugcucaguccccucugcaaauacccgugaguccauccucuuccucaacccuuuugagucuguuccagagcuuuucggagcgaacucaguccacauucgagggcuucgcccagucuagccuacaaauccccgucucaccuaguuuuuccucuacccucgugagccuguuccaguccucaccagaacguacgcagagcacuuuugagggcuucccccaaaguccgcuucagauuccuguuucuuccagcucgucaucuacccuguugagucucuuucaguccagcccagaaagaacacacucuacuuucgagggguuuccccagagccuguuacaaaucccuaugaccuccucauucaguagcacacugcucucuauuuuucaguccucacccgaaagugcacagagcaccuucgagggauuuccacaguccccucuucaaauccccgguucuccaucguucagcucaacgcuguugucccuauuucagaguucuccggagaggacucauagcacauucgaaggcuucccucaguccccacugcagauacccaugaccucaucuuuuagcaguacucuccuguccauucuucaaagcucucccgagucagcccaguccgcuuucgaaggguuuccucagaguccacugcaaauccccgugagcucgucuuucuccuauacauugcucagccuguuucagucaaguccugagcggacccacucuacguucgaaggauuuccgcaguccccauuacagauucccgucagcucaaguagcuccucuagcacccugcuaucccucuuccaaucaucuccugaguguacacagaguacuuuugagggcuucccacagucgccccugcagaucccucaaagcccgcccgaaggugagaacacccauuccccacuucagaucgugccuucuuugcccgaaugggaggacucacugagcccacacuacuuuccucaguccccaccccagggggaggauagucucucuccgcauuauuucccucaaucacccccacagggagaagacagccugagcccccacuacuuuccucagaguccacagggcgaggacagccuuucuccccacuauuucccucaauccccgccacagggcgaagauucaaugagcccccuguacuucccucagucgcccuugcaaggggaggaauuucagucuagucuccaguccccaguaagcauuugcucauccucuacaccuagcagucugccccaguccuucccagagagcucucaaucaccuccggagggacccguucagaguccauuacauuccccucagucucccccagaagguaugcacagccagucgccucugcaaucacccgagagcgcaccggaaggcgaggacucccuaaguccacuccagauaccucagucuccccuggaaggggaggauagccuuuccucauugcauuuuccacagagucccccugagugggaagacucucugagcccgcuccacuucccccaauuuccaccucagggagaggauuuccaguccucacugcaaagccccgugucuaucuguuccaguagcacuucguuaucccugccucagucuuuuccagaaucaccccagagcccuccagagggccccgcccagaguccgcuucaacgcccugucuccucuuucuuuagcuauaccuuggcuucacuccugcaguccagucacgaaagcccacagucucccccugaggguccagcccagucaccccuacaauccccggugagcucuuucccuaguucgacauccagcucacugucucagagcucccccgugaguucauuuccaucuagcaccuccaguagccucuccaaaucuucaccugagagcccccugcagucgccagucauuuccuucaguucuagcacuucacuuucccccuucucugaagagaguagcuccccuguugacgaauacacgucaagcucugauacauugcuggagagugacuccuuaaccgauagcgagucacucaucgaaucugagccacuguuuacuuacacccuugacgaaaagguggaugagcuggcgagauucuugcuccugaaauaucagguaaagcaaccgauaacaaaggcagaaaugcuaaccaaugugauuuccagguacacuggguauuuucccgucaucuuccggaaagcccgcgaguuuaucgagauucuguucggcaucucgcuccgagaaguggacccugacgauagcuacguuuuugugaacacacuggaccuuacgagugagggaugcuugucugaugaacagggcaugucccagaauagacuguuaauucucauacugagcaucauuuucaucaaggggaccuaugcuucagaggaagucaucugggacgugcuuaguggaauugguguaagggccggccgggagcauuuugcauucggggagccacgugaacugcuaacuaaaguuugggugcaggagcacuaccucgaauaucgcgagguccccaacuccagcccuccaagauacgaauuucuguggggacccagggcucauucugaggugauaaagcggaaagucguggaguucuuggccaugcugaagaauacaguuccuaucaccuuuccgucaagcuacaaggaugcguuaaaagacguggaggaacgagcccaagcaauuaucgauacaacugacgauuccaccgcuacggaaucugccaguucgagcguaauguccccaucauucucuagcgaguga

SEQ ID NO: 2303 - RNA, 1122 nt, Artificial Sequence
  AAF07210 variant
augcccccugugccaggcgucccguucagaaacguugacaaugauagccccaccuccguggagcuggaagacuggguagaugcccagcacccuacagacgaggaagaggaagaggcuucuucagcaaguagcacucucuaccuuguguuuuccccaucuucguucucaacgagcaguucccugaucuuagggggacccgaggaagaggaagucccuucuggugugauuccaaacuugaccgagagcauacccuccucaccuccacaaggcccgccccaggggccuagucagagcccacugucuuccugcuguagcucauuuaguuggucuuccuucagcgaggaaucgucuucccagaagggagaggauacaggcacuugccaaggucuacccgacucagaaaguagcuuuaccuauacacucgaugagaaaguugccgaacugguggaguuccuucuguugaaguacgaggcggaagaaccugucaccgaagcugagaugcucaugaucgugauuaaauauaaggacuacuuuccaguaauccugaaaagggcccgggaguucauggagcugcucuuuggguuagcacugauugagguuggacccgaucauuucuguguguuugccaauacugucggccuuacagacgaaggcuccgaugacgaggggaugccggaaaacucuuugcugaucauaauccuaagcgugauuuucaucaagggaaauugcgcuucagaggaagugauuugggagguccucaacgcaguugguguguaugccggccgcgagcacuuuguauacggggaaccucgagagcugcuuaccaagguguggguccagggacauuaucuggaauaccgugaggugccccacaguuccccaccuuacuaugaguucuuguggggccccagagcucauagcgaaucuaucaaaaagaaaguucucgaguuccuggccaaguuaaauaacacggugccaucaaguuuucccagcugguacaaagaugcgcugaaggacgucgaagagagggugcaggcaacuauagacaccgccgaugacgcuacaguaauggccuccgaaucucucucgguuaugagcuccaaugugucauucagugaguga

SEQ ID NO: 2304 - RNA, 1932 nt, Artificial Sequence
  AAM08355 variant
augcugcuccccugccacugggugcuugacgccaccuucagcgauggcucccuggggcagugggucaagaacacaugugcuacuuacgcauugucuccuguuguguuaccaccgcaaccccagccucggaaaaaggccacggacaaagauuauucagcguuucaucugggacaccuaagggagguaagacucuuccugcgcgguggcaccagugaccagcgaauggauagccuugugcugugcccaacauacuuuaaguuguggcguacucucuccgggucucccggacugcagcugucggaccuccauuucggcucacaaccugaagguaaauuuagcuuaagaagggcugucagugugaagcagcgggaggaaccacaggauuggccccugaaugagaagcgcacccuuuggaaagacuccgauuugccuacauggagaagggggaccggauauacucugucucuaccagccguuagcccgggcaagcggcucuggggcgaaaaagcagggucccugcccgagucagagccucuuuucacauacacccuggacgaaaagguggauaaauugguccaguuucuccuguuaaaguaucaagccaaggagccacugacgcgcgcugaaaugcagaugaacgugaucaauacuuacaccggauauuuccccaugauuuuucgaaaagcaagagaguucauagagauccucuuugguauuagucuuacagaaguagacccugaucacuucuacguuuuugugaacacucuggacuugaccugugagggcagccuaucugacgaacaggggaugccacagaauaggcugcucauccugauucuuuccgucaucuucauaaagggaaacugcgccucagaggaagugaucugggaggugcugaaugcuauuggccccuggagcgccuuggcggguuucgcagauguccucagucggcuggccuuaugggagucugaagggccggaggcuuuuugugaagaguccggacugcguagcgccgaaggcucgguucuagaccucgcaaacccucaaggccuggcugggcaucgccaggaggauggaagaaggggucuuacagaggccucuccccagcagaaaaagggcggggaagacgaggauaugccagcggccggaaugccucccuugccacaaucacccccugaaaucccaccgcagggcccucccaaaauuuccccacagggucccccucaaaguccaccccagagcccgcuggacuccugcucuagcccucuccuguggacccggcuugaugaggaaucaaguuccgaggaggaagacacggcaacuuggcacgcucugccagagagcgaaucuuugccccgauacgcccucgaugagaagguggcugagcugguacaguucuuacugcuaaaauaucagacaaaggaaccugugaccaaggccgagaugcucacuacagucaucaaaaaguacaaagacuauuuucccaugauauucgggaaggcacacgaauuuauugagcugaucuucggcauugcccuuaccgauauggacccagacaaucauucauacuuuuucgaagauacguuggaccugaccuaugagggaagucucaucgaugaccaaggcaugccuaaaaacugucuguuaauccugauucuuagcaugauauuuaucaagggguccugcgugcccgaggaaguuauuugggagguguugucugcuaucggaccaauacagcgcccggcgagagaaguccucgaguuccugucgaagcuaagcuccauuaucccuucagcauuucccaguugguacauggaugcccugaaagacauggaagauagggcucaggccaucauugacacaacugaugacgcaaccgccauggcuucugccagcccauccgugaugucaacaaauuucugucccgaguga

SEQ ID NO: 2305 - RNA, 2337 nt, Artificial Sequence
  AAG23757 variant
auggcccagaagauggacugcggcgcugggcugcucggauuccaagcagaggccagcguggaagauuccgcgcuucugaugcagaccuugauggaggcuauccagauuucugaagcacccccuacaaaccaggccacugccgcugcaucaccacaaaguagccagccgcccacggccaaugagauggcugacauacaggucuccgccgcggcagccagaccuaaaucugcuuuuaagguucagaacgccaccacaaaagguccaaauggcguguacgauuucucgcaagcacacaacgcuaaggacguacccaauacucagccuaaagccgcguuuaagucacagaacgccaccccaaaggggcccaaugcagcuuaugauuucagccaggccgcuacaaccggagaauuagccgcaaacaaaagugagauggccuuuaaggcucaaaaugcgacuacaaaagugggcccuaacgcaaccuacaauuucucccagucucugaacgccaaugaccuagcuaacagcaggccaaagacgccguuuaaagccuggaaugauacuaccaaggcacccacagccgacacucagacccaaaacgucaaccaggcuaagauggccacaucccaggcagauaucgagaccgacccugguauuucagaaccagauggggcgacggcucagacaagugccgacggaagccaagcacagaaucucgagucucggacuaucauucgcggcaaacgaacccguaagaucaacaaucugaacguggaagaaaauuccucaggcgaucagagaagggcuccccuugccgccgggacuuggcggagcgcaccuguuccagugacaacccagaaucccccgggagcuccucccaacguccuguggcaaacgccauuggccuggcagaacccuagugguuggcagaaucagaccgcgcgccaaacacccccagccagacagucucccccugcuaggcagacuccaccggcauggcagaaccccguggccuggcaaaauccuguaauauggccaaaccccguuaucuggcagaauccugugauuuggccaaaccccaucgucuggccgggcccugugguguggccaaauccccucgcuuggcagaacccucccggguggcaaaccccaccuggauggcagacacccccaggcuggcaggguccgccugacuggcaggggcccccagacuggccccugccuccagauuggccccugccuccggacuggccacuccccacugauuggccuuuaccacccgacuggauuccugccgauuggccgauacccccagacuggcaaaaccugcggccuucccccaaucuucgcccaagcccuaacucgcgagcaucucagaaucccggagcggcccagccaagagaugucgcuuugcugcaggagagggccaacaagcuaguuaaauaucucaugcugaaagacuacaccaaggugccgaucaaacgguccgagaugcuucgugauauuauccgcgaguauacagacguauacccugaaauuaucgagagagcauguuucgugcuggaaaagaaguuuggcauccaauugaaagagauugauaaggaggaacaucucuauauacugaucucaacccccgagaguuuagcuggcauucuggggacuacgaaagacacaccaaagcucggacuucuguuggucauccuaggugugauauucaugaauggcaacagggccagcgaagcaguucugugggaggcccuccggaaaauggggcugcgacccggagugcgccacccucuucugggcgacuugagaaagcuccugaccuacgaauuugucaagcagaaauacuuagauuauaggcgggugccaaauuccaaucccccugaguacgaguuccuguggggucuacgcucuuaucaugaaacuagcaagaugaaaguacucagauuuauugcugagguucagaagagggacccgcgugauuggaccgcgcaguucauggaagccgcagacgaggcucuggaugcccuugacgccgcugcagccgaagcggaggcucgggccgaggcacgaacaagaauggggaucggcgaugaagccgugucaggaccauggaguugggacgauaucgaguucgaauugcugaccugggacgaggagggcgauuuuggggaccccugguccaggauuccuuucacuuuuugggcucgcuaccaccaaaacgcacggagcagauucccccagacauuugccggaccaaucauugguccuggcgggacggcgucugcuaacuucgccgcaaauuuuggagccauaggcuucuuuugggucgaauga

SEQ ID NO: 2306 - RNA, 1821 nt, Artificial Sequence
  AAD28598 variant
augagcgacaccuccgagucuggcgccgggcugacaagauuccaggcugaagcaucagagaaggauaguagcuccaugaugcaaacucuccuuacggugacccagaacgucgaaguucccgagacaccuaaagccucuaaggcgcuggaagugucggaggacguaaaagugucaaaggcuagcggagucaguaaagccacugagguguccaagaccccagaagcaagggaggccccggcuacacaggcaucuagcaccacucaguugacagauacccaaguuuuagccgcugaaaauaagucccuggccgcggacacgaaaaagcagaacgcagauccccaggccgugacuaugccugcuaccgagacuaaaaaggucucacacguggccgacacuaaaguaaauaccaaggcacaggagacagaagcugccccaagucaagcgcccgccgaugagccugaaccagagagcgcagcugcccagucucaggaaaaccaggacacccggcccaagguuaaagcuaagaaagcccgcaaggugaaacaucuagauggugaggaggacggcuccucagaucaaagccaggcaagugggacgacuggaggccgacgugucucuaaggcccucauggcuuccauggcgagaagggcaagccgggguccuaucgccuuuugggcucgcagagccucgaggacacggcuggcagccugggcucgccgagcccuucugucuuugagauccccaaaagcaaggcgggggaaggcgcgucgcagagcugccaagcuccagucaagucaagaaccggaggcacccccuccaagggacguggcccugcugcagggacgggcuaaugaucucgugaaauacuuacuggccaaggaccagaccaaaauucccauaaagcgaagcgacaugcuuaaagauaucauuaaggaauauacugacgucuacccugagaucauugaacgcgcaggcuauuccuuggagaagguuuucggcauccagcugaaagagauagauaagaacgaccaccuauacauccuccugucuacacuugaaccaaccgaugcugggauucugggaacgaccaaagacagccccaaguugggucuccugaugguguuacugucaaucauuuuuaugaauggcaacagaaguuccgaggccguaaucugggaagugcucaggaaacuugggcugcggccgggaauacaucacagcuuguucggcgaugucaagaagcuaauuacagacgaguuugugaaacaaaaguaucuggauuacgcgcgcguuccuaauucuaaucccccagaauaugaguucuuuuggggucucagaucauacuacgagacaaguaaaaugaaggugcugaaauucgccugcaagguccagaagaaagacccuaaggaaugggcugcacaguauagggaggccauggaagcugaucuuaaagccgcagcggaggccgcugccgaggcaaaggcucgugccgaaauccgggcacgaauggggauuggacugggcagcgagaacgccgcuggccccuguaacugggacgaagcggacaucgggccaugggccaaagcaagaauccaggcuggagccgaggccaaggcuaaagcacaagaauccgguucugccucgaccggcgcgagcacauccacuaauaacucagcuagugccucugcaagcaccuccgggggauuuucagccggcgcuagcuugacagcaacccucacuuucggucuguuugccggguuaggcggagcgggcgcuucuacguccgggaguagcggagccugcgguuucucuuacaaguga

SEQ ID NO: 2307 - RNA, 2226 nt, Artificial Sequence
  AAH63838 variant
auggccgagggcagcuucuccgugcagucugaaucauacagugucgaggacauggaugaagggagcgacgagguuggagaagaggagaugguggaagguaacgauuaugaggaauuuggcgcuuucgggggauacggcacccugacauccuuugacauccacauucucagagcauucgguucucuugggcccggacugaggauauugucgaaugagccuugggaguuagaaaacccaguacuggcccaaacucuaguggaggcgcuccagcuggauccggaaacgcuugcuaaugagaccgccgcacgggccgcuaacgucgcacgcgccgcugccucaaaucgagcggcacgugccgcugccgcagcugccagaacagcguuuagccaggugguugccagucauaggguggcaacuccccaggucuccggcgaagacacccaaccuacaaccuaugcugccgaggcucagggcccaacucccgagccuccacuggccucuccccagacaagccagauguuggugaccuccaagauggcagccccugaagcuccagcgacgucagcacaaagucagacugggagcccggcccaggaggcugccaccgaaggacccucuuccgcaugcgccuucucacaggcuccuugugcccgggagguagaugcaaaccgcccaagcacagcguuucucggucaaaaugacguuuucgauuuuacucagcccgcuggcgugagugggauggccuucccuagaccaaaaaggcccgcaccggcccaggaagcugccaccgagggaccuucugcagcuuccggcgucccccaaacagguccagggcgggagguggccgcgacccgcccuaagacgacuaaaagcggaaaggcccuggcuaaaacacgauggguggaaccccagaacgucguugcagccgcugccgcaaaggcgaagauggccaccucgaucccagagcccgaaggcgcugccgcagcuacugcccagcacucugcagagccuugggccagaaugggcgggaaaaggacaaagaaauccaagcaucuggacgaugaauacgagucaagugaggaggaacgggaaaccccagcugugccgcccacguggcgugcgagccagccuucccucaccguacgcgcccaauuagcaccaagacccccuauggcuccaaggucucagauucccagccggcacgugcugugccuuccgccucgaaaugucacauugcugcaggagcgcgccaacaagcuagugaaauaucucaugaucaaggacuacaaaaagauuccaaucaaaagagccgauaugcugaaggacguuauaagggaguaugacgaacauuuucccgagaucauugaacgggcuacuuacacccuugagaaaaaguucggaauccaccugaaagaaauugauaaggaggagcacuuguacauccucguguguacacgcgacucaagugcaagacuguuagguaagacuaaagauaccccuaggcugucccuccuucuggucauauugggcgugauuuuuaugaaugggaaccgugccagcgaagcgguacuaugggaggcucugcggaagaugggacuccgacccggcguuagacauccauuccugggugaccuuaggaaacugaucacagaugacuucgugaagcagaaauauuuggaauacaagaagauuccuaauucuaaucccccagaguaugaauuucucugggggcugcgcgcccggcacgagaccucaaaaaugagagucuuaagguucaucgcacaaaaccagaaccgcgauccgcgagaguggaaggcccauuuucuggaagcuguggacgaugcauucaaaacuauggacgucgauauggccgaggaacacgcgcgggcucagaugcgugcccagaugaacaucggcgacgaggcacuaauuggaagauggaguugggacgauauacaaguggaacuccugacgugggacgaggauggcgacuuuggggaugccugggcuaggaucccuuucgccuuuugggcacgcuaccaccaguauauucuuaauagcaaccgggcuaauagaagggccacauggcgagcgggaguuuccucugguaccaacggcggggccucgacuagcguguuggacggacccuccaccucaaguacaauccgcacccggaaugcagcuagagccggcgcuucuuucuuuagcuggauacagcauagguga

SEQ ID NO: 2308 - RNA, 1122 nt, Artificial Sequence
  CAG33449 variant
augcccccugugccaggcgucccguucagaaacguugacaaugauagccccaccuccguggagcuggaagacuggguagaugcccagcacccuacagacgaggaagaggaagaggcuucuucagcaaguagcacucucuaccuuguguuuuccccaucuucguucucaacgagcaguucccugaucuuagggggacccgaggaagaggaagucccuucuggugugauuccaaacuugaccgagagcauacccuccucaccuccacaaggcccgccccaggggccuagucagagcccacugucuuccugcuguagcucauuuaguuggucuuccuucagcgaggaaucgucuucccagaagggagaggauacaggcacuugccaaggucuacccgacucagaaaguagcuuuaccuauacacucgaugagaaaguugccgaacugguggaguuccuucuguugaaguacgaggcggaagaaccugucaccgaagcugagaugcucaugaucgugauuaaauauaaggacuacuuuccaguaauccugaaaagggcccgggaguucauggagcugcucuuuggguuagcacugauugagguuggacccgaucauuucuguguguuugccaauacugucggccuuacagacgaaggcuccgaugacgaggggaugccggaaaacucuuugcugaucauaauccuaagcgugauuuucaucaagggaaauugcgcuucagaggaagugauuugggagguccucaacgcaguugguguguaugccggccgcgagcacuuuguauacggggaaccucgagagcugcuuaccaagguguggguccagggacauuaucuggaauaccgugaggugccccacaguuccccaccuuacuaugaguucuuguggggccccagagcucauagcgaaucuaucaaaaagaaaguucucgaguuccuggccaaguuaaauaacacggugccaucaaguuuucccagcugguacaaagaugcgcugaaggacgucgaagagagggugcaggcaacuauagacaccgccgaugacgcuacaguaauggccuccgaaucucucucgguuaugagcuccaaugugucauucagugauuga

SEQ ID NO: 2309 - RNA, 2874 nt, Artificial Sequence
  AAM08354 variant
augagccuggugucccagaacucuagaaggcggcgccgacgugucgccaaggcuaccgcacacaauucaaguuggggcgagaugcaagcccccaacgcgccugggcucccagcugacguuccgggaagcgaugugccccaggguccuuccgacucucagauccuucagggccugugcgccucggaagggccaucaacaagcguauugcccacgagugcagagggaccuuccacuuucgugccacccaccauuucugaagccagcuccgcuucaggccaaccuacaauaagugaggguccagggacuagcgucuuaccgacccccucugaaggacuguccacaucaggcccuccaaccaucagcaaaggccuauguacaagugugacucucgcagccucugaggggagaaauaccuccaggcccccuacgagcucggaggaaccaucuacuuccguucccccgaccgcuucagaggugccuaguacaagccugcccccaacuccuggagaagguaccuccacaucugucccuccaaccgccuacgagggccccagcacgucagugguaccuacuccagaugaggggccgaguacauccguucuucccaccccuggagaaggcccagguacuagcgugccccuggcggcaacagagggguugucuaccucaguccaggccacgccugacgaaggaccaaguaccagcgugcccccgacagcuacugagggccucuccaccccugugccacccacacgggaugaaggcccuucuacuucgguccccgccaccccaggggagggaccuagcacauccguucugcccgcagcuucagacggucagaguauuucucuggugccaacccgcggcaaggggagcuccacuucaguaccgccuacggccacagagggacucagcaccucugugcagcccacugcgggcgaagguuccaguaccagcgucccacccacaccugggggcggauuaucuaccuccgugccacccacugccacagaggaacugucaacgaguguuccuccgaccccaggcgaggggcccagcacuucggugcuuccuaucccaggagaagguuuguccacaucugugcccccuaccgcaagcgauggcucagacacaagugucccgcccacuccaggggagggagcuuccacccugguacaaccuacggcccccgauggcccagguucuagcguucuaccuaaccccggggagggcccauccacccucuuuucaagcagugcuucuguggacagaaauccguccaaaugcagccugguccuuccuucgcccagggugacaaaggccucagucgauucugacagugaaggaccaaaaggcgcagaggggcccauugaguucgaagugcugcgggauugugaauccccuaacagcaucucuauaaugggauugaauacuagccgcguugccaucacccucaagccacaggaccccauggagcagaacguggcugagcuguuacaguuucugcucguaaaggaccaauccaaauauccuauucgagaaucagagaugagagaauacaucgucaaggaguauaggaaucaguucccggagauucuucggcgugcggcagcccaucuggaaugcaucuuucgcuucgaguugagagaacuagauccagaggcucacacauacauacugcucaacaaacugggucccgugccuuuugaaggccuugaggagagucccaaugggccaaagaugggacuguugaugaugauucucggccagaucuuccugaacgguaaucaagccaaagaagcagagauuugggaaauguuauggaggauggggguucagcgggagcgacgccugagcaucuuuggcaacccuaagagacuacucucuguggaguucgucuggcagagguaucuggacuaccggcccgugacugauuguaagccaguagaauaugaguuuuucuggggaccucgcucccaucuugaaaccacgaaaaugaagaucuugaaauuuauggccaagauuuacaauaaagacccgauggauuggcccgagaaguacaacgaagcucuggaggaagacgccgcaagagcguucgcugagggcuggcaggcccucccacacuucaggcgucccuuuuucgaggaagcagccgcugaggugcccucaccagauagugaaguuagcuccuauucuucgaaauacgccccucauagcuggcccgagucacggcuggaguccaaggcacgaaaacuuguccaacuguuuuugcucauggacaguacaaagcugccgauaccaaagaaagggaucuuauauuacauuggaagagaaugcucuaagguguucccugaucugcuaaacagggcugcccgcacccucaaucacguguauggcacugagcuggucguucuugacccccggaaccacagcuacacauuguauaauagaagggaaauggaggaaaccgaggagaucguggauuccccaaaccgccccgguaauaacuuucugaugcaagugcucucauucauauuuauuauggggaaucaugcgcgagaaucugccguaugggcuuuccugcggggauuaggcguccaggcaggucguaaacacgugaucacuuguagauaccugagccagagguacaucgacagucuucgcguuccugacuccgauccggugcaguaugaguuugucuggggcccccgggccagauuggaaaccagcaagaugaaggcucucagguacguggcccgcauucaucgaaaagagccacaggacuggccucagcaguaucgggaagcaauggaggaugaggcgaacagagccgacguugggcacaggcaaaucuucgugcacaauuuucguuga

SEQ ID NO: 2310 - RNA, 1572 nt, Artificial Sequence
  AAH93964 variant
augagccuggugucccagaacgccagacacugcucugcugagaucaccgcagacuacggcgaugggaggggagaaauucaagccacaaaugcgucagguagucccacuagcaugcucgucguugacgcuccucaguguccacaggccccgauaaacucccagugcgugaauacgucucaagcaguacaggaucccaacgaccuugaggugcugaucgaugaacagucgcggcgcuugggcgccuuacgaguccaugacccucuggaggaucguucaauugcucuagugaauuucaugagaaugaaaagccagaccgaagggaguauccaacaguccgagaugcucgaguuucugagggaauauucugaccaguucccagagauucuucggcgcgcaagcgcccaccuggaucagguuuuuggauugaaccucagagugaucgacccccaagcugauacauacaaucuggucuccaagaggggcuuccagauaacugaccggaucgccgaaucacuggauaugccuaaggcgagucucuuagcacuggugcuuggucauauuuugcugaacgggaaucgcgcccgagaggcuagcaucugggaccuacuccugaaaguagacaugugggauaagccacagagaauuaacaaucuuuuuggaaacaccaggaaucuguugacaaccgacuucguuuguaugcgguuucucgaguauuggcccguguacggcacuaacccucuggaguucgaguuuuuauggggcucucgugcccaccgcgaaaucacaaaaauggaggcacugaaguucgucuccgaugcucaugacgaagaaccauggucauggccggaggaauauaauaaggcccucgagggggauaaaaccaaggaaagaagccuuacggcgggacuggaguuuuggagugaagacacuaugaacgauaaagccaacgacuuggugcaacuagcaauaucugugaccgaggagaugcugcccauucaccaggaugaacuccuggcucacacagguaaggaguucgaagacgucuuuccuaauauccuuaacagggccacucugauuuuggauauguucuacggccucucccugaucgagguugacaccagcgaacauaucuauuuacuggugcagcagccagagucggaggaggaacaaguaaugcuagaaucucucgggcggcccacacaggaguacgugaugccuauucugggacuuauauucuugaugggcaaucgagucaaagaggcuaacguguggaaucugcuccgcagauuuuccguugacguggguaggaagcacucaaucacccggaagcugaugcgccagagauaccuugaaugcaggccacugaguuauagcaaccccgucgaguacgaauugcucugggggccgcgugcccaucacgagacgauuaaaaugaaggugcuggaauauauggcacgguuauaccgaaaaagaccucagaauuggcccgagcaauauagggaggccguagaagaugaggaagcucgcgcgaaguccgaggcaacuaucauguucuuucuggacccaacauga

SEQ ID NO: 2311 - RNA, 924 nt, Artificial Sequence
  CCDS3269.1 variant
augcugcagacccccgagagcagaggccucccugugccacaagccgaaggggagaaggacggaggucacgauggcgaaacaagggcuccgacugcaucccaggagcggcccaaagaagaacuuggggccggacgcgaggaaggcgcggcugagccugcccugacgcgaaagggugcacgugccuuggcugcaaaagccuuagcuagaaggcgggccuaccgcagacugaacaggaccgucgcggagcuaguucaguuccuccuggugaaggacaaaaagaagucuccaaucacacggucagagaugguaaaauaugugauuggggaucuuaagauacuguuucccgacaucauugcacgcgccgcugagcauuugcgauacgucuucggauuugaacucaaacaguucgauagaaagcaccauacuuauauccugauuaauaaacugaagccucucgaggaagaggaagaggaggacuuaggcggcgaugggccaaggcugggacuuuugaugaugauccugggucuaauauacaugcggggcaacagugcccgugaagcacaagugugggagaugcuccgcagacuggggguucagcccagcaaguaucacuuucuuuucggauacccuaaaaggcugaucauggaagacuuugugcagcagcgguauuuguccuaccgacgcgucccacauaccaauccgcccgaguacgaguucucuuggggcccuagaucgaaccucgaaauuucaaagauggaggugcuggguuuuguagcuaaauuacacaagaaagaaccacaacacuggcccguucaguauagggaggcccuggcggaugaagccgaccgggcacgcgcuaaggccagagcugaggccagcaugagggcacgugccagugcucgggcggggauccaucucugguga

SEQ ID NO: 2312 - RNA, 660 nt, Artificial Sequence
  AAD31314 variant
augcccagaggcaggaagucgcggcgccgacguaacgccagagcugcagaggaaaauaggaacaaucggaaaauccaggccuccgaggcgucugaaaccccuauggcugccucaguggucgcaaguacaccagaggacgaucugagcgggccggaagaggaccccuccacuccugaggaagccucuacgaccccagaggaagcuagcucaacagcacaagcccagaagcccagcguuccucgcaguaacuuccagggaacuaaaaagucccuccuuaugucuauucuggcuuugauauuuaucauggguaauagcgccaaagaggcguuaguguggaagguacugggcaagcuagggaugcagccaggaagacaacacuccauuuucggcgaucccaaaaagaucgugaccgaggaauuugucaggcgggguuaccucauuuauaaaccugugccacgcucaaguccgguugaguacgaguucuuuugggggccccgagcacauguggaaagcucuaagcugaaagucaugcacuucguggccagaguaaggaaccggugcuccaaggacuggccuuguaauuaugauugggacucagaugacgaugcugaaguugaggccauccuuaacagcggagcacguggcuacagugcuccauga

SEQ ID NO: 2313 - RNA, 3750 nt, Artificial Sequence
  CCDS73700.1 variant
augagccagcuguccaagaaccucggcgacucuucacccccugccgaggcuccaaaaccgcccguguacaguagaccuaccguccuuaugagggcaccacccgccagcucccgggcgccuccaguucccugggauccuccaccgaucgaccugcaggcuucuuuggccgcauggcaagcuccccagccugccugggaagcaccacaggggcaauuacccgccccugugguaccaaugacacagcccccggcucugggagguccuauugugcccgccccaccucuaggcgggcccaugggaaagccacccacuccuggcguccucauggugcacccaccgcccccuggugcgccaauggcacagcccccuacgccagggguucugauggugcaucccucggccccgggagcuccuauggcccacccacccccucccggcaccccaaugucacauccucccccaccgggcacaccuauggcacacccaccacccccugggacuccaauggcucaucccccuccgccaggaacccccaugguccacccuccacccccugguacaccgauggcccaucccccaccucccggcaccccaauggcgcacccucccccaccggggacuccuauggcccacccaccacccccuggaacaccaauggcacaucccccuccgccaggcacccccauggcucagccucccgccccaggugugcuuauggcucaaccucugacgcccgggguauugaugguucagccagccgcaccuggagccccgauggugcagcccccucccgcugcgaugaugacucagccccaaccaagcggcgcaccuauggccaaacccccgggcccagggguccucaugauacacccucccggagcucgcgccccaaugacccagcccccugcaaguggugccccgauggcucagcccgccgcacccccugcgcaacccauggcuccuccagcccagcccauggcauccugggccccucaggcucagccacugauccugcaaauucagucucaggugauccgagccccgccccaggugccucaaggcccacaggcacccccugcucagcucgccacaccacccggguggcaggcgacuagcccgggauggcaagccacccagcagggcuggcaggcuacaccuuuaaccuggcaaacgacucaggucacauggcaggcacccgccguuaccuggcaagugccaccucccaugcgucaggguccacccccuauuagaccagggccgcccccuaucaggccaggacccccuccaguacggcaggcucccccucugauacgccaggccccgccagugaucagacaagcacccccugucauuaggcaggcgcccccagugauccggcaggccccugcuguuauucgccaggcacccccagugauccgacaagccccgccugucauaagacaggcucccccagugauuaggcaggcacccccucuuauccggcaggccccacccccuauucguccggccccacaaguauuggcuacucagcccccucuguggcaggcgcuaccacccccucccccacuccgccaagccccgcaggcaagacugccugcuccccagguucaggccgccccacaagugccuacagcucccccagcaacccaggucccugccgcgcccccggcuggcccacaggugccucagcccguccuuccagcaccccuguccgccccuuugucagccccgcaagcugugcacugcccaaguaucaucuggcaggcacccaagggccagccucccguuccacaugagauuccuacgagcauggaguuccaggaagugcaacagacccaggcccucgcguggcaggcucaaaaagcccccacacacauauggcagccacugccugcacaggaagcccaaaggcaggcuccgcccuuaguacagcuggagcagccauuucaaggggccccucccucucagaaggcaguccagauccagcucccaccucaacaggcucaggccuccggaccccaggcggaggugccgacucuuccacugcaaccuucauggcaggcacccccagccguuuugcaggcucaacccgguccucccguggccgcugcaaauuucccacuaggcagcgccaagagucugaugaccccuucuggggaaugucgggccuccagcauugaucgacgcggaucgucuaaagagagaaggacauccucaaaggaacggcgcgcuccgaguaaagacagaaugaucuuugcggcaacuuucugcgcccccaaggcugucagcgccgcaagggcccaucucccagcugcguggaaaaaccugccugccacccccgagacauuugcaccauccucuagcguguucccugcuaccucacaguuucagcccgccagucuuaaugcauucaagggcccguccgccgcuagcgagacuccuaagucucugccauaugccuugcaggaucccuuugcguguguagaagcacucccugccgugccauggguuccccaaccuaacaugaaugcuucaaaagccagucaggcugucccaacguuccugauggcaacagccgcugcaccccaggccaccgcgacuacccaggaggccagcaagacauccguggaaccgccucgucggucugguaaagcuacccgaaagaaaaagcacuuagaggcccaagaagacucgagagggcauacucuggcauuucacgauuggcagggccccaggccaugggagaaccuaaaucucagcgacugggaggugcagucccccauacaggucucaggagauugggaacacccuaacacaccacgcggccugagugggugggagggacccucuacgagccggauucuuuccgguugggaaggcccuucagcuagcugggccuugucugcaugggaggggccauccaccaguagagcccugggacucagcgaaucuccgggcuccucacugcccguuguggugagugagguagcuagcgucucgccugguuccucugcgacucaagacaauagcaaaguggaggcccagccacuuucaccccuggaugaaagggcaaacgcuuugguucaguuccuccuggugaaggaccaggccaaggucccugugcaacgcagugagaugguuaaagugaucuuacgagaauacaaggaugagugccuggacaucauuaaucgggccaacaauaaacuagaaugugcauuuggguaucagcucaaggagaucgacaccaaaaaccaugcuuacauuauaaucaauaagcugggcuaucacacaggaaaccuuguagccuccuacuuggaucguccaaaguucggccugcucauggucgugcugucuuuaauuuucaugaaagggaacugcgugagagaggaccugaucuuuaauuuccuuuuuaaguugggacucgaugucagggaaacaaacggccuguucgguaauacuaaaaagcuaaucaccgagguuuuugugcgccagaaauaucuggaauaccggaggauucccuacacggagccggcggaguaugaguuccucugggggccuagagcuuuucuggaaaccagcaagaugcuuguauugcgauuccuggccaaguuacauaaaaaggacccacaauccuggcccuuucacuaccucgaagcacuggccgagugugaaugggaggauacagacgaggaugaaccugacacuggagauucagcucacggccccaccagccgcccaccgccucgguga

SEQ ID NO: 2314 - RNA, 282 nt, Artificial Sequence
  AAC39608 variant
augaagcugcucauggugcuuaugcuggccgcuuugagccagcacugcuacgcaggcuccgggugucccuuacuggagaacgucaucucuaaaaccauuaauccucaaguuucaaagacagaauauaaagagcuacuccaggaguucauagacgauaacgccacuacgaaugcgaucgacgaacugaaggaaugcuuucuuaaccagaccgaugagacacugaguaauguggagguauucaugcaguugauuuacgacagcucccucugugaucuguuuuga

SEQ ID NO: 2315 - RNA, 363 nt, Artificial Sequence
  AAH67220 variant
augaagcugcucauggugcuuaugcuggccgcuuugagccagcacugcuacgcaggcuccgggugucccuuacuggagaacgucaucucuaaaaccauuaauccucaaguuucaaagacagaauauaaagagcuacuccaggaguucauagacgauaacgccacuacgaaugcgaucgacgaacugaaggaaugcuuucuuaaccagaccgaugagacacugaguaauguggagguauucauggugauuagcuuuuccucuuacaaauuguucaagucgccagaccagggacaagucgguagcucauuucucacugauaacgcuaaggccaccagugaacaggcauucuccuauaucggcuga

SEQ ID NO: 2316 - RNA, 357 nt, Artificial Sequence
  AAA19238 variant
augcccagagaggacgcccacuucaucuacggcuauccuaagaaagggcauggacacagcuacaccacagcugaagaggcagccgguauuggcauacugacugugauccucgggguccuucuguugauuggaugcugguauuguaggcggcgcaacggcuaccgagcguuaauggauaagucccugcauguugguacgcagugcgcucuaacccguagauguccacaagaaggguuugaccacagggauucuaaagugucacuccaggagaagaauugcgaaccgguagugcccaacgccccuccagcauaugagaaacugagugccgagcagagcccucccccauacucccccuga

SEQ ID NO: 2317 - RNA, 1482 nt, Artificial Sequence
  EAW93427 variant
augcugcccagaugggagcucgcccuuuaccuguuggcuagcuuaggcuuccacuuuuauuccuucuacgaaguguauaaggucucuagggagcaugaagaggaacuggaccaggaguuugagcuagaaaccgauacacucuucgggggacugaaaaaggacgcaacugauuuugaguggucauucuggauggaaugggguaaacaauggcuuguuuggcuguugcucggccacauggugguaagucagauggccacgcugcuggcgcggaagcaucgcccuuggauccucauguuauacgggaugugggcuugcuggugugugcugggaaccccaggcgucgccauggugcuuuugcacacaacuauuagcuuuugcguugcacaguuccgaucccagcugcuaaccuggcucuguucucugcuucuguugucgacacuccgucugcaagguguggaggaggucaaaagaaggugguauaagaccgaaaacgaguacuauuuacugcaguuuacucucacagugcggugccuuuacuacaccucauucagccuggaauuguguuggcagcagcuaccggccgcuaguacguccuauucuuuucccuggaugcuggcauacguauucuauuacccuguucuccauaaugggccaauacugagcuuuuccgaguucaucaagcaaaugcagcagcaggaacacgacucacuuaaagccagucugugcguguuggcucucggacugggccgcuuacuguguuggugguggcuagccgagcucauggcgcaccugauguauaugcaugcaauuuacagcucuaucccccuuuuggagacugucuccugcuggacccugggcgggcucgcccuggcucaagugcuuuucuuuuaugugaaguaccuggucuuguucggaguuccugcccuccugaugagauuagauggucugacaccacccgcacuaccuaggugugugucaacuauguuuagcuucaccggcauguggcgguacuuugacguagggcuccacaacuuccugauucgcuauguguacaucccagucggaggcagucagcauggucuuuuggggacacuguuuucuaccgcuaugacguucgccuuuguguccuauuggcacggaggcuacgauuaucucuggugcugggcggcccugaauugguuaggcguuacuguggaaaacgggguccgaagacugguggagacaccguguauacaggacagccuugcaagguacuucucgccccaagcucggcgucgcuuucacgccgcuuuggccucuugcuccaccucaaugcucauccugaguaaucuaguauuccugggagguaacgaaguuggcaaaacuuauuggaauagaauuuuuauccagggguggccuugggugacacucagcguccugggauuccuuuacugcuacucccaugugggcauugcaugggcccagaccuaugcuacggauuga

SEQ ID NO: 2318 - RNA, 954 nt, Artificial Sequence
  AAD41349 variant
auggccgugcagggcagccaaagaaggcugcucgggucccuuaacucuacccccacagcuaucccucagcugggauuggcagccaaucagacuggugcgcggugcuuagaggucucaauuagugacggccuguuccuaagccucgggcugguuucccuuguggaaaacgcucugguaguggccacgauagcaaagaaucgcaacuugcacucuccaauguacuguuuuaucugcugucucgcccugucggaucugcucgucucaggaagcaauguguuagagaccgcuguuauucugcuuuuggaagcaggcgcccugguggcucgagccgcgguccuacagcaacucgacaacgugaucgauguaauuacaugcaguuccaugcugucuagccuuuguuuccugggugcaaucgccguugaccguuauauauccaucuuuuacgcuuugagauaucauucaauugugacucucccgagggcccggcgcgcagucgcugccaucuggguggcgaguguggucuucagcacccuguuuauugccuacuaugaucacguugcaguguuacugugccucguaguguucuuucuugcuaugcuggucuugauggccgugcuauacguucauaugcuggcuagagccugucagcacgcacaggggaucgccaggcuccauaaacggcagcgccccgugcaccaaggauucggccugaagggcgcugucacacuuaccauacuguuggggaucuuuuuccucugcuggggaccauuuuuccugcacuuaacucugauugugcuauguccugagcaucccacaugcgguuguauuuuuaaaaauuucaaccucuuccuggcgcuuaucaucugcaaugcaauuauagacccuuugaucuaugccuuucacucucaggaacugcgaagaacccucaaggagguacugacgugcuccugguga

SEQ ID NO: 2319 - RNA, 954 nt, Artificial Sequence; identical to SEQ ID NO: 2318
  AHC09522 variant

SEQ ID NO: 2320 - RNA, 954 nt, Artificial Sequence
  AHC09804 variant
auggccgugcagggcagccaaagaaggcugcucgggucccuuaacucuacccccacagcuaucccucagcugggauuggcagccaaucagacuggugcgcggugcuuagaggucucaauuagugacggccuguuccuaagccucgggcugguuucccuuguggaaaacgcucugguaguggccacgauagcaaagaaucgcaacuugcacucuccaauguacuguuuuaucugcugucucgcccugucggaucugcucgucucaggaagcaauguguuagagaccgcuguuauucugcuuuuggaagcaggcgcccugguggcucgagccgcgguccuacagcaacucgacaacgugaucgauguaauuacaugcaguuccaugcugucuagccuuuguuuccugggugcaaucgccguugaccguuauauauccaucuuuuacgcuuugagauaucauucaauugugacucucccgagggcccggcaggcagucgcugccaucuggguggcgaguguggucuucagcacccuguuuauugccuacuaugaucacguugcaguguuacugugccucguaguguucuuucuugcuaugcuggucuugauggccgugcuauacguucauaugcuggcucgcgccugucagcacgcacaggggaucgccagacuccauaaaaggcaacggcccgugcaccagggauucggccugaagggcgcugucacacuuaccauacuguuggggaucuuuuuccucugcuggggaccauuuuuccugcacuuaacucugauugugcuauguccugagcaucccacaugcgguuguauuuuuaaaaauuucaaccucuuccuggcgcuuaucaucugcaaugcaauuauagacccuuugaucuaugccuuucacucucaggaacugcgccgaacccucaaggagguacugacgugcuccugguga

SEQ ID NO: 2321 - RNA, 954 nt, Artificial Sequence
  BAE94313 variant
auggccgugcagggcagccaaagaaggcugcucgggucccuuaacucuacccccacagcuaucccucagcugggauuggcagccaaucagacuggugcgcggugcuuagaggucucaauuagugacggccuguuccuaagccucgggcugguuucccuuguggaaaacgcucugguaguggccacgauagcaaagaaucgcaacuugcacucuccaauguacuguuuuaucugcugucucgcccugucggaucugcucgucucaggaagcaauguguuagagaccgcuguuauucugcuuuuggaagcaggcgcccugguggcucgagccgcgguccuacagcaacucgacaacgugacagauguaaucacuugcaguuccaugcugucuagccuuuguuuccugggugcaauugccguugaccguuauaucuccauauuuuacgcuuugagauaucauucaaucgugacccucccgagggcccggcgcgcagucgcugccauuuggguggcgaguguggucuucagcacacuguuuaucgccuacuaugaucacguugcaguguuacugugccucguaguguucuuucuugcuaugcuggucuugauggccgugcuauacguucauaugcuggcuagagccugucagcacgcacaggggauugccaggcuccauaaacggcagcgccccgugcaccaaggauucggccugaagggcgcugucacccuuacuauccuguuggggauauuuuuccucugcuggggacccuuuuuccugcacuuaacacugauugugcuauguccagagcauccuaccugcgguuguaucuuuaaaaauuucaaccucuuccuggcgcuuauuaucugcaaugcaaucauugacccuuugauauaugccuuucacucucaggaacugcgaagaacgcucaaggagguacugacuugcuccugguga

SEQ ID NO: 2322 - RNA, 954 nt, Artificial Sequence
  AHC09531 variant
auggccgugcagggcagccaaagaaggcugcucgggucccuuaacucuacccccacagcuaucccucagcugggauuggcagccaaucagacuggugcgcggugcuuagaggucucaauuagugacggccuguuccuaagccucgggcugguuucccuuguggaaaacgcucugguaguggccacgauagcaaagaaucgcaacuugcacucuccaauguacuguuuuaucugcugucucgcccugucggaucugcucgucucaggaagcaauauguuagagaccgcugugauucugcuuuuggaagcaggcgcccugguugcucgagccgcggugcuacagcaacucgacaacgucaucgaugugauuacaugcaguuccaugcugucuagccuuuguuuccugggugcaaucgccguagaccguuauauauccaucuuuuacgcuuugagauaucauucaauuguuacucucccgagggcccggcgcgcaguggcugccaucugggucgcgagugugguguucagcacccuguuuauugccuacuaugaucacgucgcaguuuuacugugccucgugguauucuuucuugcuaugcugguguugauggccguccuauacgugcauaugcuggcuagagccugucagcacgcacaggggaucgccaggcuccauaaacggcagcgccccguucaccaaggauucggccugaagggcgcugugacacuuaccauacuguuggggaucuuuuuccucugcuggggaccauuuuuccugcacuuaacucugauuguccuauguccugagcaucccacaugcgguuguauuuuuaaaaauuucaaccucuuccuggcgcuuaucaucugcaaugcaauuauagacccuuugaucuaugccuuucacucucaggaacugcgaagaacccucaaggaggugcugacgugcuccugguga

SEQ ID NO: 2323 - RNA, 954 nt, Artificial Sequence
  BAE94311 variant
auggccgugcagggcagccaaagaaggcugcucgggucccuuaacucuacccccacagcuaucccucagcugggauuggcagccaaucagacuggugcgcggugcuuagaggucucaauuagugacggccuguuccuaagccucgggcugguuucccuuguggaaaacgcucugguaguggccacgauagcaaagaaucagaacuugcacucuccaauguacuguuuuaucugcugucucgcccugucggaucugcucgucucaggaagcaauguguuagagaccgcuguuauucugcuuuuggaagcaggcgcccugguggcucgcgccgcgguccuacaacagcucgacaacgugaucgauguaauuacaugcaguuccaugcugucuagccuuuguuuccugggugcaaucgccguugaccgauauauauccaucuuuuacgcuuugcguuaucauucaauugugacucucccgagagccaggcaggcagucgcugccaucuggguggcgaguguggucuucagcacccuguuuauugccuacuaugaucacguugcaguguuacugugccucguaguguucuuucuugcuaugcuggucuugauggccgugcuauacguucauaugcuggcucgggccugucagcacgcacaagggaucgcccgccuccauaaaagacagaggcccgugcaccagggauucggccugaagggcgcugucacacuuaccauacuguuggggaucuuuuuccucugcuggggaccauuuuuccugcacuuaacucugauugugcuauguccugagcaucccacaugcgguuguauuuuuaaaaauuucaaccucuuccuggcgcuuaucaucugcaaugcaauuauagacccuuugaucuaugccuuucacucucaggaacugcggcgcacccucaaggagguacugacgugcuccugguga

SEQ ID NO: 2324 - RNA, 954 nt, Artificial Sequence
  BAE94309 variant
auggccgugcagggcagccaaagaaggcugcucgggucccuuaacucuacccccacagcuaucccucagcugggauuggcagccaaucagacuggugcgcggugcuuagaggucucaauuagugacggccuguuccuaagccucgggcugguuucccuuguggaaaacgcucugguaguggccacgauagcaaagaaucgcaacuugcacucuccaauguacuguuuuaucugcugucucgcccugucggaucugcucgucucaggaagcaauguguuagagaccgcuguuauucugcuuuuggaagcaggcgcccugguggcucgagccgcgguccuacagcaacucgacaacgugaucgauguaauuacaugcaguuccaugcugucuagccuuuguuuccugggugcaaucgccguugaccguuauauauccaucuuuuacgcuuugagauaucauucaauugugacucucccgagggcccggcaggcagucggggcuaucuggguggccaguguggucuucagcacccuguuuauugcguacuaugaucacguugccguguuacugugccucguaguguucuuucuugcaaugcuggucuugauggcugugcuauacguucauaugcuggcccgcgcuugucagcacgcccagggaaucgcaagacuccauaaaaggcaacggcccgugcaccagggcuucggccugaagggggccgucacacuuaccauacuguugggaaucuuuuuccucugcugggguccauuuuuccugcacuuaacucugauugugcuauguccugagcaucccacaugcggcuguauuuuuaaaaauuucaaccucuuccuggcucuuaucaucugcaaugcgauuauagacccuuugaucuaugcauuucacucucaggaacugcgccgaacccucaaggagguacugacgugcuccugguga

SEQ ID NO: 2325 - RNA, 954 nt, Artificial Sequence
  BAE94308 variant
auggccgugcagggcagccaaagaaggcugcucgggucccuuaacucuacccccacagcuaucccucagcugggauuggcagccaaucagacuggugcgcggugcuuagaggucucaauuagugacggccuguuccuaagccucgggcugguuucccuuguggaaaacgcucugguaguggccacgauagcaaagaaucgcaacuugcacucuccaauguacuguuuuaucugcugucucgcccugucggaucugcucgucucaggaagcaauguguuagagaccgcuguuauucugcuuuuggaagcaggcgcccugguggcucgagccgcgguccuacagcaacucgacaacgugacagauguaaucacuugcaguuccaugcugucuagccuuuguuuccugggugcaauugccguugaccguuauaucuccauauuuuacgcuuugagauaucauucaaucgugacccucacaagggcccggcgcgcagucgcugccauuuggguggcgaguguggucuucagcacccuguuuaucgccuacuaugaucacguugcaguguuacugugccucguaguguucuuucuugcuaugcuggucuugauggccgugcuauacguucauaugcuggcuagagccugucagcacgcacaggggauugccaggcuccauaaacggcagcgcccggugcaccaaggauucggccugaagggcgcugucacucuuacaauccuguuggggauauuuuuccucugcuggggacccuuuuuccugcacuuaacccugauugugcuauguccugagcauccaacgugcgguuguaucuuuaaaaauuucaaccucuuccuggcgcuuauuaucugcaaugcaaucauugaccccuugauauaugccuuucacucucaggaacugcgaagaacucucaaggagguacugaccugcuccugguga

SEQ ID NO: 2326 - RNA, 954 nt, Artificial Sequence
  BAE94307 variant
auggccgugcagggcagccaaagaaggcugcucgggucccuuaacucuacccccacagcuaucccucagcugggauuggcagccaaucagacuggugcgcggugcuuagaggucucaauuagugacggccuguuccuaagccucgggcugguuucccuuguggaaaacgcucugguaguggccacgauagcaaagaaucgcaacuugcacucuccaauguacuguuuuaucugcugucucgcccugucggaucugcucgucucaggaagcaauauguuagagaccgcugugauucugcuuuuggaagcaggcgcccugguugcucgagccgcggugcuacagcaacucgacaacgucaucgaugugauuacaugcaguuccaugcugucuagccuuuguuuccugggugcaaucgccguagaccguuauauauccaucuuuuacgcuuugagauaucauucaauuguuauccucccgagggcccggcgcgcaguggcugccauuugggucgcgagugugguguucagcacucuguuuaucgccuacuaugaucacgucgcaguuuuacugugccucgugguauucuuucuugcuaugcugguguugauggccguccuauacgugcauaugcuggcuagagccugucagcacgcacaggggauagccaggcuccauaaacggcagcgccccguucaccaaggauucggccugaagggcgcugugacccuuacaauucuguuggggaucuuuuuccucugcuggggaccauuuuuccugcacuuaacccugauuguccuauguccugagcaucccacuugcgguuguaucuuuaaaaauuucaaccucuuccuggcgcuuaucauuugcaaugcaauaaucgacccuuugauuuaugccuuucacucucaggaacugcgaagaacacucaaggaggugcugaccugcuccugguga

SEQ ID NO: 2327 - RNA, 951 nt, Artificial Sequence
  BAE94306 variant
auggccgugcagggcagccaaagaaggcugcucgggucccuuaacucuacccccacagcuaucccucagcugggauuggcagccaaucagacuggugcgcggugcuuagaggucucaauuagugacggccuguuccuaagccucgggcugguuucccuuguggaaaacgcucugguaguggccacgauagcaaagaaucgcaacuugcacucuccaauguacuguuuuaucugcugucucgcccugucggaucugcucgucucaggaagcaauguguuagagaccgcuguuauucugcuuuuggaagcaggcgcccugguggcucgagccgcgguccuacagcaacucgacaacgugaucgauguaauuacaugcaguuccaugcugucuagccuuuguuuccugggugcaaucgccguugaccguuauauauccaucuacgcuuugagauaucauucaauugugacucucccgagggcccggcaggcagucgcugccaucuggguggcgaguguggucuuuagcacccuguucauugccuacuaugaucacguugcaguguuacugugccucguaguguuuuuccuugcuaugcuggucuugauggccgugcuauacguucauaugcuggcucgcgccugucagcacgcacaggggaucgccagacuccauaaaaggcaacggcccgugcaccagggauuuggccugaagggcgcugucacacuuaccauacuguuggggauuuucuuucucugcuggggaccuuucuuucugcacuuaacucugaucgugcuauguccagagcaucccacaugcgguuguauuuucaaaaauuuuaaccucuuccuggcgcuuaucaucugcaaugcaauuauagacccuuugaucuaugccuuccacucucaggaacugcgccgaacccucaaggagguacugacgugcuccugguga

SEQ ID NO: 2328 - RNA, 954 nt, Artificial Sequence
  AAQ62977 variant
auggccgugcagggcagccaaagaaggcugcucgggucccuuaacucuacccccacagcuaucccucagcugggauuggcagccaaucagacuggugcgcggugcuuagaggucucaauuagugacggccuguuccuaagccucgggcugguuucccuuguggaaaacgcucugguaguggccacgauagcaaagaaucgcaacuugcacucuccaauguacuguuuuaucugcugucucgcccugucggaucugcucgucucaggaagcaauguguuagagaccgcuguuauucugcuuuuggaagcaggcgcccugguggcucgagccgcgguccuacagcaacucgacaacgugaucgauguaauuacaugcaguuccaugcugucuagccuuuguuuccugggugcaaucgccguugaccguuauauauccaucuuuuacgcuuugagauaucauucaauugugacucucccgagggcccggcgcgcagucgcugccaucuggguggcgaguguggucuucagcacccuguuuauugccuacuaugaucacguugcaguguuacugugccucguaguguucuuucuugcuaugcuggucuugauggccgugcuauacguucauaugcuggcuagagccugucagcacgcacaggggaucgccaggcuccauaaacggcagcgccccgugcaccaaggauucggccugaagggcgcugucacacuuaccauacuguuggggaucuuuuuccucugcuggggaccauuuuuccugcacuuaacucugauuauucuauguccugagcaucccacaugcgguuguaucuuuaaaaauuucaaccucuuccuggcgcuuaucauuugcaaugcaauaaucgacccuuugauuuaugccuuucacucucaggaacugcgaagaacccucaaggaggugcugacgugcuccugguga

SEQ ID NO: 2329 - RNA, 954 nt, Artificial Sequence
  AAQ62975 variant
auggccgugcagggcagccaaagaaggcugcucgggucccuuaacucuacccccacagcuaucccucagcugggauuggcagccaaucagacuggugcgcggugcuuagaggucucaauuagugacggccuguuccuaagccucgggcugguuucccuuguggaaaacgcucugguaguggccacgauagcaaagaaucgcaacuugcacucuccaauguacuguuuuaucugcugucucgcccugucggaucugcucgucucaggaagcaauguguuagagaccgcuguuauucugcuuuuggaagcaggcgcccugguggcucgagccgucgugcuacagcaacucgacaacguaaucgauguuauuacaugcaguuccaugcugucuagccuuuguuuccugggugcgaucgcaguggaccguuauauauccaucuuuuacgccuugagauaucauucaauugucacucucccgagggcucggcgcgccguggcagcuaucuggguggccagugucguuuucagcacccuguuuauugcguacuaugaucacguggccguauuacugugccucguggucuucuuucuugcaaugcugguguugauggcuguucuauacgugcauaugcuggccagagcuugucagcacgcccaggggaucgcaaggcuccauaaacggcagcgccccguccaccaaggauucggccugaagggcgccgugacacuuaccauacuguuggggaucuuuuuccucugcuggggaccauuuuuccugcacuuaacucugauuguacuauguccugagcaucccacaugcgguuguauuuuuaaaaauuucaaccucuuccuggcucuuaucaucugcaaugcgauuauagacccuuugaucuaugcauuucacucucaggaacugcgaagaacccucaaggagguucugacgugcuccugguga

SEQ ID NO: 2330 - RNA, 954 nt, Artificial Sequence
  AAQ62974 variant
auggccgugcagggcagccaaagaaggcugcucgggucccuuaacucuacccccacagcuaucccucagcugggauuggcagccaaucagacuggugcgcggugcuuagaggucucaauuagugacggccuguuccuaagccucgggcugguuucccuuguggaaaacgcucugguaguggccacgauagcaaagaaucgcaacuugcacucuccaauguacuguuuuaucugcugucucgcccugucggaucugcucgucucaggaagcaauguguuagagaccgcuguuauucugcuuuuggaagcaggcgcccugguggcucgagccgcgguccuacagcaacucgacaacgugaucgauguaauuacaugcaguuccaugcugucuagccuuuguuuccugggugcaaucgccguugaccguuauauauccaucuuuuacgcuuugagauaucauucaauugugacucucccgagggcccggcgcgcagucgcugccaucuggguggcgaguguggucuucagcacccuguuuauugccuacuaugaucacguugcaguguuacugugccucguaguguucuuucuugcuaugcuggucuugauggccgugcuauacguucauaugcuggcuagagccugucagcacgcacaggggaucgccaggcuccauaaacggcagcgccccgugcaccaaggauucggccugaagggcgcugucacacuuaccauacuguuggggaucuuuuuccucugcuggggaccauuuuuccugcacuuaacucugauugugcuauguccugagcaucccacaugcgguuguauuuuuaaaaauuucaaccucuuccuggcgcuuaucaucugcaaugcaauuauagacccuuugaucuaugccuuucacucucaggaacugcgaagaacccucaaggagguacugacgagguccugguga

SEQ ID NO: 2331 - RNA, 954 nt, Artificial Sequence
  AAQ62973 variant
auggccgugcagggcagccaaagaaggcugcucgggucccuuaacucuacccccacagcuaucccucagcugggauuggcagccaaucagacuggugcgcggugcuuagaggucucaauuagugacggccuguuccuaagccucgggcugguuucccuuguggaaaacgcucugguaguggccacgauagcaaagaaucgcaacuugcacucuccaauguacuguuuuaucugcugucucgcccugucggaucugcucgucucaggaagcaauguguuagagaccgcuguuauucugcuuuuggaagcaggcgcccugguggcucgagccgcgguccuacagcaacucgacaacgugaucgauguaauuacaugcaguuccaugcugucuagccuuuguuuccugggugcaaucgccguugaccguuauauauccaucuuuuacgcuuugagauaucauucaauugugacucucccgagggcccggcgcgcagucgcugccaucuggguggcgaguguggucuucagcacccuguuuauugccuacuaugaucacguugcaguguuacugugccucguaguguucuuucuugcuaugcuggucuugauggccgugcuauacguucauaugcuggcuagagccugucagcacgcacaggggaucgccaggcuccauaaacggcagcgccccgugcaccaaggauucggccugaagggcgcugucacacuuaccauacuguuggggaucuuuuuccucugcuggggaccauuuuuccugcacuuaacucugauugugcuauguccugagcaucccacaugcgguuguauuuuuaaaaauuucaaccucuuccuggcgcuuaucaucugcaaugcaauuauagacccuuugaucuaugccuuucacucucaggaacugcgaagaaugcucaaggagguacugaccugcuccugguga

SEQ ID NO: 2332 - RNA, 954 nt, Artificial Sequence
  AAQ62972 variant
auggccgugcagggcagccaaagaaggcugcucgggucccuuaacucuacccccacagcuaucccucagcugggauuggcagccaaucagacuggugcgcggugcuuagaggucucaauuagugacggccuguuccuaagccucgggcugguuucccuuguggaaaacgcucugguaguggccacgauagcaaagaaucgcaacuugcacucuccaauguacuguuuuaucugcugucucgcccugucggaucugcucgucucaggaagcaauguguuagagaccgcuguuauucugcuuuuggaagcaggcgcccugguggcucgagccgcgguccuacagcaacucgacaacgugaucgauguaauuacaugcaguuccaugcugucuagccuuuguuuccugggugcaaucgccguugaccguuauauauccaucuuuuacgcuuugagauaucauucaauugugacucucccgagggcccggcgcgcagucgcugccaucuggguggcgaguguggucuucagcacccuguuuauugccuacuaugaucacguugcaguguuacugugccucguaguguucuuucuugcuaugcuggucuugauggccgugcuauacguucauaugcuggcuugggccugucagcacgcacaggggaucgccagacuccauaaaaggcagcggcccgugcaccaaggauucggccugaagggcgcugucacacuuaccauacuguuggggaucuuuuuccucugcuggggaccauuuuuccugcacuuaacucugauugugcuauguccugagcaucccacaugcgguuguauuuuuaaaaauuucaaccucuuccuggcgcuuaucaucugcaaugcaauuauagacccuuugaucuaugccuuucacucucaggaacugcgccgaacccucaaggagguacugacgugcuccugguga

SEQ ID NO: 2333 - RNA, 954 nt, Artificial Sequence
  AAQ62971 variant
auggccgugcagggcagccaaagaaggcugcucgggucccuuaacucuacccccacagcuaucccucagcugggauuggcagccaaucagacuggugcgcggugcuuagaggucucaauuagugacggccuguuccuaagccucgggcugguuucccuuguggaaaacgcucugguaguggccacgauagcaaagaaucgcaacuugcacucuccaauguacuguuuuaucugcugucucgcccugucggaucugcucgucucaggaagcaauguguuagagaccgcuguuauucugcuuuuggaagcaggcgcccugguggcucgagccgcgguccuacagcaacucgacaacgugaucgauguaauuacaugcaguuccaugcugucuagccuuuguuuccugggugcaaucgccguugaccguuauauauccaucuuuuacgcuuugagauaucauucaauugugacucucccgcaggccaggcgggcagucgcugccaucuggguggcgaguguggucuucagcacccuguuuauugccuacuaugaucacguugcaguguuacugugccucguaguguucuuucuugcuaugcuggucuugauggccgugcuauacguucauaugcuggcucgcgccugucagcacgcacaggggaucgccagacuccauaaaaggcaacggcccgugcaccagggauucggccugaagggcgcugucacacuuaccauacuguuggggaucuuuuuccucugcuggggaccauuuuuccugcacuuaacucugauugugcuauguccugagcaucccacaugcgguuguauuuuuaaaaauuucaaccucuuccuggcgcuuaucaucugcaaugcaauuauagacccuuugaucuaugccuuucacucucaggaacugcgccgaacccucaaggagguacugacgugcuccugguga

SEQ ID NO: 2334 - RNA, 954 nt, Artificial Sequence
  AAQ62970 variant
auggccgugcagggcagccaaagaaggcugcucgggucccuuaacucuacccccacagcuaucccucagcugggauuggcagccaaucagacuggugcgcggugcuuagaggucucaauuagugacggccuguuccuaagccucgggcugguuucccuuguggaaaacgcucugguaguggccacgauagcaaagaaucgcaacuugcacucuccaauguacuguuuuaucugcugucucgcccugcuggaucucuuagucucgggaucaaaugugcuggagaccgcuguuauucuuuugcuggaagcaggcgcccuaguggcucgagccgcgguccuccagcaacuggacaacgugaucgauguaauuacaugcagcaguaugcuuuccucucuguguuucuugggugcaaucgccguugaccguuauauaagcaucuuuuacgcucucagauaucauuccauugugacucugccgagggcccggcgcgcagucgcugccaucuggguggcgucaguggucuucaguaccuuauuuauugccuacuaugaucacguugcagugcugcucugccuuguaguguucuuucuggcuauguugguccuaauggccgugcuguacguucauaugcucgcuagagccugucagcacgcacaggggaucgccaggcugcauaaacggcagcgccccgugcaccaaggauucggccuuaagggcgcugucacacugaccauauugcucgggaucuuuuuccugugcuggggaccauuuuucuuacaccugacucuaauugugcucuguccugagcaucccacaugcgguuguauuuuuaaaaauuucaaccuguuccuugcguugaucaucugcaaugcaauuauagacccucugaucuaugccuuucacagccaggaacuccgaagaacccugaaggagguacuuacgugcucuugguga

SEQ ID NO: 2335 - RNA, 954 nt, Artificial Sequence
  AAQ62969 variant
auggccgugcagggcagccaaagaaggcugcucgggucccuuaacucuacccccacagcuaucccucagcugggauuggcagccaaucagacuggugcgcggugcuuagaggucucaauuagugacggccugcuacucagccuggggcuuguuucccugguggaaaacgcuuugguaguggccacgauagcaaagaaucgcaaccuccacucuccaauguacuguuucaucugcugucuggcccugucggaucucuuagucucaggaagcaaugugcuggagaccgcuguuauucuuuugcuggaagcaggcgcccuaguggcucgagccgcgguccuccagcaacuggacaacgugaucgauguaauuacaugcaguuccaugcuuucuagccugugcuuuuugggugcaaucgccguugaccguuauauauccaucuucuacgcucucagauaucauucaauugugacucugccgagggcccggcgcgcagucgcugccaucuggguggcgaguguggucuuuagcaccuuauucauugccuacuaugaucacguugcagugcugcucugucuuguaguguuuuuccuggcuauguugguccuaauggccgugcuguacguucauaugcucgcuagagccugucagcacgcacaggggaucgccaggcugcauaaacggcagcgccccgugcaccaaggauuuggccuuaagggcgcugucacacugaccauauugcucgggauuuucuuucugugcuggggaccuuucuuuuuacaccugacucuaaucgugcucuguccagagcaucccacaugcgguuguauuuucaaaaauuuuaaccuguuccuugcguugaucaucugcaaugcaauuauagacccucugaucuaugccuuccacucucaggaacuccgaagaacccugaaggagguacuuacgugcuccugguga

SEQ ID NO: 2336 - RNA, 954 nt, Artificial Sequence
  AAO21073 variant
auggccgugcagggcagccaaagaaggcugcucgggucccuuaacucuacccccacagcuaucccucagcugggauuggcagccaaucagacuggugcgcggugcuuagaggucucaauuagugacggccuguuccuaagccucgggcugguuucccuuguggaaaacgcucugguaguggccacgauagcaaagaaucgcaacuugcacucuccaauguacuguuuuaucugcugucucgcccugucggaucugcucgucucaggaagcaaugugcgagagaccgcuguuauuuuacugcuugaagcaggcgccuugguggcucgugccgcgguccugcagcaacuagacaacgugaucgauguaauuacaugcaguuccaugcucucuagccuguguuuccuuggugcaaucgccguugacagauauauauccaucuuuuacgcucugagguaucauucaauugugacuuugccgcgggcccgcagagcagucgcugccaucuggguggcgaguguggucuucagcacccucuuuauugccuacuaugaucacguugcagugcuguuaugccugguaguguucuuucucgcuaugcuuguccugauggccguguuguacguucauaugcuagcuagggccugucagcacgcacaggggaucgcccggcugcauaaacgccagcgacccgugcaccaaggauucggccucaagggcgcugucacacugaccauacuucuggggaucuuuuucuugugcuggggaccauuuuuccuccaccugacuuuaauugugcuguguccugagcaucccacaugcgguuguauuuuuaaaaauuucaaccuauuccucgcgcugaucaucugcaaugcaauuauagacccucuuaucuaugccuuucacucucaggaauugagaaggacccugaaggagguacucacgugcuccugguga

SEQ ID NO: 2337 - RNA, 954 nt, Artificial Sequence
  AHC09567 variant
auggccgugcagggcagccaaagaaggcugcucgggucccuuaacucuacccccacagcuaucccucagcugggauuggcagccaaucagacuggugcgcggugcuuagaggucucaauuagugacggccuguuccuaagccucgggcugguuucccuuguggaaaacgcucugguaguggccacgauagcaaagaaucgcaacuugcacucuccaauguacuguuuuaucugcugucucgcccugccggaucugcucgucucgggaucaaauguguuagagaccgcuguuauucugcuuuuggaagcaggcgcccugguggcucgagccgcgguccuacagcaacucgacaacgugaucgauguaauuacaugcagcaguaugcuguccucucuuuguuuccugggugcaaucgccguugaccguuauauaagcaucuuuuacgcuuugagauaucauuccauugugacucuccccagggcccggcgcgcagucgcugccaucuggguggcgucaguggucuucaguacccuguuuauugccuacuaugaucacguugcaguguuacugugccucguaguguucuuucuugcuaugcuggucuugauggccgugcuauacguucauaugcuggcuagagccugucagcacgcacaggggaucgccaggcuccauaaacggcagcgcccugugcaccaaggauucggccugaagggcgcugucacacuuaccauacuguuggggaucuuuuuccucugcuggggaccauuuuuccugcacuuaacucugauugugcuaugucccgagcauccuacaugcgguuguauuuuuaaaaauuucaaccucuuccuggcgcuuaucaucugcaaugcaauuauagacccauugaucuaugccuuucacagccaggaacugcgaagaacccucaaggagguacugacgugcucuugguga

SEQ ID NO: 2338 - RNA, 954 nt, Artificial Sequence
  AHC09812 variant
auggccgugcagggcagccaaagaaggcugcucgggucccuuaacucuacccccacagcuaucccucagcugggauuggcagccaaucagacuggugcgcggugcuuagaggucucaauuagugacggccuguuccuaagccucgggcugguuucccuuguggaaaacgcucugguaguggccacgauagcaaagaaucgcaacuugcacucuccaauguacuguuuuaucugcugucucgcccugucggaucugcucgucucaggaagcaauguguuagagaccgcuguuauucugcuuuuggaagcaggcgcccugguggcucgagccgcgguccuacagcaacucgacaacgugaucgauguaauuacaugcaguuccaugcugucuagccuuuguuuccugggugcaaucgccguugaccguuauauauccaucuuuuacgcuuugagauaucauucaauugugacucucccgagggcccggcgcgcagucgcugccaucuggguggcgaguguggucuucagcacccuguuuauugccuacuaugaucacguugcaguguuacugugccucaugguauucuuucuugcuaugcugguguugauggccguccuauacgugcauaugcuggcuagagccugucagcacgcacaggggaucgccaggcuccauaaacggcagcgccccguucaccaaggauucggccugaagggcgcugugacacuuaccauacuguuggggaucuuuuuccucugcuggggaccauuuuuccugcacuuaacucugauuguccuauguccugagcaucccacaugcgguuguauuuuuaaaaauuucaaccucuuccuggcgcuuaucaucugcaaugcaauuauagacccuuugaucuaugccuuucacucucaggaacugcgaagaacccucaaggaggugcugacgugcuccugguga

SEQ ID NO: 2339 - RNA, 954 nt, Artificial Sequence
  AHC10192 variant
auggccgugcagggcagccaaagaaggcugcucgggucccuuaacucuacccccacagcuaucccucagcugggauuggcagccaaucagacuggugcgcggugcuuagaggucucaauuagugacggccuguuccuaagccucgggcugguuucccuuguggaaaacgcucugguaguggccacgauagcaaagaaucgcaacuugcacucuccaauguacuguuuuaucugcugucucgcccugucggaucugcucgucucaggaagcaauguguuagagaccgcuguuauucugcuuuuggaagcaggcgcccugguggcucgagccgcgguccuacagcaacucgacaacgugaucgauguaauuacaugcaguuccaugcugucuagccuuuguuuccugggugcaaucgccguugaccguuauauauccaucuuuuacgcuuugagauaucauucaauugugacucucccgagggcccggcgcgcagucgcugccaucuggguggcgaguguggucuucagcacccuguuuauugccuacuaugaucacguugcaguguuacugugccucguaguguucuuucuugcuaugcuggucuugauggccgugcuauacguucauaugcuggcuagagccugucagcacgcacaggggacagccaggcuccauaaacggcagcgccccgugcaccaaggauucggccugaagggcgcugucacccuuacuauccuguuggggauauuuuuccucugcuggggacccuuuuuccugcacuuaacacugauugugcuauguccagagcauccuaccugcgguuguaucuuuaaaaauuucaaccucuuccuggcgcuuauuaucugcaaugcaaucauugacccuuugauauaugccuuucacucucaggaacugcgaagaacgcucaaggagguacugacuugcuccugguga

SEQ ID NO: 2340 - RNA, 954 nt, Artificial Sequence
  AHC09641 variant
auggccgugcagggcagccaaagaaggcugcucgggucccuuaacucuacccccacagcuaucccucagcugggauuggcagccaaucagacuggugcgcggugcuuagaggucucaauuagugacggccuguuccuaagccucgggcugguuucccuuguggaaaacgcucugguaguggccacgauagcaaagaaucgcaacuugcacucuccaauguacuguuuuaucugcugucucgcccugucggaucugcucgucucaggaagcaauguguuagagaccgcuguuauucugcuuuuggaagcaggcgcccugguggcucgagccgcgguccuacagcaacucgacaacgugaucgauguaauuacaugcaguuccaugcugucuagccuuuguuuccugggugcaaucgccguugaccguuauauauccaucuuuuacgcuuugagauaucauucaacugugacccucccgagggcccggcgcgcagucgcugccauuuggguggcgaguguggucuucagcacacuguuuaucgccuacuaugaucacguugcaguguuacugugccucguaguguucuuucuugcuaugcuggucuugauggccgugcuauacguucauaugcuggcuagagccugucagcacgcacaggggauugccaggcuccauaaacggcagcgccccgugcaccaaggauucggccugaagggcgcugucacccuuacuauccuguuggggauauuuuuccucugcuggggacccuuuuuccugcacuuaacacugauugugcuauguccagagcauccuaccugcgguuguaucuuuaaaaauuucaaccucuuccuggcgcuuauuaucugcaaugcaaucauugacccuuugauauaugccuuucacucucaggaacugcgaagaacgcucaaggagguacugacuugcuccugguga

SEQ ID NO: 2341 - RNA, 954 nt, Artificial Sequence
  AHC10044 variant
auggccgugcagggcagccaaagaaggcugcucgggucccuuaacucuacccccacagcuaucccucagcugggauuggcagccaaucagacuggugcgcgguacuuagaggucucaauuagugacggccuguuccuaagccucgggcugguuucccuuguggaaaacgcucugguaguggccacgauagcaaagaaucgcaacuugcacucuccaauguauugcuuuaucuguugccucgcccugucggaucugcucgucucaggaagcaauguguuagagaccgcuguuauucugcuuuuggaagcaggcgcccugguggcucgagccgcgguccuacagcaacucgacaacgugaucgauguaauuacauguaguuccaugcugucuagccuuugcuuccugggugcaaucgccguugaccguuacauauccaucuuuuaugcuuugagauaccauucaauugugacucucccgagggcccggcgcgcagucgcugccaucuggguggcgaguguggucuucagcacccuguuuauugccuauuacgaucacguugcaguguuacugugucucguaguguucuuucuugcuaugcuggucuugauggccgugcuauauguucauaugcuggcuagagccugccagcacgcacaggggaucgccaggcuccauaaacggcagcgccccgugcaccaaggauucggccugaagggcgcugucacacuuaccauacuguuggggaucuuuuuccucuguuggggaccauuuuuccugcacuuaacucugauugugcuaugcccugagcaucccacaugugguugcauuuuuaaaaauuucaaccucuuccuggcgcuuaucaucuguaaugcaauuauagacccuuugaucuacgccuuucacucucaggaacugcgaagaacccucaaggagguacugacgugcuccugguga

SEQ ID NO: 2342 - RNA, 954 nt, Artificial Sequence
  AHC09532 variant
auggccgugcagggcagccaaagaaggcugcucgggucccuuaacucuacccccacagcuaucccucagcugggauuggcagccaaucagacuggugcgcggugcuuagaggucucaauuagugacggccuguuccuaagccucgggcugguuucccuuguggaaaacgcucugguauuggccacgauagcaaagaaucgcaaccuccacucuccaauguacuguuuuaucugcugucuggcccugucggaucucuuagugucaggaagcaauguccuggagaccgcugugauucuuuugcuggaagcaggcgcccuaguugcucgagccgcggugcuccagcaacuggacaacgucaucgaugugauuacaugcaguuccaugcuuucuagccuguguuucuugggugcaaucgccguagaccguuauauauccaucuuuuacgcucucagauaucauucaauuguuacucugccgagggcccggcgcgcaguggcugccaucugggucgcgagugugguguucagcaccuuauuuauugccuacuaugaucacgucgcaguucugcucugccuugugguauucuuucuggcuauguuggugcuaauggccguccuguacgugcauaugcucgcuagagccugucagcacgcacaggggaucgccaggcugcauaaacggcagcgccccguucaccaaggauucggccuuaagggcgcugugacacugaccauauugcucgggaucuuuuuccugugcuggggaccauuuuucuuacaccugacucuaauuguccucuguccugagcaucccacaugcgguuguauuuuuaaaaauuucaaccuguuccuugcguugaucaucugcaaugcaauuauagacccucugaucuaugccuuucacucucaggaacuccgaagaacccugaaggaggugcuuacgugcuccugguga

SEQ ID NO: 2343 - RNA, 954 nt, Artificial Sequence
  AHC11042 variant
auggccgugcagggcagccaaagaaggcugcucgggucccuuaacucuacccccacagcuaucccucagcugggauuggcagccaaucagacuggugcgcggugcuuagaggucucaauuagugacggccuguuccuaagccucgggcugguuucccuuguggaaaacgcucugguaguggccacgauagcaaagaaucgcaacuugcacucuccaauguacuguuuuaucugcugucucccgcugucggaucugcucgucucaggaagcaauguguuagagaccgccguuauucugcuuuuggaagcuggcgcacugguggcccgagcugccguccuacagcaacucgacaacgugaucgauguaauuacaugcaguuccaugcugucuagccuuuguuuccugggugcgaucgcaguugaccguuauauauccaucuuuuacgccuugagauaucauucaauugugacucuccccagggcucggcgcgccgucgcagcuaucuggguggccaguguggucuucagcacccuguuuauugcguacuaugaucacguugccguguuacugugccucguaguguucuuucuugcaaugcuggucuugauggcugugcuauacguucauaugcuggccagagcuugucagcacgcccaggggaucgcaaggcuccauaaacggcagcgcccugugcaccaaggauucggccugaagggcgccgucacacuuaccauacuguuggggaucuuuuuccucugcuggggaccauuuuuccugcacuuaacucugauugugcuaugucccgagcauccuacaugcgguuguauuuuuaaaaauuucaaccucuuccuggcucuuaucaucugcaaugcgauuauagacccauugaucuaugcauuucacucucaggaacugcgaagaacccucaaggagguacugacgugcuccugguga

SEQ ID NO: 2344 - RNA, 954 nt, Artificial Sequence
  AHC10733 variant
auggccgugcagggcagccaaagaaggcugcucgggucccuuaacucuacccccacagcuaucccucagcugggauuggcagccaaucagacuggugcgcggugcuuagaggucucaauuagugacggccuguuccuaagccucgggcugguuucccuuguggaaaacgcucugguaguggccacgauagcaaagaaucgcaacuugcacucuccaauguacuguuuuaucugcugucucgcccugucggaucugcucgucucaggaagcaauguguuagagaccgcuguuauucugcuuuuggaagcaggcgcccugguggcucgagccgcgguccuacagcaacucgacaacgugaucgauguaauuacaugcaguuccaugcugucuagccuuuguuuccugggugcaaucgccguugaccguuauauauccaucuuuuacgcuuugagauaucauucaauugugacucucccgagggcccggcgcgcagucgcugccaucuggguggcgaguguggucuucagcacccuguuuauugccuacuaugaucacguugcaguguuacugugccucguaguguucuuucuugcuaugcuggucuugauggccgugcuauacguucauaugcuggcuagagccugucagcacgcacaggggaucgccaggcuccauaaacggcagcgccccgugcaccaaggauucggccugaagggcgcugucacacuuaccauacuguuggggaucuuuuuccucugcuggggaccauuuuuccugcacuuaacucugauugugcuauguccugagcaucccacaugcgguuguauuuuuaaaaauuucucucucuuccuggcgcuuaucaucugcaacgcaauuauagacccuuugaucuaugccuuucacucccaggaacugcgaagaacccucaaggagguacugacgugcucaugguga

SEQ ID NO: 2345 - RNA, 954 nt, Artificial Sequence
  AHC10696 variant
auggccgugcagggcagccaaagaaggcugcucgggucccuuaacucuacccccacagcuaucccucagcugggauuggcagccaaucagacuggugcgcggugcuuagaggucucaauuagugacggccuguuccuaagccucgggcugguuucccuuguggaaaacgcucugguaguggccacgauagcaaagaaucgcaacuugcacucuccaauguacuguuuuaucugcugucucgcccugucggaucugcucgucucaggaagcaauguguuagagaccgcuguuauucugcuuuuggaagcaggcgcccugguggcucgagccgcgguccuacagcaacucgacaacgugaucgauguaauuacaugcaguuccaugcugucuagccuuuguuuccugggugcaaucgccguugaccguuauauauccaucuuuuacgcuuugagauaucauucaauugugacucucccgagggcccggcgcgcagucgcugccaucuggguggcgaguguggucuucagcacccuguuuauugccuacuaugaucacguugcaguguuacugugccucguaguguucuuucuugcuaugcuggucuugauggccgugcuauacguucauaugcuggcuagagccugucagcacgcacaggggaucgccaggcuccauaaacggcagcgccccgugcaccaaggauucggccugaagggcgcugucacacuuaccauacuguuggggaucuuuuuccucugcuggggaccauuuuuccugcacuuaacucugauugugcuauguccugagcaucccacaugcgguuguauuuuuaaaaauuucaaccucuuccuggcgcuuaucaucugcaaugcaauuauagacccuuugauccacgccuuucauucucaggaacugcgaagaacccucaaggagguacugacgugcuccugguga

SEQ ID NO: 2346 - RNA, 954 nt, Artificial Sequence
  AHC09527 variant
auggccgugcagggcagccaaagaaggcugcucgggucccuuaacucuacccccacagcuaucccucagcugggauuggcagccaaucagacuggugcgcggugcuuagaggucucaauuagugacggccuguuccuaagccucgggcugguuucccuuguggaaaacgcucugguaguggccacgauagcaaagaaucgcaacuugcacucuccaauguacuguuuuaucugcugucucgcccugucggaucugcucgucucaggaagcaauguguuagagaccgcuguuauucugcuuuuggaagcaggcgcccugguggcucgagccgcgguccuacagcaacucgacaacgugaucgauguaauuacaugcaguuccaugcugucuagccuuuguuuccugggugcaaucgccguugaccguuauauauccaucuuuuacgcuuugagauaucauucaauugugacucucccgagggcccggcgcgcagucgcugccaucuggguggcgaguguggucuucagcacccuguuuauugccuacuaugaucacguugcaguguuacugugccucguaguguucuuucuugcuaugcuggucuugauggccgugcuauacguucauaugcuggcuagagccugucagcacgcacaggggaucgccaggcuccauaaacggcagcgccccgugcaccaaggauucggccugaagggcgcugucacacuuaccauacuguuggggaucuuuuuccucugcuggggaccauuuuuccugcacuuaacucugauugugcuauguccugagcaucccacaugcgguuguauuuuuaaaaauuucaaccucuuccuggcgcuuaucaucugcaaugcaauuauacacccuuugaucuaugccuuucauucucaggaacugcgaagaacccucaaggagguacugacgugcuccugguga

SEQ ID NO: 2347 - RNA, 954 nt, Artificial Sequence
  AHC10869 variant
auggccgugcagggcagccaaagaaggcugcucgggucccuuaacucuacccccacagcuaucccucagcugggauuggcagccaaucagacuggugcgcggugcuuagaggucucaauuagugacggccuguuccuaagccucgggcugguuucccuuguggaaaacgcucugguaguggccacgauagcaaagaaucgcaacuugcacucuccaauguacuguuuuaucugcugucucgcccugucggaucugcucgucucaggaagcaauguguuagagaccgcuguuauucugcuuuuggaagcaggcgcccugguggcucgagccgcgguccuacagcaacucgacaacgugaucgauguaauuacaugcaguuccaugcugucuagccuuuguuuccugggugcaaucgccguugaccguuauauauccaucuuuuacgcuuugagauaucauucaauugugacucucccgagggcccggcgcgcagucgcugccaucuggguggcgaguguggucuucagcacccuguuuauugccuacuaugaucacguugcaguguuacugugccucguaguguucuuucuugcuaugcuggucuugauggccgugcuauacguucauaugcuggcuagagccugucagcacgcacaggggaucgccaggcuccauaaacggcagcaccccgugcaccaaggauucggccugaagggcgcugucacacuuaccauacuguuggggaucuuuuuccucugcuggggaccauuuuuccugcauuuaacucugauugugcuauguccugagcaccccacaugcgguuguauuuuuaaaaauuucaaccucuuccuggcgcuuaucaucugcaaugcaauuauagacccuuugaucuaugccuuucauucucaggaacugcgccgaacccucaaggagguacugacgugcuccugguga

SEQ ID NO: 2348 - RNA, 954 nt, Artificial Sequence
  AHC11615 variant
auggccgugcagggcagccaaagaaggcugcucgggucccuuaacucuacccccacagcuaucccucagcugggauuggcagccaaucagacuggugcgcggugcuuagaggucucaauuagugacggccuguuccuaagccucgggcugguuucccuuguggaaaacgcucugguaguggccacgauagcaaagaaucgcaacuugcacucuccaauguacuguuuuaucugcugucucgcccugucggaucugcucgucucaggaagcaauguguuagagaccgcuguuauucugcuuuuggaagcaggcgcccugguggcucgagccgcgguccuacagcaacucgacaacgugaucgauguaauuacaugcaguuccaugcugucuagccuuuguuuccugggugcaaucgccguugaccguuauauauccaucuuuuacgcuuugagauaucauucaauugugacucucccgagggcccggcgcgcagucgcugccaucuggguggcgaguguggucuucagcacccuguuuauugccuacuaugaucacguugcaguguuacugugccucguaguguucuuucuugcuaugcuggucuugauggccgugcuauacguucauaugcuggcuagagccugucagcacgcacaggggaucgccaggcuccauaaacggcagcgccccgugcaccaaggauucggccugaagggcgcugucacacuuaccauacuguuggggaucuuuuuccucugcuggggaccauuuuuccugcacuuaacucugauugugcuauguccugagcaucccacaugcgguuguauuuuuaaaaauuucaaccucuuccugacccuuaucaucugcaaugcgauuauagacccuuugaucuaugcauuucacucucaggaacugcgaagaacgcucaaggagguacugacuugcuccugguga

SEQ ID NO: 2349 - RNA, 954 nt, Artificial Sequence
  AHC09535 variant
auggccgugcagggcagccaaagaaggcugcucgggucccuuaacucuacccccacagcuaucccucagcugggauuggcagccaaucagacuggugcgcggugcuuagaggucucaauuagugacggccuguuccuaagccucgggcugguuucccuuguggaaaacgcucugguaguggccacgauagcaaagaaucgcaacuugcacucuccaauguacuguuuuaucugcugucucgcccugucggaucugcucgucucaggaagcaauguguuagagaccgcuguuauucugcuuuuggaagcaggcgcccugguggcucgagccgcgguccuacagcaacucgacaacgugaucgauguaauuacaugcaguuccaugcugucuagccuuuguuuccugggugcaaucgccguugaccauuauauauccaucuuuuacgcuuugcguuaucacucaauugugacucucccgagagccaggcgggcagucgcugccaucuggguggcgaguguggucuucagcacccuguuuauugccuacuaugaucauguugcaguguuacugugccucguaguguucuuucuugcuaugcuggucuugauggccgugcuauacguucacaugcuggcucgcgccugucagcaugcacaggggaucgccagacuccacaaaaggcagcggcccgugcaccaaggauucggccugaagggcgcugucacacuuaccauacuguuggggaucuuuuuccucugcuggggaccauuuuuccugcauuuaacucugauugugcuauguccugagcaccccacaugcgguuguauuuuuaaaaauuucaaccucuuccuggcgcuuaucaucugcaaugcaauuauagacccuuugaucuaugccuuucauucucaggaacugcgccgaacccucaaggagguacugacgugcuccugguga

SEQ ID NO: 2350 - RNA, 954 nt, Artificial Sequence
  AHC11840 variant
auggccgugcagggcagccaaagaaggcugcucgggucccuuaacucuacccccacagcuaucccucagcugggauuggcagccaaucagacuggugcgcggugcuuagaggucucaauuagugacggccuguuccuaagccucgggcugguuucccuuguggaaaacgcucugguaguggccacgauagcaaagaaucgcaacuugcacucuccaauguacuguuuuaucugcugucucgcccugucggaucugcucgucucaggaagcaauguguuagagaccgcuguuauucugcuuuuggaagcaggcgcccugguggcucgagccgcgguccuacagcaacucgacaacgugaucgauguaauuacaugcaguuccaugcugucuagccuuuguuuccugggugcaaucgccguugaccguuauauauccaucuuuuacgcuuugagauaucauucaauugugacucucccgagggcccggcgcgcagucgcugccaucuggguggcgaguguggucuucagcacccuguuuauugccuacuaugaucacguugcaguguuacugugccucguaguguucuuucuugcuaugcuggucuugauggccgugcuauacguucauaugcuggcuagagccugucagcacgcacaggggaucgccaggcuccauaaacggcagcgccccgugcaccaaggauucggccugaagggcgcugucacacuuaccauacuguuggggaucuuuuuccucugcuggggaccauuuuuccugcacuuaacucugauugugcuauguccugagcaucccacaugcgguuguauuuuuaaaaauuucaaccucuuccuggcgcuuaucaucugcaaugcaauuauagacccuuugaucuaugccuuucacaaccaggaacugcgaagaacccucaaggagguacugacgugcucuugguga

SEQ ID NO: 2351 - RNA, 954 nt, Artificial Sequence
  AHC09665 variant
auggccgugcagggcagccaaagaaggcugcucgggucccuuaacucuacccccacagcuaucccucagcugggauuggcagccaaucagacuggugcgcggugcuuagaggucucaauuagugacggccuguuccuaagccucgggcugguuucccuuguggaaaacgcucugguaguggccacgauagcaaagaaucgcaacuugcacucuccaauguacuguuuuaucugcugucucgcccugucggaucugcucgucucaggaagcaauguguuagagaccgcuguuauucugcuuuuggaagcaggcgcccugguggcucgagccgcgguccuacagcaacucgacaacgugaucgauaugauuacaugcaguuccaugcugucuagccuuuguuuccugggugcaaucgccguagaccguuauauauccaucuuuuacgcuuugagauaucauucaauuguuacucucccgagggcccggcgcgcaguggcugccaucugggucgcgagugugguguucagcacccuguuuauugccuacuaugaucacgucgcaguuuuacugugccucgugguauucuuucuugcuaugcugguguugauggccguccuauacgugcauaugcuggcuagagccugucagcacgcacaggggaucgccaggcuccauaaacggcagcgccccguucaccaaggauucggccugaagggcgcugugacacuuaccauacuguuggggaucuuuuuccucugcuggggaccauuuuuccugcacuuaacucugauuguccuauguccugagcaucccacaugcgguuguauuuuuaaaaauuucaaccucuuccuggcgcuuaucaucugcaaugcaauuauagacccuuugaucuaugccuuucacucucaggaacugcgaagaacccucaaggaggugcugacgugcuccugguga

SEQ ID NO: 2352 - RNA, 954 nt, Artificial Sequence
  AHC11324 variant
auggccgugcagggcagccaaagaaggcugcucgggucccuuaacucuacccccacagcuaucccucagcugggauuggcagccaaucagacuggugcgcggugcuuagaggucucaauuagugacggccuguuccuaagccucgggcugguuucccuuguggaaaacgcucugguaguggccacgauagcaaagaaucgcaacuugcacucuccaauguacuguuuuaucugcugucucgcccugucggaucugcucgucucaggaagcaauguguuagagaccgcuguuauucugcuuuuggaagcaggcgcccugguggcucgagccgcgguccuacagcaacucgacaacgugaucgauguaauuacaugcaguuccaugcugucuagccuuuguuuccugggugcaaucgccguugaccguuauauauccaucuuuuacgcuuugagauaucauucaauugugacucucccgagggcccggcgcgcagucgcugccaucuggguggcgaguguggucuucagcacccuguuuauugccuacuaugaucacguugcaguguuacugugccucguaguguucuuucuugcuaugcuggucuugauggccgugcuauacguucauaugcuggcuagagccugucagcacgcacaggggaucgccaggcuccauaaacggcagcgccccgugcaccaaggauucggccugaagggcgcugucacacuuaccauacuguuggggaucuuuuuccucugcuggggaccauuuuuccugcacuuaacucugauugugcuauguccugagcaucccacaugcgguuguauuuuuaaaaauuucaaccucuuccuggcgcuuaucauccgaaaugcaauuauagacccuuugaucuaugccuuucacucucaggaacugagaaggacccucaaggagguacugacgugcuccugguga

SEQ ID NO: 2353 - RNA, 954 nt, Artificial Sequence
  AHC09521 variant
auggccgugcagggcagccaaagaaggcugcucgggucccuuaacucuacccccacagcuaucccucagcugggauuggcagccaaucagacuggugcgcggugcuuagaggucucaauuagugacggccuguuccuaagccucgggcugguuucccuuguggaaaacgcucugguaguggccacgauagcaaagaaucgcaacuugcacucuccaauguacuguuuuaucugcugucucgcccugucggaucugcucgucucaggaagcaauguguuagagaccgcuguuauucugcuuuuggaagcaggcgcccugguggcucgagccgcgguccuacagcaacucgacaacgugaucgauguaauuacaugcaguuccaugcugucuagccuuuguuuccugggugcaaucgccguugaccguuauauauccaucuuuuacgcuuugagauaucauucaauugugacucucccgugggccaggcgggcagucgcugccaucuggguggcgaguguggucuucagcacccuguuuauugccuacuaugaucacguugcaguguuacugugccucguaguguucuuucuugcuaugcuggucuugauggccgugcuauacguucauaugcuggcucgcgccugucagcacgcacaggggaucgccagacuccauaaaaggcagcggcccgugcaccaaggauucggccugaagggcgcugucacacuuaccauacuguuggggaucuuuuuccucugcuggggaccauuuuuccugcacuuaacucugauugugcuauguccugagcaucccacaugcgguuguauuuuuaaaaauuucaaccucuuccuggcgcuuaucaucugcaaugcaauuauagacccuuugaucuaugccuuucacucucaggaacugcgccgaacccucaaggagguacugacgugcuccugguga

SEQ ID NO: 2354 - RNA, 954 nt, Artificial Sequence
  AHC11794 variant
auggccgugcagggcagccaaagaaggcugcucgggucccuuaacucuacccccacagcuaucccucagcugggauuggcagccaaucagacuggugcgcggugcuuagaggucucaauuagugacggccuguuccuaagccucgggcugguuucccuuguggaaaacgcucugguaguggccacgauagcaaagaaucgcaacuugcacucuccaauguacuguuuuaucugcugucucgcccugucggaucugcucgucucaggaagcaauguguuagagaccgcuguuauucugcuuuuggaagcaggcgcccugguggcucgagccgcgguccuacagcaacucgacaacgugaucgauguaauuacaugcaguuccaugcugucuagccuuuguuuccugggugcaaucgccguugaccguuauauauccaucuuuuacgcuuugagauaucauucaauugugacucucccgagggcccggcgcgcagucgcugccaucuggguggcgaguguggucuucagcacccuguuuauugccuacuaugaucacguugcaguguuacugugccucguaguguucuuucuugcuaugcuggucuugauggccgugcuauacguucauaugcuggcuagagccugucagcacgcacaggggaucgccaggcuccauaaacggcagcgccccgugcaccaaggauucggccugaagggcgcugucacacuuaccauacuguuggggaucuuuuuccucugcuggggaccauuuuuccugcacuuaacucugauugugcuauguccugagcaucccgaaugcgguuguauuuuuaaaaauuucaaccucuuccuggcgcuuaucaucugcaaugcaauuauagacccuuugaucuaugccuuucacucucaggagcugcgaagaacacucaaggagguacugaccugcuccugguga

SEQ ID NO: 2355 - RNA, 954 nt, Artificial Sequence
  AHC10874 variant
auggccgugcagggcagccaaagaaggcugcucgggucccuuaacucuacccccacagcuaucccucagcugggauuggcagccaaucagacuggugcgcggugcuuagaggucucaauuagugacggccuguuccuaagccucgggcugguuucccuuguggaaaacgcucugguaguggccacgauagcaaagaaucgcaacuugcacucuccaauguacuguuuuaucugcugucucgcccugucggagcugcucgucucaggaagcaauguguuagaaaccgcuguuauucugcuuuuggaggcaggcgcccugguggcucgagccgcgguccuacagcaacucgauaacgugaucgacguaauuacaugcaguuccaugcugucuagccuuuguuuccugggugcaaucgccguugaucguuauauauccaucuuuuacgcuuugagauaucauucaauugugacucucccgagggcccggcgcgcagucgcugccaucuggguggcgaguguggucuucagcacccuguuuauugccuacuaugaccacguugcaguguuacugugccucguaguguucuuucuugcuaugcuggucuugauggccgugcuauacguucauaugcuggcuagagccugucagcacgcacaggggaucgccaggcuccauaaacggcagcgccccgugcaccaaggauucggccugaagggcgcugucacacuuaccauacuguuggggaucuuuuuccucugcuggggaccauuuuuccugcacuuaacucugauugugcuauguccugaacaucccacaugcgguuguauuuuuaaaaauuucaaccucuuccuggcgcuuaucaucugcaaugcaauuauagauccuuugaucuaugccuuucacucucaggagcugcgaagaacccucaaggagguacugacgugcuccugguga

SEQ ID NO: 2356 - RNA, 954 nt, Artificial Sequence
  AHC09597 variant
auggccgugcagggcagccaaagaaggcugcucgggucccuuaacucuacccccacagcuaucccucagcugggauuggcagccaaucagacuggugcgcggugcuuagaggucucaauuagugacggccuguuccuaagccucgggcugguuucccuuguggaaaacgcucugguaguggccacgauagcaaagaaucgcaacuugcacucuccaauguacuguuuuaucugcugucucgcccugucggaucugcucgucucaggaagcaauguguuagagaccgcuguuauucugcuuuuggaagcaggcgcccugguggcucgagccgcgguccuacagcaacucgacaacgugaucgauguaauuacaugcaguuccaugcugucuagccuuuguuuccugggugcaaucgccguugaccguuauauauccaucuuuuacgcuuugugcuaucauucaauugugacucucccgagagccaggcgggcagucgcugccaucuggguggcgaguguggucuucagcacccuguuuauugccuacuaugaucacguugcaguguuacugugucucguaguguucuuucuugcuaugcuggucuugauggccgugcuauacguucauaugcuggcucgcgccugccagcacgcacaggggaucgccagacuccauaaaaggcagcggcccgugcaccaaggauucggccugaagggcgcugucacacuuaccauacuguuggggaucuuuuuccucuguuggggaccauuuuuccugcacuuaacucugauugugcuaugcccugagcaucccacaugugguugcauuuuuaaaaauuucaaccucuuccuggcgcuuaucaucugcaaugcaauuauagacccuuugaucuaugccuuucacucucaggaacugcgccgaacccucaaggagguacugacguguuccugguga

SEQ ID NO: 2357 - RNA, 1665 nt, Artificial Sequence
  CCDS816.1 variant
augaccgcccccggcgcugcagggagaugcccuccaacaacuuggcugggaagccuccuucuguugguguguuuacuggccuccaggucuaucacggaggaagucucagaguacugcagucacaugauugguagcggccaucuacagucccuccaacggcugauagacucucagauggaaaccucgugucagaucacauucgaguuuguugaucaggaacaacuuaaggacccggugugcuaucugaaaaaggcguucuugcucguacaggauauuauggaggacacuaugcgcuuucgagauaacacccccaaugcuaucgccauugugcagcugcaggagcugucacuccguuuaaaaagcuguuucacaaaggacuacgaagaacacgauaaagcaugcgucagaaccuuuuaugaaacuccucugcaacuuuuggagaaggugaagaacguuuucaaugagaccaaaaaccugcuagacaaggauuggaauaucuuuaguaaaaacuguaauaacuccuucgccgaaugcucuagccaggacguggucacaaagccagauuguaauugccucuaccccaaagcuauaccuuccucagacccagcaagugugagcccccaucagccucuggccccaucuauggcuccgguagccgggcuuacgugggaggauuccgaaggaacugagggcucaagccuguugcccggugaacagccucuccacaccguugacccagggagugcgaagcaaaggcccccucggucuacaugucaguccuuugagccacccgagacuccgguggucaaggacagcaccaucggaggcucgccucagccccgcccaucugugggcgcauucaacccugggauggaagauauucuggacuccgccaugggaacaaauugggugcccgaggaggcuucaggugaggccagugaaaucccagucccccaaggcaccgaguuaagcccuuccagaccagggggaggcucuaugcagacggagccggcaaggcccagcaacuuucugucagcuaguuccccucucccagccagcgcgaaaggucagcagcccgccgauguuacugggacagcacuuccucgggugggaccaguacgccccaccggccaagacuggaaucauacuccgcagaagacagaucacccuucugcucuguugcgagacccacccgaaccuggcucacccagaauuaguagccuaaggccacaggggcuguccaacccuucuacccucucggcccagccccaacugagccggucccacucaaguggaucugugcuuccacugggugaguuggaaggccgucgcagcacgagagauaggcgguccccggcugagccugaagggggacccgccucagagggcgcagcccgaccacucccccgcuucaauagcgucccucugaccgacacaggucaugagagacagucugaaggguccuuuaguccacaguuacaggagagcguguuccaucugcuaguucccucugugauccucguccugcuugcugugggcggauugcuguucuauagguggcggcgcagaucccaccaagaaccucagagggcggauucaccgcucgagcagccagagggcaguccccugacucaggacgaucgucaaguagaacuuccuguuuga

SEQ ID NO: 2358 - RNA, 1893 nt, Artificial Sequence
  EAW85719 variant
auggcccugcccaccgcuagaccucuccuuggcagcugcgggacaccagcacugggauccuuguuauuccugcuauuuucucucgguugggugcagccgucaaggacucuggccggcgagacggggcaagaagcggcuccccuugacggaguccuggccaacccuccaaauaucaguagcuugucuccccggcagcuccugggcuucccuugugcagagguuuccggucugucgaccgaacgcgugcgagagcucgccguagcuuuagcacagaagaacgugaaacugucaacagaacagcuucguugcuuggcccacagacugagcgagccacccgaggaucuagacgcucucccucuggaucuucuguuguuucucaauccagacgccuucagugggccgcaagcguguacuagguuuuucucccggauuaccaaggcaaacgucgaucuguuaccccgcggagccccugaaagacagaggcugcucccagcugcccuugcaugcuggggcgugcggggcucucuguugagcgaggcugacguucgcgcccuagggggacuggcgugugaucuccccggucgauuuguggccgaauccgcagagguccugcuuccuagacuggugucaugcccaggccccuuggaccaggaucagcaagaggcugccagggcugcccuccaagggggaggcccgccuuacggucccccaaguacauggagcguaucuaccauggacgcacugcggggguuacugccuguucuaggacagcccauaauccguuccauuccacagggcaucguggccgcuuggcgccagagaucaagcagggaucccaguuggcggcagccugaacgaacuauucuccgcccaagauucaggcgggaggucgaaaagacagcguguccgucuggcaagaaagcacgcgagaucgacgaaucccugauauuuuauaagaagugggagcuugaggccugcguggaugcugccuugcuggcaacccagauggacagagugaaugccauccccuucacguacgaacaacucgacguccugaaacauaaacuugaugagcuguauccucagggguacccagaaagcguuauucagcacuugggauaucucuuucugaaaaugucgcccgaggacaucaggaaguggaacgugacuucuuuagaaacccugaaagcucuacucgagguaaauaagggucaugagauguccccucaggccccacgucggccccugccgcaaguggcaacacuuauugaucgauucgucaagggcagagggcaguuggacaaagauacucuggacacccucacagcguuuuacccuggauaucuguguucauuaaguccagaggaacugagcuccgugcccccuucuagcaucugggcuguuaggccccaggaucuugauaccugcgacccacgccaguuggacgugcucuacccuaaggcccggcuggcauuccaaaacaugaauggcucagaauacuucgucaaaauacagaguuuucuagguggggcccccacggaggaucugaaggcucucucccagcagaacgugagcauggaccuggccacuuucaugaaacuuagaacagacgcaguauugccacugaccguugcugaagugcaaaaguuacucggcccgcacgucgagggacugaaagccgaggaaaggcaucgcccugugcgagauuggauucuucggcagcgucaggacgaucuggacacuuugggccucgggcugcagggagguauccccaauggcuaucuaguccuggaucucucuaugcaagaggcgcugucagggacaccaugucuuuugggacccggcccugugcugaccguuuuagcccuccugcuugcuaguacgcuggcauga

SEQ ID NO: 2359 - RNA, 1515 nt, Artificial Sequence
  CCDS46865.1 variant
auggaggcccugagagugcagauguucaugcccugcagcuuugaaucccucuaccuuucuucagcugagcacccuggcgcaaguaagccaccgaucagcuccucuucgaugaccucaaggauucuguugcggcaacaguuaaugcgcgaacagaugcaggagcaagaacgacgugagcagcagcagaaacugcaagccgcgcaguucaugcagcagagaguccccguuagccaaacuccugcuauaaacgugaguguaccaacaacgcuacccuccgccacccaggugccuauggagguccucaaggugcagacacaucuggaaaauccaacuaaauaucacauccaacaggcacagaggcagcaaguuaagcaguaccuuucuaccacacuggccaacaaacaugcuaaucagguguugagccuccccuguccuaaccagccaggggaccacgucaugccgcccgugccuggauccucagcaccaaauagucccauggccaugcugacccugaacagcaauugcgagaaggaagguuuuuauaaguucgaggagcaaaaccgggcugaaucugaguguccuggcaugaauacucauucccgcgccucaugcaugcagauggaugacguaauugaugacaucauuagccucgaaaguucuuacaacgaggaaaucuuagggcugauggauccagcgcuucagauggcaaauacauugcccguuuccggaaaccugauagaccuauauggcaaucagggucucccgccucccgggcugaccaucagcaacucguguccagccaaucuuccuaacauuaaaagagagcugacggagucugaagcuagggccuuggcaaaggagcggcagaaaaaggauaaccacaaucucaucgaacgccgaagaagguuuaacauuaaugaccggaucaaagagcugggaacuuuaauacccaaguccaacgauccagacaugcguuggaauaagggcaccauucugaaggcuucaguggauuacauccgcaagcuccaaagagaacagcagagggccaaagagcuugagaaccggcaaaagaaacuggaacacgcgaaucgacauuugcuacugcgcauucaggagcucgaaaugcaggccagagcacacggccugagucuuauccccagcacagggcugugcuccccugacuuggucaacaggaucauuaagcaagagccagugcucgaaaauuguucucaggaucuguuacagcaucacgcugaccugacuugcaccacaacccuagaccucacggauggaacuauaacauucaacaauaaccuggguaccggcacugaggccaaucaggcuuauagcgugccgacaaaaauggggucaaaacuugaggacaucuugauggaugacacccugagucccgucggaguuacggauccucuccuguccagcgugucuccaggcgccucaaagaccaguagccggcgcuccucuaugucgauggaagagacagaacacacuuguuga

SEQ ID NO: 2360 - RNA, 1260 nt, Artificial Sequence
  CCDS2913.1 variant
augcuggagaugcucgaauacaaccacuaucaggugcaaacccaucuugagaaucccacaaaguaccacauccagcaggcccagagacaacaggucaaacaguaucugagcacuacguuggcuaacaagcaugcaaaucagguuuuaucccugccuugcccaaaccaaccgggcgaccacgugaugcccccuguaccagggucuucagcccccaauaguccuauggcgaugcuaacccucaacagcaauugugaaaaagagggauucuacaaguuugaggaacagaacagggcugaguccgaaugcccagguaugaauacacauucucgggccucguguaugcagauggaugacgugauugaugacauaaucucacuggagagcaguuauaacgaagagauucuuggccugauggaucccgcauugcagauggccaauacucucccugucuccgggaaccugaucgaccuguacggaaaucaaggccucccaccgcccgguuuaaccauuucuaacagcugcccugcuaaucugccaaacaucaaacgcgagcuuacagcauguauauuccccaccgaauccgaggcccgagcuuuggccaaggaacgucagaagaaagauaaccacaaucugaucgagagaaggcggcgcuuuaacauuaaugacagaaucaaggaacuagggacucucauuccuaaaucaaacgauccagacaugagguggaauaagggaacaauccugaaagcgaguguggauuauauacggaaacuucagcgcgagcaacagcgagcaaaggagcuggaaaacagacagaagaaguuggagcacgccaauaggcaucuccuguuacggauucaggaacuggagaugcaagcucgugcccacggccucagccuuauccccucuaccggccugugcuccccggacuugguuaaccgcauuaucaaacaggaaccugugcuagagaauuguucacaggaucugcuccagcaucacgcagaccugacgugcacuaccacacuugaccugacugaugggaccaucacauucaacaauaacuugggaaccgguacggaggcuaaucaagccuacagcguccccacuaagaugggcaguaaacucgaagacauucugauggaugacacauuaucuccaguggggguaaccgauccucugcuauccagcguuucgcccggagcgucuaagacuuccucaagaaggaguagcauguccauggaggaaacagagcacaccuguuga

SEQ ID NO: 2361 - RNA, 1581 nt, Artificial Sequence
  XM_005264754 variant
augcaaagcgaguccggcaucgugcccgacuucgaagucggggaggaauuucacgaggaaccuaagaccuacuaugagcugaaaucucaaccacucaagucaaguagcuccgccgagcauccgggagcuucuaaacccccuauuucgucaagcaguaugacauccagaauacuucugaggcagcaguugaugcgggaacagaugcaagagcaggaacgccgagagcagcagcaaaaguuacaggcagcccaguucaugcagcaacguguuccagugucucagacucccgcgaucaacguaagcgugccuacgacccugccauccgcuacacagguccccauggaggugcuaaaaguucaaacucaccucgaaaauccuaccaaguaccauauucagcaggcccagagacaacaggugaagcaguaucugucaacaacccuugcaaacaaacacgccaaucagguccugaguuugccaugcccgaaccaacccggugaucaugugaugccuccaguacccggcagcucugcuccuaauuccccaauggcaaugcucacucugaacucaaauugugagaaggaaggguuuuacaaauucgaggaacagaacagggccgagagcgagugccccggaaugaauacacacagucgggcuucuuguaugcagauggacgauguuaucgacgauauuaucucccuggaaagcucguauaacgaggaaauacucggcuuaauggacccggcccugcagauggcgaauacccuuccugugucugguaacuugaucgaucuguacgggaaucaaggacuacccccaccuggccucacgauuuccaacucaugccccgcaaaucugccaaacaucaagcgcgagcuuacugccuguauuuuucccaccgaaagugaggcuagagcccuggcaaaagagaggcagaagaaggacaaccacaauuugaucgaacggcgccgaagauucaacauaaaugauaggauuaaagagcucggcacacugaucccuaagagcaacgacccagauaugcgguggaauaaagggacuauuuuaaaggcuuccgucgacuauauccguaaacugcagcgcgaacagcaaagagccaaggagcucgaaaacaggcagaaaaagcuggagcaugcgaaucggcaccuuuugcuacgaauccaggagcuggaaaugcaagcccgcgcacauggacucucucugauuccgagcaccggucuuugcucacccgaucuggugaacagaauaaucaagcaggagccuguguuggaaaauuguagucaggaccuccugcagcaccacgcugacuuaacaugcaccacgacucuggaucuaacagacggcaccauuacuuuuaacaauaaccucgggacaggaaccgaggccaaucaggcuuacuccgucccaacgaaaaugggcagcaagcuggaggauauccuuauggacgauaccuugucucccguuggugugacagacccucugcucucaaguguaagcccaggggccuccaaaacuucuucgaggcggagcuccaugucaauggaagagaccgaacauacauguuga

SEQ ID NO: 2362 - RNA, 1065 nt, Artificial Sequence
  BAG52140 variant
auggcccccgcugcauggcugagaagcgccgcggcuagggcccuccuuccuccaaugcuguuguuacugcuacagccgcccccucuccuggcacgggcccuuccacccgacgugcaccaucugcacgcugagcgccgaggcccucaaccauggcaugcagccuugcccuccucuccugcuccagccccggcgacccaggaagcaccccguccugccucaagucucagaccacccaggugcggggucccugauccaagcgacggacuguccgcucggaaccgccagaagagaauccugagguuccccuggcagcucguucaagaacaggugcggcagacaauggccgaggcauuaaaaguauggucugaugugacuccgcugacguuuaccgagguccacgaaggucgcgcugacauuaugauagauuucgcccgauacuggcauggcgacgaucuuccuuuugacgggcccggaggcaucuuggcgcacgccuucuuuccaaagacacacagagagggugaugugcauuucgacuaugaugagacuuggaccauuggggacgaucagggaacagaccugcuacaaguugcagcucacgaauuuggccaugugcucggccugcagcacaccacugccgcuaaagcccuuaugucggcauucuacacauuuagguauccucugucauugagccccgacgauugucgugggguccagcaccucuacggacagccauggcccaccgugacgagucggacuccugcccuggguccacaagcuggcaucgacaccaaugagauugcgccguuagaacccgaugcaccuccagacgccugcgaggcuuccuucgaugccguaucuacaauccgcggggagcuguuuuucuuuaaggcaggauucguuuggagacucaggggcggucagcuucagcccggguauccugcccuggcuagccggcauuggcaaggauugccaucccccguggacgccgcauucgaagaugcgcagggccacauaugguuuuuccagggcacuaccggggucucaacaccggcuccuggaguguga

SEQ ID NO: 2363 - RNA, 804 nt, Artificial Sequence
  AAV40839 variant
augagacugaccgugcucugcgccgucugucuucugcccggcagcuuggcuuuaccucugccacaggaggcagggggaauguccgaacuacaaugggagcaggcccaggacuaccucaagagguucuaucuguacgauucugaaacaaagaacgcuaauucacuugaggcgaagcugaaagaaaugcagaaguuuuucgguuugccgaucacuggcaugcucaacagucggguuauugagauaaugcaaaaaccccgcugcggggugccugacguagccgaguauagccuguuuccaaauucccccaaguggacgucuaagguggucaccuaccgaaucgugucguauacacgugaucugccucacauuacuguugacagacucgugucaaaagcauuaaacauguggggaaaggaaaucccacugcauuucaggaaagucguguggggcaccgccgauauuaugaucgguuuugcucgcggggcacacggagacagcuaccccuucgauggcccuggcaauacacuugcccaugcuuuugccccagggaccggauuggguggcgacgcgcacuucgaugaggacgaacgguggacugaugggaguucccugggaauaaacuuucuauaugcagccacacaugagcucggccacucucuggguauggggcacagcuccgacccgaaugcuguaauguaccccaccuacggaaacggcgauccucagaauuucaaacuuucacaggacgacaucaaaggcauucagaagcuguaugggaagagaaguaacagcaggaaaaaguga

SEQ ID NO: 2364 - RNA, 3768 nt, Artificial Sequence
  J05582.1 variant
augacccccggcacacagagcccuuucuuucugcuccuucuguugacuguguuaacggucguuaccggguccggacacgccucuucaacaccagguggcgagaaggaaaccagugcuacucaaagaagcuccgugccgucuucgacagagaaaaacgcaguaucaaugaccagcagugugcuguccucucauagccccggguccggaucaaguacuacacagggccaggacgucacccuagccccugcgacggaaccagcuagcgguucugccgcaacuugggggcaggaugugaccuccguucccgugacaaggccugcccucggaucaacuaccccacccgcucacgacgucacaagcgcaccugauaauaagccagccccgggcaguaccgcucccccugcccauggcgugacgucugcgccagacacucggcccgcaccuggguccacagccccacccgcucacggaguaaccagcgccccggauacucgcccugcacccgguucgacagcuccaccagcccauggcguuaccucugcgcccgacacgcgaccagcccccggguccaccgcaccuccagcucacggagugacaucagccccggauacucgucccgcuccuggcaguaccgccccacccgcacacggugucacaagcgccccugacacuagaccagcucccggguccaccgcgccgccugcacauggagugacaucugccccagauaccaggcccgcuccuggcagcacugccccaccagcacacggcgugacgucagccccugacacacggcccgcuccagggaguaccgccccgccugcacauggagucacuuccgcgcccgauacccgcccagcucccgguagcacagccccuccagcacacggcguuaccucugcccccgacacuagaccugcuccggggucaacagccccacccgcacacggagugacgagugcuccugauaccaggccagcccccggcagcacugcgccuccggcccaugguguaacauccgcucccgacacccggccagcaccugggucuacagcucccccagcccacggcgugacuucggccccugacacccgccccgcaccaggaagcacggcgccgccugcccauggcgucaccuccgcucccgauacacgaccagcccccgggucaacugcaccuccagcucacggagugaccagugcccccgacacaagaccugcaccggguucuacugccccacccgcucauggcguuaccagcgcgccugauacgaggcccgccccaggguccacagcaccucccgcucacggagugaccucagccccagacacucggccugccccgggcagcacagcucccccagcacacggugucaccucugccccugauacucgucccgcgccaggguccaccgcuccucccgcccauggcgugacaagugcaccggacacgcgcccagccccuggaagcaccgcucccccagcacacggcguaacuucugcccccgauacaagaccugcgccgggguccaccgcucccccagcccauggaguuacaucagcaccugacacuaggcccgccccugguaguaccgcuccacccgcccacggcgugacgagcgcaccugauacacggccagcucccgggucgaccgccccgccugcgcacggagucacuuccgccccagacacccgacccgcaccuggcucuacagcuccacccgcccauggugugacuagcgcuccggauacccgcccugcacccgggucaacagccccuccugcccacggcgucacgagugcucccgacaccagaccagcgcccggauccacugcaccuccagcccauggcgugacaucugcuccggacaccaggcccgccccugggagcacugcaccacccgcccacggaguuacauccgcuccugauacccggccagcgcccggcucaacggccccuccggcacauggugugacuagcgcuccagacacccgccccgccccugggaguacagcacccccagcccacggaguaaccucugcuccugauacuagacccgccccaggcuccacagcgccgccugcacacggugucaccagcgcccccgacacaaggccagcucccggcucgacugccccuccagcucauggggugaccucagcacccgauacgcguccugccccgggaucuacagcuccacccgcccacggcguuaccagugcaccugacacucggccagcgcccggguccaccgccccucccgcucauggagugacaagcgccccagauacucgaccggcaccuggcucuaccgcucccccagcccacggugucacgagcgcaccugacacaagacccgccccaggguccaccgcuccucccgcgcauggagugacuucagccccggauacaaggccagcaccuggcaguaccgcucccccagcccacgguguaacuagcgcccccgacacacgcccugcaccgggcucuaccgcuccacccgcccacggggugacguccgcgccugauacucggcccgcuccaggaucaaccgccccucccgcacauggcguuacaagugccccagacaccagaccugcuccggggagcacagcacccccagcccacggagucacuuccgcgccugauaccaggcccgcuccaggcucuacggccccucccgcacauggugugacaucggccccggacacucgcccagcuccugggagcaccgcacccccagcccacggagugacaucagcucccgacacccgaccugcccccggcuccacugcgcccccugcccacggugucaccagugcaccggauaaccggcccgcucugggcucuacagccccaccuguucauaaugugacgagcgcauccgggucagcuucuggaagcgccaguacucuugugcacaacggcaccuccgcccgugcgacaaccacucccgcuagcaaaucuacaccauucucaaucccuucccaucacagugacacccccacgacucuggcaagccauucgacaaagaccgaugccucuuccacccaccacagcucaguaccgccuuugacaaguucuaaucauuccacuagcccacaacucucaaccggggucagcuuuuucuuucugaguuuccacauuuccaaccugcaguuuaauucuagccucgaggaccccuccacagauuacuaucaggaauuacagagagacauaucagagauguuccugcaaaucuacaaacagggaggcuuucuugguuugucuaacauuaaguucaggccugggagugugguugugcagcugacucuagcuuuucgcgagggaacgaucaauguccaugauguggaaacccaguucaaccaauauaagacagaggccgcaucgcgguacaaucucacuauuagcgacguuuccgugucugauguaccauuucccuucucagcccagagcggcgcuggcgucccuggguggggaaucgcgcugcuugugcuggugugcgucuugguugcccucgcaauaguguaucugaucgcuuuagccguaugucagugcagaaggaaaaacuacggucaacuggacauuuucccagcacgagauaccuaucaccccauguccgaauacccgacauaccacacccauggccgcuaugugccucccaguucuacugaccggagcccauacgagaaggucucagccgggaauggaggcuccagucucagcuauacgaaccccgcuguggccgcggcaucugccaaucuuuga

SEQ ID NO: 2365 - RNA, 2136 nt, Artificial Sequence
  NM_032853 variant
augauggccgacgcuaaguacgugcugugcagaugggagaaaaggcucuggcccgcaaagguccuugcccggaccgcgacaagcacuaaaaacaagcgccgaaaagaauauuuccuggcuguucagaucuuguccuuagaggaaaagauuaaggugaaaucuacggagguagaaauacuggagaagucacaaaucgaggccauugcaaguagccuagccucccagaaugaagugccugcugcaccacucgaggaacuggccuaccguagaucucuuagggucgcucuggauguguugucggagggcucaaucuggagccaggagaguuccgccgggaccggacgggcggaccgcucucucagagguaaaccgauggaacacguuagcucccccugugauucaaacaguagcucucugccuaggggcgacgugcugggguccucacggccacaucgccgaagacccugcguccagcaaagccucaguucuuccuuuacaugugagaaggauccugaaugcaaaguggaccacaagaagggauuaaggaaaagcgagaauccacggggcccccugguacuuccugccggugggggagcacaggaugaaucgggcucucguauucaucacaagaacuggacuuuggcuuccaaacgcggcgggaauagcgcccagaaggcaagucugugucuaaacggaagcucccucucugaggacgauaccgagagagacauggguagcaaaggcgggucaugggcugccccaagucugccguccggaguuagggaagaugaccccugcgcgaaugccgagggccaugauccuggucuuccacuggggagcuugacagcacccccugcuccagaacccucugccuguucagagccgggagaaugcccugcuaagaaacggccccgacucgacggcagucagcgcccuccagccgugcaacuggagcccauggcagccggcgcugcgccaagccccgggccuggaccagguccgagagaguccgucacccccaggucuacugcacgguuaggcccuccacccucgcacgccagcgcugacgccacacgcugucugccuugcccagauucccagaagcucgaaaaggagugucagucaagugaagagucuauggggagcaacuccaugagaucaauccuugaagaggacgaggaagaugaggaacccccgagggugcuguuguaucacgagccucguagcuucgaggugggaaugcuagucuggcauaaacacaagaaauacccauuuuggcccgcaguugugaagucuguacggcagcgagacaaaaaggccuccgugcuguauauagaaggccauaugaauccuaagaugaaagguuucaccgucagucucaagagccugaaacacuuugauugcaaggagaaacaaacgcuucugaaccaggcuagagaagacuucaaucaggauaucggguggugcgugucuuugauuacugacuacaggguucgccucggcuguggauccuuugccggcucauuccuggaguauuacgcagcggauaucaguuaccccgugcggaagucaauucaacaggacgucuuagggaccaagcugccacagcuaucgaaaggauccccugaagaacccgugguagguugcccacucggccagagacaaccguguaggaagaugcugccugaucgcucucgagcugcccgggaccgugcaaaccagaaacuuguugaguauaucgugaaggccaaaggggcugaaagccacuugagagccauacugaagucaaggaagcccagucgcuggcuccagacauuucuguccucuagccaguacgucacuugcguggagaccuaucuugaagacgagggacaacuggauuuggucgugaaauaccuccagggcguuuaucaggaagugggugcaaagguacugcagcggacaaauggggacagaauuagguucaucuuagauguccugcuaccagaggcuauuaucugugccaucuccgcgguggacgagguugauuacaaaaccgccgaagagaaguauauuaaaggccccucacucagcuaccgagaaaaggagauauuugacaaccaacugcuugaggagcgcaaucggagaaggcguuga

SEQ ID NO: 2366 - RNA, 438 nt, Artificial Sequence
  AAD44697 variant
augaccgugcacaaccuguaccucuucgacagaaauggcgucugccuucauuauagcgaguggcacaggaagaaacaggccgggauccccaaggaagaggaauacaaacugauguauggaauguuguuuuccauucggucuuucguuucaaagaugaguccuuuagauaugaaagacgguuuucuggcuuuccaaacaagccgcuacaagcuacauuauuacgagacuccaacgggcauaaaggugguaaugaacaccgaucucggggugggaccgauccgagacguccugcaccauauuuauuccgcacuuuacguggaacugguugugaaaaaucccuuguguccucucggccagacaguccagucugagcuguuucguucgagacuggauucauacgugaggagccucccauucuuuagugcccgggcggguuga

SEQ ID NO: 2367 - RNA, 1395 nt, Artificial Sequence
  AAH02712 variant
augcccagcugcuccaccucuacaaugccuggcaugaucuguaagaacccagaccuggaguucgauucacuccagccgugcuuuuaccccgacgaagaugacuucuauuuugggggaccugauaguacuccacccggugaggacauuuggaaaaaguucgaacuucugccuacgccacccuugagcccuuccagaggcuuugccgagcacucuucggaaccaccgucaugggugaccgagauguuacuggagaaugaacuaugggggagccccgcugaggaagaugcauucggacucggcggucuagggggacuuacaccuaacccagucauacugcaagacuguauguggaguggcuuuuccgccagggagaaauuggagcgggcgguuucugaaaagcuccagcauggccgcgggcccccuacugcuggaagcaccgcccaguccccaggugcaggcgccgcuucacccgcagggcgaggacacggcggugccgcuggggccggacgugcgggcgcagcccugccggcugagcuggcccauccugcagcugaaugcguggaucccgccguaguguucccauuuccugucaauaaaagagagcccgcgccagugcccgccgccccugcuagugccccagcugccggcccggcaguugccagcggggcuggaaucgcggcacccgccggugcuccuggcguggccccacccaggccugggggacggcagacaucuggcggugaccacaaggcacucuccaccucaggggaagauacuuuaagcgacagugaugacgaggacgaugaggaagaggacgaagaggaagagauugaugucgugacaguagagaagcgcagaucuuccagcaacaccaaagccguuacgacuuucaccaucacagugaggccaaagaaugcugcccugggccccggacgggcacaaucgucugaacuuauuuugaaacgcugucugccgauccaucagcagcacaacuacgcggcuccuuccccauaugucgagucagaagacgcacccccucagaagaaaauaaagagugaggcaagcccccgaccacuaaaguccgugaucccucccaaagccaagucucucagcccaagaaauucagauagugaagacuccgagaggcggcguaaccacaauauucuggagcgccaaagaaggaacgaucuucggagcucuuuucugacuuugcgagaccaugugccggaacucgucaaaaaugagaaggcugccaaaguugugauccugaagaaagcaaccgaauacguacacucauuacaggcugaggagcaucagcugcuccuugaaaaggagaagcugcaggcccgccaacagcaguugcugaaaaagauugaacacgcgagaacaugcuga

SEQ ID NO: 2368 - RNA, 3132 nt, Artificial Sequence
  AAC78645 variant
augccccugcucgagggcagcgugggggucgaagaccuuguucuguuggagccuuuaguggaagagucccugcuaaagaaccuccagcugagauacgaaaauaaagagaucuauaccuacauuggaaacguagugauaucugucaauccauaucaacagcuuccgaucuacggucccgaguucauugccaaguaucaggauuacacauuuuaugaacugaaaccucacaucuacgcuuuggcaaacguggccuaccagucacucagggaccgggaucgcgaccaaugcauucugaucacuggcgagagugggagcggaaagacggaagcguccaaacugguuaugucuuauguggcugccgucuguggcaagggugagcagguaaauucggugaaggagcagcucuuacagucaaacccaguucuggaagcauucgggaaugccaaaaccauacgaaacaauaacagcagucguuuuggaaaguacauggauaucgaguucgacuuuaaaggcaguccccuuggcggggugauuacaaauuauuugcuggaaaagucuaggcuagucaaacaacucaagggagagagaaacuuccauaucuuuuaccagcugcuugcuggugcagaugaacagcuguugaaggcccucaaacuggagcgggacacuaccggcuaugcuuacuuaaaucacgaggugagccgcguggaugggauggacgaugccuccucauucagagcgguccagagugcaauggccguuauuggauuuagcgaagaggaaaucaggcaagugcuggagguaacaucuauggugcucaaacuuggcaacguccugguggcugacgaguuccaggccuccgguauaccugcaucagggauucgggauggacgcggcguucgagaaaucggcgagauggugggguugaauagcgaagaggucgaaagagcucuaugcaguaggaccauggagacugccaaggaaaaggugguaacagcgcugaacguuaugcaggcccaauaugcacgggacgcucucgccaaaaacauuuacucucgucuguuugacuggaucgugaaucgcaucaacgaguccauuaaggucggaauaggugagaaaaagaaggugaugggcguccuugauaucuacggguucgaaauucuggaggacaauagcuuugaacaguucgugaucaacuauuguaaugagaaauugcagcagguuuucauagagaugacccucaaggaggaacaagaagaguacaaaagagaaggcauuccauggacgaagguggauuauuuugacaacggaaucaucugcaaacugauugagcauaaucagagggguaucuuagcuaugcuggaugaggaaugucuacggcccgggguagucucggacucuacuuuccucgccaagcugaaccagcuguuuuccaagcacggccauuacgagucaaaagugacccagaaugcacaacgacaguaugaucacacaaugggauugaguugcuuccgcauuugucacuacgccggcaagguuacuuauaacgugaccagcuuuauagacaaaaauaacgaucuucucuucagagaccugcuucaggcuauguggaaggcgcagcauccucuguugaggucccucuuuccagaagggaauccgaaacaagcaucucugaagcggcccccuacagccggagcucaguucaagagcucagucgccaucuuaaugaaaaaccuguacaguaaguccccaaauuacauucgcugcaucaaacccaacgagcaccagcagagaggucaauuuagcucugaucuaguggcaacccaggccagguaucucggccugcuugaaaacguacgugugcggcgagcuggguacgcccauagacagggauauggcccuuucuuggagagguaccgccugcucucacggaguacguggccacacuggaaugguggggacagagagggcguugaaaagguccugggagaguuaagcauguccucuggcgaacuggcauuugggaaaacuaagaucuucauuaggucgcccaagacauuguuuuaucuugaggaacaacgccgacuccggcugcagcagcuagcgacccugauacagaaaaucuaccguggauggagauguaggacucacuaucaacucaugcgcaagagccagauucugaucuccucaugguuccgggguaacaugcagaaaaagugcuacggcaaaauuaaggcuagugugcuuuugauccaggccuucgugagaggguggaaagcaaggaagaauuaccgaaaguauuuucgcucugaggccgcucugacauuagccgacuucauauacaaaagcaugguccaaaaguuucuccugggacuuaaaaacaaucugccguccaccaacguuuuggauaagacguggccugcagcucccuauaaaugucucucaaccgccaaucaggagcugcagcagcuauucuaccaauggaagugcaagcgguuuagagaccagcugagcccaaaacagguggaaauccucagggagaagcugugcgcgucugaacuuuucaaaggcaagaaagccuccuauccucaaagugugcccauuccauuuuguggugauuacaucggguugcagggcaaccccaagcugcagaaguuaaaaggaggcgaggaggggccuguacucauggcugaagcagucaagaaagugaaucguggaaacggcaagacaagcucucgcauucugcuucugacuaaaggucauguuauccuaaccgacacaaagaagucccaggccaaaauagugauugggcucgauaaugucgcuggagugucaguuacuucccugaaggacggcuuguucagccugcacuuaucggagauguccucuguggguagcaaaggcgauuuucuccugguaucagaacaugucaucgagcuucugaccaagauguaucgggccguguuggacgcaacacaaagacagcucaccgugacugucacggaaaaauucaguguuagguuuaaggagaacuccguggcgguaaaagugguccaggggccagccggaggcgauaauucuaagcugcgauacaagaaaaaggggagccacugccuagaggugacaguucaguga

SEQ ID NO: 2369 - RNA, 3411 nt, Artificial Sequence
  AAH53558 variant
auggccaagauggaggugaaaaccagccugcucgacaacaugaucggcgucggggauaugguucuucuggaacccuugaaugaggaaacauucauuaacaauuuaaagaaaagauuugaccacuccgagauauacacuuauaucggaucugugguaauuucagugaacccuuacaggagucugccaaucuauagcccggaaaaggucgaggaguaccggaaucgcaacuucuaugaacuaaguccccauauuuuugcucucucugaugaggcauaccgaucgcugcgugaccaggauaaagaccaaugcauccuuauaacgggugaaucaggcgccgggaagaccgaggcgagcaagcuggugaugaguuauguugcugccguguguggaaaaggcgcagaggucaaucaggugaaggaacaguugcuccaguccaacccuguacuggaggccuucgguaaugcuaaaacaguuagaaacgauaauucuagcagguuugggaaguacauggacaucgaguucgauuuuaaaggagacccacugggcggcgugauuuccaacuaccucuuagaaaagucacgggucgugaagcaaccccgcggggaaagaaauuuccacguguuuuaucagcugcuuaguggagcaagcgaggaguugcugaacaaacuaaagcucgaaagggauuucucucgguacaauuaucugucccuugacucagccaaagucaacgguguugaugacgcugccaacuuucgcacugugcgaaaugcgaugcagaucguaggcuucauggaccaugaggcagaaagcgugcuggccgucguggcugccguuuugaagcucgggaacauugaguuuaaaccugaaaguagagugaauggacuggaugagucuaagaucaaagacaagaacgaguuaaaggaaauaugcgagcugaccggcauugaucaguccguccucgaaagggcauucagcuuccggacaguggaggcuaaacaagaaaagguaucgaccacucuuaauguugcccaggcguacuaugcccgugacgcacuggcuaaaaacuuguacucucgccuauuuuccuggcuggugaauagaaucaacgagucaauuaaggcccagacaaaagucaggaagaaggugauggguguccucgauaucuauggguucgagaucuuugaagacaauaguuucgagcaguuuauuauaaacuacuguaaugaaaaacugcaacagaucuucauugagcuuacccugaaggaggaacaggaggaauacauccgggaggauauagaauggacgcacauugacuauuuuaacaaugcuaucaucugcgauuugauugagaacaauacuaacggaauccucgccaugcuggacgaggaauguuuacgaccaggcaccgugacagaugagacuuuccuggaaaaacuaaaccaaguuugcgcaacccaucagcacuuugagagccgcauguccaaguguucuagauuccucaaugacacaagccugccccacucaugcuuuaggauucagcauuacgccggcaaagugcuuuaucagguagaaggguucgucgacaagaacaaugauuugcuguaccgggaccucagucaagcuauguggaaggcgucccacgcacugauaaaaagccuuuuuccugagggaaacccagccaagaucaaucugaaacgcccgcccaccgcugguucucaguucaaggccucaguggcaacguugaugaaaaaccuccagacuaagaauccuaacuauauuagauguaucaagccaaaugauaaaaaggccgcucauaucuucaacgaggcccugguuugccaccagauuagguacuuaggccugcuagaaaaugugcguguccggcgagcaggguaugcguuuagacaggcuuacgagcccugucucgaaagguacaaaaugcugugcaagcaaacauggccucacuggaaaggaccagcccgcaguggcguggagguacuuuucaacgaauuggagauacccguggaggaauauagcuuuggucgguccaagaucuucauuagaaauccgaggacccuguuuaaacucgaggaccugcgcaagcagcgauuagaagaucuggcaacucuuauccagaagauuuaccggggguggaaaugccguacacauuucuugcucaugaagaaaucucaaaucguuauagccgcuugguauagaagguacgcccagcagaagcgcuaucagcaaaccaaaucgagcgcacuggucauccaguccuacauucggggcuggaaggcuagaaagauccuaagggagcugaaacaccagaagcgauguaaagaggccgugacgaccauugcggccuauuggcauggaacacaagcucgccgggaacucagaaggcugaaggaggaagcacguaacaaacacgccaucgcugugauaugggccuacuggcuuggcucaaaggcacgccgggaguugaagagacugaaagaagaggcgaggcgaaagcaugccgucgcuguuauuugggccuacugguuagggcucaaagugcggcgcgaguauagaaaguuuuucagggcaaaugcugguaaaaagaucuacgaauuuacucugcagcggauugugcagaaguauuuccuugagaugaaaaacaagaugccuagucugucucccaucgacaaaaacuggccaagccgaccuuacuuguuucucgauuccacccacaaggaacugaaaagaauauuccaccuauggcgcugcaagaaauauagggaccaguuuacagaucaacagaagcugaucuacgaggaaaagcucgaggccucagagcuguucaaagacaagaaagcacuuuaucccagcucuguaggacagccauuccagggcgccuacuuggaaauuaauaagaaccccaaauacaagaagcugaaagaugcuaucgaggaaaagauuaucauagcggaggucgugaauaaaauuaaccgugccaaugggaaguccacuucccggaucuuuuuacucaccaacaauaaccugcuucuggcagaccagaaaagcggacaaaucaagucugaaguuccucuaguggaugucacaaagguguccaugucaagucagaaugacggcuucuuugcuguucaucucaaagaggguagcgaggccgccucgaagggggacuuccuguuuuccucugaucacuugauugaaauggcuaccaaacuguauagaacuacguuaagccagacaaagcaaaaacucaacaucgagauuucagacgaguuccuggugcaguuuaggcaggauaagguaugugucaaguucauacaaggcaaucagaaaaacggaagugugccaaccugcaagcgcaaaaauaaccgacuucuggaaguggcagucccguga

SEQ ID NO: 2370 - RNA, 3192 nt, Artificial Sequence
  CCDS42226.1 variant
auggcccuucagguggagcucguccccaccggcgaaaucauuagaguugugcacccucauaggccaugcaagcuggcucuggggagcgacggaguacgggugacaauggaguccgcauugacugcccgcgaucgagucggugugcaagacuucguuuuacuggaaaacuuuacgucugaggcggcuuucauagaaaaucuacguagaagguuucgggagaaccucaucuacaccuauauuggcccggugcuggucucagugaaucccuaccgcgaucuucagaucuauaguagacagcacauggagagguaccgcgggguuagcuucuaugaaguaccuccacaucuguuugccguggcagacacagucuaccgggccuugcgaacugagagaagggaucaggcugugaugauuuccggagaaucuggcgcagguaaaaccgaggccacaaagcggcuccugcaauucuaugcugagaccugucccgccccugaacgugggggagcggugcgcgacagacugcuccagucgaacccagucuuagaggcauuuggcaaugccaaaacucugaggaacgauaauucaagccgguucggcaaguacauggacguucaguuugauuucaaaggggcucccgugggaggucacauccuuaguuacuugcuggaaaagucccgaguagugcaucagaaccacggcgagcgcaauuuucacauauucuaucaacuacucgaagggggagaggaggaaacacugagaaggcuuggccuggagcggaacccucagucuuacuuguaucucgucaagggucagugcgccaaagugagcuccaucaaugacaagucagauuggaaaguugugcgcaaggcacugaccgucauugacuuuacggaagaugagguggaagacuuacugaguaucguagcuagcguucuccaucuugggaacauucacuucgccgcgaaugaggagucuaacgcccaggugacuaccgaaaaucaacugaaauacuugacaagacuacuguccgucgagggaucaacucucagggaagcacugacccaucguaagaucauagcuaagggcgaggaacuucugagcccauugaaccucgagcaggccgcuuaugcccgggacgcacuggccaaagcuguguacagucgaacauucaccugguuagucggcaagauuaacagaucucuggcguccaaagauguggagagcccgucguggaggucuacgacuguucuagggcuccuggacaucuauggauuugaaguguuccagcacaauuccuuugagcaauucuguauuaacuacugcaaugaaaaacuucagcaguuguuuaucgagcugacacucaagucagagcaggaagaguacgaagcagaggguaucgccugggaacccguacaauauuucaacaauaagauuauaugugaucuggucgaggagaaauuuaagggcaucauuaguauccuugacgaagagugccugcgcccuggggaagcuaccgauuugacuuuccucgagaagcuggaagacacagugaaacaccauccacacuuuuuaacccauaagcuggccgaucagcggacgagaaaaagccuaggaaggggcgaguuccgccuccugcacuacgcuggugagguuaccuauuccgugacaggguuucuugacaagaacaaugauuugcuguuccgaaaccucaaagaaacuauguguucuagcaagaaucccauaaugucacagugcuuugaccggagugagcuguccgauaagaaacguccugaaaccgucgccacacaguucaagaugagcuuacugcaacuuguggagauuuugcagucuaaagaaccagcuuacguaagauguaucaagcccaacgacgccaaacagccgggcagguucgacgaggugcucauccgccaucagguuaaguaucugggacuacuggagaaucuccgggucagaagggcaggcuuugcguaccgacgcaaguaugaggcuuuccugcaacgguacaaaucacuuugcccugaaacuuggcccaccugggccgggagaccacaggauggaguggcaguguuggucaggcaccuggguuacaagccugaagaguauaaaaugggccguacaaagauuuuuauccgcuuccccaaaaccuuauuugccacugaggacgcucucgaaguucggagacagagucuggccacgaagauucaggcagcuuggaggggguuccacuggcgacaaaaguuucuucgggugaaacgcagcgccauauguauccaguccugguggagaggaacacugggcaggcggaaggcggccaaacgaaagugggcugcacagaccauuagacgcuugaucagggguuucgugcuccgucaugccccacggugccccgagaacgcauuuuuccuggaucacguaagaacuucuuuucuacugaaucucaggcgccaacugccucagaacguccuugacaccucguggccaacaccgcccccugccuugcgagaagcaagcgagcuguuaagagaacucugcaucaaaaauaugguguggaaguacugucgguccauuucaccagaguggaaacagcagcugcaacagaaggcgguugccagugagauauucaaggggaaaaaggauaacuauccccagucugugccuaggcuuuuuaucagcacccgccugggcacugacgaaauuuccccacguguccuacaggcucucggaucagagcccauccaauacgccgugccgguugugaaauaugauagaaagggcuacaaaccucggagcaggcagcuguugcugacaccaaacgcaguagucauuguggaagacgcuaaggugaagcagcgcaucgauuaugccaauuuaacggggauaucugucuccagucucagcgacucucuguucguucuucaugugcagcgagcagauaacaaacaaaagggagacguagugcugcaguccgaucacgucaucgagaccuugacuaaaacagcccucucagcuaauagagugaacaguauuaauaucaaccaggguagcauuaccuucgcgggcgggcccggacgggacggcacaaucgacuuuacuccugguucggaacugcuaauaaccaaggccaaaaaugggcaccuggcaguuguggcucccaggcuuaacucccgcuga

SEQ ID NO: 2371 - RNA, 3021 nt, Artificial Sequence
  AAI46764 variant
auggccgagcaggaaagccuggaguucggcaaggcugacuuugugcucauggauaccgucuccaugcccgaguucauggcaaaccuuagacugagguuugagaaagggcggaucuacacauucauuggagaaguugugguaucugugaauccuuauaaguuguuaaacauauacggucgcgacacuaucgagcaauauaaaggccgagagcuguacgaacguccaccgcaccuauuugccauugcggaugcugccuauaaggcaaugaaaagaaggucaaaggacacgugcaucgucauuaguggggagagcggagccggcaagaccgaggcuuccaaauacaucaugcaguauauagcagccaucacaaaucccucucagcgggcugaaguggagcgcguuaagaacaugcuccugaaaucgaauugugugcuugaagccuucgguaacgcgaagacuaauagaaacgauaauucaagcagguuugggaaauacauggacauuaacuucgauuuuaagggagacccuaucggcggccauauuaauaacuaccuguuggagaagagucgggucaucgugcagcaaccaggggaacgcuccuuccacucuuuuuaucagcuccugcagggagguagcgagcagaugcugcgaucccuccauuuacaaaaaucacugaguagcuacaauuauauacacguaggcgcacagcuuaagucuuccauuaacgaugccgcugaguucagaguuguggccgacgcaaugaaagucaucggguuuaagcccgaagagauucagaccguguacaaaaucuuggcugccauccugcaucuaggaaaucucaaguucguggucgauggcgacacaccucugauugaaaacgguaaaguugugucaauaaucgcggagcuucugagcaccaagacugauaugguagaaaaggccuugcucuauaggacaguggcaaccgggcgggacauuaucgacaaacagcacacggagcaagaagcuaguuacggacgugaugccuucgcuaaggccauauaugagcgccuguuuugcuggauugucacuagaaucaacgacaucauugaggugaaaaauuacgauaccacaauccacggcaagaacacuguuauuggcguguuagacauauacggguucgaaaucuuugauaauaacucuuucgagcaguuuuguauuaauuauugcaacgaaaaacugcagcaacucuucauccagcuuguccugaagcaggagcaggaagaguaccaaagggagggaaucccauggaagcauauugacuauuuuaauaaccagauaaucguggauuugguagaacagcagcacaaagguauuaucgcaauucuagacgaugccuguaugaauguuggcaaggugaccgacgagauguuccuggaagcucucaacuccaaacuggggaagcaugcgcacuuuagcucgcggaaacuuugcgcaucugauaagauccuggaguucgaccgagacuuucgcauaagacacuacgccggagaugucguguauuccgucaucggcuucauugacaagaauaaagauacauuguuucaagacuucaagaggcucauguacaacucaaguaaucccgugcugaaaaacauguggccugaggguaaguuaagcaucaccgaaguuacgaaacggccacugacugcugccacacuauucaaaaauuccaugauugcacucguggauaaccuggccucuaaggagccguauuacguacgcuguaucaagcccaacgacaagaaaagcccucagauauuugaugacgaaagaugcaggcaucaggucgaguaccuuggguugcuggaaaaugugcguguucggcgagcuggcuucgccuuuagacagaccuaugagaaguuccuccacagguacaaaaugauuucagaguuuacuuggccaaaccaugaucugcccagugacaaggaagcagugaaaaagcugaucgagcgcuguggauuccaagaugacgucgcguauggcaagacaaaaauuuuuauccggaccccuagaacgcuuuucaccuuggaagaacucagggcucagaugcugauacgcaucguguuauuucugcagaagguauggcgagggacacuagcccggaugcguuacaaaagaacuaaggcagcccucaccauuaucagguauuaccgccgguauaaagugaaguccuacauucacgaaguugcuagaagguuccauggagucaagacaaugcgagauuacgguaaacacgugaaguggccaucacccccgaaagugcugcgccgguuugaggaggcccuucagacuaucuucaauagauggagggcaucucaauugauaaagucaauuccugcuagugaccugccccagguccgugccaaaguugcggccguggaaaugcucaagggccagcgcgcugaccugggguuacaacgggcaugggagggaaacuaucuggccagcaagccagauaccccucagacauccggcaccuuugugcccguagcuaaugaacuuaaaagaaaggacaaauacaugaacgucuuguucucuugccacgugaggaagguuaaucgauucucgaaaguggaggaucgggccaucuuugucacugaccgccaucucuauaagauggauccaacgaagcaguacaaagugaugaagacaaucccccuguauaaccuaaccggucugagcguuuccaaugggaaagaccagcucgugguauuccacacuaaggauaacaaagaccugauugucugucuuuuuagcaagcaaccuacccaugaaaguagaaucggcgaguuggugggagugcuggucaaucacuucaaaucugagaagaggcacuuacagguuaacgugacaaauccaguacagugcagccuccauggcaagaaaugcaccguguccgucgaaacucggcugaaccagccgcaacccgauuuuacaaagaaucgaucaggguucauucuuagcgugccuggaaacuga

SEQ ID NO: 2372 - RNA, 3327 nt, Artificial Sequence
  CCDS32254.1 variant
augggcagcaaggggguguaccaguaucacuggcaaucccauaacgucaaacacucuggaguugacgauauggugcugcucucaaagaucaccgagaauaguauuguagaaaaccuuaaaaagagauacauggacgauuauauauucacauacaucgguagcgugcugauuuccgucaaucccuuuaaacagaugccuuauuucggcgagaaggaaaucgagauguaccagggggccgcucaguaugaaaacccaccgcauauuuacgcauuggccgacaauauguacaggaacaugaucauagaucgggagaaucaaugcgugaucauuucuggagagucgggcgcggguaagacuguugcugccaaauauaucaugucauacauuagccgcgugagugggggaggcacgaagguccagcacgugaaagacaucauauuacaguccaacccccugcuagaagcauuuggcaaugccaagaccguacgaaacaauaacucuagccguuucgggaaauauuuugagauucaguucuccccuggaggugaaccagauggcgggaagaucucaaauuuucuccuggagaagaguagaguugugaugaggaaccccggagagcggagcuuccauauuuucuaccaacuuaucgaaggcgcuucugcagagcagaaacacucccuggguaucacaucaauggacuauuacuauuacuugagccucagugggucuuacaaggucgaugacauugaugaccgcagagaauuucaggagacucugcacgccaugaaugugauaggaaucuuugcugaggaacagacccuggugcuccaaauugucgccggcaucuuacaucugggcaacauauccuucaaagagguugggaacuaugcggcaguggaaagcgaggaauuucuugccuucccugcuuacuugcugggaauuaaucaggauaggcuaaaggagaaacucacaucgcggcagauggacucuaagugggguggcaaauccgaaucaauccacguaacccugaacguggagcaagccuguuauacucgcgacgcacuugcuaaggcccugcaugcgcgagucuucgauuuucucguggacaguaucaauaaggccauggagaaagaucacgaagaguacaacauugggguucucgacaucuauggauucgaaauuuuucagaagaauggcuucgagcaguuuugcauaaacuucgugaaugaaaaacugcagcaaaucuuuauugaguuaacacugaaggcagagcaggaagaguacguccaggaagguaucagauggaccccaaucgaguauuucaacaauaaaauugugugugaucucauagagaacaagguaaaucccccugggaucaugagcauucuugacgauguuugcgcuacgaugcacgccgugggcgaaggagcugaccagacucuguugcaaaagcuacagaugcagaucggcucccaugagcacuuuaacucuuggaaucagggguucauuauccaucacuacgccggaaaagucagcuacgauauggacgguuuuugugaaaggaaccgggaugugcuguucauggaccucauagagcugaugcaaucaagugaacuuccauuuaucaagucccuguucccggagaauuugcaggcagacaaaaagggccgucccaccacagccgggagcaaaauuaagaagcaggcuaacgaucucgucucuacucugaugaaaugcaccccucauuauauccgcuguauuaagccaaacgagaccaaaaagcccagagacugggaagagucaagggugaaacaccagguugaauacuuaggacugaaggagaauauccgggugcgacgcgcgggcuaugcauacagaaggauauuccaaaaguuucuacagcgguaugccauucucacaaaagcuacguggccuaguuggcagggugaagagaagcaagggguacugcaccuuuugcagagcgucaacauggauuccgaccaguuccagcugggccgcucuaaaguguuuaucaaggccccagagucguuguuccugcuugaagagaugagagaaaggaaauacgauggauaugcacguguuauucaaaagagcuggcggaaauuuguggcccgaaagaaguacguccagaugagagaggaggcuuccgaccuguugcucaauaaaaaggaaaggcgccggaacucaaucaauagaaacuucauaggcgauuacaucgggauggaggaacaucccgagcugcagcaguuugugggaaaaagggaaaagauugacuucgccgauacuguaacaaaauaugaccgccgauuuaagggugugaagcgggauuuacugcuaaccccgaaaugccucuaccugaucggccgugagaagguuaaacaagggccugacaagggacuugucaaagagguguugaagagaaagauugaaaucgagaggauacugagugugucucucagcacuaugcaggaugacauuuucauccugcacgaacaggaguaugacuccuuacuggaaucagucuuuaaaacagaguuccuuagcuugcucgcaaagcgcuacgaggagaaaacccagaagcaacugccccuaaaauuuucuaauacgcuggaacucaagcugaagaaagaaaacuggggcccaugguccgcgggugggagucggcagguucaguuccaucaaggcuucggagaucuugcuguguugaagccuagcaauaaagugcugcagguaucuaucggccccggguuaccaaagaacuccagacccaccaggcgaaauacaacucagaacaccggauauucaaguggcacacagaaugccaacuacccuguccgcgcagccccaccgcccccugguuaucaccaaaauggggugauucggaaccaguacguuccauacccccacgcuccuggaagccagagaucgaaccagaaaucccucuauacuucuauggccaggccaccccugccgcgucaacagagcaccucaagugaccgcgugucccagacaccugagucucuugauuuucugaaggucccagaccagggcgcagcuggugugcggagacaaaccacuagcaggcccccucccgccggcgggcgaccaaaaccucagcccaagccaaagccgcagguuccucaguguaaagcguuguacgccuaugaugcucaagacacggaugaacucuccuucaaugcaaacgacaucauugauauaaucaaggaggaccccucaggaugguggacaggccggcugcgcgggaaacagggacuauuuccaaauaacuacgugaccaagauuuga

SEQ ID NO: 2373 - RNA, 3297 nt, Artificial Sequence
  AAH28071 variant
augggcagcaaggagagauuccacuggcagucccauaacgugaaacaaucuggggucgacgauaugguucugcucccccagaucaccgaagacgccauugcugcaaaucuuaggaagcgguuuauggaugacuacauauucacauauaucggaucagugcugauuaguguaaacccuuuuaaacagaugccauacuucacugaucgcgagaucgacuuguaucagggugccgcgcaauacgaaaauccgccccacauuuaugcuuuaacggauaacauguaccgaaauaugcugaucgacugcgagaaccagugugugauaaucagcggcgaauccggggccggaaagaccgucgcagccaaauauauuaugggcuacaucucuaaggugucgggugggggagagaagguucagcaugugaaagauauuauccuacagucaaauccucuccuggaggcuuuuggcaacgcaaagacaguccguaauaacaauagcaguagauucggcaaauacuuugaaauacaauucuccaggggaggagagccagacgguggcaagauuucuaacuuucuucuggagaaaagccgggugguaaugcagaaugaaaacgagcgcaauuuccacaucuauuaccaguugcucgaaggggccucccaggagcaaagacagaaccugggacugaugacucccgauuauuacuauuaccucaaccagucagacaccuaucaaguugauggcacagacgacaggagugauuuuggugaaaccuuaagcgcuaugcaagugauugggaucccuccaucuauccagcagcugguccuucaguugguggccgggauucugcaucuaggcaauauauccuucugcgaggacggcaacuacgcgcggguggaaucagucgaucuccuggcauuucccgccuaccuucuggggaucgacagcggacgcuugcaggagaagcucacuucacgaaagauggauucuagaugggguggcagguccgagagcauuaauguuacacugaacguggaacaggcugccuauacccgggacgcauuagcuaaagggcuguacgcccgucucuucgauuuccuuguagaggcgaucaaucgcgccaugcagaagccucaagaagaguauucgauaggagugcuggacauuuacggcuuugaaaucuuccagaaaaacgguuuugagcaguucuguaucaauuuugucaacgagaaguugcagcaaauuuucaucgaacuaacgcugaaagcagagcaggaagaguaugugcaggaagggauuagauggacuccaauacaguacuuuaauaacaagguugugugcgaucucaucgagaauaaacugucuccgcccggcauuauguccguccuugacgaugugugugcuaccaugcacgccacaggaggcggggcugaccaaacucuguugcagaagcuccaggccgcaguaggaacccacgagcauuucaacucauggagugccgguuuuguuauccaccauuaugcuggcaaggugagcuacgacgucuccggguucugcgaaaggaaucgggaugugcuguuuucugacuuaaucgagcugaugcaaacaagcgaacaggcguuccuacgaaugcucuuuccugagaaacuggauggagacaagaaaggccgcccaucaaccgcagguaguaagauuaaaaagcaggccaacgaucuugucgcuacguugaugagauguacuccccacuacauaaggugcaucaagccuaaugagacaaaacggccacgcgacugggaagagaacagagugaagcaccagguugaauaucuggggcucaaagagaacauuagggugcgucgggccggcuucgcauaccgaagacaauucgccaaguuucugcagagguaugcuauccuuacccccgaaacuuggccgcgcuggcggggagaugagagacagggcguacagcaucuguugagggccgucaauauggagccugaccaauaccagaugggguccacaaaaguguucguuaagaaccccgaaagccucuuucuguuagaggaagugcgcgagcgaaaguucgauggauuugcacggaccauucagaaagcguggcguagacacgucgcugugaggaaguaugaagagaugcgcgaggaagccucuaauauccugcuaaacaaaaaggagcggagaaggaauaguauaaaccgaaauuucguaggugacuaccucggccuggaggaacgcccagaacuucggcaguuuuuggggaaaagagagaggguggauuucgcagacaguguuacgaaguaugaucgucgcuuuaagccuaucaaacgggaccugauucucacccccaagugugucuacgugaucggaagagagaaagugaagaaaggcccagaaaagggucaagucugcgagguucugaaaaagaagguggacauucaggccuuacgaggggugagccuguccacaaggcaggaugacuucuuuauccuucaagaagaugcugccgacucuuucuuggagucgguauuuaaaacugaguucgucagccuccuguguaagcgguucgaagaggcaacccgcagaccccuaccucugacauuuuccgauacucuccaguucagggugaaaaaggaaggcuggggaggcgggggaacccggucaguuacauuuagucgaggcuucggugaccuggcugugcuuaaagucgggggaagaaccuugacugugucuguuggcgauggucugccaaagagcuccaagccgacgcgcaaaggcauggccaaggggaaacccaggcguucaagccaggcgccuacacgggccgcuccagcacccccuagaggaauggacaggaacggcgugccacccucugcccgcgggggaccguuaccucucgagauaauguccggcggugggacccaucgaccacccagaggaccucccaguacuagccugggcgcuucucggaggccacgcgcccguccucccuccgaacacaauaccgaguuucuuaacguaccagaucaggguauggcaggcaugcaaagaaagcggucagucgggcagaggccggugccuggagugggccgccccaaaccacagccccgaacacaugggccuagaugccgggcgcuguaccaguaugucggacaagacguugaugaguugaguuucaaugugaacgaaguaauugagauccucauggaagacccaagcggcugguggaaggguaggcugcacgggcaggagggacuauuucccggcaauuacguggaaaagauuuga

SEQ ID NO: 2374 - RNA, 3057 nt, Artificial Sequence
  CCDS34629.1 variant
auggaggacgaagagggccccgaauacgggaagccugauuucgugcugcucgaccaggucaccauggaggauuuuaugagaaaccuucaacugagguucgaaaaaggacggaucuauacauacauuggugagguuuuggugagcguaaauccauaucaggaguuaccgcuguacggccccgaagccauagcucgcuaucaggggcgagagcuauacgaacguccuccacaccucuaugcaguggccaacgcggcuuacaaggccaugaaacauagauccagggacacuugcaucgucauuucuggagagucaggcgcagguaagacggaggccaguaaacacaucaugcaguacauugcugcagugaccaaucccagccaacgggccgaaguugagcgcgugaaggauguccugcuuaaguccacaugugugcuggaagccuuugggaacgcuagaacuaauaggaaccauaauucuucgcgguucggaaaauauauggacaucaacuuugauuucaagggcgacccuauaggcgggcacauccauucauacuugcucgagaaaagccgcguacugaagcagcacguuggagaacgaaauuuucacgcguucuaucagcugcucagagguagugaggauaaacaguuacaugagcugcaccuugaaaggaacccagcaguguacaauuuuacccaucaaggcgccggguugaacaugacaguccacuccgcucuggacucugaugagcagagccaccaggccgugaccgaagcaaugcgggugauuggauucucccccgaggaagucgagucaguucaucguauccuagcugccauucuccaccugggcaauaucgaguuuguggaaacugaggaaggugggcuucagaaggagggacuggcgguagccgaagaggcauugguggaccaugucgcugagcucacagccaccccucgcgaucugguguuaagaagucugcucgcuaggacgguugccagcggcggccgggaacuuauagagaaggggcacacugcagccgaggcuucuuaugcgcgagacgcaugcgccaaagcuguguaccaacgccuguucgaaugggucgugaacagaauuaauuccguaauggagccaaggggacgggacccgcgcagagaugguaaggacaccguuaucggcguguuggauauuuauggguuugaagucuuccccgugaacucauucgagcaguuuuguaucaacuacugcaaugaaaaacuacagcaacuguucauccagcucauucugaagcaggagcaggaagaguacgagagggaaggaauaacauggcaaagcgucgaguauuuuaacaaugccacuaucguggaccuuguugaacguccucaucggggcauucuggcaguguuggaugaggccuguaguucugcugguaccaucacagaccgaauauuccuccagacccuggauaugcaccacagacaucacuuacauuacacguccaggcagcugugcccaacugacaaaacaauggaauuugggcgcgauuuccggauuaagcacuaugccggcgacguaaccuacagcgucgagggauuuaucgauaaaaacagagacuuccuauuucaggacuucaagaggcuccuguauaauucgacugaucccacacuucgcgcaauguggccugacggccaacaggauaucaccgaggugacgaagcgaccauugaccgcggggacacuguuuaaaaacucuaugguugcucucguggaaaaucuggccuccaaggagcccuucuacguccgguguauuaaaccgaacgaagacaagguggcaggaaaacuugaugagaaucacugccgucaucagguagccuaucuggguuugcucgaaaacgugagaguuaggcgcgcuggcuuugccucacggcagccuuacaguagauuccuguuaagguacaagaugacuugugaguauaccuggcccaaucaccuccuagggagcgacaaggcagcugucuccgcccuccuggagcaacauggacuucagggcgauguggcguucggucacucuaaauuguuuauccgaagcccacgcacacuggugacucucgaacagucacgggccagacugauuccuauaaucgucuuacugcuucagaaggcuuggagggggaccuuggcacguuggcgcugccggagacucagggccauuuacacaaucaugcgaugguuccggcgccauaaaguuagagcucaccuggccgagcuacaaaggcgguuucaggcagcgcgacagcccccacuguauggcagagaccucguguggccccugccuccagccgugcuucaaccguuccaggauaccugucacgcuuuguuuugccgcuggagggcccgucagcugguaaagaacauucccccuagugacaugccacagaucaaagcaaaggucgcugccaugggagcauuacaaggccuccggcaggauugggggugcagaagggccugggcucgcgacuaccuguccagcgcgacugauaaucccacggccucuucacuuuucgcacagcgacugaagacauugcaggacaaagacggauuuggugcugugcuguucaguagccauguuagaaaggugaaccgguuucacaaaauaaggaaucgcgcccugcuacugaccgaucaacaucucuauaagcuggacccugaucgucaguacagagucaugcgggccgugccacuugaagcuguuacuggcuuguccgugaccucugggggagaccagcugguagucuuacacgcaaggggccaggaugaccucguggugugucugcaucgcucgcgacccccgcuugauaacagagucggugagcugguuggggugcuagccgcgcacugccaaggcgagggacggacacucgaaguaagggugagcgacuguaucccucugucccaccgcggcgucagaagguugauuucaguggagccacggcccgaacagccugagcccgauuuccguugcgcucgcgggaguuuuacccuguuauggccaucucgauga

SEQ ID NO: 2375 - RNA, 3069 nt, Artificial Sequence
  CCDS53826.1 variant
auggagggcgcccugaccgcuagagacaagguggggguccaggauuucguucuccuugacgcauacacaagcgaauccgccuuuguggauaaccugaggaaacgguucucugagaauuugaucuauacuuacauuggaacguuacugguaucagugaaccccuaucaagaacuagguauauacaccgucagucagauggagcucuaucagggcgugaacuuuuucgaacugccuccacacguuuacgcgaucgcugacaaugccuaucgcaugaugugcgcagagcuuaauaaccauuuuauucugaucagcggggaguccggagccggcaagacagaggcuucuaaaaagauuuuggaguacuucgcagugacuuguccgaugacccagucgcuccaaaucgcccgagaucgucugcuguuuucaaaucccguccucgaggcuuucgguaacgccagaacauuaaggaaugacaacagcagucgguuugggaaauacauggauauacaguucgacuuucagggaaucccugugggcggccacauuaucuccuaucugauugagaagucucgcguaguuuaccagaaugagggggaaagaaacuuccauaucuuuuaucaacuuuuggcgggaggugaggaagagaggcugagcuaccuaggccucgaacgggauccacagcuguauaaguaccuuucccaggggcacugcgcaaaagagucaaguauaagcgacaagaaugauuggaaaaccgugucuaacgccuucuccgucauugacuucacugaggcugaucuggaaaauuuguuuggaaucauugccucagugcuccaucugggcaacaucgguuucgaggaagacgaccaggggugugcaacaauccccgauacccacgagauuaaguggauagcuaaauuacugggagugcacccuagcguccuccuugaagcccugacgcaucgcaagaucgaggcgaagacugaggaaguuauuugcccauugacccuagagcugaguguguaugcccgagacgcaauggcuaaagccguauacggcagaacauuuacuuggcucgugaacaagaucaauucuucccuggucaacaaagauuucaccaggaagacagugauaggccuucuggacauuuacggguuugaaguuuucgauaaaaauggauuugagcaauucuguaucaacuauugcaaugaaaaguugcagcagcuccugaucgagcggaccuuaaaagcugagcaagccgaauacgagauggaagguauugagugggagcccaucaaguauuuuaacaauaagauuauaugugaccugguggaagaacgucacaaaggcaucauuagcauccuagaugaagagugcauccgcccugggccagcaacggaccucucguuccuggaaaaacuugaggagaaagucggaaagcaugcccacuuugaaacuagaaaauuggcuggcccgaaggguaggaagcggauuggguggauggaguuccgacugcuccacuacgcgggcgaagugacauauuguaccaaaggauuucuggagaagaacaaugaucuucuguaccgccauuugaaagaaguacucugcaagucuaaaaacauaauccugagagaguguuucuuacuggcagagcuagaaaauaggcggcgacccccuacuguuggcacacaguucaagaacucccucucaagucugcuugagaccuugauuagcaaggaaccauccuauaucagaugcauuaaacccaaugacaggaaggagccuucuaaauuugaugacuuccugauccgucaccagauaaaguaccucgggcugauggaacauuuacgggugcgcagagccggauuugcuuacaggcgcaaauaugagcacuuccugcagcgguacaagagccuuugcccagacacguggccccauuggcacgguccgccugccgagggcgucgaaagauugaucaaguauauuggguacaaacccgaggaauauaagcucggaaaaaccaagaucuuuauuagguucccacgcacacuguuugcaacugaggaugccuucgaguuuucaaaacaccagcuaguggcucgaauccaagccaccuacaagcggugucugggccguagagaauaugucaaaaagaggcaggcagcgauaaagcucgaggcucauuggcgcggugcccuggcacggaaagccauucagagaaggaagugggcugugcgaaucauucgcaaauucaucaagggguuuauaagucggaacaaaccucuuugccccgacaaugaagaguucaucguuuuugugagaaagaacuacauuuugaaccugagguaccacuuaccaaagacaguacucgauaaauccuggcugcgucccccuggcauccuugaaaaugccagcgaccuguugcgcaagauguguguccggaaccucgugcaaaaauauugcagaggaauuacugcagagaggaaggcuaugaugcagcagaaaguugugaccucugagaucuuccgaggccggaaggauggguacacagaaucacugaaucagccauucgucaacagucgcauagacgagggagauauuaauccgaaggugcuacaacugaucagccaugaaaagauccaguaugguguacccgugauuaaguacgacagaaaaggcuuuaaggccaggcagcggcagcucauccugacccaaaaagcggccuauguugucgagcuugcuaagauuaagcagaaaauagaauacuccgcauugaagggggugucuacuucgaaccugagcgauggaaucuuagugauucacgucuccccugaggacucaaaacagaagggcgaugccguucuccaauguggucacguguucgaggcugugacgaaacugguaaugcuugucaagaaagaaaauaucgugaacguugugcaggggagucugcaguuuuucauuucuccaggcaaggagggaacaaucgucuuugacaccggccuagaagaacagguguauaagaauaaaaacgggcaacucacuguugugagcguacgaagaaaguccuga

SEQ ID NO: 2376 - RNA, 2379 nt, Artificial Sequence
  BAC84969 variant
augaucaccgugaaccccgacggcaagauuauggucagaaggugccugguuacacuccggccuuuccgccuuuuugugcuggggauaggauucuuuacuuuguguuucuuaaugacgagccuggguggccaguuuuccgcccgacgucuaggggauucuccauucaccaucagaacagagguaaugggaggcccggaaucaaggggugugcuccggaaaaugagugaccugcuugagcugauggucaagcgcauggaugcuuuggcaagacucgaaaauagcuccgagcugcacagggccgggggagaccugcauuuucccgcggaucggaugccuccaggcgcuggccucauggaacgcauucaagccaucgcacagaacgugucugacauugccguuaaaguggaucagaucuuacgacacucgcugcuuuugcauucaaaggucagcgaggggagaagggaccagugcgaggcucccagugauccuaaauucccagacuguuccggaaagguggaauggaugcgggcacguuggacuucugaucccugcuacgccuuuuucgguguagacggcaccgaguguagcuuucugauauaucuauccgaaguugagugguucugcccuccacucccguggcgcaaucaaacagcugcccagagagcgcccaagccucugccaaaagugcaggcagucuuuaggucaaaccuuagucaccuguuggaucucauggggagcggaaaggagucucugaucuucaugaaaaagcggaccaaacgauuaacugcccagugggcucuggccgcacaacgccucgcucagaagcugggcgccacacagagagaccagaagcaaauucuggugcauaucgguuucuugaccgaagaguccggggacguguuuucacccaggguccuaaaaggaggcccucugggcgaaaugguucagugggcggauauucucacggcccuguacgugcuugggcacggacugcggguaacugugagcuugaaggagcuccagaguaaucugggugucccacccggccgcgggucuuguccguuaaccaugccucugcccuucgaccuaaucuauacagauuaccacggacuccaacagaugaaaagacauaugggccuguccuuuaagaaauauaggugccguauacgggugauugacacuuucgguaccgaaccagcauacaaccacgaggaguaugcuacacuucauggguaccgaaccaauuggggcuacuggaacuugaauccuaagcaguuuaugacgauguucccccacacuccagauaacagcuuuaugggauucguuucggaggaacugaaugaaacagagaaaagacucaucaagggcgggaaggccucuaacauggcuguggucuauggaaaagaagccuccauuuggaagcugcaggguaaagagaaguuucuuggcauccugaauaaauacauggagauccacgggaccguguauuacgaaucacaaaggcccccugagguaccagcauucguuaagaaccauggauugcucccgcagcccgaauuucagcagcuguuacgcaaggccaaacuguucauuggcuuugguuucccuuaugaggggccagcuccccuagaagcgauagcaaauggcuguaucuuccuccaaagucgguuuagcccuccacacuccucucugaaccaugaguucuuuagaggaaagcccacuagcagggagguguucucacagcacccguacgccgaaaacuuuauuggcaaaccucaugucuggacaguggacuauaauaacagugaggaauuugaggcugccaucaaggcaauaaugcgcacccaggucgauccauaccuucccuacgaguauacgugcgaagggauguuggagcggauucacgccuacauccagcaccaagacuuuugucgagcuccugaucccgcccugccagaagcacaugcgccucagucccccuucgugcucgcuccaaaugccacccaccuggagugggcacguaacacaagccuggccccgggagcuuggccucccgcccaugcacugagagcuuggcuugccguuccagguagggcgugcacugauaccugcuuggaccacggccucaucugugaacccucuuucuucccuuuucuuaauucacaggacgccuuccuaaaauuacaggugccaugcgacaguacagagagcgagaugaaccaccucuaucccgcuuuugcacaaccugggcaggaauguuaccugcagaaggagccgcuuuuguucuccugcgccggaucuaauacuaaguaucgccggcuguguccaugcagagauuucaggaaaggccaaguagcuuuaugucaggguugccucuga

SEQ ID NO: 2377 - RNA, 36 nt, Artificial Sequence
  AF164963.1 variant
augacccagggccaacacuuccugcagaagguguga

SEQ ID NO: 2378 - RNA, 2211 nt, Artificial Sequence
  AAI11702 variant
augaaggagaugagcgccaacaccgugcuggacucccagagacaacagaaacacuacggcaucacaucucccauuucacucgcuaguccuaaggaaauagaucauaucuauacucagaaacuuauugacgcaaugaagccauucggggucuuugaggaugaagaggaacugaaucacagguugguuguguuaggaaaacugaacaaucuaguaaaggaguggaucagcgacguguccgagucuaagaaccucccgcccucggucguggccacgguugguggcaaaauuuucaccuuugggucauaccggcugggagugcauacaaagggcgcggauaucgacgcucuuugcgucgccccucgccacguggaacgaagcgauuucuuucagaguuucuuugagaaacugaagcaucaagacgguauacguaauuugagagcaguagaagaugccuucguuccagugaucaaauuugaguucgacgggauugagaucgaucucgucuuugcuaggcuggcaauucagacuaucuccgacaaccuggaucuccgggacgacucucgcuuaagaagccuggauauaagguguauucggucccuuaauggaugccgcgugaccgacgaaaucuugcaccuggugcccaacaaggagacauuccgacuaacccucagagccgucaagcugugggcuaaaaggcggggcauuuauucaaauaugcuuggcuuucugggagggguuaguugggccauguugguggcgcguacuugucagcucuacccuaacgcagccgcuagcacacugguacacaaguucuucuuaguguuuucuaaaugggaauggccaaaucccguccugcucaagcagccugaggaauccaaccuuaaucugccagugugggauccgcgcguuaaccccucagacagauaucauuugaugccuaucaucaccccagccuacccccaacagaauagcacguauaacgugaguacuucuaccaggacagucaugguggaggaguucaaacagggucuagcaguaacugaugaaauucugcagggcaaguccgacuggagcaaacuccuggagccuccaaacuuuuuccaaaaguaccggcacuacauaguucuuaccgcuucggccucuacagaagagaaucaucuggaaugggugggguuggucgaguccaagauccgagugcucgucggaaaccuggagcgcaaugaauuuauuaccuuagcgcacgugaacccccagucauucccgggcaauaaagagcaccauaaggauaacaauuauguuaguaugugguuucuggguaucauauucagaaggguggaaaacgccgagagcguaaauauugaccuaacguacgauauccaguccuuuacugacacagucuaucggcaagcaaacaauaucaacaugcucaaagaagggaugaagauugaggcuacccacgugaaaaagaagcagcugcaucacuaccuuccugccgagaucuugcagaaaaagaaaaagcagucucugagcgauguuaaucgcucaaguggaggccuccaauccaaaagacugagccuugacucuucaugccuggacaguagcagggauacugacaacggcacacccuucaauuccccagcuucuaagucggauagcccuuccgugggggaaaccgagcguaacucagccgaacccgcagccgucauuguggagaagccauugaguguacccccugcucagggacucucuauaccagugaucggugcgaaaguugacagcacggucaagaccguguccccgcccacaguguguacuauuccuaccgucguuggccggaacgugaucccacgaaucacaacuccccauaauccugcacaggggcagccacaccugaacggaaugucaaauauuaccaaaacagugacccccaagagaagccacucuccguccauagauggcacuccuaaaagguuaaaggacguagagaaguuuauccgccuggaaaguacguucaaagauccacggacagccgaggaaagaaagaggaaaagcgucgacgcuauugguggggagucuaugcccaucccuaccauugauacuucccgcaagaaacgacuacccucaaaggaacucccagacaguagcucgccugugcccgccaacaauauccggguuaucaaaaacuccauacgucugacccuuaauagauga

SEQ ID NO: 2379 - RNA, 1377 nt, Artificial Sequence
  AAG28389 variant
augagcaccgagggcggguucggagguacauccucuucagacgcccagcaaagucugcagagcuuuuggcccagagugauggaagagaucaggaaccucacugucaaggauuuccggguucaggaacuuccucuggcucgcauuaaaaagauaaugaaauuggacgaggaugugaagaugaucuccgcagaagccccaguauuauuugcgaaagcugcccagauuuucaucacggagcugacccuacgagcauggauucacacagaggacaauaagcguagaacucuccaaaggaacgauaucgccauggcuauaaccaaguuugaccaguucgauuuucugaucgacauugugccgcgggaugaacuuaaacccccuaagcgccaggaggaagucagacagucugugacaccagcagagcccguucaauacuauuucacccuggcccagcagccuacugcugugcagguccaaggccagcagcaagggcagcagacaaccucgucaacgacuaccauccagccaggacaaauuaucauagcccagccccagcagggccaaacaacuccugugaccaugcagguaggugaggggcagcagguucaaauugugcaggcgcagccacagggacaagcacagcaggcccaaagcggcacaggccagaccaugcaggucaugcagcaaaucauuacgaauacuggggaaauccagcagaucccggugcaguugaacgcuggacaacuccaguacauuaggcuggcccagcccgugagugguacacaggucguucaaggccagauacagacccuggcaacuaaugcucaacaggggcagcggaacgccucccagggaaaaccucgccgaugccucaaggagacauuacaaaucacccagacggaagugcagcagggccaacagcaguuuucucaguucaccgacggucaaagaaauagcguacagcaggcgaggguguccgagcugacaggggaagccgagccacgggaggucaaagcaacuggaaacucaacccccuguacaaguagccuuccuacuacccauccacccucucaccgugcuggcgccuccugcguguguugcucacagccgcaacagagcaguacaucuccucccccauccgaugcuuugcaguggguuguggucgaagugagcggcaccccuaaucaacuggagacucaucgcgaacuacacgcaccccucccagggaugacgucgcugucuccccuucauccuucccagcagcuguaucagauucaacagguaacaaugccagccggacaggacuuggcccagccgauguuuauccaaucagcuaaccagcccagugauggucaggcgccucagguuaccggcgacuga

SEQ ID NO: 2380 - RNA, 2802 nt, Artificial Sequence
  CCDS33423.1 variant
augagaauggccgcuaccgcaugggccggccugcaggggcccccucucccaacacuuugcccggcggugaggacuggacuguacugucgggaccaagcucacgccgagcgcugggcaaugacgagcgaaaccuccucugguucacauugcgcccgaagucguauguugagaaggcgggcucaggaggaagauagcacagucuuaaucgacguuucacccccugaggcagaaaagcgcggcucuuaugggucgacugcccacgcuucagagccaggaggccagcaggccgcggcauguagagccgguagccccgcuaaaccuaggauugccgauuucgugcugguaugggaggaagaccuaaagcucgaucggcaacaggacagugcagcucgcgaucgaaccgacaugcauagaacauggagggagaccuuucuggauaaccuucgggccgcggggcugugcguggaccagcaggauguccaagacggaaauacuacagugcacuacgccuugcucuccgcaucuugggcuguucuguguuauuacgccgaagaucugcgucucaaauuaccacugcaggagcuucccaaccaggcuagcaauugguccgccggcuugcuggcauggcuaggcauaccuaacgugcuccuggaggucgugccagacguaccgcccgaauauuacucaugccgcuucagaguuaauaaacuuccuagguuucuggggagugacaaccaggauaccuucuuuacgagcacuaagcggcaucaaaucuuguucgagauucucgccaagaccccauauggacacgaaaagaaaaaucuguuagguauccaccagcugcucgcugagggcgugcuuucugcggcauuuccccugcaugacgggccuuucaagacaccacccgaaggaccgcaggccccucgauugaaccaacgccagguccuauuucagcacugggcuagauggggcaaauggaauaaguaccagccccuggaucaugugaggcgguacuucggugagaaaguggcccucuauuuugcauggcugggguucuacacuggauggcuucugccagccgcugucguuggcaccuugguguuucucguaggcuguuuccugguguucuccgacauuccuacacaagaguuaugcgggucaaaggauagcuuugaaauguguccccugugccuagacuguccauucuggcuccugaguucugccugcgcacuugcgcaggcuggacgcuuguuugaucacgguggcaccgucuucuuuucccuguucauggcccucugggcagugcugcuucuggaguauuggaagagaaaaagcgccacguuggcuuacaggugggacugcucggauuaugaagacacugaggaacguccccggccucaguuugccgcaucugcuccaaugacagccccgaaccccaucaccggggaggaugagccuuacuucccagaacgauccagagcgaggcgcaugcucgccggaucaguugugauagucgugaugguagcuguuguggucaugugucuggugaguaucauuuuauaucgggcaaucauggccauugucgugagcagauccggcaauacucugcuagcugccugggcaucuaggaucgcgagccucacagguucaguugugaaccugguauuuauacuuauuuugaguaagaucuacgucucccuggcccacgugcucacccgcugggagaugcaucgaacgcagaccaaauucgaagacgcuuuuacacugaagguuuucauuuuucaauucgugaauuucuacagcucucccgucuauaucgccuuuuucaaagggcgguuugugggcuacccuggaaacuaucacacuuuauucggcguacguaaugaggaaugcgcagcugggggaugucugaucgagcuugcccaggaguugcucgugauuaugguugguaagcaggucauaaacaacaugcaggaagugcugaucccaaaacuaaagggcugguggcaaaaguuuagacugagguccaaaaagcgcaaagcaggggccagugcuggagcgagccagggccccugggaggacgauuacgaacucgugccgugcgagggucuguucgacgaguaucuugaaauggucuugcaguuuggguucguuaccauuuuuguggccgcauguccucuggcuccauuauucgcccuccugaauaacuggguggagauccggcuugaugccagaaaguuuguaugcgaauacaggcgacccgucgcugagcgcgcacaggacauaggcauuugguuccauauccuggccggauugacacaccucgcggugaucuccaaugcuuuucugcuagccuucucuucggauuuccugccucgggcauauuacagauggacuagggcccaugaccuccguggcuuucugaacuucacccuugcucgcgcacccagcuccuuugccgcggcucacaaucggacauguagauacagggccuuccgagaugacgaugggcacuauucacaaaccuacuggaacuugcuggcaauucgguuagccuuuguuaucguguucgaacaugucguguuuaguguuggacgccuccuggaccuucuggugccagauauuccugagucuguagagauaaaagucaagagagaauauuaccuagcuaagcaggcccucgcagagaaugaagugcuguucgguacuaacggcacgaaagacgagcagcccgaagggagcgaguuguccucacacuggacaccauuuaccgugccgaaggcuagccaacugcagcaguga

SEQ ID NO: 2381 - RNA, 885 nt, Artificial Sequence
  AAA36380 variant
auggaggacagcauggauauggacaugucuccccugagaccucagaacuaccucuucggcugcgaacuuaaggccgauaaagacuaucacuuuaagguggauaaugacgagaacgaacaucaacuguccuugaggaccgucucauuaggggcuggagcaaaagaugagcugcacaucguugaagccgaggcgaugaauuacgaggguaguccaauuaaggugacacuagcuacucucaaaaugagcguacagccgacggugucccugggcggguucgaaauaacacccccugucgugcuucggcugaaguguggaucuggcccaguucauaucucgggucagcacuugguggccgucgaggaagacgcagagucagaggaugaagaggaagaggacgugaagcuccugagcauuagugggaaacgcuccgcccccggaggcggcucuaagguaccucagaaaaagguuaaacuggcugcagaugaagacgaugacgacgaugacgaggaggaugacgaugaagacgaugacgaugacgauuuugacgacgaggaagccgaggaaaaggcuccagugaagaaaagcauccgagauacccccgccaagaacgcgcaaaaauccaaucagaacgggaaggacucaaaaccuaguagcacuccacguucuaagggacaggaguccuucaaaaagcaggagaagaccccgaaaacacccaaggguccuucaagcgucgaagauauuaaagcaaagaugcaagccaguaucgagaaaggcgggucucucccaaagguggaagcuaaguuuauaaauuaugugaaaaacugcuucagaaugaccgaccaggaggccauccaggauuuauggcaguggaggaagucccuguga

SEQ ID NO: 2382 - RNA, 3915 nt, Artificial Sequence
  CCDS47686.1 variant
augcagcugaagaucaugcccaaaaagaaaagacucagcgccggcagggugccucuuauucuguucuugugccaaaugauauccgcuuuagaggucccacuggacccgaagcuacucgaagaucugguucagcccccuaccaucacacagcagucuccaaaagacuacauuaucgauccccgggagaauauugugauccaaugugaagcaaaggggaagccuccacccucauuuaguuggacucgcaauggaacgcacuucgacauagauaaagacccucuuguaaccaugaagccagguacaggcacucugaucauuaacaucaugagcgaggggaaagccgaaaccuaugagggaguguaccagugcacagcgcgaaaugagcguggcgcugccgucuccaacaauauugugguuagaccgucuaggucgcccuuguggaccaaggaaaaacucgagccuaucacucugcagucaggucagagccuggugcucccaugucggcccccuauaggguuaccacccccgauuaucuuuuggauggauaacaguuuccaacgccugccucaguccgaaagagucucucagggacuuaauggcgacuuguauuuuagcaacgugcugcccgaggauacaagggaggacuacauuugcuaugcacgguucaaucauacccagacgauccaacagaagcagccaaucuccguaaagguuauuucaguggaugaacuaaacgacacuauagccgcuaaucucagugauaccgaguuuuacggcgcaaaaagcucucgcgaacgaccucccacauuccugacuccagaggggaacgccuccaauaaggaggaacuuagaggaaacguccugucauuggaguguaucgcugaaggucuccccaccccuauuaucuauugggccaaagaggacggcaugcugccaaagaauaggacaguguacaaaaacuuugaaaagaccuuacaaauaauucacgugagcgaggcggacagugggaacuaccagugcaucgcuaaaaaugcccugggagcuauccaucacacgauuucuguccggguuaaggccgcaccguauuggaucacugcuccccagaaccucgugcuuuccccuggcgaagaugguacacugauuugucgugccaaugggaacccaaagccccgcauaagcugguugaccaauggaguaccuaucgagauugcgccagacgaucccucgagaaaaaucgacggcgauacuaucauuuucucuaacgugcaggagagguccucagccgucuaccaaugcaaugcaaguaacgaauauggcuaccuacuggcuaaugccuuugugaacguucucgcugagccgccucggauacugacaccagccaauacccuuuaucaggugaucgcaaaccgacccgcccuguuggacugugcuuucuuugggagcccucuccccacgauugaaugguucaagggagcgaaagguuccgcacugcaugaggauaucuacgucuuacacgaaaauggcacccuggagauuccaguggcccagaaggacucuacagggacuuauaccugcguagcucgcaacaaacuaggaauggccaagaaugagguucaccucgaaaucaaggauccuacauggauagugaaacagcccgaguacgcagucgugcaaagaggcagcauggucucauucgaauguaaggugaaacaugaccacacucugagucuuaccguuuuguggcugaaggauaacagggagcucccauccgacgagcgguuuacaguggacaaagaucaucugguagucgccgacgugagcgaugacgauucugguaccuacacuugcguugcuaacacgacacuugacucagugagugccagcgcaguccuguccgugguagcgccgaccccuacucccgcuccaguguaugauguucccaauccuccauucgacuuggaacucaccgaucagcuggacaagucuguccaguuaucguggacacccggggaugacaacaauagcccuaucaccaaguuuauuaucgaguacgaagaugccaugcacaaaccgggccuguggcaccaucagacugagguguccggaacacaaacgaccgcacagcuaaagcucucaccauaugugaacuacaguuuccgcgucauggccguuaauucuauuggcaaaagccugcccuccgaagcaucagagcaguaucuuacuaaggccagcgagccugacaaaaacccaacagcaguggaaggguugggaucugagcccgacaaucuggugaucaccuggaagccucucaacgguuuugaauccaauggcccggggcugcaguacaagguaaguuggagacaaaaagauggagacgaugaguggacaagcgucgugguugcuaacgugucuaaguauauagucuccggcacucccaccuucgugccauacuuaauuaaaguucaggcccugaaugacauggguuuugcgccugaacccgccgugguaauggggcacucaggcgaggaucuuccaauggucgcuccuggaaacgugagggugaaugucguuaacaguacguuggcagaggugcauugggaccccguaccacucaagagcauccguggccaucugcagggguaccggauuuauuacuggaaaacccaaucguccucuaagcgaaauagaaggcacaucgaaaagaagauacuaacauuccagggaagcaagacucacgguaugcugccgggccucgagccuuuuucacacuauacccugaacgugcgcgucgugaacgggaaaggagaaggccccgccaguccagaucggguuuucaauacacccgagggugugccuuccgcuccaucuagccuuaagaucgucaaccccacuuuggacucccugaccuuagaaugggauccuccgucacauccaaaugggauucucacggaguacacacugaaauaucagcccaucaacagcacccacgagcuuggcccucugguggacuugaagauucccgccaauaaaacuagauggacacucaagaaccugaauuuuaguaccagguacaaguucuauuuuuacgcacagacuucugcgggauccggcagccaaaucaccgaagaggccguuacaacgguggaugaagcugggauacuaccaccugacgucggagccggcaaaguacaggcagugaacccccgcauuucgaaucugaccgcugccgcagccgagacuuacgcuaacaucucaugggaguaugaagguccagagcauguuaauuucuacguggaauauggggucgcgggaucuaaggaggaauggcgaaaagagaucgugaacggcagucgguccuucuuuggucucaagggccugaugccugggacagccuacaaaguacgugugggagcagucggcgauagcggguucguuucuagcgaggacguguuugaaaccggaccggcuauggccuccagacagguggacauugccacacagggcugguucaucggucuuaugugcgcugucgcauugcugauuuuaauacuccugaucguguguuuuauuaggcgcaauaaagggggaaaguaucccguuaaagagaaggaagaugcccacgcggacccagagauccaaccuaugaaagaagaugacggcacuuucggugaguacucagaugcugaggaccacaagccccuuaaaaagggcagucggaccccaagcgauagaacgguaaagaaagaagacucugaugacucccugguggauuauggggagggagucaacggccaguuuaaugaagacgggucauucauuggacaguacaguggcaagaaagagaaggaaccugccgaggguaacgagagcuccgaagcacccucuccggugaacgccaugaacucguuuguuuga

SEQ ID NO: 2383 - RNA, 1305 nt, Artificial Sequence
  AAB51320 variant
augagcaucgagaagauuugggccagagaaauacuggacuccaggggcaaccccaccguggaggucgaucucuacacagcuaaagggcuuuuccgggcagccguuccuucuggagcgucaacugguaucuaugaagcucuggaguugcgcgacggcgauaagcagcgauacuuagggaaaggagugcugaaggccguagaccacauuaauaguacgaucgcaccagcccuaauuagcuccggccucucuguggucgaacaagagaaacuggauaaccuuaugcuggaguuggacgguaccgaaaauaagucgaaguuuggggcuaacgcaauccucggagugucacuggccguuugcaaagcuggcgccgcggagcgugaacugccgcucuauagacauauagcacaguuagccggcaauagcgaucugauccuucccgugccugcuuucaacgucauuaaugggggaagucacgccgguaacaaguuggcaaugcaggaguuuaugauccugccagugggcgcugaguccuucagggacgccaugcggcuaggggcggaaguauaccauacacucaaaggaguuauuaaggauaaauauggcaaggacgccacuaaugugggugaugaagggggauuugcacccaacauccuggaaaauucugaggcucuugaacuggucaaggaggccauagacaaagcuggcuacaccgagaagauugugaucggcauggauguggccgcaagcgaguucuaucgcgacgggaaauacgacuuggauuuuaaguccccuacagacccaucaagauacauuaccggagaucagcucggugcccuguaucaagacuucgucagggauuaccccguugugaguaucgaggacccuuuugaucaggacgauugggcugcguggagcaaauucacugcaaacguaggcauccagauugugggggacgauuuaacagucaccaauccaaagcggauagaacgcgccguggaggaaaaggcuuguaacugccugcuccuuaaaguuaaucagaucggaucugugacggaggccauucaagcauguaagcuggcccaggagaacggcuggggugucauggugucccaccgaucaggggaaacugaggacaccuuuaucgcugacuugguaguuggccuaugcacaggacagauaaaaacuggcgccccguguagaagcgaaaggcuggcaaaguauaaccagcucaugcggauugaggaggaacugggggaugaggcgcguuucgcuggacauaauuuucgcaaccccagugugcuuuga

SEQ ID NO: 2384 - RNA, 1395 nt, Artificial Sequence
  AAH08489 variant
auggagacccugagcuuccccagauacaacguggccgaaaucgucauucacauaaggaauaagauccucacaggcgcugacgggaaaaaccuuacuaagaaugaucuguauccuaacccaaaaccggagguuuugcauaugauuuacaugcgggcauuacagaucguguaugguauucgccuggaacacuuuuacaugaugcccguaaauuccgaggugauguauccucaucuaauggaaggauuccucccauuuucuaaccuggucacgcaccuugacucauuccugcccaucugccgagugaaugauuuugagaccgccgacauauuguguccuaaggcgaaacguacaaguagauuccucagcggcaucauuaacuuuauccauuucagggaggcuugccgggaaacuuacauggaguuucuguggcaauauaaguccucugccgauaagaugcagcagcugaaugcagcccaccaggaagcucucaugaaauuagagcgccuggacucgguuccaguggaggaacaagaggaguucaagcagcuuucagaugggauucaggaguugcagcaaagccugaaccaggacuuucaccagaaaaccaucguccuacaggaaggaaauagucaaaagaaauccaacauaucugagaagacaaagagacucaaugagcugaaacuuagcgugguaucccugaaggaaauucaggagucauugaaaaccaagaucguugauagucccgaaaaacucaagaacuacaaagagaagaugaaggacacugugcagaaacugaagaaugcaaggcaagaagucguggagaaauacgagauuuauggcgauagcguggacuguuuaccuucuugccagcuggaaguccagcucuaccagaagaaaauccaagaucuuuccgacaaccgggagaagcuggccucaaucuugaaggaaagccuaaaccuggaggaccagauugaaagugaugagucugagcucaaaaagcugaaaacagaagaaaauuccuucaagcgccuuaugauaguuaaaaaggaaaagcuggcuaccgcccaguuuaaaaucaacaagaaacaugaggacgugaagcaguauaaacgaacgguaauugaggauuguaauaaggugcaagaaaagagaggugcggucuacgagagggugacuaccaucaaccaggaaauacagaaaauuaaguuggggauccagcaacucaaagacgcagccgagcgggaaaagcugaaaagccaggagaucuucuuaaaucugaagacagcucuagagaaauaucacgauggaauugaaaaggccgcagaggacucguacgcuaagaucgaugagaaaacugccgaacucaagcguaaaauguucaagaugucuaccuga

SEQ ID NO: 2385 - RNA, 543 nt, Artificial Sequence
  AAB49693 variant
augcaggccgagggcagagggaccggagguagcacaggcgacgcugaugggcccggaggcccugguaucccagacgggccgggaggcaacgcaggcgggcccggagaagccggugcgacuggcgggaggggaccucggggcgcuggugccgcacgcgccuccgggccaggaggcggcgcuccccgagggccucacggaggugcagccucuggccugaaugggugcugucguugcggagcuagaggcccagagucaaggcuccuugaguucuaccuggccaugcccuuugcgacgccuauggaagcagaauuggcccggcgcaguuuagcucaagaugccccaccgcugcccgugccugguguccuacucaaggaguucaccguuagcgggaacauucugacaauaagacuuacugcagcugaccauaggcagcugcaguuguccaucucuucgugucuccagcaacugucacugcucauguggauuacccagugcuuuuuaccaguguuccuggcccagcccccuagcggccagcggcgcuga

SEQ ID NO: 2386 - RNA, 1215 nt, Artificial Sequence
  CCDS14134.2 variant
auggccagccccagacugggcaccuucugcuguccuacaagggacgcugcaacucagcucgugcuuuccuuucaaccacgggccuuccacgcgcugugcuuggggucuggagguuuacgccuggcucuaggccuccugcagcuucugccggggcgacgucccgccggaccuggcucaccagcaacgagucccccugccagcgucagaaucuugagggcugcagccgcuugugaucuccuggguugccuggggaugguuauucgguccaccguguggcucggauuuccaaacuucguagacucugugucggauaugaaucauacagagauauggcccgccgcguuuugugucggcucagcaauguggauccaguuacuguacagcgccugcuucuggugguuguuuuguuaugcuguggacgccuaccuuguuauucgcagaagugcaggccuguccacuauccuacucuaucacauuauggcuugggggcuggccacccuucugugcguggaaggagcggccauguuguacuauccuucugucuccaggugugagcggggucucgaucaugcaaucccacacuacgugacaauguaucugccguuacugcucguacuuguugcuaaccccauacuguuccagaagaccgugacugccgucgcuagcuugcuaaaaggccgccaagggaucuacacagaaaaugagcgaagaaugggagccgugauuaagaucagguuuuucaaaauuaugcuggugcucaucauaugcuggcugucaaacauuaucaaugaaagucuucuguuuuacuuggagaugcagaccgacauuaacggcgguagccucaagccuguccggacggcagccaaaacuaccugguucaucauggggauccugaauccagcucagggauuuuuacugucucuagcguucuauggcuggacaggcuguucccucggguuccagucaccccguaaggagauucaaugggaaagccugacuaccagugcagccgagggagcucauccuucuccacuuaugccccacgaaaacccggccuccgguaagguuagccaggugggcgggcagacaucggaugaggcauugucuaugcuguccgagggaucagacgccaguaccauagaaauccacacggcuagcgaguccugcaauaaaaacgaaggcgauccugcccuccccacucauggugaccuguga

SEQ ID NO: 2387 - RNA, 3141 nt, Artificial Sequence
  AAH38180 variant
auggccagcuccgugggcaacgucgcugacucuaccgagcccacaaagagaaugcugucauuccaggggcucgcagaacuugcccacagggaguaccaagcgggagauuuugaagcugccgagcggcauugcaugcagcuguggcgccaggaaccugacaauacugguguuuuguuacugcuaaguagcauccacuuccagugucgacgucucgauagauccgcacauuuuucuacgcuggccauuaaacaaaacccacuucuggcugaggcauauucgaauuugggcaacguguacaaggagagggggcagcuccaggaagccauagagcacuaucggcaugcucugcgccugaaaccggacuucaucgauggauacauuaaucucgccgcggcauuaguagccgcuggcgacauggaaggugccgugcaggcauaugucucagcucugcaauacaaccccgaucuuuauugcgugagaagcgacuuggggaaucugcuaaaggcccucggaaggcuggaggaggcgaaagccuguuaccuuaaggcaaucgaaacccagccuaacuuugcuguugccuggaguaaucugggcugcguguucaacgcucagggcgagauuugguuggccauccaccacuuugaaaaggcagucacacucgauccaaauuuccuggacgccuacauaaacuuagggaaugugcugaaagaggcucggaucuuugaucgcgcgguagcagccuaucuccgagcucuuucccugucucccaaccaugccguugugcacggaaauuuggcaugugucuacuaugaacagggucuaauugaccuggccaucgauacuuacagaagggcuauugagcuccaaccucauuucccagacgccuauugcaaccuggcaaacgcgcuuaaggagaaaggcagcguggcugaagccgaggacuguuacaauaccgcacugcgguugugccccacacacgccgauucccucaacaaucuggcuaacaucaagcgugaacaggggaauauagaggaagccgugcgcuuauauagaaaagcacuggaggucuuuccugaguucgcugccgcgcacucaaaccuagccaguguucuccagcaacagggaaagcugcaggaagcucuuaugcauuacaaggaggcaauuaggaucagcccaaccuuugccgacgcuuacucuaauaugggcaacacuuugaaagaaaugcaggaugugcaaggugcccugcaguguuauacacgggcaauucagaucaauccggcguucgccgacgcucacuccaaccucgccucaauccauaaggauagcgggaauauucccgaggcaauagcuaguuaccgaaccgcccugaaacuuaagccugacuucccagaugcauauugcaaccuggcccacuguuugcagaucguaugcgacuggacggauuacgacgaacgcaugaaaaagcucgugucuauugucgcugaucaacuggagaaaaauagauuacccuccgugcauccucaccacagcaugcuguauccacuaucgcauggauuuaggaaggcgaucgccgagcggcacggcaaccucugccuggacaagauaaauguucuucauaaacccccguacgaacacccuaaggacuugaaacugucugauggccgccucagagugggguaugucuccucagacuucggaaaccaccccaccagucaucugaugcagagcauuccagguaugcacaacccugauaaguuugagguguucuguuacgcauuaucccccgacgauggcacuaauuuuaggguaaaaguuauggcugaagccaaccauuucaucgaccugucucagaucccaugcaaugggaaggccgcugaucguauucaccaggacggaauccauauucuugugaacaugaauggcuacacaaagggugcacggaacgaguuguuugcccuccgacccgcgccuauacaagcuauguggcugggguauccaggcacuagcggagcccuauucauggauuacaucauuaccgaccaggagacaucaccggcagaagucgccgagcaguauagugaaaaacuggcuuacaugccccacaccuuuuucaucggcgaucacgcaaauauguuuccucaucucaagaaaaaggccgugaucgacuucaaauccaacgggcacauuuaugauaauagaauaguccugaacggaaucgaccuuaaggcguuuuuggacagccugccagaugugaagauuguuaaaaugaagugucccgacgguggcgauaaugcugacucuucaaacacggccuuaaauaugccugugaucccaaugaacacuauugcagaggccguaaucgaaaugauaaauagggggcagauccaaauuacaaucaacggauucaguauuagcaacggccucgcuaccacucagaucaauaacaaagccgcaacaggugaggaggucccccgcaccauaauugugacgacccggucccaguacgggcugccggaagaugcuaucguuuauugcaauuucaaccaacuuuacaagauugacccuucuacacugcagaugugggccaauaucuugaaaagagugccaaacucgguccucuggcugcuaagguuucccgcggugggcgagccuaauauacagcaguacgcccaaaacaugggacugccccagaaucgcaucauuuucagcccaguagcaccuaaggaggaacaugugcgacggggccagcucgcugauguuugucuggacacuccccuuugcaacgggcacaccacaggaauggaugucuugugggccgguacuccaauggugaccaugccgggcgaaacacuggcuucccguguggcagccucacaguuaaccugucucgggugccuggagcuuaucgccaagaauagacaagaguaugaagacauugcugucaaacugggaacugaucuagaguaccucaagaaaguuaggggcaagguguggaaacagcgcaucaguucuccucuguuuaacacgaagcaguauacaauggaauuggagcggcuguacuuacagaugugggaacauuaugcggcagguaauaaacccgaccacaugauaaagccaguggagguaaccgagagcgccuga

SEQ ID NO: 2388 - RNA, 441 nt, Artificial Sequence
  BAG57972 variant
auggccgcugagacccugcucagcucccuucugggcuuguuacugcuagggcuccugcuucccgcaucucugacaggaggugugggcucauugaaccucgaggaacugagugaaaugagauacgggaucgagauucugccucucccagucaugggaggccagagccaauccucugacguugugauaguaucgucaaaguauaaacagagguacgaaugccgguuaccggugggugccauccacuuccagcgcgagcgagaggaagagacucccgcguaucaggggccuggcauuccagaacugcuuagccccaugcgugaugcuccuuguuugcugaagacgaaagacugguggaccuacgaguuuugcuauggaagacauauccaacaguaccacauggaggauagugaaauuaagggccuacaggccgcauccucuuga

SEQ ID NO: 2389 - RNA, 1221 nt, Artificial Sequence
  BAG65333 variant
auggccgcugagacccugcucagcucccuucugggcuuguuacugcuagggcuccugcuucccgcaucucugacaggaggugugggcucauugaaccucgaagaacugagugaaaugagauacgggaucgagauucugccucucccagucaugggaggccagagccaauccucugacguugugauaguaucgucaaaguauaaacagagguacgaaugccgguuaccggccggugcgauccacuuccagcgcgagcgagaggaagagacucccgcuuaucaggggccuggcauuccagaacugcuuagccccaugcgugaugccccuuguuugcugaagacgaaagacugguggaccuacgaguuuugcuauggaagacauauccaacaguaccacauggaggauagugcauccggcgccccaaaugacuuccagaacaaugugcaggucaaggugauuaggucucccgcugaucuaauccgguuuauagaggagcucaaagggggaacaaagaaggguaaaccuaacaucggccaagaacagccaguugacgaugcagccgaggugccgcagcgcgaacccgagaaggagagaggggacccugaaaggcagcgggagauggaagaggaagaggaugaggacgaagaugaggacgaagaugaggacgaacgccaacugcuuggagaguucgagaaagaacuggagggcauuuugcucccaagcgaccgagauagacugagguccgaagucaaggcugguauggagcgggaguuagaaaauaucauucaggagacugaaaaagagcuggaccccgaugggcucaagaaggaaucagagcgugaccgcgccaugcuugcgcugaccaguacauugaacaaacuaaucaagagacuggaggaaaaacagagcccugagcucgugaagaaacauaagaaaaagaggguaguuccaaagaaacccccgccuucuccccaaccaaccggaaagauagaaauuaaaaucgugcggccuugggcagagggcacugaagagggcgcccgauggcugacagaugaggacacccgcaaucuuaaggaaaucuuuuucaacauucugguccccggggcugaggaagcccagaaagagagacagaggcagaaggaauuggaguccaauuaucggcgcguguggggaucaccagguggcgaggggacgggagaucucgacgaauuugauuucuga

SEQ ID NO: 2390 - RNA, 2223 nt, Artificial Sequence
  BAH13933 variant
auggccguggagacccugcucagcucccuucugggcuuguuacugcuagggcuccugcuucccgcuucucugacaggaggugucggcucauugaaccucgaagaacugagugaaaugagauacgggaucgagauucugccucucccaguuaugggaggccagagccaauccucugacgugguaauagugucgucaaaguauaaacagagguacgaaugccgguuaccggccggugcaauccacuuccagcgcgagcgagaggaagagacucccgcguaucaggggccuggcauuccagaacugcuuagccccaugcgugaugcuccuuguuugcugaagacgaaagacugguggaccuacgaguuuugcuauggaagacauauccaacaguaccacauggaggauagugaaauuaagggcgagguccuauaucucggguacuaccaguccgccuucgacugggaugacgaaacagcaaaagccucuaagcagcauaggcugaagcgguaucacagccaaacuuacggaaaugguuccaaaugugaucuuaacggccgcccaagagaggcugaagugagguuucugugcgacgagggggcaggaaucucaggcgauuauauagaccggguugaugagcccuugaguuguagcuacgugcucaccauccgcacaccucgacugugcccacauccguuacugagacccccuccaucugccgcuccccaggccauucucugucacccuucccuucagccagaagaguauauggcguacguccagaggcaagcagacucaaagcaguauggugauaaaaucauugaggagcugcaggacuuggggccccaaguguggagcgaaaccaagaguggaguagccccgcagaaaauggcuggccggacucuauuccaccuguuucgugagauccauuuccacuuuuucccuucucccgaccucacaguucugaccgauugguggggcgggggagguguggagaaguaccauggcccauccagccuuggggaccgcggaggcgaagguacgccuucguaccuguugcccucugucuccccacuccugucagaucagaguuuacccgugcugugcacucuaggggccagcccuaccaaggacgauuccaaagacucugauuuuuggaagaugcucaaugagccagaagaccaggcaccgggcggagaggaagugcccgcugaggagcaagauccuagcccagaagccgcggacucagccaguggcgcacccaacgauuuccagaauaacguccagguuaaagugauaagauccccugcugaccugauuagguuuaucgaggaacuuaaagggggaacaaagaaggguaaaccaaauauuggccaggagcaacccguagacgaugccgcugaggugccgcagcgggaaccugagaaggaacgaggggacccagagcgccagagagaaauggaggaggaagaggaugaagacgaggaugaagacgaggaugaggacgaaaggcaguugcugggagaguucgaaaaggagcucgaaggcauccugcuucccagcgaucgggaccgccugagaucugaggucaaagccgguauggagagggaauuggagaacaucauucaagaaacugagaaggagcucgauccugacgggcugaaaaaggaaucagagcgugaucgggcaauguuagcccugaccaguacacuaaauaaacucauaaagcgacuggaagagaagcagagccccgaacuugugaaaaagcacaaaaagaaaagaguugugccaaagaagccucccccauccccgcagccuaccgaggaggaccccgaacacaggguccgcgugcggguaacgaaauugagacugggcggaccaaaccaggaccucacuguucuggagaugaagagggaaaauccccaauuaaaacagaucgagggccuggugaaggaacuuuuggagcgcgaggggcucacagcugcgggaaaaauugaaaucaagauaguccgaccuugggcagaggguaccgaagagggcgcccgguggcugacugaugaagacacacguaaccuaaaggagauuuucuucaauauccuggugccaggggcugaggaagcccagaaagagagacaaaggcagaaggaacucgagucuaacuaucgccgggucuggggaucgcccggcggugaggggaccggcgaucuggacgaauuugauuuuuga

SEQ ID NO: 2391 - RNA, 2004 nt, Artificial Sequence
  AAB06495 variant
auggccgcugagacccugcucagcucccuucugggcuuguuacugcuagggcuccugcuucccgcaucucugacaggaggugugggcucauugaaccucgaagaacugagugaaaugagauacgggaucgagauucugccucucccagucaugggaggccagagccaauccucugacguugugauaguaucgucaaaguauaaacagagguacgaaugccgguuaccggccggugcgauccacuuccagcgcgagcgagaggaagagacucccgcuuaucaggggccugggauuccagaacugcuuagccccaugcgugaugccccuuguuugcugaagacgaaagacugguggaccuacgaguuuugcuauggcagacauauccaacaguaccacauggaggauagugaaauuaagggcgaggugcuauaucucggguacuaccaguccgcauucgacugggaugacgaaacagccaaagccucuaagcagcauaggcugaagcgguaucacagccaaacuuacggaaaugguuccaaaugugaucuuaacggccgcccaagagaggcagaagucagguuucugugcgacgagggggccggaaucucaggcgauuauauagaccggguggaugagcccuugaguuguagcuacguucucaccauccgcacaccucgacugugcccacauccguuacugagacccccuccaucugcugcuccccaggcgauucucugucacccuucccuucagccagaagaguauauggcauacgugcagaggcaagccgacucaaagcaguauggugauaaaaucauugaagaacugcaggacuuggggccccaagucuggagcgaaaccaagaguggaguggcuccgcagaaaauggccggcgcaucuccuacuaaggacgauuccaaggacagcgauuucuggaaaaugcuaaaugagcccgaggaccaggcuccaggcggggaagagguaccugccgaggagcaggaucccucgccagaagcggccgacucugcauccggagcucccaacgauuuucaaaauaacguucaggugaaggucauccggaguccugccgaccugauacguuucauugaggagcucaaagguggcacaaagaaagggaagccaaauaucggacaggaacagccgguggaugacgcugccgaggugccccaacgcgaaccugagaaagagagaggcgauccagaaaggcagcgggagauggaagaggaagaggacgaggacgaagaugaggacgaagaugaggacgaacgacagcugcuuggugaguuugagaaggaacuggaggggauuuugcuccccucagaucgcgacagacugaggagcgaagucaaggcaggcauggagcgggaauuagagaacaucauccaggagaccgaaaaagagcuggauccugacggacuaaagaaagaauccgagcgcgauagagccaugcucgcucugacgucuacucuuaauaaguugauuaaaaggcuggaggaaaagcaaagcccagagcucguuaagaaacacaagaaaaagcgugugguacccaaaaagccgccuccaucaccccagccuaccgaagaggaccccgaacaucgggugcgagucagagugacaaagcugaggcuuggcgggccaaaccaggaucugacuguuuuggagaugaaacgcgagaauccucagcucaagcaaauagaaggacuggugaaagaguuacuggaacgggagggucuaaccgcggcaggcaagaucgaaauuaaaaucgucagacccugggccgaggggacagaggaaggagcuagguggcucaccgacgaggauacgcgcaaccugaaggaaauauucuuuaauauucuugugccaggcgccgaggaagcacagaaggagcgacagcggcaaaaagaguuggaaaguaacuaccguagaguaugggguuccccgggaggcgagggaacuggcgaccuggacgaguucgauuuuuga

SEQ ID NO: 2392 - RNA, 303 nt, Artificial Sequence
  AAI13433 variant
augagagcccugacccuccuugcucuguuggcauuagccgcgcugugcaucgcuggccaggccggggcaaagcccagcggagccgaguccucuaaaggugcugcauucgugucaaagcaagaaggcagugaggucguuaaaaggccucggcgcuaccuauaucaguggcucggggccccagugccguaccccgacccucuggaaccacgacgugagguaugugaacuuaaccccgauugcgacgagcuggcugaucacauuggauuucaggaggccuauagaagguucuacggcccuguguga

SEQ ID NO: 2393 - RNA, 945 nt, Artificial Sequence
  EAX06008 variant
augagaaucgccgugauuugcuucugucugcucggcauaaccugcgcuauccccgucaagcaggcagacagcggguccucugaggaaaaacaacuuuacaacaaguauccugaugccguugcgacauggcugaauccagacccgucacagaaacagaacuuguuagcuccccagaaugccgugaguagcgaggaaacuaacgauuuuaagcaagagacgcugccuuccaaaucuaaugaaucgcacgaccauauggaugacauggaugacgaggaugacgaugaccacguagauucacaggacagcauugacaguaacgauuccgacgauguggacgauaccgacgauucucaucagagcgacgagucccaccauucagaugaaagugacgagcuagucacagauuucccaacugaccuccccgcaaccgaaguguuuacaccuguugugccaaccgucgacacuuacgauggaaggggugacagcgugguauauggccugcggucuaaguccaagaaauuccgccgacccgauauccaguacccugacgccacagaugaggacauuaccucacacauggagagcgaggaacuuaauggggcuuauaaggcaaucccaguugcccaagaucugaacgcuccgagugacugggauucucguggaaaagacuccuacgaaacgagccaguuggaugaccagucggccgagacucacucucauaagcaguccagacucuauaaaaggaaggcgaaugaugaaucaaacgagcacagugacgugauagacagccaagagcuguccaaggucucucgggaauuucauagccacgaguuccacucacaugaagauaugcuggugguggaccccaaaaguaaggaggaagauaaacaccucaaguuucgcaucucccaugaguuagacagcgcaucuucagaggucaauuga

SEQ ID NO: 2394 - RNA, 903 nt, Artificial Sequence
  EAX06009 variant
augagaaucgccgugauuugcuucugucugcucggcauaaccugcgcuauccccgucaagcaggcagacagcggguccucugaggaaaaacaacuuuacaacaaguauccugaugccguugcgacauggcugaauccagacccgucacagaaacagaacuuguuagcuccccagacucugccuaguaagagcaaugagucccacgaucauauggacgauauggacgaugaagacgaugacgaucacguggacucucaagauucgauugacucaaacgacagcgaugacguagaugacacggaugacagucaucaguccgaugagucucaccauagcgacgaauccgaugagcuagugaccgacuuuccaacagaucuccccgccacugaggucuucaccccugugguuccaacaguggacaccuacgacggaaggggugauucagucguguauggccugcggaguaaaagcaagaaguuucgccgacccgacauccaguacccugaugcaacugacgaagauauuacaucucacauggaguccgaagaacuuaauggggccuauaaagcuaucccaguagcacaggaccugaacgccccgucagauugggacagccguggaaaggauaguuacgagaccucucaauuggacgaucaguccgcugaaacgcacagccauaaacagucgagacucuauaagaggaaagccaaugacgagucuaacgaacacuccgauguuauagacucacaggagcugaguaaggugagccgggaguuccauucccacgaguuucacucucaugaggacaugcuggucguggaucccaagagcaaagaagaggacaagcaccucaaauuccgcaucucacaugaauuagauagugcguccagcgaggugaauuga

SEQ ID NO: 2395 - RNA, 864 nt, Artificial Sequence
  EAX06010 variant
augagaaucgccgugauuugcuucugucugcucggcauaaccugcgcuauccccgucaagcaggcagacagcggguccucugaggaaaaacaaaacgccguuucaagugaggaaacaaaugauuuuaagcaggagacucuuccuagcaaauccaacgaaucucacgaccauauggaugacauggaugacgaggaugacgaugaccacguggauucgcaggacucaauugauagcaaugacagugacgauguagacgauacggacgauucccaucagucugacgagagccaccauuccgaugaaucagacgagcuggugaccgauuucccaacagacuugccggcgacugaagucuuuacccccgugguuccuacaguggauaccuacgacggaaggggugacagugucguguauggcuuacggagcaagucuaaaaaguuccgccgaccagauauccaauaccccgacgcuacugaugaggacauuacaucccacauggagucagaggaacugaacggggccuauaaggcaaucccuguagcccaggaucuaaaugcuccaagcgacugggauagucguggaaaagacucuuacgaaaccucccagcucgaugaccagagcgcagagacgcacucgcauaagcaaucuagacuguauaaaaggaaggccaacgaugaauccaaugagcacucagacguuauagauagucaggagcuuagcaaagugucccgggaauuucauucucacgaguuccacagccaugaagacaugcuggucguggaccccaagucaaaggaggaagauaaacacuugaaguuucgcaucagucaugagcucgacuccgcuagcucugaggugaacuga

SEQ ID NO: 2396 - RNA, 984 nt, Artificial Sequence
  BAH12087 variant
augggcaucgugcccagaagccuggacaagaaagcccacaggguccaguuccaacucaaccggauuaaggcuaaaauagagcuuccuugggggucccugcaguuggauugcuuaaugaagacccugaaagaacuauacaauaaguauccagacgcaguugccacauggcucaacccggaucccucucagaagcagaaucugcuugcgccucaaaacgcugugucaagugaggaaacuaaugacuuuaaacaggagacgcugccaagcaaguccaacgaaucucaugaucacauggacgauauggacgaugaggacgaugacgaucauguagacucgcaggacucaaucgauagcaaugacagugaugacguggaugacaccgaugacucccaccagucugaugagagccaucacuccgacgaaucagaugaguuggucacagacuuccccacugaccucccugccaccgaaguguuuacaccaguugugcccaccgucgauacuuacgacggacgcggugauagugugguauauggccugcgaagcaaaucuaagaaauuccguagaccugacauucaauacccagaugcaacagacgaggauaucaccucccacauggagucagaggaacugaacggggccuauaaggcuauuccgguugcacaggaccucaaugcccccagcgauugggacaguaggggaaaggauucuuacgaaacgucccaguuagacgaucagagcgcugagacucauucgcacaaacaaucucggcuguauaagcgcaaagccaacgacgaauccaaugagcauucagacgugaucgauagucaggagcuuagcaaggucuccagagaauuucacucucacgaguuccauagccacgaagacauguuggugguggauccuaaaucaaaggaggaagacaaacaucugaaguuuaggauaagucacgagcuagauuccgcgagcucugaggucaacuga

SEQ ID NO: 2397 - RNA, 879 nt, Artificial Sequence
  AEA49030 variant
augagaaucgccgugauuugcuucugucugcucggcauaaccugcgcuauccccgucaagcaggcagacagcggguccucugaggaaaaacaacuuuacaacaaguauccugaugccguugcgacauggcugaauccagacccgucacagaaacagaacuuguuagcuccccagaaugccgugaguagcgaggaaacuaacgauuuuaagcaagagacgcugccuuccaaaucuaaugaaucgcacgaccauauggaugacauggaugacgaggaugacgauucacaccagagcgacgagagucaucacuccgaugaaucugacgagcuaguaaccgacuucccaacagaucuccccgcaacugaaguguuuaccccugucgugccaacaguugacaccuacgauggaaggggugacagcguggucuauggccugcgguccaagucaaagaaauuccgccgacccgauauucaguacccugacgccacugaugaggacaucacaagucauauggagagcgaggaacuuaacggggcuuauaaggcaauuccaguggcccaggaucugaaugcuccgucugacugggauucccguggaaaagacucauacgaaaccagccaauuggacgaucagagugccgagacgcacucucacaagcaguccagacucuauaaaaggaaggcgaacgacgaaagcaaugagcauucggauguaaucgacucucaggagcuguccaagguuucacgggaauuucacagucaugaguuccacagccacgaagauaugcugguggucgaccccaaauccaaggaggaagauaaacaucucaaguuucgcauaucucacgaguuagacagcgcaucaagugaggugaacuga

SEQ ID NO: 2398 - RNA, 945 nt, Artificial Sequence; identical to SEQ ID NO: 2393
  AAA86886 variant

SEQ ID NO: 2399 - RNA, 1182 nt, Artificial Sequence
  AAA59988 variant
auggaggaaccccagagcgacccuuccguggagccaccgcugucucaagaaaccuucucagaucucuggaaacuucugcccgagaacaaugucuugaguccuuuaccaagccaggccauggacgaucugaugcuaucccccgacgauaucgaacagugguuuacagaggacccuggcccagaugaggcucccagaaugccugaagcagccccaccgguugcgcccgcuccugccgcaccaacucccgccgcuccugcaccagcccccucuuggccgcucucgucaagcgugccuagucagaagacguaccaaggguccuauggauucaggcuggguuuucuucacucuggcaccgcuaagagcguaacaugcacuuacucccccgcccugaacaaaauguucugucaguuggcgaagaccugcccagugcagcucugggucgacucaacaccucccccagggacccgggugcgcgcaauggccauuuauaaacagagucaacauaugacugagguugugcgacguuguccccaccaugaaagaugcagcgauucugacggacuggcuccuccacagcaccugauaagggucgagggcaaucuccggguggaguacuuagaugaccgcaacacauuuagacauuccguaguugugccguaugaacccccugaggucgguucagauuguaccacgauccacuacaauuauaugugcaacagcaguuguaugggagggaugaauaggcggccaauucugacuaucauuacccuugaagacucuuccggcaacuugcugggccgcaauagcuucgaggugcgagugugcgccugucccgggagagacaggcggacagaagaggagaaccuacguaagaagggagaaccucaccaugagcucccacccgguucgacuaaacgcgcacugccgaauaacaccucuuccucaccucagccaaagaaaaagccccuugauggcgaauacuuuacacugcagaucagagggagggagcgguucgaaauguuucgagaguugaaugaggcucucgaacugaaagacgcccaagcgggaaaggagccuggcgguagucgcgcccacagcucccauuuaaagucuaaaaaggggcagagcaccucaagacacaaaaagcugauguucaaaacggaaggacccgauagugacuga

(The sequence listing continues in the following parts.)
